United States Patent Application Publication US 2026/0337666 A1 - sequence listing, part 2

SEQ ID NO: 1495 - DNA, 6351 bp, Homo sapiens
  source 1..6351: mol_type = unassigned DNA; mol_type = unassigned DNA
aaaccttggcttcagcccggccgccgccaggcgttggcatcgccggggagagccttccggactccgggcggcggctggctgggggcgcgttccgaggcgccctcaggcagggcgcgggggcagagcctcgcctgggttctggaggctgcggggccatcgctccagatgcgaaagccatggagttgagctgcagcgaagcacctctttacgggcagatgatgatctatgcgaagtttgacaaaaatgtgtatcttcctgaagatgctgagttttactttacttatgacggatctcatcagcgacatgtcatgattgcagagcgcatcgaggataacgttctccagtccagcgtcccaggccatgggcttcaggagacggtgacggtatctgtgtgcctctgctcggaaggttactctccggtgaccatgggctctggctcagtgacctacgtggacaacatggcttgcaggctggctcgtctgctggtgacgcaggccaatcgcctcacagcctgcagccaccagaccctgctgaccccatttgccttgacggcaggagcactgcctgccttggatgaggagctcgtgctggctctgacccatctggaattgcctctagagtggactgtgttgggaagttcttcacttgaagtatcttctcacagagaatctcttctacacctggctatgagatggggcctggctaaactttcccagttcttcttgtgtctcccggggggagtccaggccttggctttacccaacgaagagggtgccacaccattagacttagctttacgtgaaggacactccaagctggtggaagacgtcacaaattttcagggcagatggtccccaagcttctcccgagtgcagctcagtgaagaagcctccttgcattacattcactcatcggaaacgctgaccctgaccctgaaccacacagccgagcatttgttggaggcagatattaaactcttccggaaatacttttgggatagagcctttcttgtcaaggcctttgagccagaagccaggccagaggaaagaacagctatgccctccagcggtgcagaaactgaagaagagattaagaattcagtgtccagcagatcagcagctgaaaaggaagatataaagcgtgtcaaaagcctggtggttcaacacaatgaacatgaagaccagcacagcctagatttggatcgctccttcgatatcctaaaaaaatccaagccgccctcgacattgcttgctgcaggccggctttcagacatgctgaatggaggtgatgaagtctacgctaactgtatggtgattgatcaggttggtgatttggatatcagctatattaatatagagggaatcactgccactaccagccctgaatccagaggttgcactctgtggcctcagagcagcaaacacacccttcctacagaaaccagtcccagtgtgtacccacttagtgaaaatgtcgaagggacagcacacactgaagcccagcagtccttcatgtcaccatcaagttcgtgtgcttccaacttgaatctttcttttggttggcatggatttgaaaaggaacaaagtcatctaaagaaaagaagttctagccttgatgccttggacgccgacagtgaaggggaagggcattctgagccatcccacatctgttacactccagggtctcagagctcctcaagaactgggattcctagtggggatgaattggactcttttgagactaacactgaaccggattttaatatctccagggctgaatcccttcctctatcaagtaatctacagtcgaaggaatcactgctttctggagttcgctcacgttcttattcttgctcatcacccaaaatttctttaggaaaaactcgtttggtgcgtgaattaacagtatgcagttcaagtgaagagcaaagagcttacagcttatcggagccaccaagagaaaacagaattcaggaagaagaatgggataaatacatcatacctgccaaatcagagtctgaaaaatataaagtgagtcgaactttcagtttcctcatgaataggatgactagccctcggaataaatcaaagacaaaaagcaaggatgccaaagataaagagaagctgaatcgacatcagtttgccccaggaacattctctggggttctgcagtgtttggtttgtgataaaacactcctggggaaagagtcactgcagtgttctaactgtaatgcaaatgtgcacaaaggttgtaaagatgctgcgcctgcatgcaccaagaaattccaagagaaatataacaagaacaaaccacagaccatccttggaaattcttcatttagagacatcccacagcctggtctctccttgcacccttcttcctccgtgcctgttggattgccgactggaaggagggagactgtgggacaggtccatccattgtccagaagtgttccaggcaccaccttggaaagcttcaggaggtcagccacatccttggagtctgagagtgaccataacagctgcagaagcaggtctcattctgatgagctgctacagtccatgggctcttctccctctacagagtctttcataatggaagatgttgtggattcttctctgtggagtgacctcagcagtgatgcccaggagtttgaagcagaatcttggagtcttgtggtggatccctcattttgtaataggcaggagaaggatgtcatcaaaagacaggatgtcatttttgagctaatgcaaacagagatgcatcacatccagaccctgttcatcatgtctgagatcttcaggaaaggcatgaaagaggagctgcagctggaccacagcaccgtggataaaattttcccctgtttagatgagttgcttgaaatccacaggcatttcttctacagtatgaaggaacgaaggcaggaatcctgtgctggcagcgacaggaattttgtgatcgaccgaattggagatattttggtacaacagttttcagaagaaaatgcaagtaaaatgaagaaaatatatggagaattctgttgccatcataaagaagctgttaacctctttaaagaactccagcagaataaaaagtttcagaattttattaagctccgaaatagtaatcttttggctcgacgccgaggaattccagaatgcattctgttggtcactcagcgtattacaaaataccctgtcttggtggaaaggatattgcagtacacaaaggaaagaactgaggaacataaagacttacgcaaagcgctttgcttaattaaagacatgattgcaacagtggatttaaaagtcaatgaatatgagaaaaaccaaaaatggcttgagatcctaaataagattgaaaacaaaacatacacgaagctcaaaaatggacatgtgtttaggaagcaggcactgatgagtgaagaaaggactctgttatatgatggccttgtttactggaaaactgctacaggtcgtttcaaagatatcctagctctacttctaactgatgtgctgctctttttacaagaaaaagaccagaaatacatctttgcagccgttgatcagaagccatcagttatttcccttcaaaagcttattgctagagaagttgctaatgaggagagaggaatgtttctgatcagtgcttcatctgctggtcctgagatgtatgaaattcacaccaattccaaggaggaacgcaataactggatgagacggatccagcaggctgtagaaagttgtcctgaagaaaaagggggaaggacaagtgaatctgatgaagacaagaggaaagctgaagccagagtggccaaaattcagcaatgtcaagaaatactcactaaccaagaccaacaaatttgtgcgtatttggaggagaagctgcatatctatgctgaacttggagaactgagcggatttgaggacgtccatctagagccccacctccttattaaacctgacccaggcgagcctccccaggcagcctcattactggcagcagcactgaaagaagctgagagcctacaagttgcagtgaaggcctcacagatgggcgccgtgagtcaatcatgtgaggacagttgtggagactctgtcttggcggacacactcagttctcatgatgtaccaggatcaccgactgcctcattagtcacaggagggagagaaggaagaggctgttcggatgtggatcccgggatccagggtgtggtaaccgacttggccgtctctgatgcaggggagaaggtggaatgtagaaattttccaggttcttcacaatcagagattatacaagccatacagaatttaacccgtctcttatacagccttcaggccgccttgaccattcaggacagccacattgagatccacaggctggttctccagcagcaggagggcctgtctctcggccactctatcctccgaggcggccccttgcaggaccagaagtctcgcgacgcggacaggcagcatgaggagctggccaatgtgcaccagcttcagcaccagctccagcaggagcagcggcgctggctgcgcaggtgtgagcagcagcagcgggcgcaggcgaccagggagagctggctgcaggagcgggagcgggagtgccagtcgcaggaggagctgctgctgcggagccggggcgagctggacctccagctccaggagtaccagcacagcctggagcggctgagggagggccagcgcctggtggagagggagcaggcgaggatgcgggcccagcagagcctgctgggccactggaagcacggccggcagaggagcctgcccgcggtgctccttccgggtggccccgaggtaatggaacttaatcgatctgagagtttatgtcatgaaaactcattcttcatcaatgaagctttagtacaaatgtcatttaacactttcaacaaactgaatccatcagttatccatcaggatgccacttaccctacaactcaatctcattctgacttggtgaggactagtgaacatcaagtagacctcaaggtggacccttctcagccttcgaatgtcagtcacaaactgtggacagccgctggttccggccatcagatacttcctttccatgaaagcagcaaggattcttgtaaaaatggctccagtatgacaaagtgcagttgtacgttgacatctcccccgggactgtggactggaaccacatctactttgaaagatttggacacctcccacactgagtccccaaccccccatgactcaaattcacaccgccctcaactgcaggcgtttataacagaagcaaagctaaatctaccgacaaggacaatgaccagacaagatggggaaactggagatggagccaaagaaaatattgtttacctctaattgtgttgtcatttttccaaacaaaacaaaacactggcacttttgggagaaactttttgtctccattccttatgtatgtgtgattgtctgtgtccaaattgctttaagaataatatttaatatttcctggaagctcatttttttggcatgagtctaattaaattattgaaagccaccctgtttgtataatctttaacttatcaaatctaatttcagatttctggaggagaaactaacttgaataagcaggactattttaaaagttgttttgacgctagagtaaaattccatgtcacattttctacccaatcatctggatttcaagattccttttaagatctcaatgaagcaatttggatttaaagagtggtattcacaaggggtgaactttcacagtcagggcagttgcctcagtgcccacataggcagaggaggatgtgggaaagggtttttctcagctagtttttgtgtgctcatttcttctgggagcattaaaagtggtgatctgttacagtcactattcaactgggcacgtgttgtgattggtcagtcactgagccagggatacagtccggacttgcttagtacctaagcctaatgctggtggggtttcaagacatggttcagcatcatcttttaacaaggcccagaggcccagagcccccatcaagtcattttgatgtaaatagtgaactttgttagagccctcacttctatcaatcagctgtcctgtccctgccagcacctggagcaccaactaccactccctggaaagaacccttccctgcagttttttaaggacaaaactgcccactcctcattaagtttgctgcctggatacacttttccacaaaggaaaactggcatatcctgccttccgagtagtatgggtctctgtgtgagaaaccaggagatattttcatcttgttcggaaatacttgtatgtattttggtgtcaataaatatcttgtacctcatt

SEQ ID NO: 1496 - DNA, 6273 bp, Homo sapiens
  source 1..6273: mol_type = unassigned DNA; mol_type = unassigned DNA
aaaccttggcttcagcccggccgccgccaggcgttggcatcgccggggagagccttccggactccgggcggcggctggctgggggcgcgttccgaggcgccctcaggcagggcgcgggggcagagcctcgcctgggttctggaggctgcggggccatcgctccagatgcgaaagccatggagttgagctgcagcgaagcacctctttacgggcagatgatgatctatgcgaagtttgacaaaaatgtgtatcttcctgaagatgctgagttttactttacttatgacggatctcatcagcgacatgtcatgattgcagagcgcatcgaggataacgttctccagtccagcgtcccaggccatgggcttcaggagacggtgacggtatctgtgtgcctctgctcggaaggttactctccggtgaccatgggctctggctcagtgacctacgtggacaacatggcttgcaggctggctcgtctgctggtgacgcaggccaatcgcctcacagcctgcagccaccagaccctgctgaccccatttgccttgacggcaggagcactgcctgccttggatgaggagctcgtgctggctctgacccatctggaattgcctctagagtggactgtgttgggaagttcttcacttgaagtatcttctcacagagaatctcttctacacctggctatgagatggggcctggctaaactttcccagttcttcttgtgtctcccggggggagtccaggccttggctttacccaacgaagagggtgccacaccattagacttagctttacgtgaaggacactccaagctggtggaagacgtcacaaattttcagggcagatggtccccaagcttctcccgagtgcagctcagtgaagaagcctccttgcattacattcactcatcggaaacgctgaccctgaccctgaaccacacagccgagcatttgttggaggcagatattaaactcttccggaaatacttttgggatagagcctttcttgtcaaggcctttgagccagaagccaggccagaggaaagaacagctatgccctccagcggtgcagaaactgaagaagagattaagaattcagtgtccagcagatcagcagctgaaaaggaagatataaagcgtgtcaaaagcctggtggttcaacacaatgaacatgaagaccagcacagcctagatttggatcgctccttcgatatcctaaaaaaatccaagccgccctcgacattgcttgctgcaggccggctttcagacatgctgaatggaggtgatgaagtctacgctaactgtatggtgattgatcaggttggtgatttggatatcagctatattaatatagagggaatcactgccactaccagccctgaatccagaggttgcactctgtggcctcagagcagcaaacacacccttcctacagaaaccagtcccagtgtgtacccacttagtgaaaatgtcgaagggacagcacacactgaagcccagcagtccttcatgtcaccatcaagttcgtgtgcttccaacttgaatctttcttttggttggcatggatttgaaaaggaacaaagtcatctaaagaaaagaagttctagccttgatgccttggacgccgacagtgaaggggaagggcattctgagccatcccacatctgttacactccagggtctcagagctcctcaagaactgggattcctagtggggatgaattggactcttttgagactaacactgaaccggattttaatatctccagggctgaatcccttcctctatcaagtaatctacagtcgaaggaatcactgctttctggagttcgctcacgttcttattcttgctcatcacccaaaatttctttaggaaaaactcgtttggtgcgtgaattaacagtatgcagttcaagtgaagagcaaagagcttacagcttatcggagccaccaagagaaaacagaattcaggaagaagaatgggataaatacatcatacctgccaaatcagagtctgaaaaatataaagtgagtcgaactttcagtttcctcatgaataggatgactagccctcggaataaatcaaagacaaaaagcaaggatgccaaagataaagagaagctgaatcgacatcagtttgccccaggaacattctctggggttctgcagtgtttggtttgtgataaaacactcctggggaaagagtcactgcagtgttctaactgtaatgcaaatgtgcacaaaggttgtaaagatgctgcgcctgcatgcaccaagaaattccaagagaaatataacaagaacaaaccacagaccatccttggaaattcttcatttagagacatcccacagcctggtctctccttgcacccttcttcctccgtgcctgttggattgccgactggaaggagggagactgtgggacaggtccatccattgtccagaagtgttccaggcaccaccttggaaagcttcaggaggtcagccacatccttggagtctgagagtgaccataacagctgcagaagcaggtctcattctgatgagctgctacagtccatgggctcttctccctctacagagtctttcataatggaagatgttgtggattcttctctgtggagtgacctcagcagtgatgcccaggagtttgaagcagaatcttggagtcttgtggtggatccctcattttgtaataggcaggagaaggatgtcatcaaaagacaggatgtcatttttgagctaatgcaaacagagatgcatcacatccagaccctgttcatcatgtctgagatcttcaggaaaggcatgaaagaggagctgcagctggaccacagcaccgtggataaaattttcccctgtttagatgagttgcttgaaatccacaggcatttcttctacagtatgaaggaacgaaggcaggaatcctgtgctggcagcgacaggaattttgtgatcgaccgaattggagatattttggtacaacagttttcagaagaaaatgcaagtaaaatgaagaaaatatatggagaattctgttgccatcataaagaagctgttaacctctttaaagaactccagcagaataaaaagtttcagaattttattaagctccgaaatagtaatcttttggctcgacgccgaggaattccagaatgcattctgttggtcactcagcgtattacaaaataccctgtcttggtggaaaggatattgcagtacacaaaggaaagaactgaggaacataaagacttacgcaaagcgctttgcttaattaaagacatgattgcaacagtggatttaaaagtcaatgaatatgagaaaaaccaaaaatggcttgagatcctaaataagattgaaaacaaaacatacacgaagctcaaaaatggacatgtgtttaggaagcaggcactgatgagtgaagaaaggactctgttatatgatggccttgtttactggaaaactgctacaggtcgtttcaaagatatcctagctctacttctaactgatgtgctgctctttttacaagaaaaagaccagaaatacatctttgcagccgttgatcagaagccatcagttatttcccttcaaaagcttattgctagagaagttgctaatgaggagagaggaatgtttctgatcagtgcttcatctgctggtcctgagatgtatgaaattcacaccaattccaaggaggaacgcaataactggatgagacggatccagcaggctgtagaaagttgtcctgaagaaaaagggggaaggacaagtgaatctgatgaagacaagaggaaagctgaagccagagtggccaaaattcagcaatgtcaagaaatactcactaaccaagaccaacaaatttgtgcgtatttggaggagaagctgcatatctatgctgaacttggagaactgagcggatttgaggacgtccatctagagccccacctccttattaaacctgacccaggcgagcctccccaggcagcctcattactggcagcagcactgaaagaagctgagagcctacaagttgcagtgaaggcctcacagatgggcgccgtgagtcaatcatgtgaggacagttgtggagactctgtcttggcggacacactcagttctcatgatgtaccaggatcaccgactgcctcattagtcacaggagggagagaaggaagaggctgttcggatgtggatcccgggatccagggtgtggtaaccgacttggccgtctctgatgcaggggagaaggtggaatgtagaaattttccaggttcttcacaatcagagattatacaagccatacagaatttaacccgtctcttatacagccttcaggccgccttgaccattcaggacagccacattgagatccacaggctggttctccagcagcaggagggcctgtctctcggccactctatcctccgaggcggccccttgcaggaccagaagtctcgcgacgcggacaggcagcatgaggagctggccaatgtgcaccagcttcagcaccagctccagcaggagcagcggcgctggctgcgcaggtgtgagcagcagcagcgggcgcaggcgaccagggagagctggctgcaggagcgggagcgggagtgccagtcgcaggaggagctgctgctgcggagccggggcgagctggacctccagctccaggagtaccagcacagcctggagcggctgagggagggccagcgcctggtggagagggagcaggcgaggatgcgggcccagcagagcctgctgggccactggaagcacggccggcagaggagcctgcccgcggtgctccttccgggtggccccgaggtaatggaacttaatcgatctgagagtttatgtcatgaaaactcattcttcatcaatgaagctttagtacaaatgtcatttaacactttcaacaaactgaatccatcagttatccatcaggatgccacttaccctacaactcaatctcattctgacttggtgaggactagtgaacatcaagtagacctcaaggtggacccttctcagccttcgaatgtcagtcacaaactgtggacagccgctggttccggccatcagatacttcctttccatgaaagcagcaaggattcttgtaaaaatgatttggacacctcccacactgagtccccaaccccccatgactcaaattcacaccgccctcaactgcaggcgtttataacagaagcaaagctaaatctaccgacaaggacaatgaccagacaagatggggaaactggagatggagccaaagaaaatattgtttacctctaattgtgttgtcatttttccaaacaaaacaaaacactggcacttttgggagaaactttttgtctccattccttatgtatgtgtgattgtctgtgtccaaattgctttaagaataatatttaatatttcctggaagctcatttttttggcatgagtctaattaaattattgaaagccaccctgtttgtataatctttaacttatcaaatctaatttcagatttctggaggagaaactaacttgaataagcaggactattttaaaagttgttttgacgctagagtaaaattccatgtcacattttctacccaatcatctggatttcaagattccttttaagatctcaatgaagcaatttggatttaaagagtggtattcacaaggggtgaactttcacagtcagggcagttgcctcagtgcccacataggcagaggaggatgtgggaaagggtttttctcagctagtttttgtgtgctcatttcttctgggagcattaaaagtggtgatctgttacagtcactattcaactgggcacgtgttgtgattggtcagtcactgagccagggatacagtccggacttgcttagtacctaagcctaatgctggtggggtttcaagacatggttcagcatcatcttttaacaaggcccagaggcccagagcccccatcaagtcattttgatgtaaatagtgaactttgttagagccctcacttctatcaatcagctgtcctgtccctgccagcacctggagcaccaactaccactccctggaaagaacccttccctgcagttttttaaggacaaaactgcccactcctcattaagtttgctgcctggatacacttttccacaaaggaaaactggcatatcctgccttccgagtagtatgggtctctgtgtgagaaaccaggagatattttcatcttgttcggaaatacttgtatgtattttggtgtcaataaatatcttgtacctcatt

SEQ ID NO: 1497 - DNA, 3602 bp, Homo sapiens
  source 1..3602: mol_type = unassigned DNA; mol_type = unassigned DNA
cactcggctccggagcccagtcgagtcctgcccggctagaagccggctgtcggtctccgtgtcgccgccgccgcccggcatcgtggagctggggcccccttttgcctgggagttttgtagtcgcctagggtcagcggtgacatcccaaagggcaggcccggcagccgccatggtggccaaggattaccccttctacctcacggtcaagagagcgaactgcagcctggagctacccccggccagcggtccggccaaggacgctgaggagcctagtaataaacgggtcaaacccctttcccgagtcacgtcgctagcaaacctcatcccgcccgtgaaggccacgccattaaagcgcttcagtcaaaccctgcagcgctccattagcttccgcagtgagagccgccctgacatcctcgccccccgaccctggtccagaaatgccgccccctcgagcacgaaacggagagatagcaagctgtggagtgagaccttcgatgtgtgcgtcaatcagatgcttacatccaaggaaatcaaacgtcaggaggcgatctttgagctttcccaaggagaagaagacttgatagaagacttgaaattagcaaaaaaggcctatcatgaccccatgctgaaactctccataatgacagaacaagagttgaatcaaatttttggaacactggactctctaattcctctacatgaagagctccttagtcagcttcgagatgttaggaagcctgatggctcgactgaacatgttggtcccatcctcgtgggctggctcccttgcctcagctcctatgatagctactgcagcaatcaagtagccgccaaagctctgctggaccacaaaaagcaagatcaccgagtccaggatttcctacagcgatgtttagaatccccctttagccgcaaactagatctctggaatttcctcgatattccaagaagccgcctggtaaaataccctctgcttctccgagaaatcttgaggcacacaccaaatgataatccagatcagcagcacttggaagaagctataaatatcattcagggaattgtggcagaaatcaacaccaagactggtgaatctgaatgccgctattataaagagcggcttctttacttggaagaaggccagaaagactccctgatcgacagctctcgagtcttgtgttgtcatggtgaactgaagaacaatcggggcgtgaaactgcatgttttcctgttccaagaagtgcttgtgatcactcgagccgtcacccacaatgagcagctttgctaccagctgtaccgtcagccaatccccgtgaaagacctcctgctggaagacctccaggatggagaagtgaggctgggtggctccctgcgaggggcattcagcaacaatgagagaattaaaaacttcttcagagtcagtttcaaaaatggatcccaaagtcagacccactcgctacaagccaatgacactttcaacaaacagcagtggcttaactgtattcgtcaagccaaagaaacagttttgtgtgctgccgggcaagctggggtgcttgactccgagggatcgttcctaaatcccaccaccgggagcagagagctacagggagaaacaaaacttgagcagatggaccaatcggacagtgagtcagactgtagtatggacacgagtgaggtcagcctcgactgtgagcgcatggaacagacagactcttcctgtggaaacagcaggcacggtgaaagtaacgtctgacagaagcatgtgcacttcgggaagcaggcctgcatcttacctgtacagtatttgcattccacagatggaacggtttggagaagcactttttcatacttttgtgaaagtatacatgttggcccagtctctcgtatctgtacctttgtccctagtactgtaactgccaatctgtctgtgtaagctggaatctgtggcaactattaccctgtgttgtatttcccaagtgtctggatggatggagaggtactcaaacaagttactttcagttgtcctgctggattttaaaaaaatagaaaaagaatctcaaaactactgttttacatagattgtttgaagagtccttcctcttgtgcttctgtaccactttcccagctcttagatgtggtagctaaaggcacggaatttagacggccttgtaaatagggcatgaggaactcatctgtgtattgggatggtattagagagagaatcaggaaagaccaactcatgaagtgaacttggtttgatcttactcaactagaaagcttgaaaacatccctggggattctgaaggcttaattttgcaaaggaggatgcattgtctgaactttgcaacttcatccagtgcaagtttgatgcaagaatgtattaggacataaaatagaggctgaccttaaaagggccaggacagaagcggctgccagctctgaatctttaactgaaatgcacatggcaccaggaggtgtctctcatagttggttgctagcctaaaacatcagaatagaacccaaagggcttaggaaggcctgccaggataacaagaaggccctgtattcattgtgtttcatctgcctaggcctactcattattttagagaatgaatgaagcaacaaggaagagagaccatgactctatcgatgacactgtttatagaaacacaggagaggaagaatttggaatgaaaagcacttcgtcagaaccttctgtgggagccattgagagaaaagcatggtccagtgccttctgagaaaggccagagctttgggctttcctgctctgcttttgggtcgtcaatttgccatctctggttctgtgctataatcagaattgtaattatgttctccagaggccaatttcattaactctgattaattagaatcagctagccagattagtaacctctttgtccagccttgatttacagtgcagggtaaagtgcagaccttaaaaacagctaagtacctagaagagctccctgcaagtgtaaatattaaggatgacctgtgcaaaattatacccacaccagcactagtggtaattattctaaattattgccaaaaagttttttttaatctgtctttcaagtttacagaaaagaaagcagtaaatgcattgatgtcattttattatgtacatatatcatgtgcattcaagctgtgtgacaagatatatcaatataaaaacaaggtatatactttattattttttgaaaacaaggatattgtgatcaattttaccctgtaaaacatatttctgtatttataggtcttaaacatgatgaattttttctattacaagtttatttaaaactgctttctcaagtcgttattgatacagcaagtgaacctgctgcagacagaagcagaggaaagccaagaacagcctttattggtgaagaaaagaatgaatgattctttgtaggcgccatcagccacttttagaagccatcagccagtgtgttgggaaaagaggtttgtcaagtgttggcctatgggaaggtggtcaatgaatgttttgatgaaatgaatgtttttgtataatggccttaaacttttctggaagtatttcaaataaattacattattaagtcatc

SEQ ID NO: 1498 - DNA, 3639 bp, Homo sapiens
  source 1..3639: mol_type = unassigned DNA; mol_type = unassigned DNA
agcccaggggagccgccgccgcagccgccgccgccgcggtgagttttccagcctggagaggccgaaccagcgcgggggtcgaggagacctgagcctgccatactgagtctatggacagttccacagcaatgaatcaatgcagctgtagaggaatggaagaaaacaaggaaaggcctaaacggcagcggcaaaacaactttcccatgtttccctctcctaaagcctggaatttcagagggcgaaaacggaaacagagcacccaagatgaagatgctgttagcctttgcagtctcgacataagtgagcctagtaataaacgggtcaaacccctttcccgagtcacgtcgctagcaaacctcatcccgcccgtgaaggccacgccattaaagcgcttcagtcaaaccctgcagcgctccattagcttccgcagtgagagccgccctgacatcctcgccccccgaccctggtccagaaatgccgccccctcgagcacgaaacggagagatagcaagctgtggagtgagaccttcgatgtgtgcgtcaatcagatgcttacatccaaggaaatcaaacgtcaggaggcgatctttgagctttcccaaggagaagaagacttgatagaagacttgaaattagcaaaaaaggcctatcatgaccccatgctgaaactctccataatgacagaacaagagttgaatcaaatttttggaacactggactctctaattcctctacatgaagagctccttagtcagcttcgagatgttaggaagcctgatggctcgactgaacatgttggtcccatcctcgtgggctggctcccttgcctcagctcctatgatagctactgcagcaatcaagtagccgccaaagctctgctggaccacaaaaagcaagatcaccgagtccaggatttcctacagcgatgtttagaatccccctttagccgcaaactagatctctggaatttcctcgatattccaagaagccgcctggtaaaataccctctgcttctccgagaaatcttgaggcacacaccaaatgataatccagatcagcagcacttggaagaagctataaatatcattcagggaattgtggcagaaatcaacaccaagactggtgaatctgaatgccgctattataaagagcggcttctttacttggaagaaggccagaaagactccctgatcgacagctctcgagtcttgtgttgtcatggtgaactgaagaacaatcggggcgtgaaactgcatgttttcctgttccaagaagtgcttgtgatcactcgagccgtcacccacaatgagcagctttgctaccagctgtaccgtcagccaatccccgtgaaagacctcctgctggaagacctccaggatggagaagtgaggctgggtggctccctgcgaggggcattcagcaacaatgagagaattaaaaacttcttcagagtcagtttcaaaaatggatcccaaagtcagacccactcgctacaagccaatgacactttcaacaaacagcagtggcttaactgtattcgtcaagccaaagaaacagttttgtgtgctgccgggcaagctggggtgcttgactccgagggatcgttcctaaatcccaccaccgggagcagagagctacagggagaaacaaaacttgagcagatggaccaatcggacagtgagtcagactgtagtatggacacgagtgaggtcagcctcgactgtgagcgcatggaacagacagactcttcctgtggaaacagcaggcacggtgaaagtaacgtctgacagaagcatgtgcacttcgggaagcaggcctgcatcttacctgtacagtatttgcattccacagatggaacggtttggagaagcactttttcatacttttgtgaaagtatacatgttggcccagtctctcgtatctgtacctttgtccctagtactgtaactgccaatctgtctgtgtaagctggaatctgtggcaactattaccctgtgttgtatttcccaagtgtctggatggatggagaggtactcaaacaagttactttcagttgtcctgctggattttaaaaaaatagaaaaagaatctcaaaactactgttttacatagattgtttgaagagtccttcctcttgtgcttctgtaccactttcccagctcttagatgtggtagctaaaggcacggaatttagacggccttgtaaatagggcatgaggaactcatctgtgtattgggatggtattagagagagaatcaggaaagaccaactcatgaagtgaacttggtttgatcttactcaactagaaagcttgaaaacatccctggggattctgaaggcttaattttgcaaaggaggatgcattgtctgaactttgcaacttcatccagtgcaagtttgatgcaagaatgtattaggacataaaatagaggctgaccttaaaagggccaggacagaagcggctgccagctctgaatctttaactgaaatgcacatggcaccaggaggtgtctctcatagttggttgctagcctaaaacatcagaatagaacccaaagggcttaggaaggcctgccaggataacaagaaggccctgtattcattgtgtttcatctgcctaggcctactcattattttagagaatgaatgaagcaacaaggaagagagaccatgactctatcgatgacactgtttatagaaacacaggagaggaagaatttggaatgaaaagcacttcgtcagaaccttctgtgggagccattgagagaaaagcatggtccagtgccttctgagaaaggccagagctttgggctttcctgctctgcttttgggtcgtcaatttgccatctctggttctgtgctataatcagaattgtaattatgttctccagaggccaatttcattaactctgattaattagaatcagctagccagattagtaacctctttgtccagccttgatttacagtgcagggtaaagtgcagaccttaaaaacagctaagtacctagaagagctccctgcaagtgtaaatattaaggatgacctgtgcaaaattatacccacaccagcactagtggtaattattctaaattattgccaaaaagttttttttaatctgtctttcaagtttacagaaaagaaagcagtaaatgcattgatgtcattttattatgtacatatatcatgtgcattcaagctgtgtgacaagatatatcaatataaaaacaaggtatatactttattattttttgaaaacaaggatattgtgatcaattttaccctgtaaaacatatttctgtatttataggtcttaaacatgatgaattttttctattacaagtttatttaaaactgctttctcaagtcgttattgatacagcaagtgaacctgctgcagacagaagcagaggaaagccaagaacagcctttattggtgaagaaaagaatgaatgattctttgtaggcgccatcagccacttttagaagccatcagccagtgtgttgggaaaagaggtttgtcaagtgttggcctatgggaaggtggtcaatgaatgttttgatgaaatgaatgtttttgtataatggccttaaacttttctggaagtatttcaaataaattacattattaagtcatc

SEQ ID NO: 1499 - DNA, 3992 bp, Homo sapiens
  source 1..3992: mol_type = unassigned DNA; mol_type = unassigned DNA
gcagaagagctgtcagatctttcccttcagcacttaaatcattgtcacgcaatggctttcatcttgggagattcatcctctgcattttggaactgagccttcctagtgttctgagagttttctgctgtctgttcagcttagcacgctaagaagctggagaggtacccagcagcctggttgcattctccgtcttggaaaagtatttaactgctttgagaaatcatggaatcgtttctggccacattgtgagattgtattgaattttctttttaagtttttaaatttttatatgcaaatgctggaaagcttggagacagtctatttcaaagaaggctgttgatttctgagactggcaggggcataaaatgacatgagagtgtctcagcaggattccaaattcacgaaagatttttccaggcacctactatgttcagaacggggatgcagaaatatcctggagaatctgaagttctgccttaaccctcgaaactttgaaagcaatggctgaaaaggaaagatgaatacctagaggctccctctggaaatgattgaggtttgccaccacaattggctactttggctttgcccatcaaaatttggtatcttcatgtgctgtctagcatctactacaggtcagatggagcttaggaggacaagggagcctagtaataaacgggtcaaacccctttcccgagtcacgtcgctagcaaacctcatcccgcccgtgaaggccacgccattaaagcgcttcagtcaaaccctgcagcgctccattagcttccgcagtgagagccgccctgacatcctcgccccccgaccctggtccagaaatgccgccccctcgagcacgaaacggagagatagcaagctgtggagtgagaccttcgatgtgtgcgtcaatcagatgcttacatccaaggaaatcaaacgtcaggaggcgatctttgagctttcccaaggagaagaagacttgatagaagacttgaaattagcaaaaaaggcctatcatgaccccatgctgaaactctccataatgacagaacaagagttgaatcaaatttttggaacactggactctctaattcctctacatgaagagctccttagtcagcttcgagatgttaggaagcctgatggctcgactgaacatgttggtcccatcctcgtgggctggctcccttgcctcagctcctatgatagctactgcagcaatcaagtagccgccaaagctctgctggaccacaaaaagcaagatcaccgagtccaggatttcctacagcgatgtttagaatccccctttagccgcaaactagatctctggaatttcctcgatattccaagaagccgcctggtaaaataccctctgcttctccgagaaatcttgaggcacacaccaaatgataatccagatcagcagcacttggaagaagctataaatatcattcagggaattgtggcagaaatcaacaccaagactggtgaatctgaatgccgctattataaagagcggcttctttacttggaagaaggccagaaagactccctgatcgacagctctcgagtcttgtgttgtcatggtgaactgaagaacaatcggggcgtgaaactgcatgttttcctgttccaagaagtgcttgtgatcactcgagccgtcacccacaatgagcagctttgctaccagctgtaccgtcagccaatccccgtgaaagacctcctgctggaagacctccaggatggagaagtgaggctgggtggctccctgcgaggggcattcagcaacaatgagagaattaaaaacttcttcagagtcagtttcaaaaatggatcccaaagtcagacccactcgctacaagccaatgacactttcaacaaacagcagtggcttaactgtattcgtcaagccaaagaaacagttttgtgtgctgccgggcaagctggggtgcttgactccgagggatcgttcctaaatcccaccaccgggagcagagagctacagggagaaacaaaacttgagcagatggaccaatcggacagtgagtcagactgtagtatggacacgagtgaggtcagcctcgactgtgagcgcatggaacagacagactcttcctgtggaaacagcaggcacggtgaaagtaacgtctgacagaagcatgtgcacttcgggaagcaggcctgcatcttacctgtacagtatttgcattccacagatggaacggtttggagaagcactttttcatacttttgtgaaagtatacatgttggcccagtctctcgtatctgtacctttgtccctagtactgtaactgccaatctgtctgtgtaagctggaatctgtggcaactattaccctgtgttgtatttcccaagtgtctggatggatggagaggtactcaaacaagttactttcagttgtcctgctggattttaaaaaaatagaaaaagaatctcaaaactactgttttacatagattgtttgaagagtccttcctcttgtgcttctgtaccactttcccagctcttagatgtggtagctaaaggcacggaatttagacggccttgtaaatagggcatgaggaactcatctgtgtattgggatggtattagagagagaatcaggaaagaccaactcatgaagtgaacttggtttgatcttactcaactagaaagcttgaaaacatccctggggattctgaaggcttaattttgcaaaggaggatgcattgtctgaactttgcaacttcatccagtgcaagtttgatgcaagaatgtattaggacataaaatagaggctgaccttaaaagggccaggacagaagcggctgccagctctgaatctttaactgaaatgcacatggcaccaggaggtgtctctcatagttggttgctagcctaaaacatcagaatagaacccaaagggcttaggaaggcctgccaggataacaagaaggccctgtattcattgtgtttcatctgcctaggcctactcattattttagagaatgaatgaagcaacaaggaagagagaccatgactctatcgatgacactgtttatagaaacacaggagaggaagaatttggaatgaaaagcacttcgtcagaaccttctgtgggagccattgagagaaaagcatggtccagtgccttctgagaaaggccagagctttgggctttcctgctctgcttttgggtcgtcaatttgccatctctggttctgtgctataatcagaattgtaattatgttctccagaggccaatttcattaactctgattaattagaatcagctagccagattagtaacctctttgtccagccttgatttacagtgcagggtaaagtgcagaccttaaaaacagctaagtacctagaagagctccctgcaagtgtaaatattaaggatgacctgtgcaaaattatacccacaccagcactagtggtaattattctaaattattgccaaaaagttttttttaatctgtctttcaagtttacagaaaagaaagcagtaaatgcattgatgtcattttattatgtacatatatcatgtgcattcaagctgtgtgacaagatatatcaatataaaaacaaggtatatactttattattttttgaaaacaaggatattgtgatcaattttaccctgtaaaacatatttctgtatttataggtcttaaacatgatgaattttttctattacaagtttatttaaaactgctttctcaagtcgttattgatacagcaagtgaacctgctgcagacagaagcagaggaaagccaagaacagcctttattggtgaagaaaagaatgaatgattctttgtaggcgccatcagccacttttagaagccatcagccagtgtgttgggaaaagaggtttgtcaagtgttggcctatgggaaggtggtcaatgaatgttttgatgaaatgaatgtttttgtataatggccttaaacttttctggaagtatttcaaataaattacattattaagtc

SEQ ID NO: 1500 - DNA, 2693 bp, Homo sapiens
  source 1..2693: mol_type = unassigned DNA; mol_type = unassigned DNA
agtcgagtcctgcccggctagaagccggctgtcggtctccgtgtcgccgccgccgcccggcatcgtggagctggggcccccttttgcctgggagttttgtagtcgcctagggtcagcggtgacatcccaaagggcaggcccggcagccgccatggtggccaaggattaccccttctacctcacggtcaagagagcgaactgcagcctggagctacccccggccagcggtccggccaaggacgctgaggagcctagtaataaacgggtcaaacccctttcccgagtcacgtcgctagcaaacctcatcccgcccgtgaaggccacgccattaaagcgcttcagtcaaaccctgcagcgctccattagcttccgcagtgagagccgccctgacatcctcgccccccgaccctggtccagaaatgccgccccctcgagcacgaaacggagagatagcaagctgtggagtgagaccttcgatgtgtgcgtcaatcagatgcttacatccaaggaaatcaaacgtcaggaggcgatctttgagctttcccaaggagaagaagacttgatagaagacttgaaattagcaaaaaaggcctatcatgaccccatgctgaaactctccataatgacagaacaagagttgaatcaaatttttggaacactggactctctaattcctctacatgaagctcccttgcctcagctcctatgatagctactgcagcaatcaagtagccgccaaagctctgctggaccacaaaaagcaagatcaccgagtccaggatttcctacagcgatgtttagaatccccctttagccgcaaactagatctctggaatttcctcgatattccaagaagccgcctggtaaaataccctctgcttctccgagaaatcttgaggcacacaccaaatgataatccagatcagcagcacttggaagaagctataaatatcattcagggaattgtggcagaaatcaacaccaagactggtgaatctgaatgccgctattataaagagcggcttctttacttggaagaaggccagaaagactccctgatcgacagctctcgagtcttgtgttgtcatggtgaactgaagaacaatcggggcgtgaaactgcatgttttcctgttccaagaagtgcttgtgatcactcgagccgtcacccacaatgagcagctttgctaccagctgtaccgtcagccaatccccgtgaaagacctcctgctggaagacctccaggatggagaagtgaggctgggtggctccctgcgaggggcattcagcaacaatgagagaattaaaaacttcttcagagtcagtttcaaaaatggatcccaaagtcagacccactcgctacaagccaatgacactttcaacaaacagcagtggcttaactgtattcgtcaagccaaagaaacagttttgtgtgctgccgggcaagctggggtgcttgactccgagggatcgttcctaaatcccaccaccgggagcagagagctacagggagaaacaaaacttgagcagatggaccaatcggacagtgagtcagactgtagtatggacacgagtgaggtcagcctcgactgtgagcgcatggaacagacagactcttcctgtggaaacagcaggcacggtgaaagtaacgtctgacagaagcatgtgcacttcgggaagcaggcctgcatcttacctgtacagtatttgcattccacagatggaacggtttggagaagcactttttcatacttttgtgaaagtatacatgttggcccagtctctcgtatctgtacctttgtccctagtactgtaactgccaatctgtctgtgtaagctggaatctgtggcaactattaccctgtgttgtatttcccaagtgtctggatggatggagaggtactcaaacaagttactttcagttgtcctgctggattttaaaaaaatagaaaaagaatctcaaaactactgttttacatagattgtttgaagagtccttcctcttgtgcttctgtaccactttcccagctcttagatgtggtagctaaaggcacggaatttagacggccttgtaaatagggcatgaggaactcatctgtgtattgggatggtattagagagagaatcaggaaagaccaactcatgaagtgaacttggtttgatcttactcaactagaaagcttgaaaacatccctggggattctgaaggcttaattttgcaaaggaggatgcattgtctgaactttgcaacttcatccagtgcaagtttgatgcaagaatgtattaggacataaaatagaggctgaccttaaaagggccaggacagaagcggctgccagctctgaatctttaactgaaatgcacatggcaccaggaggtgtctctcatagttggttgctagcctaaaacatcagaatagaacccaaagggcttaggaaggcctgccaggataacaagaaggccctgtattcattgtgtttcatctgcctaggcctactcattattttagagaatgaatgaagcaacaaggaagagagaccatgactctatcgatgacactgtttatagaaacacaggagaggaagaatttggaatgaaaagcacttcgtcagaaccttctgtgggagccattgagagaaaagcatggtccagtgccttctgagaaaggccagagctttgggctttcctgctctg

SEQ ID NO: 1501 - DNA, 1994 bp, Homo sapiens
  source 1..1994: mol_type = unassigned DNA; mol_type = unassigned DNA
atgcagcccaagtggcggggaggagttccttcagggaaactatgctcagccctgttcagagaatcctgtgcacagggctccactgcagttaggagccggtgagtccgggtggatgaggtcagagcgccccatggtgtggtgctgcctctttgtccgttcgcagcgaaaacggaaacagagcacccaagatgaagatgctgttagcctttgcagtctcgacataagtgagcctagtaataaacgggtcaaacccctttcccgagtcacgtcgctagcaaacctcatcccgcccgtgaaggccacgccattaaagcgcttcagtcaaaccctgcagcgctccattagcttccgcagtgagagccgccctgacatcctcgccccccgaccctggtccagaaatgccgccccctcgagcacgaaacggagagatagcaagctgtggagtgagaccttcgatgtgtgcgtcaatcagatgcttacatccaaggaaatcaaacgtcaggaggcgatctttgagctttcccaaggagaagaagacttgatagaagacttgaaattagcaaaaaaggcctatcatgaccccatgctgaaactctccataatgacagaacaagagttgaatcaaatttttggaacactggactctctaattcctctacatgaagagctccttagtcagcttcgagatgttaggaagcctgatggctcgactgaacatgttggtcccatcctcgtgggctggctcccttgcctcagctcctatgatagctactgcagcaatcaagtagccgccaaagctctgctggaccacaaaaagcaagatcaccgagtccaggatttcctacagcgatgtttagaatccccctttagccgcaaactagatctctggaatttcctcgatattccaagaagccgcctggtaaaataccctctgcttctccgagaaatcttgaggcacacaccaaatgataatccagatcagcagcacttggaagaagctataaatatcattcagggaattgtggcagaaatcaacaccaagactggtgaatctgaatgccgctattataaagagcggcttctttacttggaagaaggccagaaagactccctgatcgacagctctcgagtcttgtgttgtcatggtgaactgaagaacaatcggggcgtgaaactgcatgttttcctgttccaagaagtgcttgtgatcactcgagccgtcacccacaatgagcagctttgctaccagctgtaccgtcagccaatccccgtgaaagacctcctgctggaagacctccaggatggagaagtgaggctgggtggctccctgcgaggggcattcagcaacaatgagagaattaaaaacttcttcagagtcagtttcaaaaatggatcccaaagtcagacccactcgctacaagccaatgacactttcaacaaacagcagtggcttaactgtattcgtcaagccaaagaaacagttttgtgtgctgccgggcaagctggggtgcttgactccgagggatcgttcctaaatcccaccaccgggagcagagagctacagggagaaacaaaacttgagcagatggaccaatcggacagtgagtcagactgtagtatggacacgagtgaggtcagcctcgactgtgagcgcatggaacagacagactcttcctgtggaaacagcaggcacggtgaaagtaacgtctgacagaagcatgtgcacttcgggaagcaggcctgcatcttacctgtacagtatttgcattccacagatggaacggtttggagaagcactttttcatacttttgtgaaagtatacatgttggcccagtctctcgtatctgtacctttgtccctagtactgtaactgccaatctgtctgtgtaagctggaatctgtggcaactattaccctgtgttgtatttcccaagtgtctggatggatggagaggtactcaaacaagttactttcagttgtcctgctggatttt

SEQ ID NO: 1502 - DNA, 2197 bp, Homo sapiens
  source 1..2197: mol_type = unassigned DNA; mol_type = unassigned DNA
aactgagccttcctagtgttctgagagttttctgctgtctgttcagcttagcacgctaagaagctggagaggtacccagcagcctggttgcattctccgtcttggaaaagtatttaactgctttgagaaatcatggaatcgtttctggccacattgtgagattgtattgaattttctttttaagtttttaaatttttatatgcaaatgctggaaagcttggagacagtctatttcaaagaaggctgttgatttctgagactggcaggggcataaaatgacatgagagtgtctcagcaggattccaaattcacgaaagatttttccaggcacctactatgttcagaacggggatgcagaaatatcctggagaatctgaagttctgccttaaccctcgaaactttgaaagcaatggctgaaaaggaaagatgaatacctagaggctccctctggaaatgattgaggagcctagtaataaacgggtcaaacccctttcccgagtcacgtcgctagcaaacctcatcccgcccgtgaaggccacgccattaaagcgcttcagtcaaaccctgcagcgctccattagcttccgcagtgagagccgccctgacatcctcgccccccgaccctggtccagaaatgccgccccctcgagcacgaaacggagagatagcaagctgtggagtgagaccttcgatgtgtgcgtcaatcagatgcttacatccaaggaaatcaaacgtcaggaggcgatctttgagctttcccaaggagaagaagacttgatagaagacttgaaattagcaaaaaaggcctatcatgaccccatgctgaaactctccataatgacagaacaagagttgaatcaaatttttggaacactggactctctaattcctctacatgaagagctccttagtcagcttcgagatgttaggaagcctgatggctcgactgaacatgttggtcccatcctcgtgggctggctcccttgcctcagctcctatgatagctactgcagcaatcaagtagccgccaaagctctgctggaccacaaaaagcaagatcaccgagtccaggatttcctacagcgatgtttagaatccccctttagccgcaaactagatctctggaatttcctcgatattccaagaagccgcctggtaaaataccctctgcttctccgagaaatcttgaggcacacaccaaatgataatccagatcagcagcacttggaagaagctataaatatcattcagggaattgtggcagaaatcaacaccaagactggtgaatctgaatgccgctattataaagagcggcttctttacttggaagaaggccagaaagactccctgatcgacagctctcgagtcttgtgttgtcatggtgaactgaagaacaatcggggcgtgaaactgcatgttttcctgttccaagaagtgcttgtgatcactcgagccgtcacccacaatgagcagctttgctaccagctgtaccgtcagccaatccccgtgaaagacctcctgctggaagacctccaggatggagaagtgaggctgggtggctccctgcgaggggcattcagcaacaatgagagaattaaaaacttcttcagagtcagtttcaaaaatggatcccaaagtcagacccactcgctacaagccaatgacactttcaacaaacagcagtggcttaactgtattcgtcaagccaaagaaacagttttgtgtgctgccgggcaagctggggtgcttgactccgagggatcgttcctaaatcccaccaccgggagcagagagctacagggagaaacaaaacttgagcagatggaccaatcggacagtgagtcagactgtagtatggacacgagtgaggtcagcctcgactgtgagcgcatggaacagacagactcttcctgtggaaacagcaggcacggtgaaagtaacgtctgacagaagcatgtgcacttcgggaagcaggcctgcatcttacctgtacagtatttgcattccacagatggaacggtttggagaagcactttttcatacttttgtgaaagtatacatgttggcccagtctctcgtatctgtacctttgtccctagtactgtaactgccaatctgtctgtgtaagctggaatctgtggcaactattaccctgtgttgtatttcccaagtgtctggatggatggagaggtactc

SEQ ID NO: 1503 - DNA, 2024 bp, Homo sapiens
  source 1..2024: mol_type = unassigned DNA; mol_type = unassigned DNA
agtcgagtcctgcccggctagaagccggctgtcggtctccgtgtcgccgccgccgcccggcatcgtggagctggggcccccttttgcctgggagttttgtagtcgcctagggtcagcggtgacatcccaaagggcaggcccggcagccgccatggtggccaaggattaccccttctacctcacggtcaagagagcgaactgcagcctggagctacccccggccagcggtccggccaaggacgctgaggagcctagtaataaacgggtcaaacccctttcccgagtcacgtcgctagcaaacctcatcccgcccgtgaaggccacgccattaaagcgcttcagtcaaaccctgcagcgctccattagcttccgcagtgagagccgccctgacatcctcgccccccgaccctggtccagaaatgccgccccctcgagcacgaaacggagagatagcaagctgtggagtgagaccttcgatgtgtgcgtcaatcagatgcttacatccaaggaaatcaaacgtcaggaggcgatctttgagctttcccaaggagaagaagacttgatagaagacttgaaattagcaaaaaaggcctatcatgaccccatgctgaaactctccataatgacagaacaagagttgaatcaaatttttggaacactggactctctaattcctctacatgaagagctccttagtcagcttcgagatgttaggaagcctgatggctcgactgaacatgttggtcccatcctcgtgggctggctcccttgcctcagctcctatgatagctactgcagcaatcaagtagccgccaaagctctgctggaccacaaaaagcaagatcaccgagtccaggatttcctacagcgatgtttagaatccccctttagccgcaaactagatctctggaatttcctcgatattccaagaagccgcctggtaaaataccctctgcttctccgagaaatcttgaggcacacaccaaatgataatccagatcagcagcacttggaagaagctataaatatcattcagggaattgtggcagaaatcaacaccaagactggtgaatctgaatgccgctattataaagagcggcttctttacttggaagaaggccagaaagactccctgatcgacagctctcgagtcttgtgttgtcatggtgaactgaagaacaatcggggcgtgaaactgcatgttttcctgttccaagaagtgcttgtgatcactcgagccgtcacccacaatgagcagctttgctaccagctgtaccgtcagccaatccccgtgaaagacctcctgctggaagacctccaggatggagaagtgaggctgggtggctccctgcgaggggcattcagcaacaatgagagaagtatggatagcagtcggggttgacctgttgaatgtttttggccgtggtagtttggagggagtgggcagctggtggaaagagaaaagccacggtcttgaagtcaaactgcatttgtatgctatttcatcacttcctgattatgtactttgtttagtccctgtgattctcagtttctcatctccaaaatggaaatgcataggtacctccttcataagattgttataaggatttagtaagataatctaagtgaaactgtctgcacatagttagtgctccttaagttccctttctctgtctttttccattggataaaaacatgcttaataccagatagtccctacatggatgccagttgcgttatggtgggttttgcagctgaactggtaaacttgtccctaaagagacataagaatggtcaactggaatgtggattcatctgtaacattactcagtgggcctaatttaagacttaataaacaaattaactaaaagaagccaagatagcaatatctatcgagtatctaacatgatactcggtgaaacaagcaggtaacttccttcccctatggagcttgcattgtgatggaggagaaagatgataaacaaatgaatactccaggtgttgttaagaaaacttaaaacccg

SEQ ID NO: 1504 - DNA, 667 bp, Homo sapiens
  source 1..667: mol_type = unassigned DNA; mol_type = unassigned DNA
agcccaggggagccgccgccgcagccgccgccgccgcggtgagttttccagcctggagaggccgaaccagcgcgggggtcgaggcctaaacggcagcggcaaaacaactttcccatgtttccctctcctaaagcctggaatttcagagggcgaaaacggaaacagagcacccaagatgaagatgctgttagcctttgcagtctcgacataagtgagcctagtaataaacgggtcaaacccctttcccgagtcacgtcgctagcaaacctcatcccgcccgtgaaggccacgccattaaagcgcttcagtcaaaccctgcagcgctccattagcttccgcagtgagagccgccctgacatcctcgccccccgaccctggtccagaaatgccgccccctcgagcacgaaacggagagatagcaagctgtggagtgagaccttcgatgtgtgcgtcaatcagatgcttacatccaaggaaatcaaacgtcaggaggcgatctttgagctttcccaaggagaagaagacttgatagaagacttgaaattagcaaaaaaggcctatcatgaccccatgctgaaactctccataatgacagaacaagagttgaatcaaatttttggaacactggactctctaattcctctacatgaagagctccttagtcagc

SEQ ID NO: 1505 - DNA, 669 bp, Homo sapiens
  source 1..669: mol_type = unassigned DNA; mol_type = unassigned DNA
aggagcccatctggtgagctgagagttagtgaggggcccaagagaatggggcttgctctgccctgtgctttagatggaccatgtttgatagaaatatttggcctaaacggcagcggcaaaacaactttcccatgtttccctctcctaaagcctggaatttcagagggcgaaaacggaaacagagcacccaagatgaagatgctgttagcctttgcagtctcgacataagtgagcctagtaataaacgggtcaaacccctttcccgagtcacgtcgctagcaaacctcatcccgcccgtgaaggccacgccattaaagcgcttcagtcaaaccctgcagcgctccattagcttccgcagtgagagccgccctgacatcctcgccccccgaccctggtccagaaatgccgccccctcgagcacgaaacggagagatagcaagctgtggagtgagaccttcgatgtgtgcgtcaatcagatgcttacatccaaggaaatcaaacgtcaggaggcgatctttgagctttcccaaggagaagaagacttgatagaagacttgaaattagcaaaaaaggcctatcatgaccccatgctgaaactctccataatgacagaacaagagttgaatcaaatttttggaacactggactctctaattcctctacatgaag

SEQ ID NO: 1506 - DNA, 567 bp, Homo sapiens
  source 1..567: mol_type = unassigned DNA; mol_type = unassigned DNA
atagtaacaatgggggagaaggggcagtttctagaaggagaaggaggcactggagcagatacaaataattcctgcctacaaaattcttccctatctgtcctcctatcataaaagcgaaaacggaaacagagcacccaagatgaagatgctgttagcctttgcagtctcgacataagtgagcctagtaataaacgggtcaaacccctttcccgagtcacgtcgctagcaaacctcatcccgcccgtgaaggccacgccattaaagcgcttcagtcaaaccctgcagcgctccattagcttccgcagtgagagccgccctgacatcctcgccccccgaccctggtccagaaatgccgccccctcgagcacgaaacggagagatagcaagctgtggagtgagaccttcgatgtgtgcgtcaatcagatgcttacatccaaggaaatcaaacgtcaggaggcgatctttgagctttcccaaggagaagaagacttgatagaagacttgaaattagcaaaaaaggcctatcatgaccccatgctgaaactctccataatgacagaacaagag

SEQ ID NO: 1507 - DNA, 787 bp, Homo sapiens
  source 1..787: mol_type = unassigned DNA; mol_type = unassigned DNA
agtaacaatgggggagaaggggcagtttctagaaggagaaggaggcactggagcagatacaaataattcctgcctacaaaattcttccctatctgtcctcctatcataaaagtgtcagctttcatgactgacgatgcatctacaaggactggagttgaacttcaagcaagagactcacagacaaaggcgccctgggccagtggcacacactagctttatcaaagagactcagggacaagtacgcctggtctgtactgcggtttgccaattagctggatgaacagctggctaatttctgttttatctcttgggcagaagacacatgaggctagaataggttatcttcaacggggagccgagctaaggcctcatcgaaaacggaaacagagcacccaagatgaagatgctgttagcctttgcagtctcgacataagtgagcctagtaataaacgggtcaaacccctttcccgagtcacgtcgctagcaaacctcatcccgcccgtgaaggccacgccattaaagcgcttcagtcaaaccctgcagcgctccattagcttccgcagtgagagccgccctgacatcctcgccccccgaccctggtccagaaatgccgccccctcgagcacgaaacggagagatagcaagctgtggagtgagaccttcgatgtgtgcgtcaatcagatgcttacatccaaggaaatcaaacgtcaggaggcgatctttgagctttcccaaggagaagaagacttgatagaagacttgaaattagcaaaaaaggtaaatttaa

SEQ ID NO: 1508 - DNA, 757 bp, Homo sapiens
  source 1..757: mol_type = unassigned DNA; mol_type = unassigned DNA
tccccgcccccggccccgcccagcccaggggagccgccgccgcagccgccgccgccgcggtgagttttccagcctggagaggccgaaccagcgcgggggtcgaggagacctgagcctgccatactgagtctatggacagttccacagcaatgaatcaatgcagctgtagaggaatggaagaaaacaaggaaagggctgttggaggtgtttctggaaccagcgcaatcaatggcaggaacaactggtttttcaggctattgagaaagtctgatttatgtggctgaagtatggtgttattgacccccccaccttcgactcctaagattccagaacaaactgagaattcatgcctaaacggcagcggcaaaacaactttcccatgtttccctctcctaaagcctggaatttcagagggcgaaaacggaaacagagcacccaagatgaagatgctgttagcctttgcagtctcgacataagtgagcctagtaataaacgggtcaaacccctttcccgagtcacgtcgctagcaaacctcatcccgcccgtgaaggccacgccattaaagcgcttcagtcaaaccctgcagcgctccattagcttccgcagtgagagccgccctgacatcctcgccccccgaccctggtccagaaatgccgccccctcgagcacgaaacggagagatagcaagctgtggagtgagaccttcgatgtgtgcgtcaatcagatgcttacatccaaggaaatcaaacgtcaggag

SEQ ID NO: 1509 - DNA, 587 bp, Homo sapiens
  source 1..587: mol_type = unassigned DNA; mol_type = unassigned DNA
actttcttctccagccccgcggggcacccgcaggtcagcgtcgcgtcgggcgctgctggtggcggctcacagggccgcgggtcacttcgcggcgggggagccgggctcagggcgctccgggcggcgggcgccgtcccagcctgcctgaggcccttgtcccggcggctgcatcttgtaaaccgagcagccagaaaatcccgagataggacaccagggtggaggacgccaaggggttaaggtcagcgtgggtgcctcgcagccagagacgggcctaaacggcagcggcaaaacaactttcccatgtttccctctcctaaagcctggaatttcagagggcgaaaacggaaacagagcacccaagatgaagatgctgttagcctttgcagtctcgacataagtgagcctagtaataaacgggtcaaacccctttcccgagtcacgtcgctagcaaacctcatcccgcccgtgaaggccacgccattaaagcgcttcagtcaaaccctgcagcgctccattagcttccgcagtgagagccgccctgacatcctcgccccccgaccctggtccagaaatgccgccccctcgag

SEQ ID NO: 1510 - DNA, 514 bp, Homo sapiens
  source 1..514: mol_type = unassigned DNA
ttttccagcctggagaggccgaaccagcgcgggggtcgaggtttattgtgtgcatccaccaaggagaatgtaggattcaagaggacagaggtgtgttgtcctgttgactactgactcctgctccatggcatacagcgggtgcacaataactgtcctgagtgaatgaacacccattgactgaagtgaggagacctgagcctgccatactgagtctatggacagttccacagcaatgaatcaatgcagctgtagaggaatggaagaaaacaaggaaaggcctaaacggcagcggcaaaacaactttcccatgtttccctctcctaaagcctggaatttcagagggcgaaaacggaaacagagcacccaagatgaagatgctgttagcctttgcagtctcgacataagtgagcctagtaataaacgggtcaaacccctttcccgagtcacgtcgctagcaaacctcatcccgcccgtgaaggccacgccattaaagcgcttcagtcaaaccctgcag

SEQ ID NO: 1511 - DNA, 428 bp, Homo sapiens
  source 1..428: mol_type = unassigned DNA
aggagcccatctggtgagctgagagttagtgaggggcccaagagaatggggcttgctctgccctgtgctttagatggaccatgtttgatagaaatatttgtcctgttatacttcatgtaaagagaaccaactcagtattggctctgcgcctggtacatagcctaaacggcagcggcaaaacaactttcccatgtttccctctcctaaagcctggaatttcagagggttcttccagggatcaccccagaagaaaacagctgatacttacatctttgctccaggatctgctttaggggaactccaaactaacagcagcgaaaacggaaacagagcacccaagatgaagatgctgttagcctttgcagtctcgacataagtgagcctagtaataaacgggtcaaacccctttcccgagtcacgtcgctagc

SEQ ID NO: 1512 - DNA, 4484 bp, Homo sapiens
  source 1..4484: mol_type = unassigned DNA
aggggaagtcaagcctctctactgcttctttttataacctttaagttaattcagaacccagataagccttgatctgaggatgatataaccaccgcaggcaacatgggaacttctagagaaaacaagaagaagacttcaaaaaacatgctgtgatgtctcccagtggagacagggcacgaggtgcagggaagaggaggtggcctgagccaggacgatgaggatgcaatgttgaagaataagctggagaagagaagtaaccggcactatggaaaaaaccaaaacaaagcaaggagagaatgaacatatgccggtgaataatccttccacgcagatttaccagttgcaggccctagcctccgaactcaaaactggtttcacagaagcaatgcaagaactgtcaagaattcaacatggagaatatgctttggaagaaaaggttaagagctgcagatgttccatggaagaaaaagttactgagatgaagaattcattaaactatttcaaggaagagctgagcaatgccatgtcgatgatccaagccatcacttccaaacaagaagaaatgcaacagaaaatcgagcagcttcaacaggagaagcgaagagaatctcgaaaagttaaagccaagaaaactcaaaaagaagagcacagctcacaggccgggcctgcccaagcacaaggaagtccttttcgttctatcaatatccctgagcctgttcttccaagcgaagactttaccaaccttttgccttctcaggcctacgagaaagcccaagagtccagatctgttcatgtaggagacagtaatgtaaaaggaatgatgggtcctggagtgaacccaacaactccagaagcagaagaaaacctcaagtcttgcctctcggctgatatccagtccaagggccatctcccatctggcatgtggaggcagcctaaggatggtaaagaatggggtgaagaatacgtcacaaaagaccacccagataaactcaaggaggctggccagggtagacacagctccttggaaaacgttttatgtgaaacctccttagctgctaaaagacagactgtggccctggaactgcttgaatctgaaagaaaatatgtcattaacatctctctgatcttgaagataaaagccacattccaggggtcagatggaaagaggaattccaaagagagaagcctcttccctggctctttacggtacctcgtccagcagcacctggatctgcttcacgcactgcaggaaagggtcctgaagtggccacgccaaggcgttcttggagatttattccttaagttaacaaatgacgagaataatttcttggattattatgttgcctacctaagggacctgcctgagtgcatctcattggttcatgttgtagtcctgaaagagggtgatgaagagattaaatctgacatctacacgttgttttttcacatagtccagcgcatccctgaatatctgatacatctgcagaacgtcctgaagttcacagagcaggagcaccctgactattatctactactggtgtgtgtccagcgcctccgagtatttatctcacactacaccctgctgtttcaatgcaatgaagatttgcttattcagaaacggaaaaagctcaagaagtcatccatggcgaagctgtacaaagggctggcttcccagtgtgccaatgctgggcaagatgcttcccccactgcaggtcctgaggctgtccgtgacactgggatccactcagaagagttgctgcaaccctacccttctgctcccagttctggccctgccatcacacatctgatgcccccagtgaagaaaagccaacagcagcaaagcctgatggagagcatgcagcccgggaagcccagtgactgggagctggagggcaggaagcacgagcggcccgagagccttctggcaccgacgcagttctgcgcggccgagcaggacgtgaaggcgctggccgggcccctgcaggccatcccggagatggacttcgagtcctctccggcggagccgctgggcaacgtggagcgctccctgcgcgccccggccgagctcctgcccgatgcccgcggcttcgtgcccgcggcctacgaagagttcgagtacggcggcgagatcttcgcgctgcccgcgccctacgacgaggagccgttccaggctccggccctcttcgagaactgctcgcctgcctcctccgagtccagcctggacatctgcttcctgcggcccgtcagcttcgccatggaggccgagcggccggagcacccgctgcagccgctgcccaagagcgctacgtcgccggcgggcagcagcagcgcctacaaactggaggcggcggcgcaggcgcacggcaaggccaagccgctgagccgctctctcaaagagttcccgcgtgcgccgccagccgacggcgtggccccacgcctctacagcacgcgcagcagcagcggcggccgcgcgcccatcaaggccgagcgcgccgcgcaggcgcacggcccggccgccgccgccgtcgccgcccgcggcgcatccaggaccttcttcccccaacagaggtcccaaagcgaaaaacagacctatttggaagtaaggagggagatgcatttagaagatactaccagattctgtcccaaagaagaaagagaaagtgaacaaacatctttcagcgatcaaaatcccaggcaagaccagaaggggggctttcgcagctccttccgcaagctctttaaaaagaagtccagtggatcagaatacagggaaaaaactaatgagaatccctcaatggatccttcacccaccaaacaagatttcttcagaaaccgacttgctcttgcaaatgaccttgaccaaggaacagctgtgtaaaacatacttaaagttgtattgtcaagtggtaagatgaggataaaaagcttgtatatatctgtgtaggaatatatatatatatctatatctatatatatatatatatcgatgtataaatccctgaggaaaactaatataaatacttacatatgaaactaaacatacaagacattgaagagatgaagattagtttctggttaagatctggctttttgaacctcaacactggggaaaagggaaatgaagacttttcacatcattacagaaaaacacaataaatttggaggaaaataaatgtttgtaagaatgaaaacttccaacttgaagtcattccccgagtataatactgagcatgttcatatttaacatggatttgaattttatgcttcctaggcatttaacttattaactcatccagtgttcttaaactaatatacactatgttaggggccagttctgtcttgcttcatgtcttccaaaaaccctaaggcaatatctaacatcccttaaggcaaaggattaattaacagaactgtattttatatgttgcatatctgagttatggagaatttgtgcttaaaccatgattcagaaggttcaaagcttaaaaacacattgatctccaaacttgttctgtggttatggaaatcagtaaagggaacaaggatttctgtagaaactggggagagaggaaggcaaagaaacattttcccttgtgtgggttgagctgaggatggaaacagtccagtctgtgttttattgagtactcagtattcaagacccactcgtgatcttgagtgtcacacacactcacaaccagatggactaggaaaaaagcagtgatttagccacatcttgttaaaaagactttctgcagcctgaaaagaaggtggcaatagcaccaaaacttcaatggctcacacacagcagttgctacaaacagcaggtcaaagtgaaaattcaggattgcagcacttgactgttttcctattttgtaaagaaaccaagctcttaaagcttagaggaatcagattgcaacgaggcctgcctggctctggggtgataaaatgtgctctgtttccacatggatatgtgcaagatggtcagcatccttgatatgccccaaacatcagatttataatagaaaaaaaattgggtttaaacaatttgtctttattcccaggcagttcggtatagtaaattaggggtatttggtttctgttcattcaaaatcttggtactcaaactggtgtcttcagaagctgttcctctattgaagcgtttgttgataaaataggcaaaggttcacatgtaagtgttgcaagttttcttctccttgtctgatgacaaattaggaactcacctactgcgttttgaatagtagttgtctggaacacataaaggatcactgccaagttttttgagtttccaggatctaagtttaagccaagatttttgtttcccagaagtttatgaattcatttgaaattagatttttctcttattatgtggccggcagtgcttgcaagcacaacgccaaatcgactggacgtggaaagtgaaatactacagaagtcacaatctattaaataaaatgttaacataa

SEQ ID NO: 1513 - DNA, 615 bp, Homo sapiens
  source 1..615: mol_type = unassigned DNA
cactagtaaatgaggtctgtagattttcaggaggcttgtttctcaaacaaaagaaaaattcaaggtccaatggtgccacttacagtaatttccagcaaattgaattaacttttcatgcattatttagttgcaggccctagcctccgaactcaaaactggtttcacagaagcaatgcaagaactgtcaagaattcaacatggagaatatgctttggaagaaaaggttaagagctgcagatgttccatggaagaaaaagttactgagatgaagaattcattaaactatttcaaggaagagctgagcaatgccatgtcgatgatccaagccatcacttccaaacaagaagaaatgcaacagaaaatcgagcagcttcaacaggagaagcgaagagaatctcgaaaagttaaagccaagaaaactcaaaaagaagagcacagctcacaggccgggcctgcccaagcacaaggaagtccttttcgttctatcaatatccctgagcctgttcttccaagcgaagactttaccaaccttttgccttctcaggcctacgagaaaggtacagttcacaaatcatactgaattaatcaagtatttttttcccaattcccccaatt

SEQ ID NO: 1514 - DNA, 659 bp, Homo sapiens
  source 1..659: mol_type = unassigned DNA
ggagatagagaccttcacagcaaactttatctgagacatctctctatcttttttggcataatatgtgttcagagagccagtttgccactgtacaacctgagaactgttatttccattctgttaggtcatccatggcgaagctgtacaaagggctggcttcccagtgtgccaatgctgggcaagatgcttcccccactgcaggtcctgaggctgtccgtgacactgggatccactcagaagagttgctgcaaccctacccttctgctcccagttctggccctgccatcacgagatgcatttagaagatactaccagattctgtcccaaagaagaaagagaaagtgaacaaacatctttcagcgatcaaaatcccaggcaagaccagaaggggggctttcgcagctccttccgcaagctctttaaaaagaagtccagtggatcagaatacagggaaaaaactaatgagaatccctcaatggatccttcacccaccaaacaagatttcttcagaaaccgacttgctcttgcaaatgaccttgaccaaggaacagctgtgtaaaacatacttaaagttgtattgtcaagtggtaagatgaggataaaaagcttgtatatatctgtgtaggaatatatatatatatctatatctatatatatat

SEQ ID NO: 1515 - DNA, 509 bp, Homo sapiens
  source 1..509: mol_type = unassigned DNA
caaagggctggcttcccagtgtgccaatgctgggcaagatgcttcccccactgcaggtcctgaggctgtccgtgacactgggatccactcagaagagttgctgcaaccctacccttctgctcccagttctggccctgccatcacgaacgtaatttgtttctgagtgtgaagatccacaagtcgaacagaagttgagttttccattattccgtatgactctgctagggcaagcaagggagagaagagagttgaaggtgtgccttggagcaccgcaggtgacatctgatgcccccagtgaagaaaagccaacagcagcaaagcctgatggagagcatgcagcccgggaagcccagtgactgggagctggagggcaggaagcacgagcggcccgagagccttctggcaccgacgcagttctgcgcggccgagcaggacgtgaaggcgctggccgggcccctgcaggccatcccggagatggacttcgagtcctctccggcggagccgctggg

SEQ ID NO: 1516 - DNA, 514 bp, Homo sapiens
  source 1..514: mol_type = unassigned DNA
cggccgcgcgcccatcaaggccgagcgcgccgcgcaggcgcacggcccggccgccgccgccgtcgccgcccgcggcgcatccaggaccttcttcccccaacagaggtcccaaagcgaaaaacagacctatttggaagagatgcatttagaagatactaccagattctgtcccaaagaagaaagagaaagtgaacaaacatctttcagcgatcaaaatcccaggcaagaccagaaggggggctttcgcagctccttccgcaagctctttaaaaagaaaaatgggaacgcaactggtgaagatttctgtggtccttggggctggtggtgacatcaaagctttcctattttcagattttaggtccagtggatcagaatacagggaaaaaactaatgagaatccctcaatggatccttcacccaccaaacaagatttcttcagaaaccgacttgctcttgcaaatgaccttgaccaaggaacagctgtgtaaaacatacttaaagttgtattgtcaag

SEQ ID NO: 1517 - DNA, 594 bp, Homo sapiens
  source 1..594: mol_type = unassigned DNA
ggccgcgcgcccatcaaggccgagcgcgccgcgcaggcgcacggcccggccgccgccgccgtcgccgcccgcggcgcatccaggaccttcttcccccaacagaggtcccaaagcgaaaaacagacctatttggaagagatgcatttagaagatactaccagattctgtcccaaagaagaaagagaaagtgaacaaacatctttcagcgatcaaaatcccaggcaagaccagaaggggggctttcgcagctccttccgcaagctctttaaaaagaaaaatgggaacgcaactggtgaagatttctgtggtccttggggctggtggtgacatcaaagctttcctattttcagggacttctgacatgagaaaactggagaaggtgcagagctggaatggattacccaagtggcttaagcaagataaaggaagaatgcaccctcgactggggactcaaatggactgatctgagttgttgactattgattggctttggtctcttttgtggtggttgagattatagtatctctgcaatctgattactgtacgaatttctgcattctaccaaatgtagcatatatgtgtggttggcttcaa

SEQ ID NO: 1518 - DNA, 456 bp, Homo sapiens
  source 1..456: mol_type = unassigned DNA; mol_type = unassigned DNA
cgccgtcgccgcccgcggcgcatccaggaccttcttcccccaacagaggtcccaaagcgaaaaacagacctatttggaagagatgcatttagaagatactaccagattctgtcccaaagaagaaagagaaagtgaacaaacatctttcagcgatcaaaatcccaggcaagaccagaaggggggctttcgcagctccttccgcaagctctttaaaaagaagggcttgtttggctggtggccccacacacccagaatgctgcttcgggatgaagctaggcatggagccagatgcagcagaaaacctgagaaagggttctcttccctctgaggctgggagggccgaaggctcatacccacaaggattcaaaagggagagtcaagttgacatcattaaaaaaatcctgaaaaatgcccaaaatatttggggaaaagaatgaccttctgattgtttccatc

SEQ ID NO: 1519 - DNA, 4300 bp, Homo sapiens
  source 1..4300: mol_type = unassigned DNA
gtgcagggaagaggaggtggcctgagccaggacgatgaggatgcaatgttgaagaataagctggagaagagaagtaaccggcactatggaaaaaaccaaaacaaagcaaggagagaatgaacatatgccggtgaataatccttccacgcagatttaccagttgcaggccctagcctccgaactcaaaactggtttcacagaagcaatgcaagaactgtcaagaattcaacatggagaatatgctttggaagaaaaggttaagagctgcagatgttccatggaagaaaaagttactgagatgaagaattcattaaactatttcaaggaagagctgagcaatgccatgtcgatgatccaagccatcacttccaaacaagaagaaatgcaacagaaaatcgagcagcttcaacaggagaagcgaagagaatctcgaaaagttaaagccaagaaaactcaaaaagaagagcacagctcacaggccgggcctgcccaagcacaaggaagtccttttcgttctatcaatatccctgagcctgttcttccaagcgaagactttaccaaccttttgccttctcaggcctacgagaaagcccaagagtccagatctgttcatgtaggagacagtaatgtaaaaggaatgatgggtcctggagtgaacccaacaactccagaagcagaagaaaacctcaagtcttgcctctcggctgatatccagtccaagggccatctcccatctggcatgtggaggcagcctaaggatggtaaagaatggggtgaagaatacgtcacaaaagaccacccagataaactcaaggaggctggccagggtagacacagctccttggaaaacgttttatgtgaaacctccttagctgctaaaagacagactgtggccctggaactgcttgaatctgaaagaaaatatgtcattaacatctctctgatcttgaagataaaagccacattccaggggtcagatggaaagaggaattccaaagagagaagcctcttccctggctctttacggtacctcgtccagcagcacctggatctgcttcacgcactgcaggaaagggtcctgaagtggccacgccaaggcgttcttggagatttattccttaagttaacaaatgacgagaataatttcttggattattatgttgcctacctaagggacctgcctgagtgcatctcattggttcatgttgtagtcctgaaagagggtgatgaagagattaaatctgacatctacacgttgttttttcacatagtccagcgcatccctgaatatctgatacatctgcagaacgtcctgaagttcacagagcaggagcaccctgactattatctactactggtgtgtgtccagcgcctccgagtatttatctcacactacaccctgctgtttcaatgcaatgaagatttgcttattcagaaacggaaaaagctcaagaagtcatccatggcgaagctgtacaaagggctggcttcccagtgtgccaatgctgggcaagatgcttcccccactgcaggtcctgaggctgtccgtgacactgggatccactcagaagagttgctgcaaccctacccttctgctcccagttctggccctgccatcacacatctgatgcccccagtgaagaaaagccaacagcagcaaagcctgatggagagcatgcagcccgggaagcccagtgactgggagctggagggcaggaagcacgagcggcccgagagccttctggcaccgacgcagttctgcgcggccgagcaggacgtgaaggcgctggccgggcccctgcaggccatcccggagatggacttcgagtcctctccggcggagccgctgggcaacgtggagcgctccctgcgcgccccggccgagctcctgcccgatgcccgcggcttcgtgcccgcggcctacgaagagttcgagtacggcggcgagatcttcgcgctgcccgcgccctacgacgaggagccgttccaggctccggccctcttcgagaactgctcgcctgcctcctccgagtccagcctggacatctgcttcctgcggcccgtcagcttcgccatggaggccgagcggccggagcacccgctgcagccgctgcccaagagcgctacgtcgccggcgggcagcagcagcgcctacaaactggaggcggcggcgcaggcgcacggcaaggccaagccgctgagccgctctctcaaagagttcccgcgtgcgccgccagccgacggcgtggccccacgcctctacagcacgcgcagcagcagcggcggccgcgcgcccatcaaggccgagcgcgccgcgcaggcgcacggcccggccgccgccgccgtcgccgcccgcggcgcatccaggaccttcttcccccaacagaggtcccaaagcgaaaaacagacctatttggaagtaaggagggagatgcatttagaagatactaccagattctgtcccaaagaagaaagagaaagtgaacaaacatctttcagcgatcaaaatcccaggcaagaccagaaggggggctttcgcagctccttccgcaagctctttaaaaagaagtccagtggatcagaatacagggaaaaaactaatgagaatccctcaatggatccttcacccaccaaacaagatttcttcagaaaccgacttgctcttgcaaatgaccttgaccaaggaacagctgtgtaaaacatacttaaagttgtattgtcaagtggtaagatgaggataaaaagcttgtatatatctgtgtaggaatatatatatatatctatatctatatatatatatatatcgatgtataaatccctgaggaaaactaatataaatacttacatatgaaactaaacatacaagacattgaagagatgaagattagtttctggttaagatctggctttttgaacctcaacactggggaaaagggaaatgaagacttttcacatcattacagaaaaacacaataaatttggaggaaaataaatgtttgtaagaatgaaaacttccaacttgaagtcattccccgagtataatactgagcatgttcatatttaacatggatttgaattttatgcttcctaggcatttaacttattaactcatccagtgttcttaaactaatatacactatgttaggggccagttctgtcttgcttcatgtcttccaaaaaccctaaggcaatatctaacatcccttaaggcaaaggattaattaacagaactgtattttatatgttgcatatctgagttatggagaatttgtgcttaaaccatgattcagaaggttcaaagcttaaaaacacattgatctccaaacttgttctgtggttatggaaatcagtaaagggaacaaggatttctgtagaaactggggagagaggaaggcaaagaaacattttcccttgtgtgggttgagctgaggatggaaacagtccagtctgtgttttattgagtactcagtattcaagacccactcgtgatcttgagtgtcacacacactcacaaccagatggactaggaaaaaagcagtgatttagccacatcttgttaaaaagactttctgcagcctgaaaagaaggtggcaatagcaccaaaacttcaatggctcacacacagcagttgctacaaacagcaggtcaaagtgaaaattcaggattgcagcacttgactgttttcctattttgtaaagaaaccaagctcttaaagcttagaggaatcagattgcaacgaggcctgcctggctctggggtgataaaatgtgctctgtttccacatggatatgtgcaagatggtcagcatccttgatatgccccaaacatcagatttataatagaaaaaaaattgggtttaaacaatttgtctttattcccaggcagttcggtatagtaaattaggggtatttggtttctgttcattcaaaatcttggtactcaaactggtgtcttcagaagctgttcctctattgaagcgtttgttgataaaataggcaaaggttcacatgtaagtgttgcaagttttcttctccttgtctgatgacaaattaggaactcacctactgcgttttgaatagtagttgtctggaacacataaaggatcactgccaagttttttgagtttccaggatctaagtttaagccaagatttttgtttcccagaagtttatgaattcatttgaaattagatttttctcttattatgtggccggcagtgcttgcaagcacaacgccaaatcgactggacgtggaaagtgaaatactacagaagtcacaatctattaaataaaatgttaac

SEQ ID NO: 1520 - DNA, 498 bp, Homo sapiens
  source 1..498: mol_type = unassigned DNA
gttgtagcagagcctagctaattacccttcataattagaattgtcctatctactacggagtgttatagaccctctttccacaggaggggaagaaagaaagaagccggaatccccctgccatcctatgtctttgcattattgcctcactaccacatatgatcttcagaagaaaacctgaacctgctgacatggccaagcatggagccgacgagccatcctccaggtcagggagtccggacagggaaggtagggcctctgaggacagatcgctgcttcatcagaggctggctgtccgggagctcatcgacactgaggtctcctacttgcacatgctccagctctgtgcctctgacatcaggagccgcctccagcagttgccgcagggagatctggatgtcctgttctcaaacattgatgatatcatcaaagtgaacagcagattcctccatgatctgcaggagacagcctccaaggaagaggaacaagtgcagctagttg

SEQ ID NO: 1521 - DNA, 4968 bp, Homo sapiens
  source 1..4968: mol_type = unassigned DNA
agccgcgcccgccagcgccctcggtgggcacagccacccggagcggcgcgggtgccgggagctgggcgacgcgcccctcctgccccggctgcgctgttgcccgggcggccgacctccgtgcgtgagcgccggcaggcaccttgcgcgcgcggaacctgctgacatggccaagcatggagccgacgagccatcctccaggtcagggagtccggacagggaaggtagggcctctgaggacagatcgctgcttcatcagaggctggctgtccgggagctcatcgacactgaggtctcctacttgcacatgctccagctctgtgcctctgacatcaggagccgcctccagcagttgccgcagggagatctggatgtcctgttctcaaacattgatgatatcatcaaagtgaacagcagattcctccatgatctgcaggagacagcctccaaggaagaggaacaagtgcagctagttggtaacatatttctggaattccaagaggagttggagcaagtctataaggtctactgtgccagctacgaccaggccttgctactggtggacacgtaccggaaggagccggagctgcagcggcacatccagggcatcgttgaggcggtggtgccgcaagctggatcttcaggcctcagtttcttgctggtaattcctctgcagaggatcaccaggtacccactgctgctgcagaaaatcctggagaacacagtccctgatgccagtgcctatcctgtccttcagagggctgtctctgccctccaggacgtgaacaccaatatcaatgagtacaagatgcgcaaggaagtggcctccaagtacaccaaggtagagcagctgaccctccgggagcggctggcccgcatcaacacacacaccctctccaagaagaccacccggctgagccagctgctgaagcaggaggcggggctgatccccaggacagaagacaaggaatttgatgatttagaagagaggttccagtgggtgtctctgtgtgtgactgagctgaagaacaacgtggctgcttacctggacaatctgcaggctttcctctacttcaggccgcacgaatacaatctggacatccccgaggggcctgcagtgcagtattgcaatttggcaagagaccttcaccttgaggccttcctgaaatttaagcaacggctagaaggcctggtgtggcagccactgtgcagcctggccaaagccctgcttggccctcagaacctgatcaagaagcgtctggacaagctactggactttgagcgggtggaagagaagctgctggaggtgggcagtgtgacctaccaggaggaggccgcccggcacacataccaggcactcaactcgctgctagtggctgagctcccacagtttaaccagctggtcatgcagtggctgggccagatcatgtgcacattcgtgaccctccagagggaccttgcaaagcaagtgctgcagagggcagagggaagcatggcccagctgccccaccaccacgtcccagagcctgccttcaggaagctggtggaggacgcactgggccggacgagtaaccagcttcgctcctttcaagagacctttgagaaagtgcagccacctcccaccacacaaccgctccttccagggtctgaacgccaggtgcaggctctcctgagcaggtatggccctgggaagctgtaccaggtgacaagcaacatcagtgggactgggactctggacctgactctgcctcggggccaaatcgtggccatccttcaaaacaaggacaccaaaggcaacagcggccgctggctggtggacaccgggggacatcgtgggtatgtgccggctgggaaactacagctgtaccatgtggtccccagtgcagaggagctcagaaggcaggcggggctgaacaaagacccccgatgtctaacaccggagcccagcccagctctagtgccctctattcccaccatgaaccaggtcatagccgcgtacccttttgtggccagaagcagccatgaagtgagcctgcaggcaggccagcctgtgaccatcctggaggcccaggacaagaaggggaaccctgagtggagcctggtggaagtgaatggacagaggggttatgtgccttctggcttcttggccagggctcggagcccagttctgtggggctggagtctgccctcttagggtaccctctttggagcctacattgccaaatgatgggggaggcttagaggctctgaccctggggggaaaagaagcaaaggaaaggtggaggtggaagggaagaccaggccagggtgggtgaagcacactcaggaggcagccagaagacatgggcgggcctcgcagagtgcttggtgtggtgggggcacaggaggctccagccaggactgctcattatgtctgcataaagaactcattccgacctggggtcacaatgcacttggacagcaggtcacagctgattggccaggactctccataggttatggccagtcttagctgtgcctgcatccgggcctgcctgtgggcgtgggtcacacgggataatgttacctgcgtgctgtgtggttgcaggaagcgggttctggaggagtccagaactgcctggtcagacagttcacttcctacacatggtatcaggagacatcataaccaatgagtcagcttttatttctctatgctggaagctgagtttatcttgggcagtgacccactgggagccctctcaagtggggaagccatggatttatcggtgtagcagagaggttcccaagactcttgactggtcctgggagtgggtgtgaccaagtcatagttctggaatgtgtgtaggcaaattcagaggctgttccagggaagaggggattttgatactgtgttaggtggggtgtgtgaggctgttggcagcaggtgaacagctactgctgtgttctcaggactagggaacaaaggggtatgcaaatcatagaggaaactctgggaaggcggtgataaggcctggtgggtggggaggttagggaatggcttgctttcctgtttctggttagaaggggagccagggggaacccccagtggtttcaggtggcccctgaggtcctggaggcagccgtggatgtgatgcaattggctgtgggaccttagatgtaggacacaacttcagtgttcccatccagaaagacctcactcacagggttgtgctgagaatgacgtggggctaagcatgcagagctccctgtaaactgtgaagtgtgatacaaatgtaaatgacagcagtgatctcggggtggcccccggcatgctgccctcccccacgcccatgcctgtggcagcaaaccttgttcatcagtatagctttctttcctgtaacccaggatctaccttggggggcttctcaatactgcattctatgtagccagcctctttaacttggtaagtgagccaccccattctagaacctggaaattggagcccctcaaaaacagttcctgttcaaggaggactgacctgctggggcaatgttgggtgcagtgcagtccctgcttggggtggtcatgtctaggctgttgctctgggcaaagataagttgcaagattcacagaaatgggaaaatgtgaccaagtgtgatcttaacaactgacaaagtttgtaaccaacccaagttagaatgtgtgtcaaacaggaggtagtttagatatgcttccaagaacatgtctgtgttataaccatagtgcctaagcagtgagctctggtttttgaagggcttttaagaaatatatacatgtctgtgtcagtctataacttgcctcctctgggcctgttaaagcatgaagactgcatgacacaagagaaatgcaagccctacggttcctttctcagcagcgaattcacttgagaggatgctcttgactcattctctctgctctttcctgctcagatttctgataaaaatagagagcataggggaacagataatgaaataggaaacccactcgtgggttccacagatacctaccgaaggcctactgtgtgctagaattgtagctcaggagttctcagtgtagctgctcactgaagttaccatggcaggtttcaactggcagaatccaggctccgtcccacccagagattctgatgaaattggtttagggtgtggctcgggcctcaggaattcagaaagcttcccaggtgcttccaatgtgcagccagggttagggacctctaccctagacacaaagtattggacagatagacctggtgccagagatggccatgagctgtaagctaggacgtgccccacctgagctctgcactagctagttcaaacaggcgctttaaaggcagtgtgaaaggggacagcctgttctgccaggtctcagaatgtatatttattaagtgccattaaaagggacctgaacaaaattggatgtcttgtaggcataagggaggaaaataaaatatacttggaaccaagtctatgtcatgaagggaaaataaaaatgtattcagtagcacgtgggttatggtttctcatagaccaggggataagattaaaagtcactgaagagtgggaaaatgcatgttgagaagatgagaatggcctgtattttctccaggggaatctgtgtaatgtgccttttccctctccaaatgcctagaaccatggcactgtgtcttatttatttaaccgttgggctgtctcatactaaacttgcaaagatatttgcctatgaactgaacaagacttccaggagttgaagtctggttcacaagggtaccccttgcctcctgtgatggagtgagaactcttaaacccctcaggccccaactcagttgtggagatgaggacaagattacaatatcaaaagaaagatgaatgaattcttggttaatatgacgaaccccagctcaatgagtaactgatgtgaactgctgggaataaaggacttcaaagatggaaa

SEQ ID NO: 1522 - DNA, 588 bp, Homo sapiens
  source 1..588: mol_type = unassigned DNA
tgctaagagccagccatctgctagtgagggccctgttgccctgatcagggtgggcccttcagtggcagagttaggatcaggcccagtactcctggctgtcaaaatgtgagcaaatgttggtgccagctttgacaggtttattcaagcacttgtgtctgtctgtgctcctcctctcccagccgctccttccagggtctgaacgccaggtgcaggctctcctgagcaggtatggccctgggaagctgtaccaggtgacaagcaacatcagtgggactgggactctggacctgactctgcctcggggccaaatcgtggccatccttcaaaacaaggacaccaaaggcaacagcggccgctggctggtggacaccgggggacatcgtgggtatgtgccggctgggaaactacagctgtaccatgtggtccccagtgcagaggagctcagaaggcaggcggggctgaacaaagacccccgatgtctaacaccggagcccagcccagctctagtgccctctattcccaccatgaaccaggtcatagccgcgtacccttttgtggccagaagcagccatgaagtgagcctgcagg

SEQ ID NO: 1523 - DNA, 5489 bp, Homo sapiens
  source 1..5489: mol_type = unassigned DNA
agtgctgcggccgggctccgggcgtcccggcggccaccatgctcagcgtcgtgcacttcctccggagcttcttcaagactccagagccaggtgcacacctgccaggtgaaggtgagattgaagataaccagctccccacatcccctgcagaacaagtggagcagggatggaaccagcaaacagaccgcgatgattctgaaacgctgtcccagcagagtgaaagtggatcagacacaaaaactgacccctttgaaagtgcctctgacacagagtccttgtctgggtacctcccgaggggagtcttccaccctctaagaggtactcccgtagatatagaagcaccttgggaataccctgatgtctcagcaactggaccccctcaggagcagcatttgaccagtgttcctgggcttcatgcaaaggaagaactcgatttgtcccctagcttagaggatgactcttgcaaaaatgggtggcgagcctttgccacagttgctggagaacaggaggcaggacacctctgggactgcgcgaccagcctggagcgagagtctttgctggcaggggttccccgacacacagggtgctgcttacagagggccacagacagcagtggtcctgagccagtacagggggtggctgttcaagacctcagagggctctccagtgtttctcttcagaaatccaggtctgagagctatctgggcatcccagtggtctggcccttccttctctggtgctgtgaactgggtcggagttggccacatatccacaacagggccagggcactggtgctacctagcagaggcccactggacaacacagcccctctggggaccaggacaaagaaggaaagtactctaggccctgcaggggacacagaattgctctggtcccagccccactcggatgtcccctgccagcctcctttgaggacatcttgcctcctacgcaccaaccgtcaccatagtgccccagaaactactggtgacaagaacagggcatcccccagactcaactgtgggcacatgagggcactggtcagggcccattccatagcagggttttcaccagagtgccccgaggatcccgtgggacagaatgttgtgaagtctgggacccatgtgaaggaaggggccaaaaatgaacgagatccaagaatacaaaacatcccttcccctgcacccacccagctgtctggcccgattcctgcttttcagagtggggctccccatctgcagggtccctgcaagcctggtgggtttcgcttgcaaagggcctctcaggacactccttctgcaggtctcctgggggaaaaccagttaagacaggattccaggtcatgtctggtggcttcatgcctcacctcagagttagtgaagctcagtgcagaggaagtgcctgagcccgctgagtgcaagtcagagcaaagcccagaaagcagaacccaggaaccccaaggcacccaactcgcaccaagagctgctgatgagagagagacacagaagcacctctggggcatttctgtccaggcaggaaaccaaaccagtaattacacatcaaagtatgtgctcagcgaggaaagcaagtcacctaccagggccaagttcccacggcagcctagcagtgaggggacccaggtgtggagtggagacttgatgggctgcttggaagtgagtgacagttcagatgcccctgagaccacccagaaatcaagcgcaatagacacttcaaaggcagccgaagaagccatggttctagaccccaactacagggaacaggctttgcaaggtctttcagaattcaaggcagccacggtgtctcactgcggccccggggctgaggagggtgaacaggggcctgggggtgccgggggccggcagctggagcccaaagcaggcggcgaggcctcgaggggcaggggcgccctcatcattgtagctgtggagcagaaaggtcttcaggccagcaggagcaatgcggggcctgttccagaaacactgccccgtgactttcctaaggaaagaccagaatctcccttgagcactggcgagaccccctgtgagtctcccactagggggaaaacaccagccggtaatgagtgtgagttgccagcagcccccatacagggagctggcgatggggctcttcagcgggtggcccaggccgcagagcttgggagagtgctggtcccccaagctgcttcggaagagacgccgagcacagaggagcccccgggagagagactgcgtggggagagccggagctccgggtcaggggagcgtggcccggaggaggcccccgaaggcggtgctgcagcagcccggggccagcgcccccgcgtccccgccttggagccgccccagccgccacgcgggctccgcaagggcgcgcaggagcctgggaagcgcccgacgttttccaaggtgacctccttcaggaagggcaggcccttggccactgagagcccaggaggggtcccggccccgaccaccgagggtcgccgctggggctcttcaggccccgaggggctccccagggagaatccgcccgctgcggccggtcgggacgcaccgcctctgcaccacggggacgccagcgcctggcccgagtttgtcccgcaggctgcaggcgacaggactgcagggccggcaggagcggggcacacggggacctcaggggatcttggtagccgagggccttcctctgagagctgcaacgcaaagagactcaaaacaacggagaaaaaactcagggcaaggttggccttggctcataagaccttttcaaactttattgagtcaatagttctagagaaagagaacacccatgaacgttccccaagttctcccaagggcgagaaggagaagagcaggctgcgccagggttcctggcgggcgtttctgaaaagcaaagatgccggaagccccaaaaagcccaccctagtgagtctgcctctaggacccgaagttctctccccagcagagaccgacagccactgtgaggaacgggcggaggacaaagagggctatgtttttagcgatcactgggcacccccacttgcctccacacctttgtcctccagtttagtttctccagaacacaggaggaaaagtgaaccgaccatcaagtgcacagccacccaggaaggcggtaggtacctaccttcaggtatctttccggaaaagtcctggctggcgtcccccggcagccctcgggcccagcaggctggaatcgcacacaccctgccttccagctctgcctgctgcctggcatatgaaaaccccgggacgccctgcagacccacgagccccaagcccctgagtcccaggcctagtgctcagcggatgggtctccactaccccgggaggggtagcgccatctccatggtttctcttggaagctacagctacgtggacagcagttcaggggaccctgaaagacccaagattcccaagggccagaccagtttcctgctttctctgcagacgctaaaccaagatgagcagaaggaagagagcagggaaggaggccagggtccgcgcggcttgggcacagtgccctggctcagggaccttcctgggagtgagaaccacatgccctgggaagaaccagcaggtgagaagcccagttgctctcacagtcagaaggcgttccacatggagcctgcccagaagccctgcttcaccactgacatggtgacatgggccctcctctgcatctctgcagagactgtgcgtggggaggctccttcacagcctaggggcatccctcaccgctcgcccgtcagtgtggatgacctgtggctggagaagacacagagaaagaagttgcagaagcaggcccacgtcgaaaggaggctgcacataggggcagtgcacaaagatggagtcaagtgctggagaaagacgatcattacctctccagagtctttgaatctccctagaagaagccatccactctcccagagtgctccaacgggactgaaccacatgggctggccagagcacacaccaggcactgccatgcctgatggagctctggacacagctgtctgcgctgacgaagtggggagcgaggaggacctgtatgatgacctgcacagctccagccaccactacagccaccctggagggggtggggagcagctggctatcaatgagctcatcagcgatggcagtgtggtctgcgctgaagcactctgggaccatgtcaccatggacgaccaggagctgggcttcaaagctggggacgtcatcgaagtgatggatgccaccaacagagagtggtggtggggccgggtcgccgatggcgagggctggtttccagccagcttcgttcggctgagggtgaatcaggacgagcccgcggatgacgacgcccctctggccgggaacagcggagcggaggacggcggggcggaggcgcagagcagcaaggaccagatgcggaccaacgtcatcaacgagatcctcagcactgagcgggactacatcaagcacctgcgcgacatctgcgagcaagccgacttccagatctactcggagtactgcaataaccaccccaacgcctgcgtggagctctcccggctcaccaagctcagcaagtacgtgtacttcttcgaggcctgccggctgctgcagaagatgattgacatctccctggatggcttcctgctgactccggtgcagaagatctgcaagtaccctctgcagctggccgagctgctcaaatacacgcacccccagcacagggacttcaaggatgttgaagccgccttgcatgccatgaagaacgtggcccagctcatcaacgagcggaagcggagacttgagaacatcgacaagattgctcagtggcagagctccatagaggactgggagggagaagatctcttggtcaggagctcagaactcatctactcgggggagctgactcgagttacacagcctcaagccaaaagccagcagcgaatgttctttctctttgaccaccagctcatctactgtaagaaggacctgctccgccgcgacgtgttgtactacaagggccggctggacatggacggcctggaggtggtggacctggaggacgggaaggacagagacctccatgtgagcatcaagaacgccttccggctgcaccgtggcgccacaggggacagccacctgctgtgcaccaggaagcccgagcagaagcagcgctggctcaaggcctttgccagggagagggagcaggtgcagctggaccaggagacaggcttctccatcactgaactgcagaggaagcaggccatgctgaatgccagcaagcagcaggtcacagggaagcccaaagctgttggccggccctgctacctgacgcgccagaagcacccagccctgcccagcaaccggccccagcagcaggtcctggtgctggcggagcccaggcgcaagccatctaccttctggcacagcatcagccggctggcacccttccgcaagtga

SEQ ID NO: 1524 - DNA, 4788 bp, Homo sapiens
  source 1..4788: mol_type = unassigned DNA
attccccaggctgagagtacgcgagggcgcagcagcggcaaggggctggaactggggtcggggctgttgggctcctgctcggggtgccccctctctggcccgatttccgggcccgctcaccatccgggacccactcagttgggacgcctccacctcgctgcccccacaggaaccccaagatgggccgggggctccggggcactgtcaggggtggccggccacaggttgccaagcccgacctccccagactccagagccaggtgcacacctgccaggtgaaggtgagattgaagataaccagctccccacatcccctgcagaacaagtggagcagggatggaaccagcaaacagaccgcgatgattctgaaacgctgtcccagcagagtgaaagtggatcagacacaaaaactgacccctttgaaagtgcctctgacacagagtccttgtctgggtacctcccgaggggagtcttccaccctctaagaggtactcccgtagatatagaagcaccttgggaataccctgatgtctcagcaactggaccccctcaggagcagcatttgaccagtgttcctgggcttcatgcaaaggaagaactcgatttgtcccctagcttagaggatgactcttgcaaaaatgggtggcgagcctttgccacagttgctggagaacaggaggcaggacacctctgggactgcgcgaccagcctggagcgagagtctttgctggcaggggttccccgacacacagggtgctgcttacagagggccacagacagcagtggtcctgagccagtacagggggtggctgttcaagacctcagagggctctccagtgtttctcttcagaaatccaggtctgagagctatctgggcatcccagtggtctggcccttccttctctggtgctgtgaactgggtcggagttggccacatatccacaacagggccagggcactggtgctacctagcagaggcccactggacaacacagcccctctggggaccaggacaaagaaggaaagtactctaggccctgcaggggacacagaattgctctggtcccagccccactcggatgtcccctgccagcctcctttgaggacatcttgcctcctacgcaccaaccgtcaccatagtgccccagaaactactggtgacaagaacagggcatcccccagactcaactgtgggcacatgagggcactggtcagggcccattccatagcagggttttcaccagagtgccccgaggatcccgtgggacagaatgttgtgaagtctgggacccatgtgaaggaaggggccaaaaatgaacgagatccaagaatacaaaacatcccttcccctgcacccacccagctgtctggcccgattcctgcttttcagagtggggctccccatctgcagggtccctgcaagcctggtgggtttcgcttgcaaagggcctctcaggacactccttctgcaggtctcctgggggaaaaccagttaagacaggattccaggtcatgtctggtggcttcatgcctcacctcagagttagtgaagctcagtgcagaggaagtgcctgagcccgctgagtgcaagtcagagcaaagcccagaaagcagaacccaggaaccccaaggcacccaactcgcaccaagagctgctgatgagagagagacacagaagcacctctggggcatttctgtccaggcaggaaaccaaaccagtaattacacatcaaagtatgtgctcagcgaggaaagcaagtcacctaccagggccaagttcccacggcagcctagcagtgaggggacccaggtgtggagtggagacttgatgggctgcttggaagtgagtgacagttcagatgcccctgagaccacccagaaatcaagcgcaatagacacttcaaaggcagccgaagaagccatggttctagaccccaactacagggaacaggctttgcaaggtctttcagaattcaaggcagccacggtgtctcactgcggccccggggctgaggagggtgaacaggggcctgggggtgccgggggccggcagctggagcccaaagcaggcggcgaggcctcgaggggcaggggcgccctcatcattgtagctgtggagcagaaaggtcttcaggccagcaggagcaatgcggggcctgttccagaaacactgccccgtgactttcctaaggaaagaccagaatctcccttgagcactggcgagaccccctgtgagtctcccactagggggaaaacaccagccggtaatgagtgtgagttgccagcagcccccatacagggagctggcgatggggctcttcagcgggtggcccaggccgcagagcttgggagagtgctggtcccccaagctgcttcggaagagacgccgagcacagaggagcccccgggagagagactgcgtggggagagccggagctccgggtcaggggagcgtggcccggaggaggcccccgaaggcggtgctgcagcagcccggggccagcgcccccgcgtccccgccttggagccgccccagccgccacgcgggctccgcaagggcgcgcaggagcctgggaagcgcccgacgttttccaaggtgacctccttcaggaagggcaggcccttggccactgagagcccaggaggggtcccggccccgaccaccgagggtcgccgctggggctcttcaggccccgaggggctccccagggagaatccgcccgctgcggccggtcgggacgcaccgcctctgcaccacggggacgccagcgcctggcccgagtttgtcccgcaggctgcaggcgacaggactgcagggccggcaggagcggggcacacggggacctcaggggatcttggtagccgagggccttcctctgagagctgcaacgcaaagagactcaaaacaacggagaaaaaactcagggcaaggttggccttggctcataagaccttttcaaactttattgagtcaatagttctagagaaagagaacacccatgaacgttccccaagttctcccaagggcgagaaggagaagagcaggctgcgccagggttcctggcgggcgtttctgaaaagcaaagatgccggaagccccaaaaagcccaccctagtgagtctgcctctaggacccgaagttctctccccagcagagaccgacagccactgtgaggaacgggcggaggacaaagagggctatgtttttagcgatcactgggcacccccacttgcctccacacctttgtcctccagtttagtttctccagaacacaggaggaaaagtgaaccgaccatcaagtgcacagccacccaggaaggcggtaggtacctaccttcaggtatctttccggaaaagtcctggctggcgtcccccggcagccctcgggcccagcaggctggaatcgcacacaccctgccttccagctctgcctgctgcctggcatatgaaaaccccgggacgccctgcagacccacgagccccaagcccctgagtcccaggcctagtgctcagcggatgggtctccactaccccgggaggggtagcgccatctccatggtttctcttggaagctacagctacgtggacagcagttcaggggaccctgaaagacccaagattcccaagggccagaccagtttcctgctttctctgcagacgctaaaccaagatgagcagaaggaagagagcagggaaggaggccagggtccgcgcggcttgggcacagtgccctggctcagggaccttcctgggagtgagaaccacatgccctgggaagaaccagcaggtgagaagcccagttgctctcacagtcagaaggcgttccacatggagcctgcccagaagccctgcttcaccactgacatggtgacatgggccctcctctgcatctctgcagagactgtgcgtggggaggctccttcacagcctaggggcatccctcaccgctcgcccgtcagtgtggatgacctgtggctggagaagacacagagaaagaagttgcagaagcaggcccacgtcgaaaggaggctgcacataggggcagtgcacaaagatggagtcaagtgctggagaaagacgatcattacctctccagagtctttgaatctccctagaagaagccatccactctcccagagtgctccaacgggactgaaccacatgggctggccagagcacacaccaggcactggtgagttacgcgcctctctcttttgctatgtactctggatcctggcatgaaggacaagaagctagtgctgttggcagctgtatccacttgcctggtagaagtagcttgaaggtgagagagataaacaattgtcctcttccttcagttagggaggagtgcctactacccaaagaaagggaattattggctgggcacagtggctcatgcctgtaatcccagcactttgagaggctgaagcaggcggatcacttgaggtcaggagctcaagaccagcctgggcaacatggtgaaaccccatctctactaaaaatacaggccgggtgcggtggctcatgctataatcccagcactttgggaggccaaggtgggcggatcatatgaggtcgggagttcgagaccagcctgaccagcatggagaaaccccatctctactaaaaatacaaaattagctgggcatggtggcacatgcctgtaatctcagctactcgggaggctgaggcaggagaattgcttgaacctgggagtcagaggttgcggtgagccaagatcacgccattgcactccagcctgggcaataagagcaaaactccgtctc

SEQ ID NO: 1525 - DNA, 3656 bp, Homo sapiens
  source 1..3656: mol_type = unassigned DNA; mol_type = unassigned DNA
agaaaaaactcagggcaaggttggccttggctcataagaccttttcaaactttattgagtcaatagttctagagaaagagaacacccatgaacgttccccaagttctcccaagggcgagaaggagaagagcaggctgcgccagggttcctggcgggcgtttctgaaaagcaaagatgccggaagccccaaaaagcccaccctagtgagtctgcctctaggacccgaagttctctccccagcagagaccgacagccactgtgaggaacgggcggaggacaaagagggctatgtttttagcgatcactgggcacccccacttgcctccacacctttgtcctccagtttagtttctccagaacacaggaggaaaagtgaaccgaccatcaagtgcacagccacccaggaaggcgacgctaaaccaagatgagcagaaggaagagagcagggaaggaggccagggtccgcgcggcttgggcacagtgccctggctcagggaccttcctgggagtgagaaccacatgccctgggaagaaccagcaggtgagaagcccagttgctctcacagtcagaaggcgttccacatggagcctgcccagaagccctgcttcaccactgacatggtgacatgggccctcctctgcatctctgcagagactgtgcgtggggaggctccttcacagcctaggggcatccctcaccgctcgcccgtcagtgtggatgacctgtggctggagaagacacagagaaagaagttgcagaagcaggcccacgtcgaaaggaggctgcacataggggcagtgcacaaagatggagtcaagtgctggagaaagacgatcattacctctccagagtctttgaatctccctagaagaagccatccactctcccagagtgctccaacgggactgaaccacatgggctggccagagcacacaccaggcactgccatgcctgatggagctctggacacagctgtctgcgctgacgaagtggggagcgaggaggacctgtatgatgacctgcacagctccagccaccactacagccaccctggagggggtggggagcagctggctatcaatgagctcatcagcgatggcagtgtggtctgcgctgaagcactctgggaccatgtcaccatggacgaccaggagctgggcttcaaagctggggacgtcatcgaagtgatggatgccaccaacagagagtggtggtggggccgggtcgccgatggcgagggctggtttccagccagcttcgttcggctgagggtgaatcaggacgagcccgcggatgacgacgcccctctggccgggaacagcggagcggaggacggcggggcggaggcgcagagcagcaaggaccagatgcggaccaacgtcatcaacgagatcctcagcactgagcgggactacatcaagcacctgcgcgacatctgcgagggctacgtccggcagtgccgcaagcgcgcagacatgttcagcgaggagcagctgcgtaccatcttcgggaacatcgaggacatctaccgctgccagaaggccttcgtgaaggccctggagcagaggttcaaccgcgagcgcccacacctgagcgagctgggtgcctgcttcctggagcatcaagccgacttccagatctactcggagtactgcaataaccaccccaacgcctgcgtggagctctcccggctcaccaagctcagcaagtacgtgtacttcttcgaggcctgccggctgctgcagaagatgattgacatctccctggatggcttcctgctgactccggtgcagaagatctgcaagtaccctctgcagctggccgagctgctcaaatacacgcacccccagcacagggacttcaaggatgttgaagccgccttgcatgccatgaagaacgtggcccagctcatcaacgagcggaagcggagacttgagaacatcgacaagattgctcagtggcagagctccatagaggactgggagggagaagatctcttggtcaggagctcagaactcatctactcgggggagctgactcgagttacacagcctcaagccaaaagccagcagcgaatgttctttctctttgaccaccagctcatctactgtaagaaggacctgctccgccgcgacgtgttgtactacaagggccggctggacatggacggcctggaggtggtggacctggaggacgggaaggacagagacctccatgtgagcatcaagaacgccttccggctgcaccgtggcgccacaggggacagccacctgctgtgcaccaggaagcccgagcagaagcagcgctggctcaaggcctttgccagggagagggagcaggtgcagctggaccaggagacaggcttctccatcactgaactgcagaggaagcaggccatgctgaatgccagcaagcagcaggtcacagggaagcccaaagctgttggccggccctgctacctgacgcgccagaagcacccagccctgcccagcaaccggccccagcagcaggtcctggtgctggcggagcccaggcgcaagccatctaccttctggcacagcatcagccggctggcacccttccgcaagtgaactggtccctgcctgacagcacctgctgggccttcctgccagtggcccccagtttttcttccccgaggcccactcggcctggccttcctctgcctgcaagtgagcagggatgggctggggagttgcttgtgccaccaagacgtgccaggtctgtactcctgttgtctttttccctgctcctggtgccctgaagagaccagcaagggggcagaccccgcactcgccacaccgccgctgcagcttgggccccatccgccctctggacctgtgtagggcctcactgctggagcggggaaaccgcagctcagcccaggcccagctggggagaaggcgctacctgcgtgggaccctcttctctggaaacctaatcctcctttcatttcctctgggcaggactctctggccttctgtggcctgcaatgccaggccatgtgcccctctgccctctagttctccaagtccccagcccggccagtggtgccaggcagcttgccacttgggagggcagaagccaggaattccacacccttgtgttgcgcccggagcccgcccttcgcctcccagcccctcaagacaccgctggctgctggacaccctcttcacttgtgtgtgtgtgtgtagcggaaaaggacaagacggtgcagtcggctgcatactcccagtcgggagtgtggtcagtctgcctgctgctgtgcggtagctccagaaccacctcgttcctggttttgtttggattttggcatcttgtttttctaacaacaaacaatggagaaaaagaattgattcttagtgacacagaagattgccttacgctcgtgagcgtgagaagccataagagagagaccgaattctgtggctcagcacacaggactgacccacagcccaggcagcgggtgtgtggagatggcgccctgtcctgccaaggggcgccaggagcagagccagggcctggcgagctggcgtggagcccacaggattcagcagcatggacagtcactcttgcactattccttctccaagccagaaaccacatttaatttcataaataaatttatgaaaagtaa

SEQ ID NO: 1526 - DNA, 1638 bp, Homo sapiens
  source 1..1638: mol_type = unassigned DNA; mol_type = unassigned DNA
ccacttgcctccacacctttgtcctccagtttagtttctccagaacacaggaggaaaagtgaaccgaccatcaagtgcacagccacccaggaaggcggtaggtacctaccttcaggtatctttccggaaaagtcctggctggcgtcccccggcagccctcgggcccagcaggctggaatcgcacacaccctgccttccagctctgcctgctgcctggcatatgaaaaccccgggacgccctgcagacccacgagccccaagcccctgagtcccaggcctagtgctcagcggatgggtctccactaccccgggaggggtagcgccatctccatggtttctcttggaagctacagctacgtggacagcagttcaggggaccctgaaagacccaagattcccaagggccagaccagtttcctgctttctctgcagacgctaaaccaagatgagcagaaggaagagagcagggaaggaggccagggtccgcgcggcttgggcacagtgccctggctcagggaccttcctgggagtgagaaccacatgccctgggaagaaccagcaggtgagaagcccagttgctctcacagtcagaaggcgttccacatggagcctgcccagaagccctgcttcaccactgacatggtgacatgggccctcctctgcatctctgcagagactgtgcgtggggaggctccttcacagcctaggggcatccctcaccgctcgcccgtcagtgtggatgacctgtggctggagaagacacagagaaagaagttgcagaagcaggcccacgtcgaaaggaggctgcacataggggcagtgcacaaagatggagtcaagtgctggagaaagacgatcattacctctccagagtctttgaatctccctagaagaagccatccactctcccagagtgctccaacgggactgaaccacatgggctggccagagcacacaccaggcactgctgttggccggccctgctacctgacgcgccagaagcacccagccctgcccagcaaccggccccagcagcaggtcctggtgctggcggagcccaggcgcaagccatctaccttctggcacagcatcagccggctggcacccttccgcaagtgaactggtccctgcctgacagcacctgctgggccttcctgccagtggcccccagtttttcttccccgaggcccactcggcctggccttcctctgcctgcaagtgagcagggatgggctggggagttgcttgtgccaccaagacgtgccaggtctgtactcctgttgtctttttccctgctcctggtgccctgaagagaccagcaagggggcagaccccgcactcgccacaccgccgctgcagcttgggccccatccgccctctggacctgtgtagggcctcactgctggagcggggaaaccgcagctcagcccaggcccagctggggagaaggcgctacctgcgtgggaccctcttctctggaaacctaatcctcctttcatttcctctgggcaggactctctggccttctgtggcctgcaatgccaggccatgtgcccctctgccctctagttctccaagtccccagcccggccagtggtgccaggcagcttgccacttgggagggcagaagccaggaat

SEQ ID NO: 1527 - DNA, 3800 bp, Homo sapiens
  source 1..3800: mol_type = unassigned DNA; mol_type = unassigned DNA
gggaaggaggccagggtccgcgcggcttgggcacagtgccctggctcagggaccttcctgggagtgagaaccacatgccctgggaagaaccagcaggtgagaagcccagttgctctcacagtcagaaggcgttccacatggagcctgcccagaagccctgcttcaccactgacatggtgacatgggccctcctctgcatctctgcagagactgtgcgtggggaggctccttcacagcctaggggcatccctcaccgctcgcccgtcagtgtggatgacctgtggctggagaagacacagagaaagaagttgcagaagcaggcccacgtcgaaaggaggctgcacataggggcagtgcacaaagatggagtcaagtgctggagaaagacgatcattacctctccagagtctttgaatctccctagaagaagccatccactctcccagagtgctccaacgggactgaaccacatgggctggccagagcacacaccaggcactgccatgcctgatggagctctggacacagctgtctgcgctgacgaagtggggagcgaggaggacctgtatgatgacctgcacagctccagccaccactacagccaccctggagggggtggggagcagctggctatcaatgagctcatcagcgatggcagtgtggtctgcgctgaagcactctgggaccatgtcaccatggacgaccaggagctgggcttcaaagctggggacgtcatcgaagtgatggatgccaccaacagagagtggtggtggggccgggtcgccgatggcgagggctggtttccagccagcttcgttcggctgagggtgaatcaggacgagcccgcggatgacgacgcccctctggccgggaacagcggagcggaggacggcggggcggaggcgcagagcagcaaggaccagatgcggaccaacgtcatcaacgagatcctcagcactgagcgggactacatcaagcacctgcgcgacatctgcgagggctacgtccggcagtgccgcaagcgcgcagacatgttcagcgaggagcagctgcgtaccatcttcgggaacatcgaggacatctaccgctgccagaaggccttcgtgaaggccctggagcagaggttcaaccgcgagcgcccacacctgagcgagctgggtgcctgcttcctggagcatcaagccgacttccagatctactcggagtactgcaataaccaccccaacgcctgcgtggagctctcccggctcaccaagctcagcaagtacgtgtacttcttcgaggcctgccggctgctgcagaagatgattgacatctccctggatggcttcctgctgactccggtgcagaagatctgcaagtaccctctgcagctggccgagctgctcaaatacacgcacccccagcacagggacttcaaggatgttgaagccgccttgcatgccatgaagaacgtggcccagctcatcaacgagcggaagcggagacttgagaacatcgacaagattgctcagtggcagagctccatagaggactgggagggagaagatctcttggtcaggagctcagaactcatctactcgggggagctgactcgagttacacagcctcaagccaaaagccagcagcgaatgttctttctctttgaccaccagctcatctactgtaagaaggacctgctccgccgcgacgtgttgtactacaagggccggctggacatggacggcctggaggtggtggacctggaggacgggaaggacagagacctccatgtgagcatcaagaacgccttccggctgcaccgtggcgccacaggggacagccacctgctgtgcaccaggaagcccgagcagaagcagcgctggctcaaggcctttgccagggagagggagcaggtgcagctggaccaggagacaggcttctccatcactgaactgcagaggaagcaggccatgctgaatgccagcaagcagcaggtcacagggaagcccaaaggtaggcggacagcagccccacctcctcggctgcccggtccttaccctgctgacatcattcccttctctgaaccacaaagccaagccagctagccaccaggcctgaggggggcccactgccctttgcagctgtttgttcccaaaggttggtaataaggggccactggggaagcctgggtcagtatatggttgacattcttactctcaacaccttggctcccccagatcagggccattggtgacaatgcttgtttccccagggttccttcctgacaggcatctggggttggtgtagggatggagctgctttccccatttctacagagagccatgcccctgaaacatcacatgcctttgcacaggccacccccctcttcaggctgctgcaggaggccaggcccaggccagagaccccaggcagcctgagctcttggatgtggtcagctctccaggagcaagtcctgtgtggcaaaactgcctcctacggcggctctgaagcagagccctgggacggaccccatgctgtccccaacagctggggtggcactctgccctgggcacccatgaccctctgctgtctctccctgttcagctgttggccggccctgctacctgacgcgccagaagcacccagccctgcccagcaaccggccccagcagcaggtcctggtgctggcggagcccaggcgcaagccatctaccttctggcacagcatcagccggctggcacccttccgcaagtgaactggtccctgcctgacagcacctgctgggccttcctgccagtggcccccagtttttcttccccgaggcccactcggcctggccttcctctgcctgcaagtgagcagggatgggctggggagttgcttgtgccaccaagacgtgccaggtctgtactcctgttgtctttttccctgctcctggtgccctgaagagaccagcaagggggcagaccccgcactcgccacaccgccgctgcagcttgggccccatccgccctctggacctgtgtagggcctcactgctggagcggggaaaccgcagctcagcccaggcccagctggggagaaggcgctacctgcgtgggaccctcttctctggaaacctaatcctcctttcatttcctctgggcaggactctctggccttctgtggcctgcaatgccaggccatgtgcccctctgccctctagttctccaagtccccagcccggccagtggtgccaggcagcttgccacttgggagggcagaagccaggaattccacacccttgtgttgcgcccggagcccgcccttcgcctcccagcccctcaagacaccgctggctgctggacaccctcttcacttgtgtgtgtgtgtgtagcggaaaaggacaagacggtgcagtcggctgcatactcccagtcgggagtgtggtcagtctgcctgctgctgtgcggtagctccagaaccacctcgttcctggttttgtttggattttggcatcttgtttttctaacaacaaacaatggagaaaaagaattgattcttagtgacacagaagattgccttacgctcgtgagcgtgagaagccataagagagagaccgaattctgtggctcagcacacaggactgacccacagcccaggcagcgggtgtgtggagatggcgccctgtcctgccaaggggcgccaggagcagagccagggcctggcgagctggcgtggagcccacaggattcagcagcatggacagtcactcttgcactattccttctccaagccagaaaccacatttaatttcataaataaatttatgaaaagt

SEQ ID NO: 1528 - DNA, 2102 bp, Homo sapiens
  source 1..2102: mol_type = unassigned DNA; mol_type = unassigned DNA
gctccaggcctgcgtgcgcgcgtgcgtgagcgcgtgccgaccgggcccgcgacccgcactggggtcgccgttgaggctcagcgcccgccgggcggccggtagtgggcagcgagctgacgcgctgcgctctgccgggagggcgcctggcctcgctccgagccgcgcgcgccccgcgcctgccaagggtcccagctgccgcggccacagagcccgagcggggggtcggctgagagcctccttaacggagccccatgatgtcagccggcccgcacgcccctcgccctccgactgcgaccccggcccgggctcgcgcgccccgtcccccggcagccccgcggccgccgcaccgccgcccccggcccagccttccccgagcctgtggctggagctcgggcccgcctgcgtgcgggcgcagcaatgccccagcgagtcaagcgggcagacgagtggcgatctcggcactagcagcagcagcagcgccgggctgtccccgggctccgactcggacagcagcggcgtggtgtgtggcggccgcggaggcaacgggggcatgcgcggcgccgtgtcccgctcctggagcctggagagcctgcgctcggccaccgccgccatgcctgatggagctctggacacagctgtctgcgctgacgaagtggggagcgaggaggacctgtatgatgacctgcacagctccagccaccactacagccaccctggagggggtggggagcagctggctatcaatgagctcatcagcgatggcagtgtggtctgcgctgaagcactctgggaccatgtcaccatggacgaccaggagctgggcttcaaagctggggacgtcatcgaagtgatggatgccaccaacagagagtggtggtggggccgggtcgccgatggcgagggctggtttccagccagcttcgttcggctgagggtgaatcaggacgagcccgcggatgacgacgcccctctggccgggaacagcggagcggaggacggcggggcggaggcgcagagcagcaaggaccagatgcggaccaacgtcatcaacgagatcctcagcactgagcgggactacatcaagcacctgcgcgacatctgcgagggctacgtccggcagtgccgcaagcgcgcagacatgttcagcgaggagcagctgcgtaccatcttcgggaacatcgaggacatctaccgctgccagaaggccttcgtgaaggccctggagcagaggttcaaccgcgagcgcccacacctgagcgagctgggtgcctgcttcctggagcatcaagccgacttccagatctactcggagtactgcaataaccaccccaacgcctgcgtggagctctcccggctcaccaagctcagcaagtacgtgtacttcttcgaggcctgccggctgctgcagaagatgattgacatctccctggatggcttcctgctgactccggtgcagaagatctgcaagtaccctctgcagctggccgagctgctcaaatacacgcacccccagcacagggacttcaaggatgttgaagccgccttgcatgccatgaagaacgtggcccagctcatcaacgagcggaagcggagacttgagaacatcgacaagattgctcagtggcagagctccatagaggactgggagggagaagatctcttggtcaggagctcagaactcatctactcgggggagctgactcgagttacacagcctcaagccaaaagccagcagcgaatgttctttctctttgaccaccagctcatctactgtaagaaggacctgctccgccgcgacgtgttgtactacaagggccggctggacatggacggcctggaggtggtggacctggaggacgggaaggacagagacctccatgtgagcatcaagaacgccttccggctgcaccgtggcgccacaggggacagccacctgctgtgcaccaggaagcccgagcagaagcagcgctggctcaaggcctttgccagggagagggagcaggtgcagctggaccaggagacaggcttctccatcactgaactgcagaggaagcaggccatgctgaatgccagcaagcagcaggtcacagggaagcccaaag

SEQ ID NO: 1529 - DNA, 1872 bp, Homo sapiens
  source 1..1872: mol_type = unassigned DNA; mol_type = unassigned DNA
tagagagaggaaatgaggccagatgggcagcaagctttggatgctgtggtaaggagttttgactgtcactctgaagcagctctcaggcagaggaatgatgtgatttattgtagtttaccaaggaccgctcagggtattgtgcagagggaagaccagctggaggttcttgtgtcactccgtgaagtgtgggggcggcggaggggcagagatgggacctgcactggagccatgcctgatggagctctggacacagctgtctgcgctgacgaagtggggagcgaggaggacctgtatgatgacctgcacagctccagccaccactacagccaccctggagggggtggggagcagctggctatcaatgagctcatcagcgatggcagtgtggtctgcgctgaagcactctgggaccatgtcaccatggacgaccaggagctgggcttcaaagctggggacgtcatcgaagtgatggatgccaccaacagagagtggtggtggggccgggtcgccgatggcgagggctggtttccagccagcttcgttcggctgagggtgaatcaggacgagcccgcggatgacgacgcccctctggccgggaacagcggagcggaggacggcggggcggaggcgcagagcagcaaggaccagatgcggaccaacgtcatcaacgagatcctcagcactgagcgggactacatcaagcacctgcgcgacatctgcgagggctacgtccggcagtgccgcaagcgcgcagacatgttcagcgaggagcagctgcgtaccatcttcgggaacatcgaggacatctaccgctgccagaaggccttcgtgaaggccctggagcagaggttcaaccgcgagcgcccacacctgagcgagctgggtgcctgcttcctggagcatcaagccgacttccagatctactcggagtactgcaataaccaccccaacgcctgcgtggagctctcccggctcaccaagctcagcaagtacgtgtacttcttcgaggcctgccggctgctgcagaagatgattgacatctccctggatggcttcctgctgactccggtgcagaagatctgcaagtaccctctgcagctggccgagctgctcaaatacacgcacccccagcacagggacttcaaggatgttgaagccgccttgcatgccatgaagaacgtggcccagctcatcaacgagcggaagcggagacttgagaacatcgacaagattgctcagtggcagagctccatagaggactgggagggagaagatctcttggtcaggagctcagaactcatctactcgggggagctgactcgagttacacagcctcaagccaaaagccagcagcgaatgttctttctctttgaccaccagctcatctactgtaagaaggacctgctccgccgcgacgtgttgtactacaagggccggctggacatggacggcctggaggtggtggacctggaggacgggaaggacagagacctccatgtgagcatcaagaacgccttccggctgcaccgtggcgccacaggggacagccacctgctgtgcaccaggaagcccgagcagaagcagcgctggctcaaggcctttgccagggagagggagcaggtgcagctggaccaggagacaggcttctccatcactgaactgcagaggaagcaggccatgctgaatgccagcaagcagcaggtcacagggaagcccaaagctgttggccggccctgctacctgacgcgccagaagcacccagccctgcccagcaaccggccccagcagcaggtcctggtgctggcggagcccaggcgcaagccatctaccttctggcacagcatcagccggctggcacccttccgcaagtga

SEQ ID NO: 1530 - DNA, 840 bp, Homo sapiens
  source 1..840: mol_type = unassigned DNA; mol_type = unassigned DNA
agggcttggggcctgggaggcgccgcgcgcacggcgccggcttcgcgggaggagccccaggcccgcgagcgcaggcgccccgcctctccccgggcgctgcgggccaccggctcggccctgtgcggcgggatctcggggccgcacggagcgggaggccgggcgccatggcgagggccccgcagccccggcgcggccccgcggcgcccgggaacgccctgcgcgccctgctgcgctgcaacctgccccccggcgcccagcgcgtggtggtctccgccgtgctggcgctcctggttctcatcaacgtcgtactgatcttcctgctggccttccgctgagcggccgcgcagggcgccgcgccgggctcatcagcgatggcagtgtggtctgcgctgaagcactctgggaccatgtcaccatggacgaccaggagctgggcttcaaagctggggacgtcatcgaagtgatggatgccaccaacagagagtggtggtggggccgggtcgccgatggcgagggctggtttccagccagcttcgttcggccccgggagtgggaaccatgacttacacctgaagaagttgaggcacggtcaagttattagccctggagatagcagagaggggacctggattccatctaagggggtctccagtcttcaaggaaggaatccaggtgcagtctccaaaaggcctggctcagggcgtccaagctgagggccgtccggcggggaggtcccaggccctggtgttcagatgctcctcctgccccagatcccctgggaaactgtccactccgcaccctaagcctttccccaagttgcatgttagccagcgggcgcgc

SEQ ID NO: 1531 - DNA, 901 bp, Homo sapiens
  source 1..901: mol_type = unassigned DNA; mol_type = unassigned DNA
gcgggaggagccccaggcccgcgagcgcaggcgccccgcctctccccgggcgctgcgggccaccggctcggccctgtgcggcgggatctcggggccgcacggagcgggaggccgggcgccatggcgagggccccgcagccccggcgcggccccgcggcgcccgggaacgccctgcgcgccctgctgcgctgcaacctgccccccggcgcccagcgcgtggtggtctccgccgtgctggcgctcctggttctcatcaacgtcgtactgatcttcctgctggccttccgctgagcggccgcgcagggcgccgcgccgggctcatcagcgatggcagtgtggtctgcgctgaagcactctgggaccatgtcaccatggacgaccaggagctgggcttcaaagctggggacgtcatcgaagtgatggatgccaccaacagagagtggtggtggggccgggtcgccgatggcgagggctggtttccagccagcttcgttcggctgagggtgaatcaggacgagcccgcggatgacgacgcccctctggccgggaacagcggagcggaggacggcggggcggaggcgcagagcagcaaggaccagatgcggaccaacgtcatcaacgagatcctcagcactgagcgggactacatcaagcacctgcgcgacatctgcgagggctacgtccggcagtgccgcaagcgcgcagacatgttcagcgaggagcagctgcgtaccatcttcgggaacatcgaggacatctaccgctgccagaaggccttcgtgaaggccctggagcagaggttcaaccgcgagcgcccacacctgagcgagctgggtgcctgcttcctggagcatcaagccgacttccagatctactcggagtactgcaataaccaccccaa

SEQ ID NO: 1532 - DNA, 662 bp, Homo sapiens
  source 1..662: mol_type = unassigned DNA; mol_type = unassigned DNA
gggctgcgggggcgaggggggaggccaaaatggcgcgtctctgcgagtaaccgaggatgcggattcagctggggctccccggctgcttgtctggaaacggagtgcatgtgaccgctgggtgagcgacccgcgcttgcatctgtgtaggttgagtcagctcatcagcgatggcagtgtggtctgcgctgaagcactctgggaccatgtcaccatggacgaccaggagctgggcttcaaagctggggacgtcatcgaagtgatggatgccaccaacagagagtggtggtggggccgggtcgccgatggcgagggctggtttccagccagcttcgttcggctgagggtgaatcaggacgagcccgcggatgacgacgcccctctggccgggaacagcggagcggaggacggcggggcggaggcgcagagcagcaaggaccagatgcggaccaacgtcatcaacgagatcctcagcactgagcgggactacatcaagcacctgcgcgacatctgcgagggctacgtccggcagtgccgcaagcgcgcagacatgttcagcgaggagcagctgcgtaccatcttcgggaacatcgaggacatctaccgctgccagaaggccttcgtgaaggccctggagcagaggttcaaccgcgagcgcccacacc

SEQ ID NO: 1533 - DNA, 3229 bp, Homo sapiens
  source 1..3229: mol_type = unassigned DNA; mol_type = unassigned DNA
gggcgtccaagctgagggccgtccggcggggaggtcccaggccctggtgttcagatgctcctcctgccccagatcccctgggaaactgtccactccgcaccctaagcctttccccaagttgcatgttagccagcgggcgcgccacccatccccctgcttctgcccgctggggctggcaggagcaggcactggttcaggaactgcagcaagcgctccagcctctgtgccgggcacaagcagggtctaggaaggaggccaaatcggtattcggatcacactgacggcggctgcgggcgtcggagtcgtcattcctcggtccaggacttgcgtgggtggcgtggtggggggagctggccggccagtcctcagccctgcgccccgtacaccctgcggggcctccgaggcccggttcccgccgctgcggcgcagggcgcggggcgttgctccgagggatgcggggcactgaccggccacgcatggcctgcagctgagggtgaatcaggacgagcccgcggatgacgacgcccctctggccgggaacagcggagcggaggacggcggggcggaggcgcagagcagcaaggaccagatgcggaccaacgtcatcaacgagatcctcagcactgagcgggactacatcaagcacctgcgcgacatctgcgagggctacgtccggcagtgccgcaagcgcgcagacatgttcagcgaggagcagctgcgtaccatcttcgggaacatcgaggacatctaccgctgccagaaggccttcgtgaaggccctggagcagaggttcaaccgcgagcgcccacacctgagcgagctgggtgcctgcttcctggagcatcaagccgacttccagatctactcggagtactgcaataaccaccccaacgcctgcgtggagctctcccggctcaccaagctcagcaagtacgtgtacttcttcgaggcctgccggctgctgcagaagatgattgacatctccctggatggcttcctgctgactccggtgcagaagatctgcaagtaccctctgcagctggccgagctgctcaaatacacgcacccccagcacaggtaggagggcactgaggcagggaggcagcccacgcctctgcatgcctccagtcagccagtttgagcattagcagtgtgctgggcactgctgcagccctggggcaacacacagaaaactagccctgtcctgatgagctccttgcaatgggggaagaggatgccaacaggatattaagctctgctctgtgcttgccatttatggagaagagaggggctgtgcatctgatagtgaggatgtggtcaaagggcacagccccagaggaaagcagctccacacgtgggggctgcaggggatcctcaccctttctctgtctccagcctgcagcagccttccatctctgttctgccccagggacttcaaggatgttgaagccgccttgcatgccatgaagaacgtggcccagctcatcaacgagcggaagcggagacttgagaacatcgacaagattgctcagtggcagagctccatagaggactgggagggagaagatctcttggtcaggagctcagaactcatctactcgggggagctgactcgagttacacagcctcaagccaaaagccagcagcgaatgttctttctctttgaccaccagctcatctactgtaagaaggacctgctccgccgcgacgtgttgtactacaagggccggctggacatggacggcctggaggtggtggacctggaggacgggaaggacagagacctccatgtgagcatcaagaacgccttccggctgcaccgtggcgccacaggggacagccacctgctgtgcaccaggaagcccgagcagaagcagcgctggctcaaggcctttgccagggagagggagcaggtgcagctggaccaggagacaggcttctccatcactgaactgcagaggaagcaggccatgctgaatgccagcaagcagcaggtcacagggaagcccaaagctgttggccggccctgctacctgacgcgccagaagcacccagccctgcccagcaaccggccccagcagcaggtcctggtgctggcggagcccaggcgcaagccatctaccttctggcacagcatcagccggctggcacccttccgcaagtgaactggtccctgcctgacagcacctgctgggccttcctgccagtggcccccagtttttcttccccgaggcccactcggcctggccttcctctgcctgcaagtgagcagggatgggctggggagttgcttgtgccaccaagacgtgccaggtctgtactcctgttgtctttttccctgctcctggtgccctgaagagaccagcaagggggcagaccccgcactcgccacaccgccgctgcagcttgggccccatccgccctctggacctgtgtagggcctcactgctggagcggggaaaccgcagctcagcccaggcccagctggggagaaggcgctacctgcgtgggaccctcttctctggaaacctaatcctcctttcatttcctctgggcaggactctctggccttctgtggcctgcaatgccaggccatgtgcccctctgccctctagttctccaagtccccagcccggccagtggtgccaggcagcttgccacttgggagggcagaagccaggaattccacacccttgtgttgcgcccggagcccgcccttcgcctcccagcccctcaagacaccgctggctgctggacaccctcttcacttgtgtgtgtgtgtgtagcggaaaaggacaagacggtgcagtcggctgcatactcccagtcgggagtgtggtcagtctgcctgctgctgtgcggtagctccagaaccacctcgttcctggttttgtttggattttggcatcttgtttttctaacaacaaacaatggagaaaaagaattgattcttagtgacacagaagattgccttacgctcgtgagcgtgagaagccataagagagagaccgaattctgtggctcagcacacaggactgacccacagcccaggcagcgggtgtgtggagatggcgccctgtcctgccaaggggcgccaggagcagagccagggcctggcgagctggcgtggagcccacaggattcagcagcatggacagtcactcttgcactattccttctccaagccagaaaccacatttaatttcataaataaatttatgaaaagtaa

SEQ ID NO: 1534 - DNA, 882 bp, Homo sapiens
  source 1..882: mol_type = unassigned DNA; mol_type = unassigned DNA
cgcctgcgtggagctctcccggctcaccaagctcagcaagtacgtgtacttcttcgaggcctgccggctgctgcagaagatgattgacatctccctggatggcttcctgctgactccggtgcagaagatctgcaagtaccctctgcagctggccgagctgctcaaatacacgcacccccagcacagggacttcaaggatgttgaagccgccttgcatgccatgaagaacgtggcccagctcatcaacgagcggaagcggagacttgagaacatcgacaagattgctcagtggcagagctccatagaggactgggagggagaagatctcttggtcaggagctcagaactcatctactcgggggagctgactcgagttacacagcctcaagccaaaagccagcagcgaatgttctttctctttgaccaccagctcatctactgtaagaaggacctgctccgccgcgacgtgttgtactacaagggccggctggacatggacggcctggaggtggtggacctggaggacgggaaggacagagacctccatgtgagcatcaagaacgccttccggctgcaccgtggcgccacaggggacagccacctgctgtgcaccaggaagcccgagcagaagcagcgctggctcaaggcctttgccagggagagggagcaggtgcagctggaccaggagacaggcttctccatcactgaactgcagaggaagcaggccatgctgaatgccagcaagcagcaggtcacagggaagcccaaaggtaggcggacagcagccccacctcctcggctgcccggtccttaccctgctgacatcattcccttctctgaaccacaaagccaagccagctagccaccaggcctgaggggggc

SEQ ID NO: 1535 - DNA, 499 bp, Homo sapiens
  source 1..499: mol_type = unassigned DNA; mol_type = unassigned DNA
caagtacgtgtacttcttcgaggcctgccggctgctgcagaagatgattgacatctccctggatggcttcctgctgactccggtgcagaagatctgcaagtaccctctgcagctggccgagctgctcaaatacacgcacccccagcacagggacttcaaggatgttgaagccgccttgcatgccatgaagaacgtggcccagctcatcaacgagcggaagcggagacttgagaacatcgacaagattgctcagtggcagagctccatagaggactgggagggagaagatctcttggtcaggagctcagaactcatctactcgggggagctgactcgagttacacagcctcaagccaaaagccagcagcgaatgttctttctctttgaccaccagctcatctactgtaagaaggtaccagagctgctctgccctgctgccccaagttgagcaagtggagggaggggagctgagggctgggagcagctgcccagaagacag

SEQ ID NO: 1536 - DNA, 769 bp, Homo sapiens
  source 1..769: mol_type = unassigned DNA; mol_type = unassigned DNA
cagtcagccagtttgagcattagcagtgtgctgggcactgctgcagccctggggcaacacacagaaaactagccctgtcctgatgagctccttgcaatgggggaagaggatgccaacaggatattaagctctgctctgtgcttgccatttatggagaagagaggggctgtgcatctgatagtgaggatgtggtcaaagggcacagccccagaggaaagcagctccacacgtgggggctgcaggggatcctcaccctttctctgtctccagcctgcagcagccttccatctctgttctgccccagggacttcaaggatgttgaagccgccttgcatgccatgaagaacgtggcccagctcatcaacgagcggaagcggagacttgagaacatcgacaagattgctcagtggcagagctccatagaggactgggagggagaagatctcttggtcaggagctcagaactcatctactcgggggagctgactcgagttacacagcctcaagccaaaagccagcagcgaatgttctttctctttgaccaccagctcatctactgtaagaagggccggctggacatggacggcctggaggtggtggacctggaggacgggaaggacagagacctccatgtgagcatcaagaacgccttccggctgcaccgtggcgccacaggggacagccacctgctgtgcaccaggaagcccgagcagaagcagcgctggctcaaggcctttgccagggagagggagcaggtgcagctggacca

SEQ ID NO: 1537 - DNA, 3666 bp, Homo sapiens
  source 1..3666: mol_type = unassigned DNA; mol_type = unassigned DNA
agaaaaaactcagggcaaggttggccttggctcataagaccttttcaaactttattgagtcaatagttctagagaaagagaacacccatgaacgttccccaagttctcccaagggcgagaaggagaagagcaggctgcgccagggttcctggcgggcgtttctgaaaagcaaagatgccggaagccccaaaaagcccaccctagtgagtctgcctctaggacccgaagttctctccccagcagagaccgacagccactgtgaggaacgggcggaggacaaagagggctatgtttttagcgatcactgggcacccccacttgcctccacacctttgtcctccagtttagtttctccagaacacaggaggaaaagtgaaccgaccatcaagtgcacagccacccaggaaggcgacgctaaaccaagatgagcagaaggaagagagcagggaaggaggccagggtccgcgcggcttgggcacagtgccctggctcagggaccttcctgggagtgagaaccacatgccctgggaagaaccagcaggtgagaagcccagttgctctcacagtcagaaggcgttccacatggagcctgcccagaagccctgcttcaccactgacatggtgacatgggccctcctctgcatctctgcagagactgtgcgtggggaggctccttcacagcctaggggcatccctcaccgctcgcccgtcagtgtggatgacctgtggctggagaagacacagagaaagaagttgcagaagcaggcccacgtcgaaaggaggctgcacataggggcagtgcacaaagatggagtcaagtgctggagaaagacgatcattacctctccagagtctttgaatctccctagaagaagccatccactctcccagagtgctccaacgggactgaaccacatgggctggccagagcacacaccaggcactgccatgcctgatggagctctggacacagctgtctgcgctgacgaagtggggagcgaggaggacctgtatgatgacctgcacagctccagccaccactacagccaccctggagggggtggggagcagctggctatcaatgagctcatcagcgatggcagtgtggtctgcgctgaagcactctgggaccatgtcaccatggacgaccaggagctgggcttcaaagctggggacgtcatcgaagtgatggatgccaccaacagagagtggtggtggggccgggtcgccgatggcgagggctggtttccagccagcttcgttcggctgagggtgaatcaggacgagcccgcggatgacgacgcccctctggccgggaacagcggagcggaggacggcggggcggaggcgcagagcagcaaggaccagatgcggaccaacgtcatcaacgagatcctcagcactgagcgggactacatcaagcacctgcgcgacatctgcgagggctacgtccggcagtgccgcaagcgcgcagacatgttcagcgaggagcagctgcgtaccatcttcgggaacatcgaggacatctaccgctgccagaaggccttcgtgaaggccctggagcagaggttcaaccgcgagcgcccacacctgagcgagctgggtgcctgcttcctggagcatcaagccgacttccagatctactcggagtactgcaataaccaccccaacgcctgcgtggagctctcccggctcaccaagctcagcaagtacgtgtacttcttcgaggcctgccggctgctgcagaagatgattgacatctccctggatggcttcctgctgactccggtgcagaagatctgcaagtaccctctgcagctggccgagctgctcaaatacacgcacccccagcacagggacttcaaggatgttgaagccgccttgcatgccatgaagaacgtggcccagctcatcaacgagcggaagcggagacttgagaacatcgacaagattgctcagtggcagagctccatagaggactgggagggagaagatctcttggtcaggagctcagaactcatctactcgggggagctgactcgagttacacagcctcaagccaaaagccagcagcgaatgttctttctctttgaccaccagctcatctactgtaagaaggacctgctccgccgcgacgtgttgtactacaagggccggctggacatggacggcctggaggtggtggacctggaggacgggaaggacagagacctccatgtgagcatcaagaacgccttccggctgcaccgtggcgccacaggggacagccacctgctgtgcaccaggaagcccgagcagaagcagcgctggctcaaggcctttgccagggagagggagcaggtgcagctggaccaggagacaggcttctccatcactgaactgcagaggaagcaggccatgctgaatgccagcaagcagcaggtcacagggaagcccaaagctgttggccggccctgctacctgacgcgccagaagcacccagccctgcccagcaaccggccccagcagcaggtcctggtgctggcggagcccaggcgcaagccatctaccttctggcacagcatcagccggctggcacccttccgcaagtgaactggtccctgcctgacagcacctgctgggccttcctgccagtggcccccagtttttcttccccgaggcccactcggcctggccttcctctgcctgcaagtgagcagggatgggctggggagttgcttgtgccaccaagacgtgccaggtctgtactcctgttgtctttttccctgctcctggtgccctgaagagaccagcaagggggcagaccccgcactcgccacaccgccgctgcagcttgggccccatccgccctctggacctgtgtagggcctcactgctggagcggggaaaccgcagctcagcccaggcccagctggggagaaggcgctacctgcgtgggaccctcttctctggaaacctaatcctcctttcatttcctctgggcaggactctctggccttctgtggcctgcaatgccaggccatgtgcccctctgccctctagttctccaagtccccagcccggccagtggtgccaggcagcttgccacttgggagggcagaagccaggaattccacacccttgtgttgcgcccggagcccgcccttcgcctcccagcccctcaagacaccgctggctgctggacaccctcttcacttgtgtgtgtgtgtgtagcggaaaaggacaagacggtgcagtcggctgcatactcccagtcgggagtgtggtcagtctgcctgctgctgtgcggtagctccagaaccacctcgttcctggttttgtttggattttggcatcttgtttttctaacaacaaacaatggagaaaaagaattgattcttagtgacacagaagattgccttacgctcgtgagcgtgagaagccataagagagagaccgaattctgtggctcagcacacaggactgacccacagcccaggcagcgggtgtgtggagatggcgccctgtcctgccaaggggcgccaggagcagagccagggcctggcgagctggcgtggagcccacaggattcagcagcatggacagtcactcttgcactattccttctccaagccagaaaccacatttaatttcataaataaatttatgaaaagtaacctggctgct

SEQ ID NO: 1538 - DNA, 3828 bp, Homo sapiens
  source 1..3828: mol_type = unassigned DNA; mol_type = unassigned DNA
acgctaaaccaagatgagcagaaggaagagagcagggaaggaggccagggtccgcgcggcttgggcacagtgccctggctcagggaccttcctgggagtgagaaccacatgccctgggaagaaccagcaggtgagaagcccagttgctctcacagtcagaaggcgttccacatggagcctgcccagaagccctgcttcaccactgacatggtgacatgggccctcctctgcatctctgcagagactgtgcgtggggaggctccttcacagcctaggggcatccctcaccgctcgcccgtcagtgtggatgacctgtggctggagaagacacagagaaagaagttgcagaagcaggcccacgtcgaaaggaggctgcacataggggcagtgcacaaagatggagtcaagtgctggagaaagacgatcattacctctccagagtctttgaatctccctagaagaagccatccactctcccagagtgctccaacgggactgaaccacatgggctggccagagcacacaccaggcactgccatgcctgatggagctctggacacagctgtctgcgctgacgaagtggggagcgaggaggacctgtatgatgacctgcacagctccagccaccactacagccaccctggagggggtggggagcagctggctatcaatgagctcatcagcgatggcagtgtggtctgcgctgaagcactctgggaccatgtcaccatggacgaccaggagctgggcttcaaagctggggacgtcatcgaagtgatggatgccaccaacagagagtggtggtggggccgggtcgccgatggcgagggctggtttccagccagcttcgttcggctgagggtgaatcaggacgagcccgcggatgacgacgcccctctggccgggaacagcggagcggaggacggcggggcggaggcgcagagcagcaaggaccagatgcggaccaacgtcatcaacgagatcctcagcactgagcgggactacatcaagcacctgcgcgacatctgcgagggctacgtccggcagtgccgcaagcgcgcagacatgttcagcgaggagcagctgcgtaccatcttcgggaacatcgaggacatctaccgctgccagaaggccttcgtgaaggccctggagcagaggttcaaccgcgagcgcccacacctgagcgagctgggtgcctgcttcctggagcatcaagccgacttccagatctactcggagtactgcaataaccaccccaacgcctgcgtggagctctcccggctcaccaagctcagcaagtacgtgtacttcttcgaggcctgccggctgctgcagaagatgattgacatctccctggatggcttcctgctgactccggtgcagaagatctgcaagtaccctctgcagctggccgagctgctcaaatacacgcacccccagcacagggacttcaaggatgttgaagccgccttgcatgccatgaagaacgtggcccagctcatcaacgagcggaagcggagacttgagaacatcgacaagattgctcagtggcagagctccatagaggactgggagggagaagatctcttggtcaggagctcagaactcatctactcgggggagctgactcgagttacacagcctcaagccaaaagccagcagcgaatgttctttctctttgaccaccagctcatctactgtaagaaggacctgctccgccgcgacgtgttgtactacaagggccggctggacatggacggcctggaggtggtggacctggaggacgggaaggacagagacctccatgtgagcatcaagaacgccttccggctgcaccgtggcgccacaggggacagccacctgctgtgcaccaggaagcccgagcagaagcagcgctggctcaaggcctttgccagggagagggagcaggtgcagctggaccaggagacaggcttctccatcactgaactgcagaggaagcaggccatgctgaatgccagcaagcagcaggtcacagggaagcccaaaggtaggcggacagcagccccacctcctcggctgcccggtccttaccctgctgacatcattcccttctctgaaccacaaagccaagccagctagccaccaggcctgaggggggcccactgccctttgcagctgtttgttcccaaaggttggtaataaggggccactggggaagcctgggtcagtatatggttgacattcttactctcaacaccttggctcccccagatcagggccattggtgacaatgcttgtttccccagggttccttcctgacaggcatctggggttggtgtagggatggagctgctttccccatttctacagagagccatgcccctgaaacatcacatgcctttgcacaggccacccccctcttcaggctgctgcaggaggccaggcccaggccagagaccccaggcagcctgagctcttggatgtggtcagctctccaggagcaagtcctgtgtggcaaaactgcctcctacggcggctctgaagcagagccctgggacggaccccatgctgtccccaacagctggggtggcactctgccctgggcacccatgaccctctgctgtctctccctgttcagctgttggccggccctgctacctgacgcgccagaagcacccagccctgcccagcaaccggccccagcagcaggtcctggtgctggcggagcccaggcgcaagccatctaccttctggcacagcatcagccggctggcacccttccgcaagtgaactggtccctgcctgacagcacctgctgggccttcctgccagtggcccccagtttttcttccccgaggcccactcggcctggccttcctctgcctgcaagtgagcagggatgggctggggagttgcttgtgccaccaagacgtgccaggtctgtactcctgttgtctttttccctgctcctggtgccctgaagagaccagcaagggggcagaccccgcactcgccacaccgccgctgcagcttgggccccatccgccctctggacctgtgtagggcctcactgctggagcggggaaaccgcagctcagcccaggcccagctggggagaaggcgctacctgcgtgggaccctcttctctggaaacctaatcctcctttcatttcctctgggcaggactctctggccttctgtggcctgcaatgccaggccatgtgcccctctgccctctagttctccaagtccccagcccggccagtggtgccaggcagcttgccacttgggagggcagaagccaggaattccacacccttgtgttgcgcccggagcccgcccttcgcctcccagcccctcaagacaccgctggctgctggacaccctcttcacttgtgtgtgtgtgtgtagcggaaaaggacaagacggtgcagtcggctgcatactcccagtcgggagtgtggtcagtctgcctgctgctgtgcggtagctccagaaccacctcgttcctggttttgtttggattttggcatcttgtttttctaacaacaaacaatggagaaaaagaattgattcttagtgacacagaagattgccttacgctcgtgagcgtgagaagccataagagagagaccgaattctgtggctcagcacacaggactgacccacagcccaggcagcgggtgtgtggagatggcgccctgtcctgccaaggggcgccaggagcagagccagggcctggcgagctggcgtggagcccacaggattcagcagcatggacagtcactcttgcactattccttctccaagccagaaaccacatttaatttcataaataaatttatg

SEQ ID NO: 1539 - DNA, 3486 bp, Homo sapiens
  source 1..3486: mol_type = unassigned DNA; mol_type = unassigned DNA
agaaaaaactcagggcaaggttggccttggctcataagaccttttcaaactttattgagtcaatagttctagagaaagagaacacccatgaacgttccccaagttctcccaagggcgagaaggagaagagcaggctgcgccagggttcctggcgggcgtttctgaaaagcaaagatgccggaagccccaaaaagcccaccctagtgagtctgcctctaggacccgaagttctctccccagcagagaccgacagccactgtgaggaacgggcggaggacaaagagggctatgtttttagcgatcactgggcacccccacttgcctccacacctttgtcctccagtttagtttctccagaacacaggaggaaaagtgaaccgaccatcaagtgcacagccacccaggaaggcgacgctaaaccaagatgagcagaaggaagagagcagggaaggaggccagggtccgcgcggcttgggcacagtgccctggctcagggaccttcctgggagtgagaaccacatgccctgggaagaaccagcaggtgagaagcccagttgctctcacagtcagaaggcgttccacatggagcctgcccagaagccctgcttcaccactgacatggtgacatgggccctcctctgcatctctgcagagactgtgcgtggggaggctccttcacagcctaggggcatccctcaccgctcgcccgtcagtgtggatgacctgtggctggagaagacacagagaaagaagttgcagaagcaggcccacgtcgaaaggaggctgcacataggggcagtgcacaaagatggagtcaagtgctggagaaagacgatcattacctctccagagtctttgaatctccctagaagaagccatccactctcccagagtgctccaacgggactgaaccacatgggctggccagagcacacaccaggcactgccatgcctgatggagctctggacacagctgtctgcgctgacgaagtggggagcgaggaggacctgtatgatgacctgcacagctccagccaccactacagccaccctggagggggtggggagcagctggctatcaatgagctcatcagcgatggcagtgtggtctgcgctgaagcactctgggaccatgtcaccatggacgaccaggagctgggcttcaaagctggggacgtcatcgaagtgatggatgccaccaacagagagtggtggtggggccgggtcgccgatggcgagggctggtttccagccagcttcgttcggctgagggtgaatcaggacgagcccgcggatgacgacgcccctctggccgggaacagcggagcggaggacggcggggcggaggcgcagagcagcaaggaccagatgcggaccaacgtcatcaacgagatcctcagcactgagcgggactacatcaagcacctgcgcgacatctgcgagcaagccgacttccagatctactcggagtactgcaataaccaccccaacgcctgcgtggagctctcccggctcaccaagctcagcaagtacgtgtacttcttcgaggcctgccggctgctgcagaagatgattgacatctccctggatggcttcctgctgactccggtgcagaagatctgcaagtaccctctgcagctggccgagctgctcaaatacacgcacccccagcacagggacttcaaggatgttgaagccgccttgcatgccatgaagaacgtggcccagctcatcaacgagcggaagcggagacttgagaacatcgacaagattgctcagtggcagagctccatagaggactgggagggagaagatctcttggtcaggagctcagaactcatctactcgggggagctgactcgagttacacagcctcaagccaaaagccagcagcgaatgttctttctctttgaccaccagctcatctactgtaagaaggacctgctccgccgcgacgtgttgtactacaagggccggctggacatggacggcctggaggtggtggacctggaggacgggaaggacagagacctccatgtgagcatcaagaacgccttccggctgcaccgtggcgccacaggggacagccacctgctgtgcaccaggaagcccgagcagaagcagcgctggctcaaggcctttgccagggagagggagcaggtgcagctggaccaggagacaggcttctccatcactgaactgcagaggaagcaggccatgctgaatgccagcaagcagcaggtcacagggaagcccaaagctgttggccggccctgctacctgacgcgccagaagcacccagccctgcccagcaaccggccccagcagcaggtcctggtgctggcggagcccaggcgcaagccatctaccttctggcacagcatcagccggctggcacccttccgcaagtgaactggtccctgcctgacagcacctgctgggccttcctgccagtggcccccagtttttcttccccgaggcccactcggcctggccttcctctgcctgcaagtgagcagggatgggctggggagttgcttgtgccaccaagacgtgccaggtctgtactcctgttgtctttttccctgctcctggtgccctgaagagaccagcaagggggcagaccccgcactcgccacaccgccgctgcagcttgggccccatccgccctctggacctgtgtagggcctcactgctggagcggggaaaccgcagctcagcccaggcccagctggggagaaggcgctacctgcgtgggaccctcttctctggaaacctaatcctcctttcatttcctctgggcaggactctctggccttctgtggcctgcaatgccaggccatgtgcccctctgccctctagttctccaagtccccagcccggccagtggtgccaggcagcttgccacttgggagggcagaagccaggaattccacacccttgtgttgcgcccggagcccgcccttcgcctcccagcccctcaagacaccgctggctgctggacaccctcttcacttgtgtgtgtgtgtgtagcggaaaaggacaagacggtgcagtcggctgcatactcccagtcgggagtgtggtcagtctgcctgctgctgtgcggtagctccagaaccacctcgttcctggttttgtttggattttggcatcttgtttttctaacaacaaacaatggagaaaaagaattgattcttagtgacacagaagattgccttacgctcgtgagcgtgagaagccataagagagagaccgaattctgtggctcagcacacaggactgacccacagcccaggcagcgggtgtgtggagatggcgccctgtcctgccaaggggcgccaggagcagagccagggcctggcgagctggcgtggagcccacaggattcagcagcatggacagtcactcttgcactattccttctccaagccagaaaccacatttaatttcataaataaatttatgaaaagtaacctggctgct

SEQ ID NO: 1540 - DNA, 2172 bp, Homo sapiens
  source 1..2172: mol_type = unassigned DNA; mol_type = unassigned DNA
agaaaaaactcagggcaaggttggccttggctcataagaccttttcaaactttattgagtcaatagttctagagaaagagaacacccatgaacgttccccaagttctcccaagggcgagaaggagaagagcaggctgcgccagggttcctggcgggcgtttctgaaaagcaaagatgccggaagccccaaaaagcccaccctagtgagtctgcctctaggacccgaagttctctccccagcagagaccgacagccactgtgaggaacgggcggaggacaaagagggctatgtttttagcgatcactgggcacccccacttgcctccacacctttgtcctccagtttagtttctccagaacacaggaggaaaagtgaaccgaccatcaagtgcacagccacccaggaaggcgacgctaaaccaagatgagcagaaggaagagagcagggaaggaggccagggtccgcgcggcttgggcacagtgccctggctcagggaccttcctgggagtgagaaccacatgccctgggaagaaccagcaggtgagaagcccagttgctctcacagtcagaaggcgttccacatggagcctgcccagaagccctgcttcaccactgacatggtgacatgggccctcctctgcatctctgcagagactgtgcgtggggaggctccttcacagcctaggggcatccctcaccgctcgcccgtcagtgtggatgacctgtggctggagaagacacagagaaagaagttgcagaagcaggcccacgtcgaaaggaggctgcacataggggcagtgcacaaagatggagtcaagtgctggagaaagacgatcattacctctccagagtctttgaatctccctagaagaagccatccactctcccagagtgctccaacgggactgaaccacatgggctggccagagcacacaccaggcactgctgttggccggccctgctacctgacgcgccagaagcacccagccctgcccagcaaccggccccagcagcaggtcctggtgctggcggagcccaggcgcaagccatctaccttctggcacagcatcagccggctggcacccttccgcaagtgaactggtccctgcctgacagcacctgctgggccttcctgccagtggcccccagtttttcttccccgaggcccactcggcctggccttcctctgcctgcaagtgagcagggatgggctggggagttgcttgtgccaccaagacgtgccaggtctgtactcctgttgtctttttccctgctcctggtgccctgaagagaccagcaagggggcagaccccgcactcgccacaccgccgctgcagcttgggccccatccgccctctggacctgtgtagggcctcactgctggagcggggaaaccgcagctcagcccaggcccagctggggagaaggcgctacctgcgtgggaccctcttctctggaaacctaatcctcctttcatttcctctgggcaggactctctggccttctgtggcctgcaatgccaggccatgtgcccctctgccctctagttctccaagtccccagcccggccagtggtgccaggcagcttgccacttgggagggcagaagccaggaattccacacccttgtgttgcgcccggagcccgcccttcgcctcccagcccctcaagacaccgctggctgctggacaccctcttcacttgtgtgtgtgtgtgtagcggaaaaggacaagacggtgcagtcggctgcatactcccagtcgggagtgtggtcagtctgcctgctgctgtgcggtagctccagaaccacctcgttcctggttttgtttggattttggcatcttgtttttctaacaacaaacaatggagaaaaagaattgattcttagtgacacagaagattgccttacgctcgtgagcgtgagaagccataagagagagaccgaattctgtggctcagcacacaggactgacccacagcccaggcagcgggtgtgtggagatggcgccctgtcctgccaaggggcgccaggagcagagccagggcctggcgagctggcgtggagcccacaggattcagcagcatggacagtcactcttgcactattccttctccaagccagaaaccacatttaatttcataaataaatttatgaaaagtaacctggctgct

SEQ ID NO: 1541 - DNA, 4764 bp, Homo sapiens
  source 1..4764: mol_type = unassigned DNA; mol_type = unassigned DNA
agtttcgccctggtggcggccgcgctcagggcagggtcccagctccggctgggttgatctgttcccgcagccttggcacaggcttgcccgcccgctcgccggccccgtgactcgggagggcgaacggcttccaggaggcggcggcggcgcggctggagtgagggagcagctggaggacaggcgggcagcggccgagccagatatttgatcctgatgacctttattcaggggtcaatttctccaaggtactgagtactcttttagctgtcaacaaagcaacagaagatcagctatcagaaagaccatgtggacgttcctcttctcttagtgctgctaatacttctcagacaaacccacagggagcagtttctagcacagtttcagggctgcaaaggcagtcaaagacagtggagatgacggaaaatggaagtcatcagttgatagtaaaagcaagattcaactttaagcagactaatgaggatgaactgtcagtttgtaagggggacatcatttacgtcacacgagttgaagaaggaggctggtgggaaggcacattaaatgggagaacaggctggttccccagtaattatgtccgtgaaattaaatccagtgagagacctctctccccaaaagccgtcaaaggatttgaaactgctccacttaccaagaattattatactgtggtgttacagaacatcctggacactgaaaaagaatatgctaaagaacttcagtctcttcttgttacttacttaagacccctgcagtccaataacaatctgagtactgtggaggttacatctttactgggaaacttcgaggaagtatgcacatttcaacagacactctgccaagccttggaagaatgttcaaagtttccagaaaaccagcacaaagtaggaggttgtctactgagtctcatgcctcattttaaatctatgtatctggcttactgtgcaaaccatccttcagctgtaaatgtgctcactcagcacagtgatgagttggaacaattcatggaaaatcaaggtgcatcgagcccaggtatcctcattttaacaacaaacctcagcaaaccattcatgcgactggagaaatatgttactctcttgcaagagttagaacggcatatggaggatactcatccagatcatcaggatattctgaaagcaatcgtagcattcaaaactctcatggggcaatgtcaagatctgaggaagagaaaacagctggagttacagatactgtccgaacctattcaggcatgggaaggagaagatattaaaaacttgggaaatgtgatttttatgtcacaagtaatggtgcagtatggagcatgtgaggaaaaagaggagcggtaccttatgttattttcaaatgtcctgataatgttatctgcaagtcctcggatgagtggctttatctatcagggaaaaataccaatagcaggaacggtggtgactagattagatgaaattgaagggaatgactgcacatttgaaatcactggtaacacagtggagagaattgtggtccattgtaacaacaaccaggacttccaggaatggttggagcagctgaacagactgatcagaggacctgcctcttgcagttcattatccaaaacctcatcgtcatcatgtagtgctcattcttcttttagctctaccggacagccccgaggacccttggagcctcctcaaattataaaaccgtggagtttaagttgtctacgacctgcacctccacttagaccatcagcagcactaggttataaagagaggatgtcttatatcttaaaggagtctagtaaaagccctaaaacgatgaagaaatttcttcataaaaggaagactgagagaaaaccatcggaggaggaatatgtgattaggaaaagtacagctgctctggaagaggatgctcaaatccttaaagtgatcgaagcctactgcaccagcgcaaattttcaacaaggccatggctcaagtactcgaaaagattccattccacaagtcctactccctgaggaagagaaactcatcattgaagaaaccagaagcaacggccagaccatcatggaagaaaagagccttgttgatactgtttacgccttgaaggacgaggtcagagaactgaagcaggaaaataaaagaatgaagcaatgcctggaagaagaactgaaatcaagaagggacctagaaaagctggtgcggaggcttttgaagcaaacagatgagtgtattcgaggcgagtccagtagcaagacctcaattcttccataaccatcactgtgccactgggtggagtgtgccttcagggcatcttgaaatgtcccgctgaatgatttgactcagtttgctcacttctttggcttttgttttgtgtttgagtctctctctctctctccctctctcttctctttctctccccgctgtgtgcatatgtgtgtgcgtgcacgtgcgcgcttgggcatttgctgttgtttggttattggttggttgttcattttttttttcaacaggtgaaaaagcaggaagtggtggtagagatggcctcagagtcttttccattcagtaagaaagagaaagggaatgcaggccagttacttaaaaggtcttcagattgccttcagttcacagtgcctctgcaacagccattgccctcaggtcacattctttgggctggctgcccttgcaaagcagctggccaaggcttattaaatgtgaacccaacttttccccagggctttcctgtacctgcaagcctcttagtacttaatttaccgaaggcaaatcttccagactatggcttgagtaggatgaaagacaaacacatctgcccaatgatccagctgcccttccttagaccatcacatgcctcccctcaatcacaggttttaaaattactgccctatgttgtctataagaccaagaaaactgtagtacccttattccttttgtgtcatgtaaattgtaactcaggggggcagaagctctggtcacccacaccaacaccaaatccatcagcaaattctactggacaatcctcccttttagtagcagagttgaccgccttttcccattgcatgataggtttctttccctcattctgcctagtgtgtaagttttctatttccccagtacttttagccaaccttaccaagtggtgtgtaaactagtatgtatgtgctttgcttactttttaaaaaaatgtagttagactgtgaggagttactttatgtacgttgcatattcaaactgtgatgttttatccttcaaaacaatctgcattaagaagatattgtgccctactagacagctttcattcactttattactctctcatatatgctgtgagaagttgtaatattaattggcctctttgggtgggactctaagcagtatttgcagaaatatgcttctggtccaacttgtacatccagaacaaaagggcccctctagtagctgtgtgctggattattcaggactgattaactcaagttgctcattgaatcacatcatccactttatcccagaaactagaactgtgagaaaccaggtttagaagacagtcacagaacagcacacatccaaattcagcgccattgaaagttggcctaaggctcagtgccactcacccctccctccccaaaagacaagagaaatttggccagatggggaaggtcactggaaattgaggccaaagggctgatcagaattgcctttataatatatttgatggatgcctataaatgtgggttttgcaaatattgtttaaaaaccaaacttgaagccaggcatggtggcccacacctgtggtcccagctactcaggaggctgaggtgggaggatcatttgagcccaggaggtcaaggctgcagtgagctgtgatgacaccactgcactccaacctaggtaacagagagacacctctgtctctgaaaaaacaaaacttgaagtttgaaacccccagcttgctgaggagccctttttatttttggtactgagagtctcaaggtcccatagctacatggtacagggctgttgtctgcttgctgcacagcagaaattacaccatccacaggaaatggactatttttgcagtccaacatcagccaaccacacacagccgtgtttggaagctgaagagtaaagaaatttctaggaatggctgttgttctgttttttagcacagccatttagatataacatccttcacttaaaaattaaaaacatcagtactaccaccaccaccaacaacatcaacacagatcttcacatctgcccattctgtggttagtcaatggcttgcaataaatgtgcaaactgcatctataggaaacatttttgtgattacggaatactttagttgattgctgaaaatattgaaaggtcttcattttacagtgatgagtacatatgcatgtttcggggacttggcccttctgatgaggggccctcggtactctggataacgaagcttgtgcagagtggtaaccatgcttacacactaaactataatataaaggaaatgaagccatgttaatctgagagcagtgtcgccatagttgtgttgtttacaatactctataaatgggttcctgttgccctgtaattaaactgctgcccgtagaggcctttcagttccttttctgtccttccccttcttaacacaagctcaaattttctaacttgtttttattttgaagacttttaaaatggacattttcaatacataaaaataaacagtgctttataaaaataa

SEQ ID NO: 1542 - DNA, 4779 bp, Homo sapiens
  source 1..4779: mol_type = unassigned DNA; mol_type = unassigned DNA
gccctgaccctgccacttgtgtgaagtcaggatctcctttcccaggcctcagttgagtcatctgtaaaatgaggagactagagtaggggttgggtaatgtctaatggttgtaatgtctgtttttaacttgcccatttccatcagtttccgctaggcaaagctttgcatatttagctgctcagttggaactagtaggaagaccaaagaggattttgatatttgatcctgatgacctttattcaggggtcaatttctccaaggtactgagtactcttttagctgtcaacaaagcaacagaagatcagctatcagaaagaccatgtggacgttcctcttctcttagtgctgctaatacttctcagacaaacccacagggagcagtttctagcacagtttcagggctgcaaaggcagtcaaagacagtggagatgacggaaaatggaagtcatcagttgatagtaaaagcaagattcaactttaagcagactaatgaggatgaactgtcagtttgtaagggggacatcatttacgtcacacgagttgaagaaggaggctggtgggaaggcacattaaatgggagaacaggctggttccccagtaattatgtccgtgaaattaaatccagtgagagacctctctccccaaaagccgtcaaaggatttgaaactgctccacttaccaagaattattatactgtggtgttacagaacatcctggacactgaaaaagaatatgctaaagaacttcagtctcttcttgttacttacttaagacccctgcagtccaataacaatctgagtactgtggaggttacatctttactgggaaacttcgaggaagtatgcacatttcaacagacactctgccaagccttggaagaatgttcaaagtttccagaaaaccagcacaaagtaggaggttgtctactgagtctcatgcctcattttaaatctatgtatctggcttactgtgcaaaccatccttcagctgtaaatgtgctcactcagcacagtgatgagttggaacaattcatggaaaatcaaggtgcatcgagcccaggtatcctcattttaacaacaaacctcagcaaaccattcatgcgactggagaaatatgttactctcttgcaagagttagaacggcatatggaggatactcatccagatcatcaggatattctgaaagcaatcgtagcattcaaaactctcatggggcaatgtcaagatctgaggaagagaaaacagctggagttacagatactgtccgaacctattcaggcatgggaaggagaagatattaaaaacttgggaaatgtgatttttatgtcacaagtaatggtgcagtatggagcatgtgaggaaaaagaggagcggtaccttatgttattttcaaatgtcctgataatgttatctgcaagtcctcggatgagtggctttatctatcagggaaaaataccaatagcaggaacggtggtgactagattagatgaaattgaagggaatgactgcacatttgaaatcactggtaacacagtggagagaattgtggtccattgtaacaacaaccaggacttccaggaatggttggagcagctgaacagactgatcagaggacctgcctcttgcagttcattatccaaaacctcatcgtcatcatgtagtgctcattcttcttttagctctaccggacagccccgaggacccttggagcctcctcaaattataaaaccgtggagtttaagttgtctacgacctgcacctccacttagaccatcagcagcactaggttataaagagaggatgtcttatatcttaaaggagtctagtaaaagccctaaaacgatgaagaaatttcttcataaaaggaagactgagagaaaaccatcggaggaggaatatgtgattaggaaaagtacagctgctctggaagaggatgctcaaatccttaaagtgatcgaagcctactgcaccagcgcaaattttcaacaaggccatggctcaagtactcgaaaagattccattccacaagtcctactccctgaggaagagaaactcatcattgaagaaaccagaagcaacggccagaccatcatggaagaaaagagccttgttgatactgtttacgccttgaaggacgaggtcagagaactgaagcaggaaaataaaagaatgaagcaatgcctggaagaagaactgaaatcaagaagggacctagaaaagctggtgcggaggcttttgaagcaaacagatgagtgtattcgaggcgagtccagtagcaagacctcaattcttccataaccatcactgtgccactgggtggagtgtgccttcagggcatcttgaaatgtcccgctgaatgatttgactcagtttgctcacttctttggcttttgttttgtgtttgagtctctctctctctctccctctctcttctctttctctccccgctgtgtgcatatgtgtgtgcgtgcacgtgcgcgcttgggcatttgctgttgtttggttattggttggttgttcattttttttttcaacaggtgaaaaagcaggaagtggtggtagagatggcctcagagtcttttccattcagtaagaaagagaaagggaatgcaggccagttacttaaaaggtcttcagattgccttcagttcacagtgcctctgcaacagccattgccctcaggtcacattctttgggctggctgcccttgcaaagcagctggccaaggcttattaaatgtgaacccaacttttccccagggctttcctgtacctgcaagcctcttagtacttaatttaccgaaggcaaatcttccagactatggcttgagtaggatgaaagacaaacacatctgcccaatgatccagctgcccttccttagaccatcacatgcctcccctcaatcacaggttttaaaattactgccctatgttgtctataagaccaagaaaactgtagtacccttattccttttgtgtcatgtaaattgtaactcaggggggcagaagctctggtcacccacaccaacaccaaatccatcagcaaattctactggacaatcctcccttttagtagcagagttgaccgccttttcccattgcatgataggtttctttccctcattctgcctagtgtgtaagttttctatttccccagtacttttagccaaccttaccaagtggtgtgtaaactagtatgtatgtgctttgcttactttttaaaaaaatgtagttagactgtgaggagttactttatgtacgttgcatattcaaactgtgatgttttatccttcaaaacaatctgcattaagaagatattgtgccctactagacagctttcattcactttattactctctcatatatgctgtgagaagttgtaatattaattggcctctttgggtgggactctaagcagtatttgcagaaatatgcttctggtccaacttgtacatccagaacaaaagggcccctctagtagctgtgtgctggattattcaggactgattaactcaagttgctcattgaatcacatcatccactttatcccagaaactagaactgtgagaaaccaggtttagaagacagtcacagaacagcacacatccaaattcagcgccattgaaagttggcctaaggctcagtgccactcacccctccctccccaaaagacaagagaaatttggccagatggggaaggtcactggaaattgaggccaaagggctgatcagaattgcctttataatatatttgatggatgcctataaatgtgggttttgcaaatattgtttaaaaaccaaacttgaagccaggcatggtggcccacacctgtggtcccagctactcaggaggctgaggtgggaggatcatttgagcccaggaggtcaaggctgcagtgagctgtgatgacaccactgcactccaacctaggtaacagagagacacctctgtctctgaaaaaacaaaacttgaagtttgaaacccccagcttgctgaggagccctttttatttttggtactgagagtctcaaggtcccatagctacatggtacagggctgttgtctgcttgctgcacagcagaaattacaccatccacaggaaatggactatttttgcagtccaacatcagccaaccacacacagccgtgtttggaagctgaagagtaaagaaatttctaggaatggctgttgttctgttttttagcacagccatttagatataacatccttcacttaaaaattaaaaacatcagtactaccaccaccaccaacaacatcaacacagatcttcacatctgcccattctgtggttagtcaatggcttgcaataaatgtgcaaactgcatctataggaaacatttttgtgattacggaatactttagttgattgctgaaaatattgaaaggtcttcattttacagtgatgagtacatatgcatgtttcggggacttggcccttctgatgaggggccctcggtactctggataacgaagcttgtgcagagtggtaaccatgcttacacactaaactataatataaaggaaatgaagccatgttaatctgagagcagtgtcgccatagttgtgttgtttacaatactctataaatgggttcctgttgccctgtaattaaactgctgcccgtagaggcctttcagttccttttctgtccttccccttcttaacacaagctcaaattttctaacttgtttttattttgaagacttttaaaatggacattttcaatacataaaaataaacagtgctttataaaaataa

SEQ ID NO: 1543 - DNA, 6019 bp, Homo sapiens
  source 1..6019: mol_type = unassigned DNA; mol_type = unassigned DNA
attaaagttggccttatcataaatttcccaatagtatgcctatttcaagtggttctgaaaatgtttgagaatgatgaagatctcttgttatagacagtttttttttcagagcagtattttaagtgcaaagtgtttttttgttgttgttgttgttgggaaaataagaatcttccatattgtagtgtagacagaggacaagtgctcttttgttctcaaacattctattttttcaagtgtattttacccacttatgtgactgagtctgagcctttgctaagggtactgcagctggattatgtagtggaaccaggtccagaaaaagaattgctaaagaatgcaagtaaacaggatgtcagatgttatccttagcctatttccctaaacatagctttttggctgcaaagtaaaatgccattcttctagcttctgcttatacacagtgatggctgacagcaggcataatcttcgtttgcttggcacgttgtcaccatgcaactcaacgtgttttgcaaggaatgatcgtgacacaccatctctgggagatactatgaggacatccggctatttcttggaagaattttctgtctaccttctttgagccctgttgtgccagcacatctccccatgaggctcagatctgtctgacctaagagccagttggcatcgtcctcctaacagaagccagattttcactggggctagactatttattgacagtgttttcccagactggcccatgagtgtctcatttccaaggtcccctgaagtgctggctcacctctgtttcccaaagcacttgcttgcttgtctctcctccctccccagcatccttttcactttcttcccttataacttcttgcactctgtgtgcgtgtgtgtgtatgcgtgtgtgcatgtgcgtttcttctttttttttatcctaacgaatttgttttgcaggttttgaaaaggaaaaaccagcgttatccaggattgttaaattaattcttatctgtttccacatcttggaccgtgatctctgtggttttaaaatcccatattttgagtgggttccgctgttgtttaagaaaagttgctttaaacctttgctctgcaagcacccgaagagaactcataaaaaggaagacaacagcagatgcaatcgcggatgtggcttagtccttgcagctgccccagagtgctgtttggagtgtaccgtcctcagtaatgaatccagaagaacaaatcgtgacatggcttatatctttgggagttttagagtcccctaaaaagaccatctgtgatccggaggagtttttaaagtcctcgctgaaaaatggggtagttctgtgcaaactgatcaacagactcatgcctggctctgtggaaaagttttgtctggatccccaaactgaagctgactgcatcaacaacatcaatgacttcctgaaaggatgtgcaaccctccaagtggaaatatttgatcctgatgacctttattcaggggtcaatttctccaaggtactgagtactcttttagctgtcaacaaagcaacagaagatcagctatcagaaagaccatgtggacgttcctcttctcttagtgctgctaatacttctcagacaaacccacagggagcagtttctagcacagtttcagggctgcaaaggcagtcaaagacagtggagatgacggaaaatggaagtcatcagttgatagtaaaagcaagattcaactttaagcagactaatgaggatgaactgtcagtttgtaagggggacatcatttacgtcacacgagttgaagaaggaggctggtgggaaggcacattaaatgggagaacaggctggttccccagtaattatgtccgtgaaattaaatccagtgagagacctctctccccaaaagccgtcaaaggatttgaaactgctccacttaccaagaattattatactgtggtgttacagaacatcctggacactgaaaaagaatatgctaaagaacttcagtctcttcttgttacttacttaagacccctgcagtccaataacaatctgagtactgtggaggttacatctttactgggaaacttcgaggaagtatgcacatttcaacagacactctgccaagccttggaagaatgttcaaagtttccagaaaaccagcacaaagtaggaggttgtctactgagtctcatgcctcattttaaatctatgtatctggcttactgtgcaaaccatccttcagctgtaaatgtgctcactcagcacagtgatgagttggaacaattcatggaaaatcaaggtgcatcgagcccaggtatcctcattttaacaacaaacctcagcaaaccattcatgcgactggagaaatatgttactctcttgcaagagttagaacggcatatggaggatactcatccagatcatcaggatattctgaaagcaatcgtagcattcaaaactctcatggggcaatgtcaagatctgaggaagagaaaacagctggagttacagatactgtccgaacctattcaggcatgggaaggagaagatattaaaaacttgggaaatgtgatttttatgtcacaagtaatggtgcagtatggagcatgtgaggaaaaagaggagcggtaccttatgttattttcaaatgtcctgataatgttatctgcaagtcctcggatgagtggctttatctatcagggaaaaataccaatagcaggaacggtggtgactagattagatgaaattgaagggaatgactgcacatttgaaatcactggtaacacagtggagagaattgtggtccattgtaacaacaaccaggacttccaggaatggttggagcagctgaacagactgatcagaggacctgcctcttgcagttcattatccaaaacctcatcgtcatcatgtagtgctcattcttcttttagctctaccggacagccccgaggacccttggagcctcctcaaattataaaaccgtggagtttaagttgtctacgacctgcacctccacttagaccatcagcagcactaggttataaagagaggatgtcttatatcttaaaggagtctagtaaaagccctaaaacgatgaagaaatttcttcataaaaggaagactgagagaaaaccatcggaggaggaatatgtgattaggaaaagtacagctgctctggaagaggatgctcaaatccttaaagtgatcgaagcctactgcaccagcgcaaattttcaacaaggccatggctcaagtactcgaaaagattccattccacaagtcctactccctgaggaagagaaactcatcattgaagaaaccagaagcaacggccagaccatcatggaagaaaagagccttgttgatactgtttacgccttgaaggacgaggtcagagaactgaagcaggaaaataaaagaatgaagcaatgcctggaagaagaactgaaatcaagaagggacctagaaaagctggtgcggaggcttttgaagcaaacagatgagtgtattcgaggcgagtccagtagcaagacctcaattcttccataaccatcactgtgccactgggtggagtgtgccttcagggcatcttgaaatgtcccgctgaatgatttgactcagtttgctcacttctttggcttttgttttgtgtttgagtctctctctctctctccctctctcttctctttctctccccgctgtgtgcatatgtgtgtgcgtgcacgtgcgcgcttgggcatttgctgttgtttggttattggttggttgttcattttttttttcaacaggtgaaaaagcaggaagtggtggtagagatggcctcagagtcttttccattcagtaagaaagagaaagggaatgcaggccagttacttaaaaggtcttcagattgccttcagttcacagtgcctctgcaacagccattgccctcaggtcacattctttgggctggctgcccttgcaaagcagctggccaaggcttattaaatgtgaacccaacttttccccagggctttcctgtacctgcaagcctcttagtacttaatttaccgaaggcaaatcttccagactatggcttgagtaggatgaaagacaaacacatctgcccaatgatccagctgcccttccttagaccatcacatgcctcccctcaatcacaggttttaaaattactgccctatgttgtctataagaccaagaaaactgtagtacccttattccttttgtgtcatgtaaattgtaactcaggggggcagaagctctggtcacccacaccaacaccaaatccatcagcaaattctactggacaatcctcccttttagtagcagagttgaccgccttttcccattgcatgataggtttctttccctcattctgcctagtgtgtaagttttctatttccccagtacttttagccaaccttaccaagtggtgtgtaaactagtatgtatgtgctttgcttactttttaaaaaaatgtagttagactgtgaggagttactttatgtacgttgcatattcaaactgtgatgttttatccttcaaaacaatctgcattaagaagatattgtgccctactagacagctttcattcactttattactctctcatatatgctgtgagaagttgtaatattaattggcctctttgggtgggactctaagcagtatttgcagaaatatgcttctggtccaacttgtacatccagaacaaaagggcccctctagtagctgtgtgctggattattcaggactgattaactcaagttgctcattgaatcacatcatccactttatcccagaaactagaactgtgagaaaccaggtttagaagacagtcacagaacagcacacatccaaattcagcgccattgaaagttggcctaaggctcagtgccactcacccctccctccccaaaagacaagagaaatttggccagatggggaaggtcactggaaattgaggccaaagggctgatcagaattgcctttataatatatttgatggatgcctataaatgtgggttttgcaaatattgtttaaaaaccaaacttgaagccaggcatggtggcccacacctgtggtcccagctactcaggaggctgaggtgggaggatcatttgagcccaggaggtcaaggctgcagtgagctgtgatgacaccactgcactccaacctaggtaacagagagacacctctgtctctgaaaaaacaaaacttgaagtttgaaacccccagcttgctgaggagccctttttatttttggtactgagagtctcaaggtcccatagctacatggtacagggctgttgtctgcttgctgcacagcagaaattacaccatccacaggaaatggactatttttgcagtccaacatcagccaaccacacacagccgtgtttggaagctgaagagtaaagaaatttctaggaatggctgttgttctgttttttagcacagccatttagatataacatccttcacttaaaaattaaaaacatcagtactaccaccaccaccaacaacatcaacacagatcttcacatctgcccattctgtggttagtcaatggcttgcaataaatgtgcaaactgcatctataggaaacatttttgtgattacggaatactttagttgattgctgaaaatattgaaaggtcttcattttacagtgatgagtacatatgcatgtttcggggacttggcccttctgatgaggggccctcggtactctggataacgaagcttgtgcagagtggtaaccatgcttacacactaaactataatataaaggaaatgaagccatgttaatctgagagcagtgtcgccatagttgtgttgtttacaatactctataaatgggttcctgttgccctgtaattaaactgctgcccgtagaggcctttcagttccttttctgtccttccccttcttaacacaagctcaaattttctaacttgtttttattttgaagacttttaaaatggacattttcaatacataaaaataaacagtgctttataaaaataa

SEQ ID NO: 1544 - DNA, 21681 bp, Homo sapiens
  source 1..21681: mol_type = unassigned DNA; mol_type = unassigned DNA
gctcagtagcgatagcagcggccgtggaggtggcgttggggactgttttctctcggaggccggagcggagccgcgtctgactgaggcgggcagcaagcggccccctcgctccctccctccctcctccgcgccctccccgccgccaccagccgtcaaacgccaaccgccgctcctggggaggagccgcggctcgcggggccggagccaggcctgcgtccggacatcagccggagccggagcgagagccggggcctcggcgtccccgccctctccccgcctcggccagcgtccgccgggcccccgcgcgtcgcgccatggactcggacgagggctacaactacgagttcgacgaggacgaggagtgcagtgaggaggacagcggcgccgaggaggaggaggacgaagacgacgacgagccggacgatgataccctggatctgggcgaggtggagctggtggagcccgggctgggcgtcggcggggagcgggacggactgctgtgcggggagacgggcggtggcggcggcagcgctctggggcccggcggtggcggcggcggcggcggcggcggtggtggtggcgggccggggcatgagcaggaggaggattaccgctacgaggtgctcacggccgagcagattctacaacacatggtggaatgtatccgggaggtcaacgaggtcatccagaatccagcaactatcacaagaatactccttagccacttcaattgggataaagagaagctaatggaaaggtactttgatggaaacctggagaagctctttgctgagtgtcatgtaattaatccaagtaaaaagtctcgaacacgccagatgaatacaaggtcatcagcacaggatatgccttgtcagatctgctacttgaactaccctaactcgtatttcactggccttgaatgtggacataagttttgtatgcagtgctggagtgaatatttaactaccaaaataatggaagaaggcatgggtcagactatttcgtgtcctgctcatggttgtgatatcttagtggatgacaacacagttatgcgcctgatcacagattcaaaagttaaattaaagtatcagcatttaataacaaatagctttgtagagtgcaatcgactgttaaagtggtgtcctgccccagattgccaccatgttgttaaagtccaatatcctgatgctaaacctgttcgctgcaaatgtgggcgccaattttgctttaactgtggagaaaattggcatgatcctgttaaatgtaagtggttaaagaaatggattaaaaagtgtgatgatgacagtgaaacctccaattggattgcagccaacacaaaggaatgtcccaaatgccatgtcacaattgagaaggatggtggttgtaatcacatggtctgtcgtaaccagaattgtaaagcagagttttgctgggtgtgtcttggcccatgggaaccacatggatctgcctggtacaactgtaaccgctataatgaggatgatgcaaaggcagcaagagatgcacaggagcgatctagggcagccctgcagaggtacctgttctactgtaatcgctatatgaaccacatgcagagcctgcgctttgagcacaaactatatgctcaggtgaaacagaaaatggaggagatgcagcagcacaacatgtcctggattgaggtgcagttcctgaagaaggcagttgatgtcctctgccagtgtcgtgccacactcatgtacacttatgtcttcgctttctacctcaaaaagaataaccagtccattatctttgagaataaccaagcagatctagagaatgccacagaggtgctctcgggctaccttgaacgagatatttcccaagattctctgcaggatataaagcagaaagtacaagacaagtacagatactgtgagagtcgacgaagggttttgttacagcatgtgcatgaaggctatgaaaaagatctgtgggagtacattgaggactgagaatggccctgcataaaatgaactctgaaaactttaccatctagagtgctcatgcaattaaaacaaaacaaacacaaacaaggaggcactaagcctattctgacaccactggtctgtagtaccagaattgttttgttaatggaaagtttaagtaaattatattgtaataaaaaggtagataaaccattgtacaacagtattctaggccaccaacaaaagtgtgacagacacactaaaagccctccaactttaacttgtaacgtagcttcattctcaaagctgactccttttttttctttttccttttcctgagtgtagtacagttaaaatttcaaacagctccttgacactgcttttcatgttcaaaccagccattttgttgtactttggtaaaggacctcttccccttcctcccctacacatacagatacacccacacacagactgactctctttctctcataccccaaggtcatgagtgaatgatgcttagttccttgtaaagaaaatcttgggatggggaaaggggtaggcagcaagaggattcaacaaacgaaaaacataaaaactttgtatatgacttttaaaacaagaggacaacacagtatttttcaaaattgtatatagcgcatatgcatggacaaagcaagcgtggcacgtgtttgcataatgtttaattacaaaaaaatatttattctttaaaaatcttcaagattatgtctatttgctgtgcattttctttcagtttgcttatctttcccgggttggggttgggataaaggtgtgtcggtttagcacctctggaagacctatctagagctctttcactttcctgaggttattttgccctttctggtgttggtatgtctgttgccggccatgggcctcatgccttgaattcctgctcttgatcagggacaagggaggtcaagctctgactaatgccatgacctgattaaggggtacagcagggagttttgttgctacagctcatgaattaacctgtcccaacctaatccccctccatggcatcatgcctctacccaagcctttgtgtgcccatgttatgcacacagctgtaggcattcttaagtcccctgtcgcatccagtggaagcattttaaaatttcttttactttttggttttcccttaattgctgcttttcagattttagttatggctcgtctgctcaccccttctctacattagggtgtcaaagagaatgttttgctttaaatataaatagccattcatttagtctcagattgtgaatttaaaatggtggataccgaaattgcttgtgtgtgttgctgtgggtttggtttgaaggcaaacacccctagaacatgatattcccatctagtgcatttaaatagaaatcactgagtttgctgcttttttattgtcagcagataggagaattaataatgcattttagctgtgatgtccatttttatgaaattcctactaagagctatgttaaaagtaaaggatggtggtggttgtattaactatatacctgtttaggccattctggctgtggtatttttcaataggtcagcatctgtaaatctgtcagttttatacaggagtgcagagtgaactaggcaactagattaagaggtctaaatatgaaataccagttgaggctgaggacctcttcgtcttcctttaaatgtcttttgcctagggagtgtttaccatttgtgaggcagctttgtctgctcttacactgtacatcctattactccattgggaagtaggttcactttcctctggccttttgcctaagttaggctttgctgaatcaaccctacttttccttttagaaaaggttgttacaggagatttactggcaactgttcttttcccatcaaaaatcagtgaatgtttgctgagtataaatgctgcttccttaaaccacttgtcgctttaggatcaactttacctgtaccttttctcctttcctcccttgccacctcaggtgcaaatctgaactcagtgtctgcttcttccattttctcgtctctctcccctcttcccccattatccatatgacattattttacttcaaatgacagcatcaatcttaaaaagatatacattaaaactaaggagtttttttaaagaaagcctgaataagttcctttccctggtaactttgaaaagcagtcagagttgctatatagatatatgtggctcctttaaaatgctttgtgtatgtgtggtgtttaaaaaaaaaaaatcttaccagttaactttgcagtgtctaggtttgagtgtcataaatccacgtgttcctgttgcaacaaatacccaaaaattgtgtgtgcacttcctaataccagtcttcacccatggaggaacagtgctttttagagatgctttctatttcaatgttggcatactgcctgagggtattgcagttgtgggtgcattccctaatttgtatgatcaagatgaactggcccttttctacttccaagcttttaacagataccaccatatttgacagaattcccagagtgaattgcttgtgttattagtagattcagtgcccccagctgggataggcaagccatgacagcttccctgtttcacctacagaagtcttatctgagggatctattcacagtaagcaccaaggtctccatgtcttgaggtcagtttcattgtcttttgaaaagtgcatgcttcatttgaacaattcattcagcagcagatggactttcagtgatttaaaataaaattttgatccaaagctcaggacacaaaccacagtggtaaaattgagtagcatataatatcagactaaattatctgtaattttccacaacccagattgtatgtgttttatgtgtgtttaaataaatatgttagatacacgtgtatacatacacccatatacaacagatccaagactggctgacttcatttgaaatggttgaatctgctgtgtaataaagtggttcaaccatgattaggaactgaaatttagtagaagagggaaaaggagttaatgtaacaaattattttagctacaaaccccggtaatagagcacttgggggatgggatggggtgggttggtgagacaatcagaatggtaaattgattaaatgctcctaaccctgtaattttgtgcatagagcaccctatgctgtggaaataactgttcttagatttcattgtaactggactgttcaggttgcccagagggaaagaacattcctaattctaataaaataaacttttattttgttattccattagttacttatgtttatttttatagttaaaaaatgactaaaggtggctaatagccacccgtattatgtgccttattcactgttcccacttaatataaaatgtcaaaaattggttgtttctttgcagggaactgtgaatgagcccattcccccaacatttaacttggttaatgaagctttcagagcattttctgaaagatttccaatttctgcatctcagatattgaatttaaattgtttgtgttgtaacagtgatacaaaaatgttcaatagctctttgaatgccactttttttaaagaaaatactttaaaagtcattcttagctaacctcaaaactcctttacattactttcattttagctcactcttaaagctgatactgttatatagggatgaagggagagttttcttaaagaaggtcccaaagttgaagatcgtttgtcattgatactctggccaagtccaggttttaggacaatttaatttactcttatttggatctgtaattatgggagtttatcacttttcctcttcaaagcacttcaacttactgtctaaaacaagtggagaagaaattgccattttttataaaggaggaagataaggctcactgaggttaaataactccctcaatttttcatttccttctacctgaaacttaacatcatgctacctctttgtatcatattttgttattctggtcacagaatgacctagtattctgtaccagggaaggtagttcttaactatattgtacttttaaaccacattaaagactattataaatgcctatcactgctactgttagaggttgctctatactatctctgatctttcatttgttgcagtttgcaacacagtagttgagaataagtggtttagtatgatttgcttaatagtacccaagtaatttgcagttgttggtttagttattcaaatgaatttccattgtaaagaattttggatagtctgcaggaaattgttacaggatgcacagaacatcccatatccattggatctcagcctttgaggctttaaaaagatgataagcagtgagttttatgagaaaattttggctccttcagaaacaggaagataagtgggcccctcagatttttcatatatctttggggataaagttggttatatctggtttattttagggattttgcttctgtagttacccaagatcaaatagccaactcagaaatactcagttggatatcaatcaaatagtgcctaccaggggagtaaacagacaacttttaggtttttagtttttgcttttgtgtggagttgagtccaatttttaaggcaactattgttgacctttctctaggcggtagcatttaggatgggaaaaaataatatgagttatgtgcgaaaagcagttttcaggctatcatttagggccacagatatgcttatttaggactattttcagggtaggagccagttaaagtttgtatatcagtcacacattgatatgtagcagctctatcaataccacaacaaccttattaccatagtaattcaggggtctcaagtaatccaggagtctcaaactgaaatgtcaacaagagccaagtaaatattttagaaatagagtaccctggagtagatgggctctgagaggagcctgtgaaatccagacttcatgtgaattctcttaattaaatgtgggccaaagaaaacccggccatgggcagtttttttttcccagcttctactagtcttggcttgcaacaatgccactgtccatctggcattacctagaccagtgatacttaaacttgactgcgaattggaatcactgagaagctttaaaaaatattagtgcctgagtgttactttatggagattatgatttaattgctttgggtaggcatcagtaatttttgtaaagccctttacgcattctcacccctaattccagccggtgattctcacatgcagactaggttgagatccttgatctagactgccttctatagttgcaaaaagagaatataggcgagcaactccagatcataagggacaaaatgattcaaggcaaattgactggctcagaatagggcctcactggaggccctagttgagtgggttttgtggaatggtgcctcccaagggtctggtgtgcagtgcccaatttggttttttgttggttttctggtaagtggtccaccttggagaaaatcacaaaactaaaagtcttaccaagaagtagaactgacaagcagccatgttgattggcagtacattctcttaccaagggggagaaatctatctagggaaaataatacagagtctgagcaaaggaagttgagtggttataagcaaaactgtcattaaagctagttgcgtcaagtctgcacaattccacgagcacttaagagtttacaagtttctcatgtctatcattcttttgataatcttgtatttttatttcaagtgtggtatagtagtaagaatattggtatttctcagccatagatttcccttttgtaaaatgggaatactaataggaactgtaatttgttgagtgctttttgccagatgccttacttttgtctgtatcttccaagcagccctaaagcaaaatgggcattgttaccctatttttatgaggaaagacactcatatactactaacttactcaaaagttacacattgagtgtataacagggccatgcttgtctgattccatatgttcattctattatgctgctgttgtctgttacataggaatattgtgaggatcaaagaacatgtgaaaacaaaacctagttacaataataagcacaccagtgctaacttgggcaaaagataaggatacagagctgtctcagagactcccaaaggcaggatgagattgggaactagaaaaccattttggacccctaaagtggtattgtctactatctgtacatcattctcttacagctcttactgctgcttttcctgtcagttaccccatagctccaggtattacatgttaactgttcctgacacatgtagacagaaccaatcagatccatggggcaggatcatcaatacaaacatgggtgttgagagcttaacttaatcgggaaggagatcttggagatcatagttcgctgggttcacatcatggaaatcgtctttgacaaaactgaaatgccctgaagttttaattttttaaatacatgtaatgaattggtatatggtagatactcgtggctacttagtatttaccaaatgctttgtttccatctcgtttatttttattttttatttttttaagagacagtcttgctatgttgcccaggctggacttgaactcctagtctcagccaaccccttctgcctcagcctcctgagtagctgggatcataggcatgtgccactgctcctagctcttccatctcagtcttatgatgtagttactattttcattttataaataagaaaatagaagctcaaataaaatgggtagtttccttgaggtcatcctgttagtaagtggtggaatgaagttacaaacctaggttttattggtcagcacacacagtgccgggcactggcagtacagcagtgaacaaaaggtctgttggtttgtctgaagctctcaaccttgattctgcatagactcggtggattgcccaaggccactcaaccagttaatatcagagccagctctgctgtttgaccagtatattattttcaccatgctgtatctgcttctcagtcaccaaaagcaccagctaaaattgtatatagactgattaggggacttccaacctaagattgtcctggaaacttaattcttatcttggctcatctcttcaaaacagatgcctctttcgttggtgacctcagatacactgttcagaagtactcaaagtattccttttttctcacatttgagagtcactctagcattttaatgagttaagcaagccagccctgcatttccaaacccttcccagaagtctaaccttactttgatctgatgacatgggctttttaaaagattactatttttttagaggtggggtctcactatgttgcccaggctggaatataatggctattcacaggcacagttagggtgcactactgccgtgaactccaggactcaagccatcttcctgccacagcctcctgagtaacctaggactataggtgcatgccaccatgcccagctgacaatggctttatatacataatatttcctcagcaacaatttatgtcttatttggcacctgtaaaaccctcttcactgattatgcctgtttaaaggtttggtatttactccaagtcacctgcctttagccatggagtattcaagtttctttcagaatgagaatttggagggtgctcatagaaatataaaacaaggctgggcatggcggcttacaccttgtaatcccagcactttaggaggctgaggcaggtggatcacgaggtcgggagttcgagaccagcctggccaacacagtgaaacctcatctctactaaaaatacaaaaattagccaggcatggtggtgcatgcctgtaattccagctgctcggaaggctgaggcaggagaatcgcttgaacgcgggaggtggagtttgcagtgagccaggatcacaccactgcactccagcctgggcgacagagagactctgtctcaaaaaaaaaaaaaaaaaaaaaaaagaagaagaagaagaaatacaaaaccaactctttatagtagacagtttatcccccagaaagctttttaggctgaaaacgtttctatagattttggatttccttctgatagctaaaatttgtttctgtataacagagtagtgccctataagccagttcagtgcacattaaatggctgttcttagaattatgaatctgaggcttatgcagtgaggctctagctctctggagtcagttggtcaagtgggattcctgaggactgagcaaacacacacagagcaggattttgtcctaagttttcttagggatcctatccaaaaacaccattacttgaatttcccagcttccttttacagggagacttccttgctatgtgtactcccacctcggtatgtcaaatcattttctcagaggaagtacagcataaaataataaccagcatttgtagagcacttcttgtgggccttcttgggcaaatagacattctcatggaatgctctaaaattgttaagttcttgcacttgctctcaagtcatttataatctaattgctggtcttcctggtatgaacaaagatgtttgcttgttaataaattcctaccacatacccagacttgtggtttatttctatctaactagggaaagcactaaagagttttccaataaggaagaatgatctgagtgtctacctgctttggaaaagatgtctgccatggataggaaatgattttgtatcccaaaatcctagtactaatttggagtgttgtaaaggtcagggcagcaaatgctagagagtgggattaatgaaaagttatagtgttctgcatgcctttgaataattaatttttactccatttttactcgcttgcaataaagtaggttaagtgctgtactttaaggaagtccatgtacaagccagtgccttaacaatggtcaaatggttgctcactaaccaatggaaataaatgactgttgtttccacaaaattgctttacagattctaaatgctatctctgggacactggattgtgtgctctttaagataaattccataatcaagggcctggccctgaatagattggagcccaaaaatctcactgaagcaaagagataataggccagtaaagagtgggagacaaacactcctggaataggaagccactactcacctttattttaaattgatatatagaaattaatattacaaaatgcacacatcttaagtgtgaagtttgatgttttgacagttgtatacgtctgtgtaataactaccaaaagaagacataatatgttacaattaacccagaaaattctcaagtacttttaaatcacccctgagcacctccccactccagtgatcacttcttgatttttatcactaaagatttgttgtacctgcttttggattacatataagtggaatcatataataatgtactcttttgcatctggcttctttcactgataatgctttaaagacacgcatactgtatgtattaggacattgttctttattgctgagtagtatttcattctataaatataccacaatttgtttattcattctcctattgaaggacctttaggttgtttccagtttggggcaattatgaataaggatgctatcgatattcttacacagccttttgtttttgttttttgtggatatacatcttcacttgtcttggataaataagagtagaaaattactgggtcatatggtaagtgcatgtttataagaaactgccctcttattctccaaagtggttttaccattttgtactcctatcagtgatgtatgagagttacagttgcttcacatgtctgtcaacatttacactgtcactgttttttatattagccattttagcatatatgaaataactgattttaatttacattacatttccctgattaatgagttgagcactttttcatatgcttatttttcatttgtatatctttcaagaagtgtctttcatgtcttttctcattttaaagttgggtgtctttttattgtaggtgttattctttgtattttgaatataaatcctttgatagatatgctatgattttttaaagactctatgtattcacttattgggatctttcgatgaacaaattttttttataaaatccactttatcagttttttattttatggttttatgacctcaaagtcacaaagaatatattttcttctagaagttttatggtttgggattttatgtttaggtctgtgatccatctcaaattaatttttgtgaacagaatgaggtttggtttttttccaacatggatatacagttgttccagcaacatttacttaaaaagacttttctttacccattagattgacttggtagcttggttaaaaattgatcacgtgtgtgtgtatttctacattttctgttctgttccattaatctatttgtgtatccttacatcagtaccacactttggattattgaaactttctagtaagtctttaaattagtaaatccttcctttttgttatttttcaagatcgctttggttattgtcgattctttggattgtcataaaagttttacaattagctcatcttgtttttcaaacgtagatgtgctgggttagctgtgttcatgccactgcattccagcttgggtgacagcaagaccctgtcaaaaaaaaaaaagaaaagaaaaaactgctagaatcttgatatggggttttgttgagtctataggtcaatttagaatgaacattttaatagtattgagtcagctaattcatgaacatattaagtcttgtcatttatttaggtattaaatttttttctcagcaatgttttgtagcttcccttgcgtaacacttgcttatcttacattagactttttcttaagcatttgatttttaaaatatttttgattttcttttctttttctttttttctttttttttttttgagacggagttttgctcttgttggctaggctggagtgcagtggcgcgatcttggctcactgcaacctccgcctcccgggttcaagcaattctcctgcctcagccttttgagtagctgggattataggcacacaccatcatgcctggctaatttttgtatttttagtacagacggggtttcaccatgttggtcagcctggtctcgagctcctgacctcgtgatccaaccaccttggcctcccaaagtgctgccattacaggcgtgagccaccgcgcctggctaattttcatttttaagttgtttgctgctagtatctagaaatacaattgattttttgtttgtttctttagagatgggtctcactatgttgcccaggttggtcttaaactcctgagctcaagggattctcatgcctcagccacccaagtagctgggactttattcacgtgccagtgtgcctggctgatttttgtatgctgatcttgaatcgtgccaccttgctaaattcatttattctagaaatagttcttgtagactccgtagagttttatattaaatagatacacaacagtgtagtctgcaaataatgtttttacttctttttctgattttatgccttttcttctttttttttttttttttttttttttttgtctttctccactggctacaatatctagtgcaatgtttaacgtgtggtgagagcagacaccttgccttgttttcttaatcttagggataaagattttaatgtttcatcactaagtataatgttaactgtaagtttttcacagaccagcccaaagaagttcctttctattcctaatttgttgataatttttattaggaagggttattaaattttgtgagatgcgtttttagcttttaataagattattatgtatttctctttttattttgttaagatggtatgttacaggggttggcaaactgtggcccatgggccagatccagcccatggacagttttgttgttgctgttttagagacagtctcactcttttgctcaggctgccaggctggagtgcaatgacatgatcatagctcactgcagccttgagctcctggactcaagcgaccctcctgcctcagcctcctgagtagctaggaatacaggtgcatgtcaccacaccaggcaaatttaagaaattttttgtagatcttgccgtgttgcccatgatggtctcaaactcctggcctcaagcaatcctcctgccttggcctcctacagtgctgggattagaggtgtgagccaccacacttggctctcatggactgtttttgtttttgttttgagacagggtctctgtcacgcaggctggagtgtggtggcatgaacgtggctcactgcagcctcaactttcttggctccagcaatcatcctgcctcagcctcccgagtagctgggaccacaggtgtgcgctaccacagctggctaatttttctttttcatttttgtagacatggagtcttgatatgttgcccagattgatctggaactgctaggctcaagtgatcttcctgccttgcactcccgaagtgttggcattacaggcatgagacacagtgcccagcctattgcagtgttttttgttttttctgttttttttttttttttttcatctttgtttttgtttttttgagactgagtcttgctctatctcccaggctgtggtgcagtggtgcaatctgcaacctccgcctcccaggtttaagcgattctcctgcctcagcctcccaagtaagtgggattataggcacatgtcaccaagctcagctaacttttatatttttagtagaaacggggtttcaccatattggccaggctggtcttgaactcctggcctcaggtgatctgcccaccttggcctcccaaagtgctgggattacaggtcactaggcgtagtagggctactacgcctggccctactgcagtttttaataagagatgagttctctcagcttttgtctataagagaatgtccttacttttatttttgaggggtattttagttggatataggactctatgttgaccttttatttcttctttcagtactttaaagaagttattttattgtactcaggcctcatttgtttctggtgagaagtcattcatcattttaatttttatttcctttccgtaatgtgtggttgttctcaatggctgcatctgtgcattatatttacttttcagtagattgactagggaatgtctaggtatgtttttctttgtatagagtttactgaacttcttggatctgtgttgatgtctttcattaatattggttctttcttggccgttatccgtttacatttttctcttgtctcatactctcttgcttctcctcttctttggagattctagttacatgtatattagatgatttgatataaacctacagatctcagatgatttttcccctgccctgttttctttttgttttcagtttggatactttccatttaaccatctttaagttttttgatgctttccaatgttaacctgttaaacttgtttattgaattctccatttaaaaatttttatttttagttatttatggatacatagttgtactgaattattcatttctaatatttttatttctagcatttcattatatttgtatagttacaattttctgctgaaatttcctatttcttcatgcatgttttccacattttccattctactttttagcattttaatcagttattttattgggttttttctgttttttctttcatttttaatcagttattttaaggatccaaactgataattcaacatctgggtcttttctagttctgcttctattgagcccttcctctcccttaccatgaatcttattttcttgcttttgcacgtcttgtatatttgattggatgatggacgttttatgttgaaaaaaaaaagaaattgaagaaaatgtttacttccaaaacagagcatgccctttgtttttttttcaggccacttgaatggtggctcaatctgatgtatatgaattctagactggggcttcactgcagttttagtttgattcagtttgcctctagcttcaaatatttgaaggaacgtagaatcagaactctcatatcaccagggcctgagttttgggcattggcaagattccagagatctgactttgcttcatagctaagccaccagcttttatcaatgtgggagatctttccctactttacaaccttgctgccaggatttttttttttaatcaatgggctggggataggaggatctttctcagctctcatgtgtgccctgcccttttgtagaggaatgcccacaatgcctaggggatgggtttctcagcatttctgaccccatttaggctccaagagtgcctctgttggatttcacaacaatcctgcctcccctttcatttttaaagggtattttgcccttgggagaagtcaagctctctcagcgttccttctattatccacacctttagtgtactacaccttcctgtacctggttatcatctaaggggtaagattggtgggaagccttcctctgtggatttgggtcatctaggttctaatgtcaaaccagcctccaaggggttgtgaaaatgttgttaaatttcagcaggtttctcttttctcccccctgtagtattcctcttcctaccatagttcaactaggaataacaacagctagggggtctcttctctcctatgaaggacttggcactttctggagtttggatcatttaggtttctttggtttttgtttttattttgagacagggtctcactcttacccagcctggagtacagcctgtagtgatctcagctcactacaacctctgccttcctggctcagttgatcctcccacctcagcctcctgagcagctgggactacaggcgtgtaccaccacacccggctaatttttgtattttttgttgagatagggttttaccatgttgcccaggctgatctcaaacttctgagctcaagcgatctgcctgcctcagcaccccaaagtcctggggttacaggcataaaccactgcacccaacctagatttctttgtgtccttagctttctgatgaattaaacatatgttttattttctagctcatctggccttttgttgttgtttgctagagtgggaggtatattccttgtgactttgttcatatcactagtgaatttcagaagtaggagtttatttttttaataaaaaatttttttaggtcaggcacagtgtctcatgcctgtaatcccagcactttgggaggccgaggcaggtggatcacctgagatcaggagtttgagaccagcctggccaacatagtgaaaccccaactctactaaaaatactaaaattagccaggtgtggtggtgggcgcctgtaatcccagctacttgagagactgagtcaggagatttgcttgaacctgggaggcggaggttgcagtgagccgagattgtgccactgcactccagcctgggtgacagagcaagactccctctcaaaaaaaaaaaaaaaaatttttttttaaacacgtctcactgccacccaggcttgagtgccatgacatgatcatagctcactgctggcttgaccttctgggctcaagtgatcctcttgcctcagcctcttgagtagctgggaccacagtcatgtgccaccatgcctggcttttttttttttgtagagtttgggtctcgctatgttgcctgtgatcctcccaccttggttttccaaagtgctgggattaaaggcatgagccaccatgcctggttaggaatgggagtttaaacaatggttttatttacatatttcattagctagtatttttttcttttttgagacagagtctggctctgttgcccaggctggagtgcagtggcacgatctaggctcattgcaacctctgcctcgtgattctcgtgactcagcctcctgagtagctgggattacaggcgcccgccaccacacccagctaatttttgtatttttagtagagacagggtttcaccatgttggccaggttggtctccaactcctgacctcagttgatccacccgcctcagcctcccaaagtgctgggattacaggtgtgagccatcgctcctggcctcattaactgttttcaaaagtaaaagtacatggataatacaaagttaaattttgtagaatcataaagaaaagcaacaccttcccatcttaactcccctagtgcctctactccctccacagagacaaatatcttaccagttggttgtgttttcttttccaaactgtatttctaaaatgtgtcaatatctcttccttttattttttattttttgtagagacaggggtctcactgtgctgcctaggctggtctcaaactcctggcctcctacctcgacttctcatagttctggcgtgagctactgcacctggcctcccccttattatttttttaaacatgaatggaagcatactatattttctacactttatttgttttatgtaactattttaacaacctgaggacttttacaggctgcataatatgtcttaatatggatgtatcttagtttatttaaacagttactggtgatggacatttccatgtttccagtattttttctcacaaacaatgcagtattatgcctttgtccacattcaccattgattgctattgagtatatctgtagcatcaagaataggcatactgaaaatcctccatgaagtccagtgaagcttcatattattttgaagtgatatttcccagtgttggctggactctcaagcgtttgtggtataggttttgggaggactggacacttccaaagagaaataagatgttacagacttgtccagcaggtggcatcagaacaaagctggctatggaccttgtcagtacaaatgataaaacattaaaaatgtaaaaactcaactgtagctccttgtttatacatatattgggggtgttgaaaagttaccgatgcctgattcctcttctatgtcctcagcccccaccataaaaatagataaatgccattttttttgtatgcccagcacagctatatgatttgaataatcttgataagcagggtcacatttgaggagatttgctaagggaaatgaagatccatctgtgacacaagaaacatgttctatgtgatttctgggattttcctgtgaacatacttcttgtttgtttgttttacagtggatctcactctgtcacccaggctggagttcagtggtgcaatcatagctcactgcaaccttgagctcctgggctcaggagagcctctctcctcagtctcccaagtagctaggactacagacacatgccatcatgccaggctcattttaaaattttttgtagagacgggtctcactatgttgctcaggctggtattgaactcctgggctcaagcaatcctcctgcctcagcatctcaaagtgttgggattacaggtgtgaaccatagtatccaacctattatgtttttttaaaaagagattgttctaattatgtatataattaaagtacattaggtttagtgattgcaatttgagaaaccaatgtcctttcttattgaaaaaggccctggtacagaaagtgttctatcttcctcacaagatctgaggtcaaaggagagattttgaaacattatagcaatggcttctagttattgaataaagaatgtcatttgctcctcacaggacccctttcagggagatttcacatattgggaaacagcctcatgagctttctacaaacatctttgtccttaagtcttcccatttcagtaattggctgtaccactcatccagcagctttcaaagtaagaaacctggcaatcttcctttaacatccatttccctttccctcattcccccatatccaatcatgtgtattggaggtttttccacctctaaacttgagaacccatttactttttctccatctcctttgccatcacactagtccaagtgaagtgtttcatcatctcatttgcagcatcctttagtttaccctagattatcaatttttgtccccctcccaattcagtctctactcatgagctaacatgagtttattaagtgttcattctgaccatgccattccttgctcaaaattctctagtgccttcccaatgcccttaaaataaaattcctcatatggcctttgtggatctgcactcctacctcttctcctattgcaaccaaccctgttacctttttctcttttcacactggtcttcattctgtgctgcaaactggctgagattcttccatcctcagggcctttgcacaagttcttcctttgccttagaattctttcctggcctgcacatgtcttcatcccctttccctaagctaatgccttaccctttaggtctcattttaaacatctcttacccaggaaaaatttccctgtccaaacaagtctagattggctccccattgtttgttctaactgttctatatttctccttcttagcatttatcacaattcttggtatgttgtgcttttcactttcttagtcgctattattggagtaggtaatacatccatatagtacaaaattcaaaatgtattaaaggtatagagtaaaaagtcttctcttccctgtccccccgctacccagttctcctctttagaaccacttttagcattttgaatatccttccagaaatattttctaagtatacaagcaattatgtatataatattcctctttatttttgcctttttattaatacagatactatatgcattttctgcactttatctgttaataatatatcttggcaattattcaatattaatatgtaaatagttgcctctttctttttcatgcgccatataatatggacttataatttatttaacctctatctaggttggttttaggcattggttattacaaataatgctgcattgaatacctttgtatgtaaagtcatttcccacatctatgcctatagaataaattactagaattgaaataattcagttaaagattatgtgcatttttaattttggtagttattgccaaactgctctcaatggaagttttatgaattcccactagtgaatgcatttgtcctcacaattatgtcagtgaaatttttgttctttgccaatgcaagaaatggaaagtatctcttggaaactaatttgcatgttttttttccttgcacagttatattttcatatgttaaagagccatttgtatttcttggtgaattgttcataaactttgcttacttattatctaatgtctgactaatttgctacactctaaattcccaattcatacttaagtctcgcccttgcaatttagatgtacaatctgcctcttcagtggtttccacaccaaaaaatccacaggctcctgaattttatatgggcctaagagtcttactgaaaattggaagtcttaaggtgtagtctattttatgcagtgtgaggcctttcatgctctgaaatgtaccactcttgactgactttttcttcttcaccctgtccggcactgtgcccttattagccagagaaatgttccccctttctcccaggaaacgttctgaccttaccctggtccctcaaggactctccttctcccccaaattaactttcaaggagtttctccaacccaaaatggcacccttcctgaaaagatttctagtggatactgttttctgtacctcactacggatgtattttgctgcttggctccccgtctccattttgctatggcaaacatttttttccagaaatatatcagataaaatg

SEQ ID NO: 1545 - DNA, 807 bp, Homo sapiens
  source 1..807: mol_type = unassigned DNA; mol_type = unassigned DNA
cgccgctcctggggaggagccgcggctcgcggggccggagccaggcctgcgtccggacatcagccggagccggagcgagagccggggcctcggcgtccccgccctctccccgcctcggccagcgtccgccgggcccccgcgcgtcgcgccatggactcggacgagggctacaactacgagttcgacgaggacgaggagtgcagtgaggaggacagcggcgccgaggaggaggaggacgaagacgacgacgagccggacgatgataccctggatctgggcgaggtggagctggtggagcccgggctgggcgtcggcggggagcgggacggactgctgtgcggggagacgggcggtggcggcggcagcgctctggggcccggcggtggcggcggcggcggcggcggcggtggtggtggcgggccggggcatgagcaggaggaggattaccgctacgaggtgctcacggccgagcagattctacaacacatggtggaatgtatccgggaggtcaacgaggtcatccagaatccagcaactatcacaagaatactccttagccacttcaattgggataaagagaagctaatggaaagtatttcactggccttgaatgtggacataagttttgtatgcagtgctggagtgaatatttaactaccaaaataatggaagaaggcatgggtcagactatttcgtgtcctgctcatggttgtgatatcttagtggatgacaacacagttatgcgcctgatcacagattcaaaagttaaattaaagtatcagcatttaataacaaatagctttgtag

SEQ ID NO: 1546 - DNA, 612 bp, Homo sapiens
  source 1..612: mol_type = unassigned DNA; mol_type = unassigned DNA
ctcggacgagggctacaactacgagttcgacgaggacgaggagtgcagtgaggaggacagcggcgccgaggaggaggaggacgaagacgacgacgagccggacgatgataccctggatctgggcgaggtggagctggtggagcccgggctgggcgtcggcggggagcgggacggactgctgtgcggggagacgggcggtggcggcggcagcgctctggggcccggcggtggcggcggcggcggcggcggcggtggtggtggcgggccggggcatgagcaggaggaggattaccgctacgaggtgctcacggccgagcagattctacaacacatggtggaatgtatccgggaggtcaacgaggtcatccagaatccagcaactatcacaagaatactccttagccacttcaattgggataaagagaagctaatggaaaggcgcctgatcacagattcaaaagttaaattaaagtatcagcatttaataacaaatagctttgtagagtgcaatcgactgttaaagtggtgtcctgccccagattgccaccatgttgttaaagtccaatatcctgatgctaaacctgttcgctgcaaatgtgggcgccaattttg

SEQ ID NO: 1547 - DNA, 319 bp, Homo sapiens
  source 1..319: mol_type = unassigned DNA; mol_type = unassigned DNA
ccgctacgaggtgctcacggccgagcagattctacaacacatggtggaatgtatccgggaggtcaacgaggtcatccagtgcatattgggtacttccagaagtatgaattcagtgatgcaaaggacaggcgggctgcagcagcaaagaatccagcaactatcacaagaatactccttagccacttcaattgggataaagagaagctaatggaaaggtactttgatggaaacctggagaagctctttgctgagtgtcatgtaattaatccaagtaaaaagtctcgaacacgccagatgaatacaaggtcatcagcacagg

SEQ ID NO: 1548 - DNA, 403 bp, Homo sapiens
  source 1..403: mol_type = unassigned DNA; mol_type = unassigned DNA
ctttctaatctatttttattcttggtttcaggcgcctgatcacagattcaaaagttaaattaaagtatcagcatttaataacaaatagctttgtagagcgatctagggcagccctgcagaggtacctgttctactgtaatcgctatatgaaccacatgcagagcctgcgctttgagcacaaactatatgctcaggtgaaacagaaaatggaggagatgcagcagcacaacatgtcctggattgaggtgcagttcctgaagaaggcagttgatgtcctctgccagtgtcgtgccacactcatgtacacttatgtcttcgctttctacctcaaaaagaataaccagtccattatctttgagaataaccaagcagatctagagaatgccacagaggtgctctcggg

SEQ ID NO: 1549 - DNA, 559 bp, Homo sapiens
  source 1..559: mol_type = unassigned DNA; mol_type = unassigned DNA
cactatgtgctagttctactactaaattctaggtaattaactgtaaagcagacatgggttctctccttgtatttgccagtcactagaaactagtgacaatactgtggaactataaggcatgaaatgattggcttatttacttgcttacagtaggtaggccttaattctattaactctttgtgtcacttaacagctttaactgtggagaaaattggcatgatcctgttaaatgtaagtggttaaagaaatggattaaaaagtgtgatgatgacagtgaaacctccaattggattgcagccaacacaaagtttctcttcataggaatgtcccaaatgccatgtcacaattgagaaggatggtggttgtaatcacatggtctgtcgtaaccagaattgtaaagcagagttttgctgggtgtgtcttggcccatgggaaccacatggatctgcctggtacaactgtaaccgctataatgaggatgatgcaaaggcagcaagagatgcacaggagcgatctagggcagccctgcagaggtacctgttctactgtaatcgctata

SEQ ID NO: 1550 - DNA, 478 bp, Homo sapiens
  source 1..478: mol_type = unassigned DNA; mol_type = unassigned DNA
taatgaggatgatgcaaaggcagcaagagatgcacaggagtgtctcgctttgtcgcccaggctggagtatagtggcatgatctcagctcactgcaacctccacctcctgggttcaagtgattctcctgcctcagcctcctgagtagctgggattacagcgatctagggcagccctgcagaggtacctgttctactgtaatcgctatatgaaccacatgcagagcctgcgctttgagcacaaactatatgctcaggtgaaacagaaaatggaggagatgcagcagcacaacatgtcctggattgaggtgcagttcctgaagaaggcagttgatgtcctctgccagtgtcgtgccacactcatgtacacttatgtcttcgctttctacctcaaaaagaataaccagtccattatctttgagaataaccaagcagatctagagaatgccacagaggtgctctcgggctaccttgaacgaga

SEQ ID NO: 1551 - DNA, 630 bp, Homo sapiens
  source 1..630: mol_type = unassigned DNA; mol_type = unassigned DNA
tcaagagtctccttctttctttatctttgccaagacttatctttcatctttttgataaaaaccattctaacaggtgtgaagtgagacttcattatggttttaatttgataatcagcttttatgtacagtttatgtgttataattatatcacccaatttttcttaatgggacagcgatctagggcagccctgcagaggtacctgttctactgtaatcgctatatgaaccacatgcagagcctgcgctttgagcacaaactatatgctcaggtgaaacagaaaatggaggagatgcagcagcacaacatgtcctggattgaggtgcagttcctgaagaaggcagttgatgtcctctgccagtgtcgtgccacactcatgtacacttatgtcttcgctttctacctcaaaaagaataaccagtccattatctttgagaataaccaagcagatctagagaatgccacagaggtgctctcgggctaccttgaacgagatatttcccaagattctctgcaggatataaagcagaaagtacaagacaagtacagatactgtgagagtcgacgaagggttttgttacagcatgtgcatgaaggctatgaaaaagatctgtgggagtacattgaggact

SEQ ID NO: 1552 - DNA, 604 bp, Homo sapiens
  source 1..604: mol_type = unassigned DNA; mol_type = unassigned DNA
cgatctagggcagccctgcagaggtacctgttctactgtaatcgctatatgaaccacatgcagagcctgcgctttgagcacaaactatatgctcaggtgaaacagaaaatggaggagatgcagcagcacaacatgtcctggattgagaataaccaagcagatctagagaatgccacagaggtgctctcgggctaccttgaacgagatatttcccaagattctctgcaggatataaagcagaaagtacaagacaagtacagatactgtgagagtcgacgaagggttttgttacagcatgtgcatgaaggctatgaaaaagatctgtgggagtacattgaggactgagaatggccctgcataaaatgaactctgaaaactttaccatctagagtgctcatgcaattaaaacaaaacaaacacaaacaaggaggcactaagcctattctgacaccactggtctgtagtaccagaattgttttgttaatggaaagtttaagtaaattatattgtaataaaaaggtagataaaccattgtacaacagtattctaggccaccaacaaaagtgtgacagacacactaaaagccctccaactttaacttgta

SEQ ID NO: 1553 - DNA, 4068 bp, Homo sapiens
  source 1..4068: mol_type = unassigned DNA; mol_type = unassigned DNA
ggttatctttagtggagaaataatgactaaaaagccagcttttagcagtaaaggttttctcaagtaaagatgttcatttaaaattgatgcataaaacattgatatctgtatatgactagacaataagactgactagcagatgggacttcagttgggtaacaggtacaaaactagccatagtggtaaaggatgatacaatttgaatcttccatacagtgttttcttataagaaataagtatagccagatgtaagcaataataggtttctattttttctcatttacctttgagttttcagcaaagagcagctctcagaacgagaagattccaaaagacattttaaatcctttcaaatggtcttcagtattcttccaaaagtaatgggtgaaatctttcgttcttttaacatttaaaaaattgttctggaaaagaacaaacaagttattagagatgaaagcccatagagctttacaggtgcagttaaaccacctatgaaagttacagaatgagtgttgagagcagtctgtagtcaacaaaacagtgaaaatggtttatcttttagctttattttgaagccaaaatttactttcattcttcttacagaataaccaagcagatctagagaatgccacagaggtgctctcgggctaccttgaacgagatatttcccaagattctctgcaggatataaagcagaaagtacaagacaagtacagatactgtgagagtcgacgaagggttttgttacagcatgtgcatgaaggctatgaaaaagatctgtgggagtacattgaggactgagaatggccctgcataaaatgaactctgaaaactttaccatctagagtgctcatgcaattaaaacaaaacaaacacaaacaaggaggcactaagcctattctgacaccactggtctgtagtaccagaattgttttgttaatggaaagtttaagtaaattatattgtaataaaaaggtagataaaccattgtacaacagtattctaggccaccaacaaaagtgtgacagacacactaaaagccctccaactttaacttgtaacgtagcttcattctcaaagctgactccttttttttctttttccttttcctgagtgtagtacagttaaaatttcaaacagctccttgacactgcttttcatgttcaaaccagccattttgttgtactttggtaaaggacctcttccccttcctcccctacacatacagatacacccacacacagactgactctctttctctcataccccaaggtcatgagtgaatgatgcttagttccttgtaaagaaaatcttgggatggggaaaggggtaggcagcaagaggattcaacaaacgaaaaacataaaaactttgtatatgacttttaaaacaagaggacaacacagtatttttcaaaattgtatatagcgcatatgcatggacaaagcaagcgtggcacgtgtttgcataatgtttaattacaaaaaaatatttattctttaaaaatcttcaagattatgtctatttgctgtgcattttctttcagtttgcttatctttcccgggttggggttgggataaaggtgtgtcggtttagcacctctggaagacctatctagagctctttcactttcctgaggttattttgccctttctggtgttggtatgtctgttgccggccatgggcctcatgccttgaattcctgctcttgatcagggacaagggaggtcaagctctgactaatgccatgacctgattaaggggtacagcagggagttttgttgctacagctcatgaattaacctgtcccaacctaatccccctccatggcatcatgcctctacccaagcctttgtgtgcccatgttatgcacacagctgtaggcattcttaagtcccctgtcgcatccagtggaagcattttaaaatttcttttactttttggttttcccttaattgctgcttttcagattttagttatggctcgtctgctcaccccttctctacattagggtgtcaaagagaatgttttgctttaaatataaatagccattcatttagtctcagattgtgaatttaaaatggtggataccgaaattgcttgtgtgtgttgctgtgggtttggtttgaaggcaaacacccctagaacatgatattcccatctagtgcatttaaatagaaatcactgagtttgctgcttttttattgtcagcagataggagaattaataatgcattttagctgtgatgtccatttttatgaaattcctactaagagctatgttaaaagtaaaggatggtggtggttgtattaactatatacctgtttaggccattctggctgtggtatttttcaataggtcagcatctgtaaatctgtcagttttatacaggagtgcagagtgaactaggcaactagattaagaggtctaaatatgaaataccagttgaggctgaggacctcttcgtcttcctttaaatgtcttttgcctagggagtgtttaccatttgtgaggcagctttgtctgctcttacactgtacatcctattactccattgggaagtaggttcactttcctctggccttttgcctaagttaggctttgctgaatcaaccctacttttccttttagaaaaggttgttacaggagatttactggcaactgttcttttcccatcaaaaatcagtgaatgtttgctgagtataaatgctgcttccttaaaccacttgtcgctttaggatcaactttacctgtaccttttctcctttcctcccttgccacctcaggtgcaaatctgaactcagtgtctgcttcttccattttctcgtctctctcccctcttcccccattatccatatgacattattttacttcaaatgacagcatcaatcttaaaaagatatacattaaaactaaggagtttttttaaagaaagcctgaataagttcctttccctggtaactttgaaaagcagtcagagttgctatatagatatatgtggctcctttaaaatgctttgtgtatgtgtggtgtttaaaaaaaaaaaatcttaccagttaactttgcagtgtctaggtttgagtgtcataaatccacgtgttcctgttgcaacaaatacccaaaaattgtgtgtgcacttcctaataccagtcttcacccatggaggaacagtgctttttagagatgctttctatttcaatgttggcatactgcctgagggtattgcagttgtgggtgcattccctaatttgtatgatcaagatgaactggcccttttctacttccaagcttttaacagataccaccatatttgacagaattcccagagtgaattgcttgtgttattagtagattcagtgcccccagctgggataggcaagccatgacagcttccctgtttcacctacagaagtcttatctgagggatctattcacagtaagcaccaaggtctccatgtcttgaggtcagtttcattgtcttttgaaaagtgcatgcttcatttgaacaattcattcagcagcagatggactttcagtgatttaaaataaaattttgatccaaagctcaggacacaaaccacagtggtaaaattgagtagcatataatatcagactaaattatctgtaattttccacaacccagattgtatgtgttttatgtgtgtttaaataaatatgttagatacacgtgtatacatacacccatatacaacagatccaagactggctgacttcatttgaaatggttgaatctgctgtgtaataaagtggttcaaccatgattaggaactgaaatttagtagaagagggaaaaggagttaatgtaacaaattattttagctacaaaccccggtaatagagcacttgggggatgggatggggtgggttggtgagacaatcagaatggtaaattgattaaatgctcctaaccctgtaattttgtgcatagagcaccctatgctgtggaaataactgttcttagatttcattgtaactggactgttcaggttgcccagagggaaagaacattcctaattctaataaaataaacttttattttgttattcc

SEQ ID NO: 1554 - DNA, 1296 bp, Homo sapiens
  source 1..1296: mol_type = unassigned DNA; mol_type = unassigned DNA
ggggcggggactgtcgcgtggagctgccgggcgagcaccgttagggcagcctggcgcgcggcgcccgccaggcgcccagtcctctgccatcgcccacgcctccctggtgccagggaacaggtatcagcgcgcctccccagcggctgggagagacgctgaatgaagaagagggaaggacggttagtcagagctgcttggagagctaagctggaagggtgcttatccctgcgtagaaacgcctgccaatgctttctcatttggacccagactccagatcgggagcagtcttatagctggatcagctaccaagagaagttgtaaaccaagaagagaaaagcatttcaatttgggacatttatttgcacctggaaatggggaatgggctgtcagaccagacttctatcctgtccaacctgccttcatttcagtctttccacattgttattctgggtttggactgtgctggaaagacaactgtcttatacaggctgcagttcaatgaatttgtaaataccgtacctaccaaaggatttaacactgagaaaattaaggtaaccttgggaaattctaaaacagtcacttttcacttctgggatgtaggtggtcaggagaaattaaggccactgtggaagtcatataccagatgcacagatggcattgtatttgttgtggactctgttgatgtcgaaaggatggaagaagccaaaactgaacttcacaaaataactaggatatcagaaaatcagggagtccctgtacttatagttgctaacaaacaagatttgaggaactcattgtcactttcagaaattgagaaattgttagcaatgggtgaactgagctcatcaactccttggcatttgcagcctacctgtgcaatcataggagatggcctaaaggaaggacttgagaaactacatgatatgatcattaaaagaagaaaaatgttgcggcaacagaaaaagaaaagatgaatatcaatacctattatatctgtgtggagtaggttttctctggtctgattttgacaaatagaagagtgtctacagcgtggtttgcctgtctgccctcctggatgctattaaagctttgttttgttgaacaatcagatgcccaactctgttgccttgtggaagatgagtaaatgcagtgcttcttaaagtggtctcttctccctaccccacaaatcttttggtactaccatttggggaagccaagcaaggatagtaaattgaccagaacacagttgtgggaatttggtctgaagttagtgaaataaaactttaaagagtgtct

SEQ ID NO: 1555 - DNA, 1147 bp, Homo sapiens
  source 1..1147: mol_type = unassigned DNA; mol_type = unassigned DNA
ggcgcgcggcgcccgccaggcgcccagtcctctgccatcgcccacgcctccctggtgccagggaacaggtatcagcgcgcctccccagcggctgggagagacgctgaatgaagaagagggaaggacggttagtcagcagtcttatagctggatcagctaccaagagaagttgtaaaccaagaagagaaaagcatttcaatttgggacatttatttgcacctggaaatggggaatgggctgtcagaccagacttctatcctgtccaacctgccttcatttcagtctttccacattgttattctgggtttggactgtgctggaaagacaactgtcttatacaggctgcagttcaatgaatttgtaaataccgtacctaccaaaggatttaacactgagaaaattaaggtaaccttgggaaattctaaaacagtcacttttcacttctgggatgtaggtggtcaggagaaattaaggccactgtggaagtcatataccagatgcacagatggcattgtatttgttgtggactctgttgatgtcgaaaggatggaagaagccaaaactgaacttcacaaaataactaggatatcagaaaatcagggagtccctgtacttatagttgctaacaaacaagatttgaggaactcattgtcactttcagaaattgagaaattgttagcaatgggtgaactgagctcatcaactccttggcatttgcagcctacctgtgcaatcataggagatggcctaaaggaaggacttgagaaactacatgatatgatcattaaaagaagaaaaatgttgcggcaacagaaaaagaaaagatgaatatcaatacctattatatctgtgtggagtaggttttctctggtctgattttgacaaatagaagagtgtctacagcgtggtttgcctgtctgccctcctggatgctattaaagctttgttttgttgaacaatcagatgcccaactctgttgccttgtggaagatgagtaaatgcagtgcttcttaaagtggtctcttctccctaccccacaaatcttttggtactaccatttggggaagccaagcaaggatagtaaattgaccagaacacagttgtgggaatttggtctgaagttagtgaaataaaactttaaagagtg

SEQ ID NO: 1556 - DNA, 1144 bp, Homo sapiens
  source 1..1144: mol_type = unassigned DNA; mol_type = unassigned DNA
ggcgcgcggcgcccgccaggcgcccagtcctctgccatcgcccacgcctccctggtgccagggaacaggtatcagcgcgcctccccagcggctgggagagacgctgaatgaagaagagggaaggacggttagtcagtcttatagctggatcagctaccaagagaagttgtaaaccaagaagagaaaagcatttcaatttgggacatttatttgcacctggaaatggggaatgggctgtcagaccagacttctatcctgtccaacctgccttcatttcagtctttccacattgttattctgggtttggactgtgctggaaagacaactgtcttatacaggctgcagttcaatgaatttgtaaataccgtacctaccaaaggatttaacactgagaaaattaaggtaaccttgggaaattctaaaacagtcacttttcacttctgggatgtaggtggtcaggagaaattaaggccactgtggaagtcatataccagatgcacagatggcattgtatttgttgtggactctgttgatgtcgaaaggatggaagaagccaaaactgaacttcacaaaataactaggatatcagaaaatcagggagtccctgtacttatagttgctaacaaacaagatttgaggaactcattgtcactttcagaaattgagaaattgttagcaatgggtgaactgagctcatcaactccttggcatttgcagcctacctgtgcaatcataggagatggcctaaaggaaggacttgagaaactacatgatatgatcattaaaagaagaaaaatgttgcggcaacagaaaaagaaaagatgaatatcaatacctattatatctgtgtggagtaggttttctctggtctgattttgacaaatagaagagtgtctacagcgtggtttgcctgtctgccctcctggatgctattaaagctttgttttgttgaacaatcagatgcccaactctgttgccttgtggaagatgagtaaatgcagtgcttcttaaagtggtctcttctccctaccccacaaatcttttggtactaccatttggggaagccaagcaaggatagtaaattgaccagaacacagttgtgggaatttggtctgaagttagtgaaataaaactttaaagagtg

SEQ ID NO: 1557 - DNA, 845 bp, Homo sapiens
  source 1..845: mol_type = unassigned DNA; mol_type = unassigned DNA
gaagggatcccacttcggggaggatgggcttatcccggcgggcgcgccaggtgggatctctagcgcctcaggggcccgcgcggcaacagccggcaccctcgggcccgcggacaaagggttaacgcgttggcagtgactgcgggccccggatgtgagagccttggcttgacgccctggctgcgctgcaggtgcgccgggccgaacggagccggcagcctggcggcgacctgaccgcccgaggctccccttcacctgcagcggctgctcggctccctctgggaacgccgccttttctaacttaagggcaacaggtggtgccggtggaccgagagagagctcagctccgccgcgctgggagcggcagttaccctcaccaattagggagcgggggcgggagttgcatggcttccctgatgcgggtgaccaatgggatttgggatcatgagtggaccgggaggagtgggcgtggtcggagtctgagtccaaggtttctcgtgcggcaactgccagagctgcttggagagctaagctggaagggtgcttatccctgcgtagaaacgcctgccaatgctttctcatttggacccagactccagatcgggagcagtcttatagctggatcagctaccaagagaagttgtaaaccaagaagagaaaagcatttcaatttgggacatttatttgcacctggaaatggggaatgggctgtcagaccagacttctatcctgtccaacctgccttcatttcagtctttccacattgttattctgggtttggactgtgctggaaagacaactgtcttatacaggctgcagttcaatgaatttgtaaataccgtacctac

SEQ ID NO: 1558 - DNA, 840 bp, Homo sapiens
  source 1..840: mol_type = unassigned DNA; mol_type = unassigned DNA
agctgcttggagagctaagctggaagggtgcttatccctgcgtagaaacgcctgccaatgctttctcatttggacccagactccagatcgggagtcttatagctggatcagctaccaagagaagttgtaaaccaagaagagaaaagcatttcaatttgggacatttatttgcacctggaaatggggaatgggctgtcagaccagacttctatcctgtccaacctgccttcatttcagtctttccacattgttattctgggtttggactgtgctggaaagacaactgtcttatacaggctgcagttcaatgaatttgtaaataccgtacctaccaaaggatttaacactgagaaaattaaggtaaccttgggaaattctaaaacagtcacttttcacttctgggatgtaggtggtcaggagaaattaaggccactgtggaagtcatataccagatgcacagatggcattgtatttgttgtggactctgttgatgtcgaaaggatggaagaagccaaaactgaacttcacaaaataactaggatatcagaaaatcagggagtccctgtacttatagttgctaacaaacaagatttgaggaactcattgtcactttcagaaattgagaaattgttagcaatgggtgaactgagctcatcaactccttggcatttgcagcctacctgtgcaatcataggagatggcctaaaggaaggacttgagaaactacatgatatgatcattaaaagaagaaaaatgttgcggcaacagaaaaagaaaagatgaatatcaatacctattatatctgtgtggagtaggttttctctggtctgattttgacaa

SEQ ID NO: 1559 - DNA, 3212 bp, Homo sapiens
  source 1..3212: mol_type = unassigned DNA; mol_type = unassigned DNA
tggcttgacgccctggctgcgctgcaggtgcgccgggccgaacggagccggcagcctggcggcgacctgaccgcccgaggctccccttcacctgcagcggctgctcggctccctctgggaacgccgccttttctaacttaagggcaacaggtggtgccggtggaccgagagagagctcagctccgccgcgctgggagcggcagttaccctcaccaattagggagcgggggcgggagttgcatggcttccctgatgcgggtgaccaatgggatttgggatcatgagtggaccgggaggagtgggcgtggtcggagtctgagtccaaggtttctcgtgcggcaactgccagagctgcttggagagctaagctggaagggtgcttatccctgcgtagaaacgcctgccaatgctttctcatttggacccagactccagatcgggagcagtcttatagctggatcagctaccaagagaagttgtaaaccaagaagagaaaagcatttcaatttgggacatttatttgcacctggaaatggggaatgggctgtcagaccagacttctatcctgtccaacctgccttcatttcagtctttccacattgttattctgggtttggactgtgctggaaagacaactgtcttatacaggctgcagttcaatgaatttgtaaataccgtacctaccaaaggatttaacactgagaaaattaaggtaaccttgggaaattctaaaacagtcacttttcacttctgggatgtaggtggtcaggagaaattaaggccactgtggaagtcatataccagatgcacagatggcattgtatttgttgtggactctgttgatgtcgaaaggatggaagaagccaaaactgaacttcacaaaataactaggatatcagaaaatcagggagtccctgtacttatagttgctaacaaacaagatttgaggaactcattgtcactttcagaaattgagaaattgttagcaatgggtgaactgagctcatcaactccttggcatttgcagcctacctgtgcaatcataggagatggcctaaaggaaggacttgagaaactacatgatatgatcattaaaagaagaaaaatgttgcggcaacagaaaaagaaaagatgaatatcaatacctattatatctgtgtggagtaggttttctctggtctgattttgacaaatagaagagtgtctacagcgtggtttgcctgtctgccctcctggatgctattaaagctttgttttgttgaacaatcagatgcccaactctgttgccttgtggaagatgagtaaatgcagtgcttcttaaagtggtctcttctccctaccccacaaatcttttggtactaccatttggggaagccaagcaaggatagtaaattgaccagaacacagttgtgggaatttggtctgaagttagtgaaataaaactttaaagagtgtctgcctagtgttttgtgcttacatctttcggggggaagcctttgcaagaaaattgcatacaaggctttgtaacgatcaagtgctaatcgatggaaatgttaaggtagattaacatatatgcagttatattgatcacattggtccaaccagtccttttttgaagtaagggacaaggagtaagtattttcttttttaagtttctgccaaatgatttttgacgctttctggaatcaagtaatttaatagtatagcttaattctagacaatgtttaagttggtctacctttattaaaaataagatatttggggtatattcaagtgcatggattagttttcctgacaaagcatgttttggtgtgtagtcttactttttagaaatagctatgcatcgttctacacaggtttaaaacaacttttttggggatttagggctattataggaatagtttgttgtcagaagcactttcacttgaagaacctaaaatgattgactcattcatagtaaatatgggcatgtaaactaataaatatgcactggatacatatatggatttatgaagaaggcgatttagtcaagaggatgtaattaaaatatgtggtctctaaaatattccagttacaagatatttgttttattaatatttgctggctaaaaacaaatgtggtttttatatatttttgtagtgtgttgagaagagcaaaagctttataaatatacctgatgcgctgtagaatgaaaatgtaaaagataacctgtatgtgttccgagctttaattttttgtttacaaattgaacagtgttacatgggctgtccagtcctgattatagagaggaagaaatggtaacagtatggcagataagaattacaattatagaaaatgaggggaaaataacaaacctgttttatgaaaattcactggtgctgtttacattggaataaaaagctctataaggaggaaaggcctttatctaattcttatctacagacacttacttccagtgaccatattttactaaatcagcttattttttatgtctaaagcaacagctgttctgaaaaatcaccaaaagaaatgcactttgctagcaggatttgttttggctttgggttttgtttttttgttttttttttttttcagtggcataacagtttttggaaccttgattcttgtgtcacacaaaatgaatgaagtagcttgatgtggagccttcatatgttaaatattcctgcactagtgatggtcacttagaatgtttatagaaatgtggataataactaccaataaactacttgaggcactaggagaacagtatttgactttgaattttaatgtatttccacttttgctgaagcttttaatcagatgtgtaaaaacaattgaccagctaggctatttagtcccatagtagttcagatctgcttagatgtgacaggcattgaaggctgtttttttttttttctcccttcactgatactgaaatcatggtatctgctgcaaacatgagtagatccatgatggattaataaagcttgctgaaaaaaaaaatctgtgtatcaattagatttaccagtttgcctgtactttctgtctacctactatgtaaaatagtgctgtttttaagtatttcaaaagcttgtgtgttgaccctttgtagcctaagtacgtaaacaaattaatgttatctaagtttttcatatttcatggacaacaaaagagaaaatggtatgaacactgtacaaactttgatttataaa

SEQ ID NO: 1560 - DNA, 7196 bp, Homo sapiens
  source 1..7196: mol_type = unassigned DNA; mol_type = unassigned DNA
ggggactacgggtcggcgttgggctcagtgggctcgaaacaaagggctgtccggtggggattcgtcgcggcgccttctgagtggtcgggtcgaggcttctcggcctagcagtgccctcgctgcgcgatctcaggcgggttctcctcggctccgcgcagcccgcgccgcggtgggggacccggcgcagcggcacctgctgccgagggaccccgcggcccgccccggtgctcgtgatggggctgatcttcgccaaactgtggagcctcttctgtaaccaagaacacaaagtaattatagtgggactggataatgcagggaaaaccaccattctttaccaattcttaatgaatgaagtggttcatacttctccaaccataggaagcaatgttgaagaaatagttgtgaagaacactcattttcttatgtgggatattggtggtcaggagtctctgcgatcatcctggaacacatattactcaaatacagagttcatcattcttgttgttgatagcattgacagggaacgactagctattacaaaagaagaattatacagaatgttggctcatgaggatttacggaaggctgcagtccttatctttgcaaataaacaggatatgaaagggtgtatgacagcagctgaaatctcgaaatacctcacccttagttcaattaaggatcatccatggcacattcaatcctgctgtgctctcacaggagaagggttatgccaaggtctagagtggatgacctcccggattggtgtgagataacttttttgcttgaaagagactgctctatttattctgtgacatgaacattttttcctagtacctttggctgctaaggcagcagcatgtttaatttataacaacacaaacctctgagagcaacacttgaatcaagtgcagctgaactggaacataaaagattttttcttaactttttttttttaacacactaatcttcagttggatgaatgtaatgtataactatgttttcagcaacaattcttctgtttattctaattaatcagtgactgccttgtaagaaatgtttgtcatatgcgtgatgtcttctgaaatattcttataaccttaatgaccaattgctttcaattcttgaccagcactccctcccaaccagagaattactggtttgatagagtagtcttggaaaccatcaggtactgcctgcagacttctccagcactaaatatatttgttccctctataaaccattcatctttcggacagaacttactgtaaagaaagaaatctgcctagaggatatatgtaaggaagattccacatcatgagtacttgccttttaactttcccccacattactgttgagtcatggaataatgtttaagttgttatttgcatggaaattaagtaggctgtttatttatctaaaggaatcaagtccactcttctgcctgcaacatttgttcaaaaactaaccaaggtaaaatatttatttgaaagcccaactttgatgttaaatattcttgaataaatctgttattttaagaatatcacattattcaatgcatataaaactatcagaagttagtaaatcataccagcactaaaaataagacaattggaatatattttagcatcagtttacaaacaactttattatcaacagaaattttagctcttttctttgcaagatatatcacagctgctttgggcagtagctgaagccgaagtatgaacagtccattttgtttcttaaaatttgaagtcgtgtctgtcatagcatttttactaccagcagtatgttacttaaaaaactacatggctttccttgaatttatttgacggtattatgtaatagacttgaaacaattgccatctttgtagttatgccttgggttctaaaatgttataggaaactgctgaattgaatcctagcttttagaatattaataggagactcaaagttaatattcttaacaacttaaaattaaaaaaagtcataatctatcaaaagtttatttattggatggcattaaaacatttttgaggcagttgtctaatatgaacaataatctaaacaatatattccttaaattaagaggaaagacaagtgtcgtatttcgatcctgtttattcaaatgtgtgattttgctgaaatgaaagggataaaatgaatacttagagaataatacttcatttttgcagtactttttaattttgataaaaaagatacaaagttcataatatcaaaatatgtgttcaaaattggtattttaattttaatatttttgtaagttgatttaaattttgctcttttttcaggtgtgcttggtttattatatttagtcaagttaatttagtcgaatgtggtaacatttttctgatttatctttagttggagcacacccttgaactgaacagtggccaaaggaaagctttctgggctttggaaagtagttgtttaactttgttttaagccgttttcttagtgattctgtatcaagtagaggataagtgtagtttaacttagtttttaatataacccataatcaagaacatgagcgaaaagcagacataaatcgatatggatggtttgtggtgtgtgtgggatgtgggggaattaagaaaatgccatttacctaagcacagtttgcctgaatttctgcttggttgtgttgtttaccgtaagtactgagggtagtttccctaagtctgtcctgagaaaaagcatacttagtactcctgtatttgttcttatgaaatgactatctgccttcttgtatctagtaagattggctggctcaattttcttctgtcaaattatatggttattttttatattaccacatcagcattatattaaaagtgtttttaatagttgattgtattttgccaactactagtatagactcaaatttgctatttaatttttaaaatacaatttattttgtaaatcctttaaaaaatatttggttagttttggattagaaatgatttatgttagccatgtgttgaagatgaaattggcatcagtgtagacggtgctgattgggaaaagttcatgattaggaaattcatgtaagactttttaagagtattttttaggttttcactcaatctttcctgtcacagtaacgtgaaaactgattattctttactccaagagaatgttttaacccaagcaagtatctaatactagagcattggttctgacattcattgtaaatcagtgaactgtaagatactgtctaaaaaatgtacatttgtaattagtgcctttattcatattttgaaataagttcttagttttatattatacctgttctttagaagtcatgttagcagctaattatttcagtgatgaaataatttgtgttttatatcccccttcacctccatgtattggttagcacagtttatagtaagtgaaaagcaagggacccacctacattaccttcaggagactgttctaccttttaatttgaaaacaaggaaattaaattttaacagaaatcttttaagtatgttataaccaaagtgttcaattatccttgcaagttcaaatacagcatttttcttaattttgagcgtgtcatgtccttcatctttaaacccatcattcttattgaagcccatttgagaactcttagaattaatagaaccttttataagggaatatatggaatattttttattgttaatgtaacttaattccttaaaacctggaatattaatatatataatctattaaaagctgaagattaaatatgtaatttttgcttttagtttcttgtgttagtatgcttaaaggtatcaatacttttattctatattcattagaagaaaggtaataaatttaagtttcattgctgaaaaattttaaatgagtgccaccccatagccatagtcattttgattaagcataatttaactttcattatagcataaagagaaaataattattttagtatggaaacagtgataggcagtgctgtaaacaatattctctgaaaagttgtgggggtcacaaagaaaattttaaagaatatagaagcttttttaaaaaatctttttagtgtagtttcttagaacaaattataaacataatcattctgaataatcaatttttatttagtccttaactatgtaaaaccgtatcagtagaaaaatgtgctggtgtcgtgtctaaagatggataaatttctttggaatttatctttggagaccaactttatgaggcagactttttgtctacagctttggaaccaaaaaaacttcactctaattcagtcctaaaggctattttacattttgccggggtaaagtgacttcaagatacagcatggtgtcttgtatctagtagaatattgtgctagccatctaaaaaagtggatttgagccttaatttggccgtttctcaattgtctagttgaccttagacaattagtgtccatggctttccttttgtttttcccatactgaggaacttaaactacagctctaaaatgtcttttggttttaaaattctgaatgcttatatactactattaaaaattaaaaatccctcaaatagtagggcaatacaggtaatatgaaattaaatgtatttttatccattatttgattcccacctgttattttatttagaatacgaatacaaccaagtagggaaaaacgtatcagtaactgctattcaacttaaattcagcgaattaatagctgaatagaaatagctaatgacaatgcaaaagagaaaacaagccatattgctaagaaaaggatagtaagctgcttagaaagaaccagcctgtgttggaaataattctcttctagataatttaccttattttcttggcttgtactaattgaatggaagtggttaatttgttcagagtttattgccgtttgatgccaccccagtctatagttctgtgtgactttccatattgaaagagtagggttagtagccaggttgtcagtcttttacaaatgtctacataaatgtctacataaatctgaaagtggtttatattcaaggttagtttttcagtagcgtctcctccttattcattcacttttactgtgaagactgaaatccaaaagccaggttccccaaaaaagtatttttaaaaaattttaggggaccaaaataaatagaggaagaccaatataaaaaaatatgttcaactattccattttaaatttaaagcagaaaaaaaaattgtgcccctcagacctaaaggcagctttaaatgtatatagtttggtgaaacatttgggaaatattaatttggaggtttagaagcatacgaaaaacaaattcaaagcacttgaaagtaaagacaatatcatgaggtcgaaaaaacttcaaaaggatattaggtaagagaaaatgtgaatgaaagcagtgaatttctgcctctcctcgtatttagggtacttaaaattactaaaaaatactgtctttttaccatacagctagatggcctgtattattcttaatgtggccaaaggagtgaagactgattagggttttagaatttggaactgtagtcacataaaggcatcttttgcatttcttaaaccagtaatctacattttctcctggaaatggagaaatatgaaatgtgctgtgcatagcttttggaatagaaaacaaagttttaaaagaatggatatgttttcttgcacaacttgtaaaattttaattaaaaaattacctcatttttcaatccataaggtgctttgctcaagtttgtgggatgtttgtaccatcccataaaaacccccttcacccaaactgtatttgaaatatgcaaaattcataactaagggatagcattccttggagactttgttttgttttactcttgtttaccagctgggccaacatggtagatatatgagattcacatatggtttcattaaagcacataggaaagtgctcagtcaatatttaattagtttaattagataagggaaaggagaaatcctaaatttgatggattcttttatactgtgaatatatttccatcagtgttggtaagatatcaaatgactatcagttgatcccagtcatcagtgacttatttgcatatttaagccctattcacaagagaccataatcattttaatcttatattttccctcaggaaatttagggactctgaagcccctattttattctcttggagtaaactgttgagtgtagttacaaaaacttttatttatgacttaaaaaaagtttagctgctatttcagtgaaagtgtaaaataaaacggtcatgatttttttcaattacagaatagttacaaattttaccatgttcatctattccacagagcatgttaaaaacaacaacaacaaaaacctaacagcaattacaaccttggtgttgcgtttattctaatcagagtgaatgattataatcacactttgctattttaacataaattggtgctttagagcattaaagaggaagcagcaggccctgtactcagtatttattatttcttgcctcagaatgcaaaacaactttaaagtgtctatattcatatatatgtgcatttcttaagatttaaatacaaactgttgttactccttaagcttcaggctttctgcgaaagctctaagaatatcttcattactatgcttggtcaactggaagatggtattaataaggtcagaattaggaattggattgctctgtgggtcctccggtattgtgcagaggaaagaaaaatgtctttcacaccacaaactgtgtgtctgaaccccagccaaacaaatgtgttccattggtccaatatataagcattaacaacaacaacaaaaaatttaaaacaagtaaattaatgcattcacatgatcacttcttgaaaatggttcaaagcatgttttcctgatggtgggattgtttaaatgacatgttttaaagtttttaatactttattagttatgaagtgcttcttttatatgttaagtttaggttgccagtactcataatttttatttctgcaattatgttataatgagttgtttgcatgcctacttaacccaagtaaaacgatgctgtttgctctggaatgttcatcttttagacaggttttggctcatttccaatcatggtgcaatatagtgtaacattcatttgttttcattcaacagttttatttttgtcataataaataattacttttccaata

SEQ ID NO: 1561 - DNA, 2141 bp, Homo sapiens
  source 1..2141: mol_type = unassigned DNA; mol_type = unassigned DNA
gccgacgcgtgcagacgtccttctaatcctagtcttcgtttggtccggttgcactcttcctatagcccagagggcgagagggcctgtggcctgggggaaggaggacgaggttctgcctggatcccagcagtaggacgctgtgccatttgggaacaaaggaatagtctgcctggaatccctgcagatcttggggccggaggccagtccaacccttggagcaggaagaaacgcaaagttgtcaagaaccaagtcgagctgcctcagagccggcccgcagtagctgcagactccgcccgcgacgtgtgcgcgcttctctgggccagagcgagcctgttttgtgctcgggttaagagatttgtcccagctataccatgggccgcactcgggaagctggctgcgtggccgctggtgtggttatcggggctggtgcctgctactgtgtatacagactggcttggggaagagacgagaacgagaaaatctgggacgaagacgaggagtctacggacacctcagagattggggttgagactgtgaaaggagctaaaactaacgctggggcagggtctggggccaaacttcagggtgattcagaggtcaagcctgaggtgagtttgggactcgaggattgtccgggtgtaaaagagaaggcccattcaggatcccacagcggaggtggcctagaggccaaggccaaggcccttttcaacacgctgaaggaacaggcaagtgcaaaggcaggcaaaggggctagggtgggtaccatctctgggaacaggacccttgcaccgagtttaccctgcccaggaggcaggggtggaggctgccaccccaccaggagtggatctagggccgggggcagggcaagtggaaaatccaagggaaaggcccgaagtaagagcaccagggctccagctacaacatggcctgtccggagaggcaagttcaactttccttataaaattgatgatattctgagtgctcccgacctccaaaaggtcctcaacatcctggagcgaacaaatgatccttttattcaagaagtagccttggtcactctgggtaacaatgcagcatattcatttaaccagaatgccatacgtgaattgggtggtgtcccaattattgcaaaactgataaaaacaaaagaccccataattagggaaaagacttacaatgcccttaataacttgagtgtgaacgcagaaaatcagggcaagattaagacgtacatcagtcaagtgtgtgatgacaccatggtctgtcgcttggactcagctgtgcagatggctgggctaagactgttaaccaacatgactgtgactaatcattaccaacatttgctttcctattcttttccagacttttttgctttgttattcctgggaaatcacttcaccaagatacagattatgaaactaattataaactttactgaaaatccagccatgacaagagagctggtcagttgtaaagtaccatcagaattgatttccctctttaataaagaatgggatagagagattcttcttaatatccttaccctatttgagaatataaatgacaacataaaaaatgaagggctcgcatcatccaggaaagaattcagcagaagttcactttttttcttattcaaagagtctggagtttgtgttaagaaaatcaaagcactagcaaatcacaatgatctggtggtgaaagtaaaagtcctgaaagtattaaccaaactctaatttggagtctgtcccaaacaatattgagatatttgcagttggtacgatgtgatttgtaaattctttgtttttcattgtgcgtatatggtaaagagatcttttcagctgctattttggaataatgactatcatatatcataacagtgactgatgttggttgtaatggttgggtttaggatgaaccattttaaggatgccaaatgaaatattagtatttgtacacagaaagaatttattgatttgatcttattacctagattgagattttttaatctttcctctacctaaactgacaatgaattggttatacatcatgcataagctacacttttatattagtttatatttgttattctaagacttgtgtttcatcaataaagttgtgttttaagcagcagaaaaaaaaaa

SEQ ID NO: 1562 - DNA, 1145 bp, Homo sapiens
  source 1..1145: mol_type = unassigned DNA; mol_type = unassigned DNA
gcggccgcggcggcggggagagcggagggagcgccgcccgcccgcgccgtcctttgtgtggcggcggcggcgcctgggcctgaccgggtccccggggctgagcgccgggctccgcgccgcccctcccgcgcccctgccaagcgggcgcctatcctctccgagcaagatggcaaccccggcggcggtcaaccctccggaaatggcttcagacatacctggatctgtgacgttgcccgttgcccccatggcggccaccggacaggtgaggatggcgggggccatgcctgcccgtggaggaaagcggcgttccggaatggacttcgatgatgaagatggtgaaggccccagtaaattttcaagagagaatcatagtgaaatcgaaaggcgcagacggaacaagatgactcagtacatcacggagctctccgacatggtccccacatgcagcgcactggctcggaagccagacaagctcaccatcctccgcatggccgtctcgcacatgaagtccatgaggggtacagggaacaagtccaccgatggcgcgtacaagccttccttcctcacagagcaggaactgaagcatctcatccttgaagcagctgatggatttctgtttgtggtggctgctgagacagggcgagtgatttatgtgtctgactccgtcacccctgttctgaaccagccccagtcagagtggtttgggagcacactgtatgaacaggtgcatcctgatgacgtggagaagctgagagagcaactgtgcacctcagaaaactcaatgacaggtcagtggagctccctttatgaggctgtttgactctagaaaacattcttggctgggcatggtggctcacgcctgtaatcccagtactttgggaggctgaggcgggtggatcacgaggtcaggagatcaagaccatcctggctaacatggtgaaaccccgtctctacaaaaaatacaaaaacaaaaaatttgccaggcgtggtggtgggcgcctgtggtcccagctactccggaggctgaggtgggagaatggcatgaacctgggaggcagagcttgcagtgagccaagattgtgccactacactccagcctgggtgacagagtgagactctgtctcaaaaaaaaaaaaaaaaaaaaa

SEQ ID NO: 1563 - DNA, 6558 bp, Homo sapiens
  source 1..6558: mol_type = unassigned DNA; mol_type = unassigned DNA
cggccgcggcggcggggagagcggagggagcgccgcccgcccgcgccgtcctttgtgtggcggcggcggcgcctgggcctgaccgggtccccggggctgagcgccgggctccgcgccgcccctcccgcgcccctgccaagcgggcgcctatcctctccgagcaagatggcaaccccggcggcggtcaaccctccggaaatggcttcagacatacctggatctgtgacgttgcccgttgcccccatggcggccaccggacaggtgaggatggcgggggccatgcctgcccgtggaggaaagcggcgttccggaatggacttcgatgatgaagatggtgaaggccccagtaaattttcaagagagaatcatagtgaaatcgaaaggcgcagacggaacaagatgactcagtacatcacggagctctccgacatggtccccacatgcagcgcactggctcggaagccagacaagctcaccatcctccgcatggccgtctcgcacatgaagtccatgaggggtacagggaacaagtccaccgatggcgcgtacaagccttccttcctcacagagcaggaactgaagcatctcatccttgaagcagctgatggatttctgtttgtggtggctgctgagacagggcgagtgatttatgtgtctgactccgtcacccctgttctgaaccagccccagtcagagtggtttgggagcacactgtatgaacaggtgcatcctgatgacgtggagaagctgagagagcaactgtgcacctcagaaaactcaatgacaggccggatcttggacctgaagactgggacggtcaagaaagaagggcagcagtcatccatgaggatgtgcatgggctcgcggcggtctttcatctgcaggatgaggtgtggaaatgctcctttggaccaccttcctctaaacagaataaccaccatgaggaaaaggttcaggaatggccttggccctgtgaaagaaggagaagcccaatatgctgtggtccactgtacaggatacatcaaggcctggccaccagcaggaatgaccatacctgaagaagacgctgatgtgggacaaggcagtaaatattgcctcgtggcaattgggagactccaggtgaccagctctcctgtatgcatggacatgaatgggatgtcggtgcccacagagttcttatcccggcataactccgatggaatcatcacatttgtggatccaagatgtatcagtgtgattggctaccaaccccaggatcttctgggaaaggacattttggaattctgccaccctgaggatcaaagccatctgcgtgagagcttccagcaggtggttaagctgaaaggccaagtcctgtcggtcatgtatcgatttcgcaccaagaaccgggagtggatgttgatccgcaccagcagcttcacattccagaatccctattctgatgagattgagtacatcatctgcaccaacaccaacgtcaagcaacttcagcaacagcaggcagaattggaagtgcaccagagagatggattgtcatcgtatgacttatcccaggtccccgtccccaacctaccagccggtgttcatgaggccgggaagtccgtggaaaaggcggatgcaatcttctcccaggaaagagatcctcggtttgctgaaatgtttgcaggaattagtgcatcggagaagaagatgatgagctcagcctctgcagcaggaacccagcagatctactcccaaggaagcccatttccctctggacactccgggaaggccttcagctcttcagtggttcatgtgcctggagtgaatgatattcagtcctcttcttccacgggccagaacatgtcccaaatctcccggcagctaaaccagagtcaggtggcatggacagggagtcgtccgccctttccgggacagcaaatcccatctcagtccagcaagactcagtcatctccctttgggattggaacgagccacacctacccggcagacccctcttcctacagccccctctccagcccagctacctcctcgccaagtgggaatgcctactccagtcttgccaacaggactccagggttcgctgaaagtggacaaagtagcgggcagttccaagggcggccctcggaagtctggtcgcagtggcaaagccagcaccatggccagcagagcggtgagcagcactcccaccagcagcccggtcagactgaagtgttccaggacatgctgcccatgccaggagatccaacccaggggactggcaactataacatcgaagactttgccgacctgggcatgtttccaccgttttctgagtagctgcggccagagtgaggctcctgctgtacagtgccacccatactgtgatgtcgatgcccatgtgaatgaggcccaccctcgccctgcttgccctgccgcaggccccccaccagaagccatctcccccgctgtgtgtccccaggcgcatcattgctccactctcccctgcagccgcggctgctcggccactgaccaggggccctggcagacattaggggatcagttgtatttattgtattttatctgtgtgtgctcaggaggtgagcctagtgggtccttaagtttggttgtgaataatctcttgatagacaatttatacccatgaaagttcagccaatgcccagagtgaccaagcagcaccagcaggcctgcccaggatgctgaaagcagatttcttcttgatttcacttctgatggatgcatggggctctgggggaatgctgggaaaatgggcaagcagagtgcacagccctcgttctgccagctggagccaagaagcacagagacacagaggcgcctgcccctcagctccgctggtctgtctgtgcatccactgtgccgtgggacatatgtaatttgtgcagtgtgacatggacttgctgtcctaatggatgtgttgtgccttgtgtctgtcatgtgtggccagcgtgattgtatagaatccagagtatgtagagagccaaaatgtgtggccctgtccccaagctcagcaccaccggccatgaccagaggttgctcggcccagggtctgggagctgggctaacaggctgacacttcggcagggtcaccaggaggcacagctaggggcatgctcacatgggtaggtcagttctttggtccaagcctctggtgcagattcaagctcctcctcttagaggaagcagctccttcctcccacaggagccccaagggagcactcaccctcctcccaattggatctgaatagctgtgttcctgatcccacataagcatgtctcatccttgccccactggtgagaggaggaccttgtgcctgcccagagcctgcaggacagcacgccttgaggtcagaggcctggcccttctttacagatgtagatagcagggtaggacgcccaggccttctcacatgggcaccatgaaacactttcttccaggccacctgagccttcgttcttcagcccgactggaggaacagcagctctgggaggcacagagtgcaggtctcaggggcagaagacatgggttccagttctggttctgccacacacccaccggccttgaatttctctggtggtctcaagacaagaacaagagctgactctagaatcttctgcctggctgacctctgagcccatgatccctggcttgctgtgcttctcttggatttgaggagagtttatgaatccatccccctgttttcagggacctctgccttctcccacaccccttacactagtgaggactccttcggcctcttgtgtttccttccttttgtgaccattacgccccctccctgtttcttatcaccagcccatcagcccactgactcccatatggtagaaaaggtaccgtggctgctgcagggcacatggagggacctaccctctgggaaagcccttgtgtccctcccagagtccttcaggtaggccctcgcagatgctgcttgctcagaaacaacccgtgcatccctgcccatggattctgcaggacctagaagagtggcattggttctaggaacctgagagtggagtgaggccagcatgcaggaaggagtttggagagagtgtttgctgtgatccattgaaagctccacattaaaccccagccctgtctggccagggagatccatgtgctcaatgttgctgggggacctacaaaagtcaaacattgctcagtaaaatgcctttggctggtcgccagctgtgcatgactgcagttcctagactctaacttaaccccaactttgcagtttctagagctttttgtctgtaatggtgattgggtctccactgtagatgcatgcagtgttcactccaacctcagaggctttcttgcttctggggaaatggcaggtggttgaaaccctgcacatcctcccagggccagccccagaatgggcctttctctgcctgccctgcccttggggccacctctgcctccagcaggcttgagcttgccccaggccttgggcataattatttccccccaaaaaaggcacaaaaataggttttggatcaaagaagtgtttctcagtgaaatgaaaacagtctttttatagcctttagcttgtgagtttggaagtttggggggtcttatgtttgttttgcctcttctgtttcttggaggagagttgaggcttttcttaggtgcatacacagacccaggtgaacacgctgactgtgaacctgccctgtatccggagctgtgctgggcactgaggggatgcaacaaaattaggagaggatccttgctcccaacgtctacttctcctacctcaacaggggtccagggtgcagtgaactcagttcttggcccttgggtgaggattcatggatgaatgaaagctagacctgatggggaggcattatgactaaataggcccagcctccttcccttccagctctgtcctaggagcataggcgggaaatctgagtagagtctgactgcagtttttgcttatgatttgtaaaagccgtcatggggtcaataagaaaataggggtgatggagggggagaagcccaggactgggagaatcgcacatgccccaggggttttcaccaaggattttcaagacaaactggagtaagaattaaagccccagaggatttaattatcctggtttgcaaaagagcctcccatgccagtaccgcccagccttggaggccggaatgctcatggcccctgtggtctgcttgtccttcagcccatgcccagcagatacctctctgactggagacgggctcaaagctggattagaaaggggagaggcacttgtgactttgtttgactctgtgactcacttcctcgctcacaccttgtttgaactactggactttcaactggctttccttaggtcaggcaagcagacagctccccactgaagaggtctgtacagtgacaacccgggccggcagcaaggacacagatgcagccacagtaaggctccatcaggactgggtcagtgatggcaacaggatggccaaggatggctctagaacactctgtccatgcgtcactccccccagttttatttttagctttggcttcagggagtgacagccatcacaaatagccacattctgctctactctccaacataccagattctacactgttgttatttcatgagacgtgaatgttgcagagagtggggggattctggttgttaaggaacttacactggggagctttactcttccgtgtcaacaatgtgactacatgttctccagattagccacacatgcaaacatcagtgtccttctagctttagccgagaaagaaaccagtcccagggaatgaatggtggtctccccactcccggcagcactttaggcagcccataagctatgcgagaatgtgaacgctcaccttgctccgtcacggttctgacctaccacataaacaggaagaagccagtgaccggaacagctctaggaataacaagtcagaatagaagtgtcctttatattaccagaaaatatgggcttggcctaagtcgctgtctcctaacctgccggggtcattccccaccaaacaccccatactaaggagccatgagccacctggacattcaccttttctttgaccatctggagtctggggcaacttaaggaggcaccacacagtggtgcaggcacatttccaagcgtaggtgtccctggcttttgtggccaaagctagtgttatggtcaacaacaggccagggtctgtggggcactgaccttgaaagtggcaaaatggaggtttcacaggctgtgcgggagcaggacggcttgcttcatctaacaatctcagtttcctttaaaaaaagaaagaaaggaaaagatttcataagcaggtgtcagtggacagtttaagtacttaaccatttctctttcttcttatggatgtgaactgtgctgtggataaatcatttgtatttcttgaatgttctctatgactaacagttattaagtcggttgtgtatatgtgtaactaatgtaactgccttttaaaatttcattacaataaaaatgactttgctctgaacaacaaa

SEQ ID NO: 1564 - DNA, 6690 bp, Homo sapiens
  source 1..6690: mol_type = unassigned DNA; mol_type = unassigned DNA
atctgtgatgacattttctcagcagaatacaaatgcagctacatttcctcccagaggtttctgacatttcttctacacggataacagattctcctaagaaggtgttggtcacaaggaagaaagatctttgtttaatccctctgaaaagtgtaggaggatcaggtgaccaaggttttttagaattttccctttttgggatctgacgccgacacactattttgaggcagtgacatcatctctttcctctggcgtgccctccttgcggctccatcattcaggccttgtcatctctcacctggactgctgtgaccttcattcattcccaggagaagtccagaaatggcttcagacatacctggatctgtgacgttgcccgttgcccccatggcggccaccggacaggtgaggatggcgggggccatgcctgcccgtggaggaaagcggcgttccggaatggacttcgatgatgaagatggtgaaggccccagtaaattttcaagagagaatcatagtgaaatcgaaaggcgcagacggaacaagatgactcagtacatcacggagctctccgacatggtccccacatgcagcgcactggctcggaagccagacaagctcaccatcctccgcatggccgtctcgcacatgaagtccatgaggggtacagggaacaagtccaccgatggcgcgtacaagccttccttcctcacagagcaggaactgaagcatctcatccttgaagcagctgatggatttctgtttgtggtggctgctgagacagggcgagtgatttatgtgtctgactccgtcacccctgttctgaaccagccccagtcagagtggtttgggagcacactgtatgaacaggtgcatcctgatgacgtggagaagctgagagagcaactgtgcacctcagaaaactcaatgacaggccggatcttggacctgaagactgggacggtcaagaaagaagggcagcagtcatccatgaggatgtgcatgggctcgcggcggtctttcatctgcaggatgaggtgtggaaatgctcctttggaccaccttcctctaaacagaataaccaccatgaggaaaaggttcaggaatggccttggccctgtgaaagaaggagaagcccaatatgctgtggtccactgtacaggatacatcaaggcctggccaccagcaggaatgaccatacctgaagaagacgctgatgtgggacaaggcagtaaatattgcctcgtggcaattgggagactccaggtgaccagctctcctgtatgcatggacatgaatgggatgtcggtgcccacagagttcttatcccggcataactccgatggaatcatcacatttgtggatccaagatgtatcagtgtgattggctaccaaccccaggatcttctgggaaaggacattttggaattctgccaccctgaggatcaaagccatctgcgtgagagcttccagcaggtggttaagctgaaaggccaagtcctgtcggtcatgtatcgatttcgcaccaagaaccgggagtggatgttgatccgcaccagcagcttcacattccagaatccctattctgatgagattgagtacatcatctgcaccaacaccaacgtcaagcaacttcagcaacagcaggcagaattggaagtgcaccagagagatggattgtcatcgtatgacttatcccaggtccccgtccccaacctaccagccggtgttcatgaggccgggaagtccgtggaaaaggcggatgcaatcttctcccaggaaagagatcctcggtttgctgaaatgtttgcaggaattagtgcatcggagaagaagatgatgagctcagcctctgcagcaggaacccagcagatctactcccaaggaagcccatttccctctggacactccgggaaggccttcagctcttcagtggttcatgtgcctggagtgaatgatattcagtcctcttcttccacgggccagaacatgtcccaaatctcccggcagctaaaccagagtcaggtggcatggacagggagtcgtccgccctttccgggacagcaaatcccatctcagtccagcaagactcagtcatctccctttgggattggaacgagccacacctacccggcagacccctcttcctacagccccctctccagcccagctacctcctcgccaagtgggaatgcctactccagtcttgccaacaggactccagggttcgctgaaagtggacaaagtagcgggcagttccaagggcggccctcggaagtctggtcgcagtggcaaagccagcaccatggccagcagagcggtgagcagcactcccaccagcagcccggtcagactgaagtgttccaggacatgctgcccatgccaggagatccaacccaggggactggcaactataacatcgaagactttgccgacctgggcatgtttccaccgttttctgagtagctgcggccagagtgaggctcctgctgtacagtgccacccatactgtgatgtcgatgcccatgtgaatgaggcccaccctcgccctgcttgccctgccgcaggccccccaccagaagccatctcccccgctgtgtgtccccaggcgcatcattgctccactctcccctgcagccgcggctgctcggccactgaccaggggccctggcagacattaggggatcagttgtatttattgtattttatctgtgtgtgctcaggaggtgagcctagtgggtccttaagtttggttgtgaataatctcttgatagacaatttatacccatgaaagttcagccaatgcccagagtgaccaagcagcaccagcaggcctgcccaggatgctgaaagcagatttcttcttgatttcacttctgatggatgcatggggctctgggggaatgctgggaaaatgggcaagcagagtgcacagccctcgttctgccagctggagccaagaagcacagagacacagaggcgcctgcccctcagctccgctggtctgtctgtgcatccactgtgccgtgggacatatgtaatttgtgcagtgtgacatggacttgctgtcctaatggatgtgttgtgccttgtgtctgtcatgtgtggccagcgtgattgtatagaatccagagtatgtagagagccaaaatgtgtggccctgtccccaagctcagcaccaccggccatgaccagaggttgctcggcccagggtctgggagctgggctaacaggctgacacttcggcagggtcaccaggaggcacagctaggggcatgctcacatgggtaggtcagttctttggtccaagcctctggtgcagattcaagctcctcctcttagaggaagcagctccttcctcccacaggagccccaagggagcactcaccctcctcccaattggatctgaatagctgtgttcctgatcccacataagcatgtctcatccttgccccactggtgagaggaggaccttgtgcctgcccagagcctgcaggacagcacgccttgaggtcagaggcctggcccttctttacagatgtagatagcagggtaggacgcccaggccttctcacatgggcaccatgaaacactttcttccaggccacctgagccttcgttcttcagcccgactggaggaacagcagctctgggaggcacagagtgcaggtctcaggggcagaagacatgggttccagttctggttctgccacacacccaccggccttgaatttctctggtggtctcaagacaagaacaagagctgactctagaatcttctgcctggctgacctctgagcccatgatccctggcttgctgtgcttctcttggatttgaggagagtttatgaatccatccccctgttttcagggacctctgccttctcccacaccccttacactagtgaggactccttcggcctcttgtgtttccttccttttgtgaccattacgccccctccctgtttcttatcaccagcccatcagcccactgactcccatatggtagaaaaggtaccgtggctgctgcagggcacatggagggacctaccctctgggaaagcccttgtgtccctcccagagtccttcaggtaggccctcgcagatgctgcttgctcagaaacaacccgtgcatccctgcccatggattctgcaggacctagaagagtggcattggttctaggaacctgagagtggagtgaggccagcatgcaggaaggagtttggagagagtgtttgctgtgatccattgaaagctccacattaaaccccagccctgtctggccagggagatccatgtgctcaatgttgctgggggacctacaaaagtcaaacattgctcagtaaaatgcctttggctggtcgccagctgtgcatgactgcagttcctagactctaacttaaccccaactttgcagtttctagagctttttgtctgtaatggtgattgggtctccactgtagatgcatgcagtgttcactccaacctcagaggctttcttgcttctggggaaatggcaggtggttgaaaccctgcacatcctcccagggccagccccagaatgggcctttctctgcctgccctgcccttggggccacctctgcctccagcaggcttgagcttgccccaggccttgggcataattatttccccccaaaaaaggcacaaaaataggttttggatcaaagaagtgtttctcagtgaaatgaaaacagtctttttatagcctttagcttgtgagtttggaagtttggggggtcttatgtttgttttgcctcttctgtttcttggaggagagttgaggcttttcttaggtgcatacacagacccaggtgaacacgctgactgtgaacctgccctgtatccggagctgtgctgggcactgaggggatgcaacaaaattaggagaggatccttgctcccaacgtctacttctcctacctcaacaggggtccagggtgcagtgaactcagttcttggcccttgggtgaggattcatggatgaatgaaagctagacctgatggggaggcattatgactaaataggcccagcctccttcccttccagctctgtcctaggagcataggcgggaaatctgagtagagtctgactgcagtttttgcttatgatttgtaaaagccgtcatggggtcaataagaaaataggggtgatggagggggagaagcccaggactgggagaatcgcacatgccccaggggttttcaccaaggattttcaagacaaactggagtaagaattaaagccccagaggatttaattatcctggtttgcaaaagagcctcccatgccagtaccgcccagccttggaggccggaatgctcatggcccctgtggtctgcttgtccttcagcccatgcccagcagatacctctctgactggagacgggctcaaagctggattagaaaggggagaggcacttgtgactttgtttgactctgtgactcacttcctcgctcacaccttgtttgaactactggactttcaactggctttccttaggtcaggcaagcagacagctccccactgaagaggtctgtacagtgacaacccgggccggcagcaaggacacagatgcagccacagtaaggctccatcaggactgggtcagtgatggcaacaggatggccaaggatggctctagaacactctgtccatgcgtcactccccccagttttatttttagctttggcttcagggagtgacagccatcacaaatagccacattctgctctactctccaacataccagattctacactgttgttatttcatgagacgtgaatgttgcagagagtggggggattctggttgttaaggaacttacactggggagctttactcttccgtgtcaacaatgtgactacatgttctccagattagccacacatgcaaacatcagtgtccttctagctttagccgagaaagaaaccagtcccagggaatgaatggtggtctccccactcccggcagcactttaggcagcccataagctatgcgagaatgtgaacgctcaccttgctccgtcacggttctgacctaccacataaacaggaagaagccagtgaccggaacagctctaggaataacaagtcagaatagaagtgtcctttatattaccagaaaatatgggcttggcctaagtcgctgtctcctaacctgccggggtcattccccaccaaacaccccatactaaggagccatgagccacctggacattcaccttttctttgaccatctggagtctggggcaacttaaggaggcaccacacagtggtgcaggcacatttccaagcgtaggtgtccctggcttttgtggccaaagctagtgttatggtcaacaacaggccagggtctgtggggcactgaccttgaaagtggcaaaatggaggtttcacaggctgtgcgggagcaggacggcttgcttcatctaacaatctcagtttcctttaaaaaaagaaagaaaggaaaagatttcataagcaggtgtcagtggacagtttaagtacttaaccatttctctttcttcttatggatgtgaactgtgctgtggataaatcatttgtatttcttgaatgttctctatgactaacagttattaagtcggttgtgtatatgtgtaactaatgtaactgccttttaaaatttcattacaataaaaatgactttgctctg

SEQ ID NO: 1565 - DNA, 2458 bp, Homo sapiens
  source 1..2458: mol_type = unassigned DNA; mol_type = unassigned DNA
tgacattttctcagcagaatacaaatgcagctacatttcctcccagaggtttctgacatttcttctacacggataacagattctcctaagaaggtgttggtcacaaggaagaaagatctttgtttaatccctctgaaaagaaatggcttcagacatacctggatctgtgacgttgcccgttgcccccatggcggccaccggacaggtgaggatggcgggggccatgcctgcccgtggaggaaagcggcgttccggaatggacttcgatgatgaagatggtgaaggccccagtaaattttcaagagagaatcatagtgaaatcgaaaggcgcagacggaacaagatgactcagtacatcacggagctctccgacatggtccccacatgcagcgcactggctcggaagccagacaagctcaccatcctccgcatggccgtctcgcacatgaagtccatgaggggtacagggaacaagtccaccgatggcgcgtacaagccttccttcctcacagagcaggaactgaagcatctcatccttgaagcagctgatggatttctgtttgtggtggctgctgagacagggcgagtgatttatgtgtctgactccgtcacccctgttctgaaccagccccagtcagagtggtttgggagcacactgtatgaacaggtgcatcctgatgacgtggagaagctgagagagcaactgtgcacctcagaaaactcaatgacaggccggatcttggacctgaagactgggacggtcaagaaagaagggcagcagtcatccatgaggatgtgcatgggctcgcggcggtctttcatctgcaggatgaggtgtggaaatgctcctttggaccaccttcctctaaacagaataaccaccatgaggaaaaggttcaggaatggccttggccctgtgaaagaaggagaagcccaatatgctgtggtccactgtacaggatacatcaaggcctggccaccagcaggaatgaccatacctgaagaagacgctgatgtgggacaaggcagtaaatattgcctcgtggcaattgggagactccaggtgaccagctctcctgtatgcatggacatgaatgggatgtcggtgcccacagagttcttatcccggcataactccgatggaatcatcacatttgtggatccaagatgtatcagtgtgattggctaccaaccccaggatcttctgggaaaggacattttggaattctgccaccctgaggatcaaagccatctgcgtgagagcttccagcaggtggttaagctgaaaggccaagtcctgtcggtcatgtatcgatttcgcaccaagaaccgggagtggatgttgatccgcaccagcagcttcacattccagaatccctattctgatgagattgagtacatcatctgcaccaacaccaacgtcaagcaacttcagcaacagcaggcagaattggaagtgcaccagagagatggattgtcatcgtatgacttatcccaggtccccgtccccaacctaccagccggtgttcatgaggccgggaagtccgtggaaaaggcggatgcaatcttctcccaggaaagagatcctcggtttgctgaaatgtttgcaggaattagtgcatcggagaagaagatgatgagctcagcctctgcagcaggaacccagcagatctactcccaaggaagcccatttccctctggacactccgggaaggccttcagctcttcagtggttcatgtgcctggagtgaatgatattcagtcctcttcttccacgggccagaacatgtcccaaatctcccggcagctaaaccagagtcaggtggcatggacagggagtcgtccgccctttccgggacagcaaatcccatctcagtccagcaagactcagtcatctccctttgggattggaacgagccacacctacccggcagacccctcttcctacagccccctctccagcccagctacctcctcgccaagtgggaatgcctactccagtcttgccaacaggactccagggttcgctgaaagtggacaaagtagcgggcagttccaagggcggccctcggaagtctggtcgcagtggcaaagccagcaccatggccagcagagcggtgagcagcactcccaccagcagcccggtcagactgaagtgttccaggacatgctgcccatgccaggagatccaacccaggggactggcaactataacatcgaagactttgccgacctgggcatgtttccaccgttttctgagtagctgcggccagagtgaggctcctgctgtacagtgccacccatactgtgatgtcgatgcccatgtgaatgaggcccaccctcgccctgcttgccctgccgcaggccccccaccagaagccatctcccccgctgtgtgtccccaggcgcatcattgctccactctcccctgcagccgcggctgctcggccactgacca

SEQ ID NO: 1566 - DNA, 585 bp, Homo sapiens
  source 1..585: mol_type = unassigned DNA; mol_type = unassigned DNA
gacattttctcagcagaatacaaatgcagctacatttcctcccagaggtttctgacatttcttctacacggataacagattctcctaagaaggtgttggtcacaaggaagaaagatctttgtttaatccctctgaaaaggccggatcttggacctgaagactgggacggtcaagaaagaagggcagcagtcatccatgaggatgtgcatgggctcgcggcggtctttcatctgcaggatgaggtgtggaaatgctcctttggaccaccttcctctaaacagaataaccaccatgaggaaaaggttcaggaatggccttggccctgtgaaagaaggagaagcccaatatgctgtggtccactgtacaggatacatcaaggcctggccaccagcaggaatgaccatacctgaagaagacgctgatgtgggacaaggcagtaaatattgcctcgtggcaattgggagactccaggtgaccagctctcctgtatgcatggacatgaatgggatgtcggtgcccacagagttcttatcccggcataactccgatggaatcatcacatttgtggatccaagatgtatcagt

SEQ ID NO: 1567 - DNA, 714 bp, Homo sapiens
  source 1..714: mol_type = unassigned DNA; mol_type = unassigned DNA
cgcagacggaacaagatgactcagtacatcacggagctctccgacatggtccccacatgcagcgcactggctcggaagccagacaagctcaccatcctccgcatggccgtctcgcacatgaagtccatgaggggtacagggaacaagtccaccgatggcgcgtacaagccttccttcctcacagagcaggaactgaagcatctcatccttgaagcagctgatggatttctgtttgtggtggctgctgagacagggcgagtgatttatgtgtctgactccgtcacccctgttctgaaccagccccagtcagagtggtttgggagcacactgtatgaacaggtgcatcctgatgacgtggagaagctgagagagcaactgtgcacctcagaaaactcaatgacaggtatgcagacctcccatgctttgttcatggcaacaacttcttagggaagggatctaaaacagaagccaacctgggcattgcaagaccggaagaggaggcttgcccagtaatgtcactgaatgactggattttccatgcatgatgccaggactccactccatttctgtgaactcgactgtaccatagtgaagttcagacatctgtctttcaaaagctaccctgatgattccagtgtggaccaactactgctccccaatgcgacccctgccaacaaaccccacgcataaataaaataaaataaaataatacaa

SEQ ID NO: 1568 - DNA, 571 bp, Homo sapiens
  source 1..571: mol_type = unassigned DNA; mol_type = unassigned DNA
gtattttcgattgcttaaataaaatcgtggacacttttcttctttcccattcaccttgggcatattgttgatgacacaggtatttcccatttcaggaatgaccatacctgaagaagacgctgatgtgggacaaggcagtaaatattgcctcgtggcaattgggagactccaggtgaccagctctcctgtatgcatggacatgaatgggatgtcggtgcccacagagttcttatcccggcataactccgatggaatcatcacatttgtggatccaagatgtatcagtgtgattggctaccaaccccaggatcttctgggaaaggacattttggaattctgccaccctgaggatcaaagccatctgcgtgagagcttccagcaggtggttaagctgaaaggccaagtcctgtcggtcatgtatcgatttcgcaccaagaaccgggagtggatgttgatccgcaccagcagcttcacattccagaatccctattctgatgagattgagtacatcatctgcaccaacaccaacgtcaagcaacttcagcaacagcaggcagaattggaagtgcac

SEQ ID NO: 1569 - DNA, 585 bp, Homo sapiens
  source 1..585: mol_type = unassigned DNA; mol_type = unassigned DNA
gaggtatgggaaaagtcctggcttagccctattgtcaccccttctgttcttcatgaccctctgttgtcttcttgtttcacaggcaacttcagcaacagcaggcagaattggaagtgcaccagagagatggattgtcatcgtatgacttatcccaggtccccgtccccaacctaccagccggtgttcatgaggccgggaagtccgtggaaaaggcggatgcaatcttctcccaggaaagagatcctcggtttgctgaaatgtttgcaggaattagtgcatcggagaagaagatgatgagctcagcctctgcagcaggaacccagcagatctactcccaaggaagcccatttccctctggacactccgggaaggccttcagctcttcagtggttcatgtgcctggagtgaatgatattcagtcctcttcttccacgggccagaacatgtcccaaatctcccggcagctaaaccagagtcaggtggcatggacagggagtcgtccgccctttccgggacagcaaatcccatctcagtccagcaagactcagtcatctccctttgggattggaacgagccacacctacc

SEQ ID NO: 1570 - DNA, 2932 bp, Homo sapiens
  source 1..2932: mol_type = unassigned DNA; mol_type = unassigned DNA
ctttgtgtggcggcggcggcgcctgggcctgaccgggtccccggggctgagcgccgggctccgcgccgcccctcccgcgcccctgccaagcgggcgcctatcctctccgagcaagatggcaaccccggcggcggtcaaccctccggaaatggcttcagacatacctggatctgtgacgttgcccgttgcccccatggcggccaccggacaggtgaggatggcgggggccatgcctgcccgtggaggaaagcggcgttccggaatggacttcgatgatgaagatggtgaaggccccagtaaattttcaagagagaatcatagtgaaatcgaaaggcgcagacggaacaagatgactcagtacatcacggagctctccgacatggtccccacatgcagcgcactggctcggaagccagacaagctcaccatcctccgcatggccgtctcgcacatgaagtccatgaggggtacagggaacaagtccaccgatggcgcgtacaagccttccttcctcacagagcaggaactgaagcatctcatccttgaagcagctgatggatttctgtttgtggtggctgctgagacagggcgagtgatttatgtgtctgactccgtcacccctgttctgaaccagccccagtcagagtggtttgggagcacactgtatgaacaggtgcatcctgatgacgtggagaagctgagagagcaactgtgcacctcagaaaactcaatgacaggccggatcttggacctgaagactgggacggtcaagaaagaagggcagcagtcatccatgaggatgtgcatgggctcgcggcggtctttcatctgcaggatgaggtgtggaaatgctcctttggaccaccttcctctaaacagaataaccaccatgaggaaaaggttcaggaatggccttggccctgtgaaagaaggagaagcccaatatgctgtggtccactgtacaggatacatcaaggcctggccaccagcaggaatgaccatacctgaagaagacgctgatgtgggacaaggcagtaaatattgcctcgtggcaattgggagactccaggtgaccagctctcctgtatgcatggacatgaatgggatgtcggtgcccacagagttcttatcccggcataactccgatggaatcatcacatttgtggatccaagatgtatcagtgtgattggctaccaaccccaggatcttctgggaaaggacattttggaattctgccaccctgaggatcaaagccatctgcgtgagagcttccagcaggtggttaagctgaaaggccaagtcctgtcggtcatgtatcgatttcgcaccaagaaccgggagtggatgttgatccgcaccagcagcttcacattccagaatccctattctgatgagattgagtacatcatctgcaccaacaccaacgtcaagcaacttcagcaacagcaggcagaattggaagtgcaccagagagatggattgtcatcgtatgacttatcccaggtccccgtccccaacctaccagccggtgttcatgaggccgggaagtccgtggaaaaggcggatgcaatcttctcccaggaaagagatcctcggtttgctgaaatgtttgcaggaattagtgcatcggagaagaagatgatgagctcagcctctgcagcaggaacccagcagatctactcccaaggaagcccatttccctctggacactccgggaaggccttcagctcttcagtggttcatgtgcctggagtgaatgatattcagtcctcttcttccacgggccagaacatgtcccaaatctcccggcagctaaaccagagtcaggtggcatggacagggagtcgtccgccctttccgggacagcaaatcccatctcagtccagcaagactcagtcatctccctttgggattggaacgagccacacctacccggcagacccctcttcctacagccccctctccagcccagctacctcctcgccaagtgggaatgcctactccagtcttgccaacaggactccagggttcgctgaaagtggacaaagtagcgggcagttccaagggcggccctcggaagtctggtcgcagtggcaaagccagcaccatggccagcagagcggtgagcagcactcccaccagcagcccggtcagactgaagtgttccaggacatgctgcccatgccaggagatccaaggaatgaatggtggtctccccactcccggcagcactttaggcagcccataagctatgcgagaatgtgaacgctcaccttgctccgtcacggttctgacctaccacataaacaggaagaagccagtgaccggaacagctctaggaataacaagtcagaatagaagtgtcctttatattaccagaaaatatgggcttggcctaagtcgctgtctcctaacctgccggggtcattccccaccaaacaccccatactaaggagccatgagccacctggacattcaccttttctttgaccatctggagtctggggcaacttaaggaggcaccacacagtggtgcaggcacatttccaagcgtaggtgtccctggcttttgtggccaaagctagtgttatggtcaacaacaggccagggtctgtggggcactgaccttgaaagtggcaaaatggaggtttcacaggctgtgcgggagcaggacggcttgcttcatctaacaatctcagtttcctttaaaaaaagaaagaaaggaaaagatttcataagcaggtgtcagtggacagtttaagtacttaaccatttctctttcttcttatggatgtgaactgtgctgtggataaatcatttgtatttcttgaatgttctctatgactaacagttattaagtcggttgtgtatatgtgtaactaatgtaactgccttttaaaatttcattacaataaaaatgactttgctctg

SEQ ID NO: 1571 - DNA, 611 bp, Homo sapiens
  source 1..611: mol_type = unassigned DNA; mol_type = unassigned DNA
agagttggcctggagagtgagcggtggagggagtggaacaaggcttcgtcaagagtccccaggagtccaggggcgcccccgagacgggttgacgatgtgtcacactgtgtaagggaatcgcatggagatgggcattccgaactgttaatggggacatgggactccagttgtctctgatcacttgtgtggattttcctggcgtagaacgacagaagccgctagtaagtcgccaagacctacagcaggaattctgcaccaaagggcataaaatcttgttattttaatttgcatctgggagaatgtctgagcaaggagacctgaatcaggcaatagcagaggaaggagggactgagcaggagacggccactccagagaacggcattgttaaatcagaaagtctggatgaagaggagaaactggaactgcagaggcggctggaggctcagaatcaagaaagaagaaaatccaagtcaggagcaggaaaaggtaaactgactcgcagccttgctgtctgtgaggaatcttctgccagaccaggaggtgaaagtcttcaggatcaggaatcaattcatttacagctttccagtttttccagcctgcaagaggaggat

SEQ ID NO: 1572 - DNA, 3150 bp, Homo sapiens
  source 1..3150: mol_type = unassigned DNA; mol_type = unassigned DNA
gggtgggactggcagagctacggacaggtgggagcagtcagacagcctgagagagggagaccagaacgcaaagagagcgagagcattaagtaggcagggagaggcacacagaaagatagacagcaacactcgcgtgctccctccctccacacgccctcctcttaccgagcgaagcggccaggggcacagagtgggagaggactgtgggcacagaagaccggaagagggacgctgcattgctggtgggacggagggattcggacggacggacagaccagcgcacagactggcagcctgcgagagtggcagctttgagagcagagcgcagcaaagcgagaatcccgcgccgagctgctagtcggacccacagacggtcggactgacagacgtgcagacggacagaagagcagacaggaggcgggggcgcgttcactcccggcggccagccggccagagaaggcggcggtggcaccttctgagcgcgtccggagcagagaccagcagcagcaggggcagcggggacacaagccgcgaccgagccgccgccgcagccctggctgccacagctgtgtgggatcccagccgacactgcagaaagctccttttactagcagttaaataaatcgaccaaaaacaaaacaaacaaacaaacccaacaacaacaacaacaacaaaagccaagccaaaagccaaaacaaacaaatccagccaaatcaatcattgagaaacaataatattaataaaatccaaaactaaatcaaaccaatcaaggcaccaagacgcaggggggatatccacagttcgatcaaggttgacgatgtgtcacactgtgtaagggaatcgcatggagatgggcattccgaactgttaatggggacatgggactccagttgtctctgatcacttgtgtggattttcctggcgtagaacgacagaagccgctagtaagtcgccaagacctacagcaggaattctgcaccaaagggcataaaatcttgttattttaatttgcatctgggagaatgtctgagcaaggagacctgaatcaggcaatagcagaggaaggagggactgagcaggagacggccactccagagaacggcattgttaaatcagaaagtctggatgaagaggagaaactggaactgcagaggcggctggaggctcagaatcaagaaagaagaaaatccaagtcaggagcaggaaaaggtaaactgactcgcagccttgctgtctgtgaggaatcttctgccagaccaggaggtgaaagtcttcaggatcagactctctgaaaactgcaaatggaaaggaattcaaaagaatttagattaaaagttaaataaaaagtaggcacagtagtgctgaattttcctcaaaggctctcttttgataaggctgaaccaaatataatcccaagtatcctctctccttccttgttggagatgtcttacctctcagctccccaaaatgcacttgcctataagaaacacaattgctggttcatatgaaacttaggaaatagtgaataaggtgcatttaactttggagaaatacttttatggctttggtggagatttctcaatactgcaaaagttgtccagaaatgaatctgagctgatggtgactttaagttaatattattaatatatcactgcatatttttacccttatttttgctccttacagcaagattagtaggttataaaaatttaaatttaaacaaaattatttcatgacaaaatgggaaacttcacatcatacttatttttgtttgcctttcaggcatcatattagcttttataaaaaatggtcttgctgctgaaattgtacttattttatcagaggctgggtgcagtcaagacaaaagtaaaatggtttacctgagcccaggggagggaaaattgattaagatatcattatttttgtttggtttggttttgcttttttcctcttactttaattgaaatactctgaattcccctcatggaaacagagagcattgagagcactttctttaaaaggaccaaaaataaattcctaatagattttgtcctaagagagtgtttttttttctagcatcattttctttacatgccactcatgtcataaggcatggacaggctatctttcagtggccattactatgtttcgtacacatgctttattttacttgggctctgagaaatgtgtggctttccttcagcattttatttgtgcttctctttttaatggagattgaaaagggagaataatgtgaatatcacggcttatattattaaatgttgattgatggcttgtaatgtactgcacacaatatatgttaactctgcagaatgacagaccctgggagaagtaatgccccagttgtcccccactcctaatgccaggcagagaaggacagcctttatagacttaatctgctttttgtcccatttgacaaggtaccaggaggaaattttttaagggatcaactgtatcacagtgcccactctggacctaagtctagtgtatccatacaattggtgcagagaaataaggtgtaaatggtgctttgttcctgctggttccaagctcagaaaccaagactagctttgtaggagagaatgagagcctgcaagcctctctttggattggctgaggagtggtgggagcagggggttgatagaaaacatccagacacacatataagcaagtggccgtgctacctttttagagaataaagaaacagacttttgagtttatatgcaatgccttcattaggtaccaccggcacttacaaaatgtgcggactgaatcccagagaacactggcagatgtatacagtatatggattgtatcgcttccccaatgtttgtaaattcacagtatttggaaaactgccttcattttccagtgtgggaaaaactcttgctacctgtattacttgatctcagacccatacctgatggttcagtctgtccttaagttaaaagaattttgcttttctaatgttatactatttacctgtcagtgtattactgcaacttgaatcactcttttactgttgttggatataaacttatcctgtaccaatgtatttattaacacttgtattttattattgagcatatcaataaaaatattaaaaaataacagattgttttttaccaa

SEQ ID NO: 1573 - DNA, 544 bp, Homo sapiens
  source 1..544: mol_type = unassigned DNA; mol_type = unassigned DNA
aacaacaaaagccaagccaaaagccaaaacaaacaaatccagccaaatcaatcattgagaaacaataatattaataaaatccaaaactaaatcaaaccaatcaaggcaccaagacgcaggggggatatccacagttcgatcaaggttgacgatgtgtcacactgtgtaagggaatcgcatggagatgggcattccgaactgttaatggggacatgggactccagttgtctctgatcacttgtgtggattttcctggcgtagaacgacagaagccgctagtaagtcgccaagacctacagcaggaattctgcaccaaagcttaaaaaagtgaggaggaagtaaatgctaaattattcatgagcctcatttgacagcacatcagaaggggaagtgtcaggggttttataaagggcataaaatcttgttattttaatttgcatctgggagaatgtctgagcaaggagacctgaatcaggcaatagcagaggaaggagggactgagcaggagacggccactccagagaacggcattgttaaatcagaa

SEQ ID NO: 1574 - DNA, 3182 bp, Homo sapiens
  source 1..3182: mol_type = unassigned DNA; mol_type = unassigned DNA
aatgtttatgcatagaaatatagctgaggtggatgtggttgctgtcagctattcaggtttgctacctgatcacctcctgaagatgtagggttgacgatgtgtcacactgtgtaagggaatcgcatggagatgggcattccgaactgttaatggggacatgggactccagttgtctctgatcacttgtgtggattttcctggcgtagaacgacagaagccgctagtaagtcgccaagacctacagcaggaattctgcaccaaagggcataaaatcttgttattttaatttgcatctgggagaatgtctgagcaaggagacctgaatcaggcaatagcagaggaaggagggactgagcaggagacggccactccagagaacggcattgttaaatcagaaagtctggatgaagaggagaaactggaactgcagaggcggctggaggctcagaatcaagaaagaagaaaatccaagtcaggagcaggaaaaggtaaactgactcgcagccttgctgtctgtgaggaatcttctgccagaccaggaggtgaaagtcttcaggatcaggaatcaattcatttacagctttccagtttttccagcctgcaagaggaggataaatctaggaaagatgactctgaaagagaaaaagaaaaggataaaaacaaagataaaacctctgaaaaacccaagatcagaatgttatcaaaagattgcagccaagaatacacggattctacaggcatagacttacacgagtttctgattaacacattaaagaataattccagggacaggatgatacttttgaaaatggagcaggaaattattgatttcattgctgacaacaataatcattataaaaagttccctcagatgtcatcgtatcagaggatgcttgtccatcgagtggcagcttattttggattggatcacaatgtggatcaaacaggaaaatctgttatcatcaacaagaccagcagcaccagaataccagagcaaaggttttgtgaacatttaaaagatgaaaaaggtgaagaatcccagaagcggtttatcttgaagcgagataactctagtattgataaagaagacaatcagtcagtttgctcccaggaaagcctttttgtggaaaacaggggcaacagagatggctcagggagaacatctgggagtcgacagagcagctcagaaaatgaactcaagtggtctgaccaccaaagggcctggagcagcacagactccgacagttccaaccgcaatctaaagcccgccatgaccaagacggcgagttttgggggcatcacggtgctgaccaggggtgacagcacttccagtactaggagtaccgggaagctgtccaaagcaggttccgagtcttccagcagtgcaggctcctcaggatcgctgtcccgcacccatccacctctccagagcacacccctagtctcaggtgtggcagctggctctccaggctgtgtgccttatccagagaatggaatagggggccaggttgctcccagcagcaccagctacatcctccttccacttgaagctgcaacaggcatcccgcctggaagcatccttcttaatccacacacaggccagccctttgtgaatcccgatggaactcctgcaatatacaacccacccaccagtcagcagcccctgcgaagcgccatggtggggcagtcccaacagcagccaccacagcagcagccctccccgcagccccaacagcaggtccagccaccgcagccacagatggcaggccctctggtcactcagtctgtccaggggctgcaggcttcctcccagtcagtgcaatatccagcagtctcttttcctccccagcacctcctacctgtgtctccaacgcagcactttcccatgagagatgatgtggcaacacagtttggccagatgaccctgagccggcagtcctcgggggagactcctgaacccccatcaggtcctgtctacccatcctcccttatgccacagccggcccagcagcccagctatgtaatcgcctctacaggccagcagcttcctacaggaggattctcaggctctggccctcccatctcccagcaggtcctccagccccctccctcaccacagggatttgtgcaacagcctccgcctgcacagatgcctgtatattattacccatctggtcagtaccctacctcaaccacgcaacagtaccggcccatggccccggttcagtacaacgctcagaggagtcaacagatgccacaggcagcacagcaagcaggttaccagccagtcttgtctggtcaacagggattccaaggcctaataggagtgcagcagccacctcagagtcagaacgtgataaataaccaacaaggaactccggtgcaaagcgtgatggtttcctacccaacaatgtcttcttatcaggtgccaatgacccagggttctcaaggactgccccagcagtcataccaacagccaatcatgctacctaaccaggcaggtcaagggtcactcccagccactggaatgcctgtttactgtaatgtcacaccgcccacccctcagaacaaccttaggctgattggcccacactgcccctccagcactgtcccagtgatgtcagctagctgcagaacaaactgtgcaagtatgagcaatgctggttggcaggtcaaattctgagagctctggctgtggtacatttcttcagatatttctcatggcctttgatggaagaggaacaaggtgggaaaactggctgaggacttaagtattcactcaacactcaaatgattgctgctggtattctgtaaaaaataaacaaagactaatatacacgttagctggttaatggtgcatatttctgtcatgtctgctaggtatgcctttatagcttagctagtgacatgaattcatcaaggtaagattttctcctaccactgaataccactgtgtagattataatatccctaatttggattagttttgtactttgtgttgagtttgtgatgctaaaagtatttaaaaattatatactaaatcacattgtaccaaagctgtaatggaaaagcaaagaagaattgatgaattgaaggaataatttatatacattatagagttttcttttttaatggatatatactgtattgtagtgtttaatcaaaataaaactatttgacct

SEQ ID NO: 1575 - DNA, 657 bp, Homo sapiens
  source 1..657: mol_type = unassigned DNA; mol_type = unassigned DNA
tttgttaaaaatcagaaaacctttgacacacttttagataaatacacctactcctttgatcctttgtgtatgtattaccacagggcttaaatatcttaagattttagttaatgtcattttcatgaaagacagtcatttggaagccaagagctctatctatgttttgttcaaatagccgagtaatctactatcttggcagtaattacttctgctgcatttctaatgtgaattgcatgtgagagcttatgaatacactcttttcaagtgtatgtgggttttcaaggttgacgatgtgtcacactgtgtaagggaatcgcatggagatgggcattccgaactgttaatggggacatgggactccagttgtctctgatcacttgtgtggattttcctggcgtagaacgacagaagccgctagtaagtcgccaagacctacagcaggaattctgcaccaaagggcataaaatcttgttattttaatttgcatctgggagaatgtctgagcaaggagacctgaatcaggcaatagcagaggaaggagggactgagcaggagacggccactccagagaacggcattgttaaatcagaaagtctggatgaagaggagaaactggaactgcagaggcggctggaggctcagaatcaagaaagaaga

SEQ ID NO: 1576 - DNA, 3433 bp, Homo sapiens
  source 1..3433: mol_type = unassigned DNA; mol_type = unassigned DNA
gtgctattagatttgcaaattgctgatctcccagtgactttccctcttagatcccagttgagtatggttaccttgagaactgtggtattagccatgttagagcatgctccactggggagttctgtgcagtctatttttaatgctatttaatgaaggagcgagcgcctcactcagcaataaaagaagcatgagggaagacagagcagtgcatggttatggatactggacaaggatatttggaaaggttgacgatgtgtcacactgtgtaagggaatcgcatggagatgggcattccgaactgttaatggggacatgggactccagttgtctctgatcacttgtgtggattttcctggcgtagaacgacagaagccgctagtaagtcgccaagacctacagcaggaattctgcaccaaagggcataaaatcttgttattttaatttgcatctgggagaatgtctgagcaaggagacctgaatcaggcaatagcagaggaaggagggactgagcaggagacggccactccagagaacggcattgttaaatcagaaagtctggatgaagaggagaaactggaactgcagaggcggctggaggctcagaatcaagaaagaagaaaatccaagtcaggagcaggaaaaggtaaactgactcgcagccttgctgtctgtgaggaatcttctgccagaccaggaggtgaaagtcttcaggatcaggaatcaattcatttacagctttccagtttttccagcctgcaagaggaggataaatctaggaaagatgactctgaaagagaaaaagaaaaggataaaaacaaagataaaacctctgaaaaacccaagatcagaatgttatcaaaagattgcagccaagaatacacggattctacaggcatagacttacacgagtttctgattaacacattaaagaataattccagggacaggatgatacttttgaaaatggagcaggaaattattgatttcattgctgacaacaataatcattataaaaagttccctcagatgtcatcgtatcagaggatgcttgtccatcgagtggcagcttattttggattggatcacaatgtggatcaaacaggaaaatctgttatcatcaacaagaccagcagcaccagaataccagagcaaaggttttgtgaacatttaaaagatgaaaaaggtgaagaatcccagaagcggtttatcttgaagcgagataactctagtattgataaagaagacaatcagcaaaacagaatgcatccatttagagatgacagacgaagtaaatcaattgaagagagagaagaggaatatcagagagtgagggagagaatatttgcacacgattcagtttgctcccaggaaagcctttttgtggaaaacagtaggctcttggaagacagtaacatatgcaatgagacctataagaaaagacagctctttcggggcaacagagatggctcagggagaacatctgggagtcgacagagcagctcagaaaatgaactcaagtggtctgaccaccaaagggcctggagcagcacagactccgacagttccaaccgcaatctaaagcccgccatgaccaagacggcgagttttgggggcatcacggtgctgaccaggggtgacagcacttccagtactaggagtaccgggaagctgtccaaagcaggttccgagtcttccagcagtgcaggctcctcaggatcgctgtcccgcacccatccacctctccagagcacacccctagtctcaggtgtggcagctggctctccaggctgtgtgccttatccagagaatggaatagggggccaggttgctcccagcagcaccagctacatcctccttccacttgaagctgcaacaggcatcccgcctggaagcatccttcttaatccacacacaggccagccctttgtgaatcccgatggaactcctgcaatatacaacccacccaccagtcagcagcccctgcgaagcgccatggtggggcagtcccaacagcagccaccacagcagcagccctccccgcagccccaacagcaggtccagccaccgcagccacagatggcaggccctctggtcactcagagagatgatgtggcaacacagtttggccagatgaccctgagccggcagtcctcgggggagactcctgaacccccatcaggtcctgtctacccatcctcccttatgccacagccggcccagcagcccagctatgtaatcgcctctacaggccagcagcttcctacaggaggattctcaggctctggccctcccatctcccagcaggtcctccagccccctccctcaccacagggatttgtgcaacagcctccgcctgcacagatgcctgtatattattacccatctggtcagtaccctacctcaaccacgcaacagtaccggcccatggccccggttcagtacaacgctcagaggagtcaacagatgccacaggcagcacagcaagcaggttaccagccagtcttgtctggtcaacagggattccaaggcctaataggagtgcagcagccacctcagagtcagaacgtgataaataaccaacaaggaactccggtgcaaagcgtgatggtttcctacccaacaatgtcttcttatcaggtgccaatgacccagggttctcaaggactgccccagcagtcataccaacagccaatcatgctacctaaccaggcaggtcaagggtcactcccagccactggaatgcctgtttactgtaatgtcacaccgcccacccctcagaacaaccttaggctgattggcccacactgcccctccagcactgtcccagtgatgtcagctagctgcagaacaaactgtgcaagtatgagcaatgctggttggcaggtcaaattctgagagctctggctgtggtacatttcttcagatatttctcatggcctttgatggaagaggaacaaggtgggaaaactggctgaggacttaagtattcactcaacactcaaatgattgctgctggtattctgtaaaaaataaacaaagactaatatacacgttagctggttaatggtgcatatttctgtcatgtctgctaggtatgcctttatagcttagctagtgacatgaattcatcaaggtaagattttctcctaccactgaataccactgtgtagattataatatccctaatttggattagttttgtactttgtgttgagtttgtgatgctaaaagtatttaaaaattatatactaaatcacattgtaccaaagctgtaatggaaaagcaaagaagaattgatgaattgaaggaataatttatatacattatagagttttcttttttaatggatatatactgtattgtagtgtttaatcaaaataaaactatttgaccttatggaggaaggtcatgtttttaccaccagtttggttca

SEQ ID NO: 1577 - DNA, 620 bp, Homo sapiens
  source 1..620: mol_type = unassigned DNA; mol_type = unassigned DNA
gcagtctatttttaatgctatttaatgaaggagcgagcgcctcactcagcaataaaagaagcatgagggaagacagagcagtgcatggttatggatactggacaaggatatttggaaaggttgacgatgtgtcacactgtgtaagggaatcgcatggagatgggcattccgaactgttaatggggacatgggactccagttgtctctgatcacttgtgtggattttcctggcgtagaacgacagaagccgctagtaagtcgccaagacctacagcaggaattctgcaccaaagggcataaaatcttgttattttaatttgcatctgggagaatgtctgagcaaggagacctgaatcaggcaatagcagaggaaggagggactgagcaggagacggccactccagagaacggcattgttaaatcagaaagtctggatgaagaggagaaactggaactgcagaggcggctggaggctcagaatcaagaaagaagaaaatccaagtcaggagcaggaaaaggtaaactgactcgcagccttgctgtctgtgaggaatcttctgccagaccaggaggtgaaagtcttcaggatcaggtatatccccttgccattatcattaatt

SEQ ID NO: 1578 - DNA, 590 bp, Homo sapiens
  source 1..590: mol_type = unassigned DNA; mol_type = unassigned DNA
agcaataaaagaagcatgagggaagacagagcagtgcatggttatggatactggacaaggatatttggaaaggtaaaggctgaccattggatatggttgacgatgtgtcacactgtgtaagggaatcgcatggagatgggcattccgaactgttaatggggacatgggactccagttgtctctgatcacttgtgtggattttcctggcgtagaacgacagaagccgctagtaagtcgccaagacctacagcaggaattctgcaccaaagggcataaaatcttgttattttaatttgcatctgggagaatgtctgagcaaggagacctgaatcaggcaatagcagaggaaggagggactgagcaggagacggccactccagagaacggcattgttaaatcagaaagtctggatgaagaggagaaactggaactgcagaggcggctggaggctcagaatcaagaaagaagaaaatccaagtcaggagcaggaaaaggtaaactgactcgcagccttgctgtctgtgaggaatcttctgccagaccaggaggtgaaagtcttcaggatcaggaatcaattcatttacagcttt

SEQ ID NO: 1579 - DNA, 715 bp, Homo sapiens
  source 1..715: mol_type = unassigned DNA; mol_type = unassigned DNA
aataaaagaagcatgagggaagacagagcagtgcatggttatggatactggacaaggatatttggaaaggttgacgatgtgtcacactgtgtaagggaatcgcatggagatgggcattccgaactgttaatggggacatgggactccagttgtctctgatcacttgtgtggattttcctggcgtagaacgacagaagccgctagtaagtcgccaagacctacagcaggaattctgcaccaaagggcataaaatcttgttattttaatttgcatctgggagaatgtctgagcaaggagacctgaatcaggcaatagcagaggaaggagggactgagcaggagacggccactccagagaacggcattgttaaatcagaaagtctggatgaagaggagaaactggaactgcagaggcggctggaggctcagaatcaagaaagaagaaaatccaagtcaggagcaggaaaaggtaaactgactcgcagccttgctgtctgtgaggaatcttctgccagaccaggaggtgaaagtcttcaggatcagattgcagccaagaatacacggattctacaggcatagacttacacgagtttctgattaacacattaaagaataattccagggacaggatgatacttttgaaaatggagcaggaaattattgatttcattgctgacaacaataatcattataaaaagttccctcagatgtcatcg

SEQ ID NO: 1580 - DNA, 543 bp, Homo sapiens
  source 1..543: mol_type = unassigned DNA; mol_type = unassigned DNA
acaatatacaaggtagccagaagtgaatatgattgagaattctcattagtgtgaggagacagtttgaagtccataaggttggaaattgcaaattaatcatttgtatataagtcagtttaattcagatctgctttgtgacaaggttaggagagaatgtggggcttaaaggtgatgtcgacaatgaaagccatttcttcttatggttgacgatgtgtcacactgtgtaagggaatcgcatggagatgggcattccgaactgttaatggggacatgggactccagttgtctctgatcacttgtgtggattttcctggcgtagaacgacagaagccgctagtaagtcgccaagacctacagcaggaattctgcaccaaagggcataaaatcttgttattttaatttgcatctgggagaatgtctgagcaaggagacctgaatcaggcaatagcagaggaaggagggactgagcaggagacggccactccagagaacggcattgttaaatcagaaagtctggatgaagaggagaaactggaactgcag

SEQ ID NO: 1581 - DNA, 568 bp, Homo sapiens
  source 1..568: mol_type = unassigned DNA; mol_type = unassigned DNA
gatgcatttagtgttttcatagataggttgacgatgtgtcacactgtgtaagggaatcgcatggagatgggcattccgaactgttaatggggacatgggactccagttgtctctgatcacttgtgtggattttcctggcgtagaacgacagaagccgctagtaagtcgccaagacctacagcaggaattctgcaccaaagggcataaaatcttgttattttaatttgcatctgggagaatgtctgagcaaggagacctgaatcaggcaatagcagaggaaggagggactgagcaggagacggccactccagagaacggcattgttaaatcagaaagtctggatgaagaggagaaactggaactgcagaggcggctggaggctcagaatcaagaaagaagaaaatccaagtcaggagcaggaaaaggtaaactgactcgcagccttgctgtctgtgaggaatcttctgccagaccaggaggtgaaagtcttcaggatcagactctctgaaaactgcaaatggaaaggaattcaaaagaatttagattaaaagttaaataaaaagtaggc

SEQ ID NO: 1582 - DNA, 572 bp, Homo sapiens
  source 1..572: mol_type = unassigned DNA; mol_type = unassigned DNA
cattagagaagaagcaggcagcttgagacaggtggagctggatcaagctgtgaacgtgatttgctggaagctggttgacgatgtgtcacactgtgtaagggaatcgcatggagatgggcattccgaactgttaatggggacatgggactccagttgtctctgatcacttgtgtggattttcctggcgtagaacgacagaagccgctagtaagtcgccaagacctacagcaggaattctgcaccaaagggcataaaatcttgttattttaatttgcatctgggagaatgtctgagcaaggagacctgaatcaggcaatagcagaggaaggagggactgagcaggagacggccactccagagaacggcattgttaaatcagaaagtctggatgaagaggagaaactggaactgcagaggcggctggaggctcagaatcaagaaagaagaaaatccaagtcaggagcaggaaaaggtaaactgactcgcagccttgctgtctgtgaggaatcttctgccagaccaggaggtgaaagtcttcaggatcagactctctgaaaactgcaaatggaaag

SEQ ID NO: 1583 - DNA, 2506 bp, Homo sapiens
  source 1..2506: mol_type = unassigned DNA; mol_type = unassigned DNA
attagagaagaagcaggcagcttgagacaggtggagctggatcaagctgtgaacgtgatttgctggaagctggtcattagtgttagaaaccccgtcttatttatttcatccttcaccctaccatgattattgcaattattattatttatttttcatcttttttcaggttgacgatgtgtcacactgtgtaagggaatcgcatggagatgggcattccgaactgttaatggggacatgggactccagttgtctctgatcacttgtgtggattttcctggcgtagaacgacagaagccgctagtaagtcgccaagacctacagcaggaattctgcaccaaagggcataaaatcttgttattttaatttgcatctgggagaatgtctgagcaaggagacctgaatcaggcaatagcagaggaaggagggactgagcaggagacggccactccagagaacggcattgttaaatcagaaagtctggatgaagaggagaaactggaactgcagaggcggctggaggctcagaatcaagaaagaagaaaatccaagtcaggagcaggaaaaggtaaactgactcgcagccttgctgtctgtgaggaatcttctgccagaccaggaggtgaaagtcttcaggatcagactctctgaaaactgcaaatggaaaggaattcaaaagaatttagattaaaagttaaataaaaagtaggcacagtagtgctgaattttcctcaaaggctctcttttgataaggctgaaccaaatataatcccaagtatcctctctccttccttgttggagatgtcttacctctcagctccccaaaatgcacttgcctataagaaacacaattgctggttcatatgaaacttaggaaatagtgaataaggtgcatttaactttggagaaatacttttatggctttggtggagatttctcaatactgcaaaagttgtccagaaatgaatctgagctgatggtgactttaagttaatattattaatatatcactgcatatttttacccttatttttgctccttacagcaagattagtaggttataaaaatttaaatttaaacaaaattatttcatgacaaaatgggaaacttcacatcatacttatttttgtttgcctttcaggcatcatattagcttttataaaaaatggtcttgctgctgaaattgtacttattttatcagaggctgggtgcagtcaagacaaaagtaaaatggtttacctgagcccaggggagggaaaattgattaagatatcattatttttgtttggtttggttttgcttttttcctcttactttaattgaaatactctgaattcccctcatggaaacagagagcattgagagcactttctttaaaaggaccaaaaataaattcctaatagattttgtcctaagagagtgtttttttttctagcatcattttctttacatgccactcatgtcataaggcatggacaggctatctttcagtggccattactatgtttcgtacacatgctttattttacttgggctctgagaaatgtgtggctttccttcagcattttatttgtgcttctctttttaatggagattgaaaagggagaataatgtgaatatcacggcttatattattaaatgttgattgatggcttgtaatgtactgcacacaatatatgttaactctgcagaatgacagaccctgggagaagtaatgccccagttgtcccccactcctaatgccaggcagagaaggacagcctttatagacttaatctgctttttgtcccatttgacaaggtaccaggaggaaattttttaagggatcaactgtatcacagtgcccactctggacctaagtctagtgtatccatacaattggtgcagagaaataaggtgtaaatggtgctttgttcctgctggttccaagctcagaaaccaagactagctttgtaggagagaatgagagcctgcaagcctctctttggattggctgaggagtggtgggagcagggggttgatagaaaacatccagacacacatataagcaagtggccgtgctacctttttagagaataaagaaacagacttttgagtttatatgcaatgccttcattaggtaccaccggcacttacaaaatgtgcggactgaatcccagagaacactggcagatgtatacagtatatggattgtatcgcttccccaatgtttgtaaattcacagtatttggaaaactgccttcattttccagtgtgggaaaaactcttgctacctgtattacttgatctcagacccatacctgatggttcagtctgtccttaagttaaaagaattttgcttttctaatgttatactatttacctgtcagtgtattactgcaacttgaatcactcttttactgttgttggatataaacttatcctgtaccaatgtatttattaacacttgtattttattattgagcatatcaataaaaatattaaaaaataacagattgttttttaccaa

SEQ ID NO: 1584 - DNA, 2416 bp, Homo sapiens
  source 1..2416: mol_type = unassigned DNA; mol_type = unassigned DNA
agagaagaagcaggcagcttgagacaggtggagctggatcaagctgtgaacgtgatttgctggaagctggtcattagtgttgacgatgtgtcacactgtgtaagggaatcgcatggagatgggcattccgaactgttaatggggacatgggactccagttgtctctgatcacttgtgtggattttcctggcgtagaacgacagaagccgctagtaagtcgccaagacctacagcaggaattctgcaccaaagggcataaaatcttgttattttaatttgcatctgggagaatgtctgagcaaggagacctgaatcaggcaatagcagaggaaggagggactgagcaggagacggccactccagagaacggcattgttaaatcagaaagtctggatgaagaggagaaactggaactgcagaggcggctggaggctcagaatcaagaaagaagaaaatccaagtcaggagcaggaaaaggtaaactgactcgcagccttgctgtctgtgaggaatcttctgccagaccaggaggtgaaagtcttcaggatcagactctctgaaaactgcaaatggaaaggaattcaaaagaatttagattaaaagttaaataaaaagtaggcacagtagtgctgaattttcctcaaaggctctcttttgataaggctgaaccaaatataatcccaagtatcctctctccttccttgttggagatgtcttacctctcagctccccaaaatgcacttgcctataagaaacacaattgctggttcatatgaaacttaggaaatagtgaataaggtgcatttaactttggagaaatacttttatggctttggtggagatttctcaatactgcaaaagttgtccagaaatgaatctgagctgatggtgactttaagttaatattattaatatatcactgcatatttttacccttatttttgctccttacagcaagattagtaggttataaaaatttaaatttaaacaaaattatttcatgacaaaatgggaaacttcacatcatacttatttttgtttgcctttcaggcatcatattagcttttataaaaaatggtcttgctgctgaaattgtacttattttatcagaggctgggtgcagtcaagacaaaagtaaaatggtttacctgagcccaggggagggaaaattgattaagatatcattatttttgtttggtttggttttgcttttttcctcttactttaattgaaatactctgaattcccctcatggaaacagagagcattgagagcactttctttaaaaggaccaaaaataaattcctaatagattttgtcctaagagagtgtttttttttctagcatcattttctttacatgccactcatgtcataaggcatggacaggctatctttcagtggccattactatgtttcgtacacatgctttattttacttgggctctgagaaatgtgtggctttccttcagcattttatttgtgcttctctttttaatggagattgaaaagggagaataatgtgaatatcacggcttatattattaaatgttgattgatggcttgtaatgtactgcacacaatatatgttaactctgcagaatgacagaccctgggagaagtaatgccccagttgtcccccactcctaatgccaggcagagaaggacagcctttatagacttaatctgctttttgtcccatttgacaaggtaccaggaggaaattttttaagggatcaactgtatcacagtgcccactctggacctaagtctagtgtatccatacaattggtgcagagaaataaggtgtaaatggtgctttgttcctgctggttccaagctcagaaaccaagactagctttgtaggagagaatgagagcctgcaagcctctctttggattggctgaggagtggtgggagcagggggttgatagaaaacatccagacacacatataagcaagtggccgtgctacctttttagagaataaagaaacagacttttgagtttatatgcaatgccttcattaggtaccaccggcacttacaaaatgtgcggactgaatcccagagaacactggcagatgtatacagtatatggattgtatcgcttccccaatgtttgtaaattcacagtatttggaaaactgccttcattttccagtgtgggaaaaactcttgctacctgtattacttgatctcagacccatacctgatggttcagtctgtccttaagttaaaagaattttgcttttctaatgttatactatttacctgtcagtgtattactgcaacttgaatcactcttttactgttgttggatataaacttatcctgtaccaatgtatttattaacacttgtattttattattgagcatatcaataaaaatattaaaaaataacagattgttttttacc

SEQ ID NO: 1585 - DNA, 1015 bp, Homo sapiens
  source 1..1015: mol_type = unassigned DNA; mol_type = unassigned DNA
gaagaagcaggcagcttgagacaggtggagctggatcaagctgtgaacgtgatttgctggaagctggtcattagtgttgacgatgtgtcacactgtgtaagggaatcgcatggagatgggcattccgaactgttaatggggacatgggactccagttgtctctgatcacttgtgtggattttcctggcgtagaacgacagaagccgctagtaagtcgccaagacctacagcaggaattctgcaccaaagcttaaaaaagtgaggaggaagtaaatgctaaattattcatgagcctcatttgacagcacatcagaaggggaagtgtcaggggttttataaagggcataaaatcttgttattttaatttgcatctgggagaatgtctgagcaaggagacctgaatcaggcaatagcagaggaaggagggactgagcaggagacggccactccagagaacggcattgttaaatcagaaagtctggatgaagaggagaaactggaactgcagaggcggctggaggctcagaatcaagaaagaagaaaatccaagtcaggagcaggaaaaggtaaactgactcgcagccttgctgtctgtgaggaatcttctgccagaccaggaggtgaaagtcttcaggatcagactctctgaaaactgcaaatggaaaggaattcaaaagaatttagattaaaagttaaataaaaagtaggcacagtagtgctgaattttcctcaaaggctctcttttgataaggctgaaccaaatataatcccaagtatcctctctccttccttgttggagatgtcttacctctcagctccccaaaatgcacttgcctataagaaacacaattgctggttcatatgaaacttaggaaatagtgaataaggtgcatttaactttggagaaatacttttatggctttggtggagatttctcaatactgcaaaagttgtccagaaatgaatctgagctgatggtgactttaagttaatattattaatatatcactgcata

SEQ ID NO: 1586 - DNA, 574 bp, Homo sapiens
  source 1..574: mol_type = unassigned DNA; mol_type = unassigned DNA
gagacaggtggagctggatcaagctgtgaacgtgatttgctggaagctggtcattagtgttgacgatgtgtcacactgtgtaagggaatcgcatggagatgggcattccgaactgttaatggggacatgggactccagttgtctctgatcacttgtgtggattttcctggcgtagaacgacagaagccgctagtaagtcgccaagacctacagcaggaattctgcaccaaagggcataaaatcttgttattttaatttgcatctgggagaatgtctgagcaaggagacctgaatcaggcaatagcagaggaaggagggactgagcaggagacggccactccagagaacggcattgttaaatcagaaagtctggatgaagaggagaaactggaactgcagaggcggctggaggctcagaatcaagaaagaagaaaatccaagtcaggagcaggaaaaggtaaactgactcgcagccttgctgtctgtgaggaatcttctgccagaccaggaggtgaaagtcttcaggatcaggtatatccccttgccattatcattaattgcatgaatgggatcc

SEQ ID NO: 1587 - DNA, 550 bp, Homo sapiens
  source 1..550: mol_type = unassigned DNA; mol_type = unassigned DNA
gattattgcaattattattatttatttttcatcttttttcaggttgacgatgtgtcacactgtgtaagggaatcgcatggagatgggcattccgaactgttaatggggacatgggactccagttgtctctgatcacttgtgtggattttcctggcgtagaacgacagaagccgctagtaagtcgccaagacctacagcaggaattctgcaccaaagggcataaaatcttgttattttaatttgcatctgggagaatgtctgagcaaggagacctgaatcaggcaatagcagaggaaggagggactgagcaggagacggccactccagagaacggcattgttaaatcagaaagtctggatgaagaggagaaactggaactgcagaggcggctggaggctcagaatcaagaaagaagaaaatccaagtcaggagcaggaaaaggtaaactgactcgcagccttgctgtctgtgaggaatcttctgccagaccaggaggtgaaagtcttcaggatcaggaatcaattcatttacagctttccagtttttccag

SEQ ID NO: 1588 - DNA, 3086 bp, Homo sapiens
  source 1..3086: mol_type = unassigned DNA; mol_type = unassigned DNA
aggttgacgatgtgtcacactgtgtaagggaatcgcatggagatgggcattccgaactgttaatggggacatgggactccagttgtctctgatcacttgtgtggattttcctggcgtagaacgacagaagccgctagtaagtcgccaagacctacagcaggaattctgcaccaaagggcataaaatcttgttattttaatttgcatctgggagaatgtctgagcaaggagacctgaatcaggcaatagcagaggaaggagggactgagcaggagacggccactccagagaacggcattgttaaatcagaaagtctggatgaagaggagaaactggaactgcagaggcggctggaggctcagaatcaagaaagaagaaaatccaagtcaggagcaggaaaaggtaaactgactcgcagccttgctgtctgtgaggaatcttctgccagaccaggaggtgaaagtcttcaggatcaggaatcaattcatttacagctttccagtttttccagcctgcaagaggaggataaatctaggaaagatgactctgaaagagaaaaagaaaaggataaaaacaaagataaaacctctgaaaaacccaagatcagaatgttatcaaaagattgcagccaagaatacacggattctacaggcatagacttacacgagtttctgattaacacattaaagaataattccagggacaggatgatacttttgaaaatggagcaggaaattattgatttcattgctgacaacaataatcattataaaaagttccctcagatgtcatcgtatcagaggatgcttgtccatcgagtggcagcttattttggattggatcacaatgtggatcaaacaggaaaatctgttatcatcaacaagaccagcagcaccagaataccagagcaaaggttttgtgaacatttaaaagatgaaaaaggtgaagaatcccagaagcggtttatcttgaagcgagataactctagtattgataaagaagacaatcagtcagtttgctcccaggaaagcctttttgtggaaaacagtaggctcttggaagacagtaacatatgcaatgagacctataagaaaagacagctctttcggggcaacagagatggctcagggagaacatctgggagtcgacagagcagctcagaaaatgaactcaagtggtctgaccaccaaagggcctggagcagcacagactccgacagttccaaccgcaatctaaagcccgccatgaccaagacggcgagttttgggggcatcacggtgctgaccaggggtgacagcacttccagtactaggagtaccgggaagctgtccaaagcaggttccgagtcttccagcagtgcaggctcctcaggatcgctgtcccgcacccatccacctctccagagcacacccctagtctcaggtgtggcagctggctctccaggctgtgtgccttatccagagaatggaatagggggccaggttgctcccagcagcaccagctacatcctccttccacttgaagctgcaacaggcatcccgcctggaagcatccttcttaatccacacacaggccagccctttgtgaatcccgatggaactcctgcaatatacaacccacccaccagtcagcagcccctgcgaagcgccatggtggggcagtcccaacagcagccaccacagcagcagccctccccgcagccccaacagcaggtccagccaccgcagccacagatggcaggccctctggtcactcagtctgtccaggggctgcaggcttcctcccagtcagtgcaatatccagcagtctcttttcctccccagcacctcctacctgtgtctccaacgcagcactttcccatgagagatgatgtggcaacacagtttggccagatgaccctgagccggcagtcctcgggggagactcctgaacccccatcaggtcctgtctacccatcctcccttatgccacagccggcccagcagcccagctatgtaatcgcctctacaggccagcagcttcctacaggaggattctcaggctctggccctcccatctcccagcaggtcctccagccccctccctcaccacagggatttgtgcaacagcctccgcctgcacagatgcctgtatattattacccatctggtcagtaccctacctcaaccacgcaacagtaccggcccatggccccggttcagtacaacgctcagaggagtcaacagatgccacaggcagcacagcaagcaggttaccagccagtcttgtctggtcaacagggattccaaggcctaataggagtgcagcagccacctcagagtcagaacgtgataaataaccaacaaggaactccggtgcaaagcgtgatggtttcctacccaacaatgtcttcttatcaggtgccaatgacccagggttctcaaggactgccccagcagtcataccaacagccaatcatgctacctaaccaggcaggtcaagggtcactcccagccactggaatgcctgtttactgtaatgtcacaccgcccacccctcagaacaaccttaggctgattggcccacactgcccctccagcactgtcccagtgatgtcagctagctgcagaacaaactgtgcaagtatgagcaatgctggttggcaggtcaaattctgagagctctggctgtggtacatttcttcagatatttctcatggcctttgatggaagaggaacaaggtgggaaaactggctgaggacttaagtattcactcaacactcaaatgattgctgctggtattctgtaaaaaataaacaaagactaatatacacgttagctggttaatggtgcatatttctgtcatgtctgctaggtatgcctttatagcttagctagtgacatgaattcatcaaggtaagattttctcctaccactgaataccactgtgtagattataatatccctaatttggattagttttgtactttgtgttgagtttgtgatgctaaaagtatttaaaaattatatactaaatcacattgtaccaaagctgtaatggaaaagcaaagaagaattgatgaattgaaggaataatttatatacatt

SEQ ID NO: 1589 - DNA, 1304 bp, Homo sapiens
  source 1..1304: mol_type = unassigned DNA; mol_type = unassigned DNA
aacagattttaactctgaaaagccatttccagtgtctatagactattgtgagcctggagaagtagcatttagttgggatagcttcactagagctgcctgccaaagacttccttccacaggatcttgtcgcaccagcaactgacaggagcttgggagctcgggagcttgggagagggcttatgtttttaataatgtagctgtcagttcgaagcctggaaatgttgaccctcaaagggcataaaatcttgttattttaatttgcatctgggagaatgtctgagcaaggagacctgaatcaggcaatagcagaggaaggagggactgagcaggagacggccactccagagaacggcattgttaaatcagaaagtctggatgaagaggagaaactggaactgcagaggcggctggaggctcagaatcaagaaagaagaaaatccaagtcaggagcaggaaaaggtaaactgactcgcagccttgctgtctgtgaggaatcttctgccagaccaggaggtgaaagtcttcaggatcagactctctgaaaactgcaaatggaaaggaattcaaaagaatttagattaaaagttaaataaaaagtaggcacagtagtgctgaattttcctcaaaggctctcttttgataaggctgaaccaaatataatcccaagtatcctctctccttccttgttggagatgtcttacctctcagctccccaaaatgcacttgcctataagaaacacaattgctggttcatatgaaacttaggaaatagtgaataaggtgcatttaactttggagaaatacttttatggctttggtggagatttctcaatactgcaaaagttgtccagaaatgaatctgagctgatggtgactttaagttaatattattaatatatcactgcatatttttacccttatttttgctccttacagcaagattagtaggttataaaaatttaaatttaaacaaaattatttcatgacaaaatgggaaacttcacatcatacttatttttgtttgcctttcaggcatcatattagcttttataaaaaatggtcttgctgctgaaattgtacttattttatcagaggctgggtgcagtcaagacaaaagtaaaatggtttacctgagcccaggggagggaaaattgattaagatatcattatttttgtttggtttggttttgcttttttcctcttactttaattgaaatactctgaattcccctcatggaaacagagagcattgagagcactttctttaaaaggaccaaaaataaattcctaatagattttgtcct

SEQ ID NO: 1590 - DNA, 3124 bp, Homo sapiens
  source 1..3124: mol_type = unassigned DNA; mol_type = unassigned DNA
atttccagtgtctatagactattgtgagcctggagaagtagcatttagttgggatagcttcactagagctgcctgccaaagacttccttccacaggatcttgtcgcaccagcaactgacaggagcttgggagctcgggagcttgggagagggcttatgtttttaataatgtagctgtcagttcgaagcctggaaatgttgaccctcaaaggtttattgccaaaattagataccatatttatgctgaattattaccttttcaatagttttttttgaccttgcagactactgtattctttatacctagggaagcatgtctatgtttggaacctgcaaataatttttcagtcatcttagagatgctgcagaacatcaatgccacatcttgagtcagaagtcgagggtcatttgttcaaaagttggagaaatatcctcttttgttgcttcttctactctgtagtggagaatggggaactggtagttgtgtgggagttatgtgtctctaagatttgtcgacccattttgatggcaaggtgtattcacaagtgtgtgtaaagggggtgtggatgggacaactgcatctgcctcttgtgcatgccttgggtacttgatttcatcttgttttttcccccttttgtataaaattctcaaaattgctcatttggatttgaatatgaaaggagaaatgaaatctctaaagaatgatagtaaataccttgcactgactttattttctgatatcttaaccttctagggcataaaatcttgttattttaatttgcatctgggagaatgtctgagcaaggagacctgaatcaggcaatagcagaggaaggagggactgagcaggagacggccactccagagaacggcattgttaaatcagaaagtctggatgaagaggagaaactggaactgcagaggcggctggaggctcagaatcaagaaagaagaaaatccaagtcaggagcaggaaaaggtaaactgactcgcagccttgctgtctgtgaggaatcttctgccagaccaggaggtgaaagtcttcaggatcaggtatatccccttgccattatcattaattgcatgaatgggatccacctttgtgtgcatgactcttaatttggtgttaaacagtgttttgggggagaaaaatataattgaagaaaataattcattttttggctttatcccctgcttatgcaacattctaaaatagtttaatggtttgtcacagagtattaaatttgtttttttccagactctctgaaaactgcaaatggaaaggaattcaaaagaatttagattaaaagttaaataaaaagtaggcacagtagtgctgaattttcctcaaaggctctcttttgataaggctgaaccaaatataatcccaagtatcctctctccttccttgttggagatgtcttacctctcagctccccaaaatgcacttgcctataagaaacacaattgctggttcatatgaaacttaggaaatagtgaataaggtgcatttaactttggagaaatacttttatggctttggtggagatttctcaatactgcaaaagttgtccagaaatgaatctgagctgatggtgactttaagttaatattattaatatatcactgcatatttttacccttatttttgctccttacagcaagattagtaggttataaaaatttaaatttaaacaaaattatttcatgacaaaatgggaaacttcacatcatacttatttttgtttgcctttcaggcatcatattagcttttataaaaaatggtcttgctgctgaaattgtacttattttatcagaggctgggtgcagtcaagacaaaagtaaaatggtttacctgagcccaggggagggaaaattgattaagatatcattatttttgtttggtttggttttgcttttttcctcttactttaattgaaatactctgaattcccctcatggaaacagagagcattgagagcactttctttaaaaggaccaaaaataaattcctaatagattttgtcctaagagagtgtttttttttctagcatcattttctttacatgccactcatgtcataaggcatggacaggctatctttcagtggccattactatgtttcgtacacatgctttattttacttgggctctgagaaatgtgtggctttccttcagcattttatttgtgcttctctttttaatggagattgaaaagggagaataatgtgaatatcacggcttatattattaaatgttgattgatggcttgtaatgtactgcacacaatatatgttaactctgcagaatgacagaccctgggagaagtaatgccccagttgtcccccactcctaatgccaggcagagaaggacagcctttatagacttaatctgctttttgtcccatttgacaaggtaccaggaggaaattttttaagggatcaactgtatcacagtgcccactctggacctaagtctagtgtatccatacaattggtgcagagaaataaggtgtaaatggtgctttgttcctgctggttccaagctcagaaaccaagactagctttgtaggagagaatgagagcctgcaagcctctctttggattggctgaggagtggtgggagcagggggttgatagaaaacatccagacacacatataagcaagtggccgtgctacctttttagagaataaagaaacagacttttgagtttatatgcaatgccttcattaggtaccaccggcacttacaaaatgtgcggactgaatcccagagaacactggcagatgtatacagtatatggattgtatcgcttccccaatgtttgtaaattcacagtatttggaaaactgccttcattttccagtgtgggaaaaactcttgctacctgtattacttgatctcagacccatacctgatggttcagtctgtccttaagttaaaagaattttgcttttctaatgttatactatttacctgtcagtgtattactgcaacttgaatcactcttttactgttgttggatataaacttatcctgtaccaatgtatttattaacacttgtattttattattgagcatatcaataaaaatattaaaaaataacagattgttttttaccaa

SEQ ID NO: 1591 - DNA, 2880 bp, Homo sapiens
  source 1..2880: mol_type = unassigned DNA; mol_type = unassigned DNA
agcatttagttgggatagcttcactagagctgcctgccaaagacttccttccacaggatcttgtcgcaccagcaactgacaggagcttgggagctcgggagcttgggagagggcttatgtttttaataatgtagctgtcagttcgaagcctggaaatgttgaccctcaaaggtttattgccaaaattagataccatatttatgctgaattattaccttttcaatagttttttttgaccttgcagactactgtattctttatacctagggaagcatgtctatgtttggaacctgcaaataatttttcagtcatcttagagatgctgcagaacatcaatgccacatcttgagtcagaagtcgagggtcatttgttcaaaagttggagaaatatcctcttttgttgcttcttctactctgtagtggagaatggggaactggtagttgtgtgggagttatgtgtctctaagatttgtcgacccattttgatggcaaggtgtattcacaagtgtgtgtaaagggggtgtggatgggacaactgcatctgcctcttgtgcatgccttgggtacttgatttcatcttgttttttcccccttttgtataaaattctcaaaattgctcatttggatttgaatatgaaaggagaaatgaaatctctaaagaatgatagtaaataccttgcactgactttattttctgatatcttaaccttctagggcataaaatcttgttattttaatttgcatctgggagaatgtctgagcaaggagacctgaatcaggcaatagcagaggaaggagggactgagcaggagacggccactccagagaacggcattgttaaatcagaaagtctggatgaagaggagaaactggaactgcagaggcggctggaggctcagaatcaagaaagaagaaaatccaagtcaggagcaggaaaaggtaaactgactcgcagccttgctgtctgtgaggaatcttctgccagaccaggaggtgaaagtcttcaggatcagactctctgaaaactgcaaatggaaaggaattcaaaagaatttagattaaaagttaaataaaaagtaggcacagtagtgctgaattttcctcaaaggctctcttttgataaggctgaaccaaatataatcccaagtatcctctctccttccttgttggagatgtcttacctctcagctccccaaaatgcacttgcctataagaaacacaattgctggttcatatgaaacttaggaaatagtgaataaggtgcatttaactttggagaaatacttttatggctttggtggagatttctcaatactgcaaaagttgtccagaaatgaatctgagctgatggtgactttaagttaatattattaatatatcactgcatatttttacccttatttttgctccttacagcaagattagtaggttataaaaatttaaatttaaacaaaattatttcatgacaaaatgggaaacttcacatcatacttatttttgtttgcctttcaggcatcatattagcttttataaaaaatggtcttgctgctgaaattgtacttattttatcagaggctgggtgcagtcaagacaaaagtaaaatggtttacctgagcccaggggagggaaaattgattaagatatcattatttttgtttggtttggttttgcttttttcctcttactttaattgaaatactctgaattcccctcatggaaacagagagcattgagagcactttctttaaaaggaccaaaaataaattcctaatagattttgtcctaagagagtgtttttttttctagcatcattttctttacatgccactcatgtcataaggcatggacaggctatctttcagtggccattactatgtttcgtacacatgctttattttacttgggctctgagaaatgtgtggctttccttcagcattttatttgtgcttctctttttaatggagattgaaaagggagaataatgtgaatatcacggcttatattattaaatgttgattgatggcttgtaatgtactgcacacaatatatgttaactctgcagaatgacagaccctgggagaagtaatgccccagttgtcccccactcctaatgccaggcagagaaggacagcctttatagacttaatctgctttttgtcccatttgacaaggtaccaggaggaaattttttaagggatcaactgtatcacagtgcccactctggacctaagtctagtgtatccatacaattggtgcagagaaataaggtgtaaatggtgctttgttcctgctggttccaagctcagaaaccaagactagctttgtaggagagaatgagagcctgcaagcctctctttggattggctgaggagtggtgggagcagggggttgatagaaaacatccagacacacatataagcaagtggccgtgctacctttttagagaataaagaaacagacttttgagtttatatgcaatgccttcattaggtaccaccggcacttacaaaatgtgcggactgaatcccagagaacactggcagatgtatacagtatatggattgtatcgcttccccaatgtttgtaaattcacagtatttggaaaactgccttcattttccagtgtgggaaaaactcttgctacctgtattacttgatctcagacccatacctgatggttcagtctgtccttaagttaaaagaattttgcttttctaatgttatactatttacctgtcagtgtattactgcaacttgaatcactcttttactgttgttggatataaacttatcctgtaccaatgtatttattaacacttgtattttattattgagcatatcaataaaaatattaaaaaataacagattgttttttaccaa

SEQ ID NO: 1592 - DNA, 561 bp, Homo sapiens
  source 1..561: mol_type = unassigned DNA; mol_type = unassigned DNA
agaagtcgagggtcatttgttcaaaagttggagaaatatcctcttttgttgcttcttctactctgtagtggagaatggggaactggtagttgtgtgggagttatgtgtctctaagatttgtcgacccattttgatggcaagggcataaaatcttgttattttaatttgcatctgggagaatgtctgagcaaggagacctgaatcaggcaatagcagaggaaggagggactgagcaggagacggccactccagagaacggcattgttaaatcagaaagtctggatgaagaggagaaactggaactgcagaggcggctggaggctcagaatcaagaaagaagaaaatccaagtcaggagcaggaaaaggtaaactgactcgcagccttgctgtctgtgaggaatcttctgccagaccaggaggtgaaagtcttcaggatcagactctctgaaaactgcaaatggaaaggaattcaaaagaatttagattaaaagttaaataaaaagtaggcacagtagtgctgaattttcctcaaaggctctcttttgataaggctgaaccaa

SEQ ID NO: 1593 - DNA, 1103 bp, Homo sapiens
  source 1..1103: mol_type = unassigned DNA; mol_type = unassigned DNA
attcacaagtgtgtgtaaagggggtgtggatgggacaactgcatctgcctcttgtgcatgccttggggcataaaatcttgttattttaatttgcatctgggagaatgtctgagcaaggagacctgaatcaggcaatagcagaggaaggagggactgagcaggagacggccactccagagaacggcattgttaaatcagaaagtctggatgaagaggagaaactggaactgcagaggcggctggaggctcagaatcaagaaagaagaaaatccaagtcaggagcaggaaaaggtaaactgactcgcagccttgctgtctgtgaggaatcttctgccagaccaggaggtgaaagtcttcaggatcagactctctgaaaactgcaaatggaaaggaattcaaaagaatttagattaaaagttaaataaaaagtaggcacagtagtgctgaattttcctcaaaggctctcttttgataaggctgaaccaaatataatcccaagtatcctctctccttccttgttggagatgtcttacctctcagctccccaaaatgcacttgcctataagaaacacaattgctggttcatatgaaacttaggaaatagtgaataaggtgcatttaactttggagaaatacttttatggctttggtggagatttctcaatactgcaaaagttgtccagaaatgaatctgagctgatggtgactttaagttaatattattaatatatcactgcatatttttacccttatttttgctccttacagcaagattagtaggttataaaaatttaaatttaaacaaaattatttcatgacaaaatgggaaacttcacatcatacttatttttgtttgcctttcaggcatcatattagcttttataaaaaatggtcttgctgctgaaattgtacttattttatcagaggctgggtgcagtcaagacaaaagtaaaatggtttacctgagcccaggggagggaaaattgattaagatatcattatttttgtttggtttggttttgcttttttcctcttactttaattgaaatactctgaattcccctcatggaaacagagagcattgagagcactttctttaaaag

SEQ ID NO: 1594 - DNA, 577 bp, Homo sapiens
  source 1..577: mol_type = unassigned DNA; mol_type = unassigned DNA
ttacaagggaaagagattcggtagaaggaaagcaaactgcacttacaaatagcttaggcggctggaggctcagaatcaagaaagaagaaaatccaagtcaggagcaggaaaaggtaaactgactcgcagccttgctgtctgtgaggaatcttctgccagaccaggaggtgaaagtcttcaggatcagactctctgaaaactgcaaatggaaaggaattcaaaagaatttagattaaaagttaaataaaaagtaggcacagtagtgctgaattttcctcaaaggctctcttttgataaggctgaaccaaatataatcccaagtatcctctctccttccttgttggagatgtcttacctctcagctccccaaaatgcacttgcctataagaaacacaattgctggttcatatgaaacttaggaaatagtgaataaggtgcatttaactttggagaaatacttttatggctttggtggagatttctcaatactgcaaaagttgtccagaaatgaatctgagctgatggtgactttaagttaatattattaatatatcactgcatatttttacccttattt

SEQ ID NO: 1595 - DNA, 700 bp, Homo sapiens
  source 1..700: mol_type = unassigned DNA; mol_type = unassigned DNA
ccaagaatacacggattctacaggcatagacttacacgagtttctgattaacacattaaagaataattccagggacaggatgatacttttgaaaatggagcaggaaattattgatttcattgctgacaacaataatcattataaaaagttccctcagatgtcatcgtatcagaggatgcttgtccatcgagtggcagcttattttggattggatcacaatgtggatcaaacaggaaaatctgttatcatcaacaagaccagcagcaccagaataccagagcaaaggttttgtgaacatttaaaagatgaaaaaggtgaagaatcccagaagcggtttatcttgaagcgagataactctagtattgataaagaagacaatcagctttgtccttcagttgtgcacaaattgagctggattatcaatacggaccgatgatcaaccggtgtagctgtaaagaacaaaccttgttatgcaaaacagaatgcatccatttagagatgacagacgaagtaaatcaattgaagagagagaagaggaatatcagagagtgagggagagaatatttgcacacgattcagtttgctcccaggaaagcctttttgtggaaaacagtaggctcttggaagacagtaacatatgcaatgagacctataagaaaagacagctctttcggggcaacagagatggctcagggagaac

SEQ ID NO: 1596 - DNA, 781 bp, Homo sapiens
  source 1..781: mol_type = unassigned DNA; mol_type = unassigned DNA
attttgcagggacaggatgatacttttgaaaatggagcaggaaattattgatttcattgctgacaacaataatcattataaaaagttccctcagatgtcatcgtatcagaggatgcttgtccatcgagtggcagcttattttggattggatcacaatgtggatcaaacaggaaaatctgttatcatcaacaagaccagcagcaccagaattcagtttgctcccaggaaagcctttttgtggaaaacagtaggctcttggaagacagtaacatatgcaatgagacctataagaaaagacagctctttcggttggggcaacagagatggctcagggagaacatctgggagtcgacagagcagctcagaaaatgaactcaagtggtctgaccaccaaagggcctggagcagcacagactccgacagttccaaccgcaatctaaagcccgccatgaccaagacggcgagttttgggggcatcacggtgctgaccaggggtgacagcacttccagtactaggagtaccgggaagctgtccaaagcaggttccgagtcttccagcagtgcaggctcctcaggatcgctgtcccgcacccatccacctctccagagcacacccctagtctcaggtgtggcagctggctctccaggctgtgtgccttatccagagaatggaatagggggccaggttgctcccagcagcaccagctacatcctccttccacttgaagctgcaacaggcatcccgcctggaagcatccttcttaatccacacacaggtgag

SEQ ID NO: 1597 - DNA, 787 bp, Homo sapiens
  source 1..787: mol_type = unassigned DNA; mol_type = unassigned DNA
ttgcagggacaggatgatacttttgaaaatggagcaggaaattattgatttcattgctgacaacaataatcattataaaaagttccctcagatgtcatcgtatcagaggatgcttgtccatcgagtggcagcttattttggattggatcacaatgtggatcaaacaggaaaatctgttatcatcaacaagaccagcagcaccagaattcagtttgctcccaggaaagcctttttgtggaaaacaggggcaacagagatggctcagggagaacatctgggagtcgacagagcagctcagaaaatgaactcaagtggtctgaccaccaaagggcctggagcagcacagactccgacagttccaaccgcaatctaaagcccgccatgaccaagacggcgagttttgggggcatcacggtgctgaccaggggtgacagcacttccagtactaggagtaccgggaagctgtccaaagcaggtagttccgagtcttccagcagtgcaggctcctcaggatcgctgtcccgcacccatccacctctccagagcacacccctagtctcaggtgtggcagctggctctccaggctgtgtgccttatccagagaatggaatagggggccaggttgctcccagcagcaccagctacatcctccttccacttgaagctgcaacaggcatcccgcctggaagcatccttcttaatccacacacaggccagccctttgtgaatcccgatggaactcctgcaatatacaacccacccaccagtcagcagcccctgcgaagcg

SEQ ID NO: 1598 - DNA, 305 bp, Homo sapiens
  source 1..305: mol_type = unassigned DNA; mol_type = unassigned DNA
ggcagcttattttggattggatcacaatgtggatcaaacaggaaaatctgttatcatcaacaagaccagcagcaccagaatgttccgagtcttccagcagtgcaggctcctcaggatcgctgtcccgcacccatccacctctccagagcacacccctagtctcaggtgtggcagctggctctccaggctgtgtgccttatccagagaatggaatagggggccaggttgctcccagcagcaccagctacatcctccttccacttgaagctgcaacaggcatcccgcctggaagcatccttcttaat

SEQ ID NO: 1599 - DNA, 466 bp, Homo sapiens
  source 1..466: mol_type = unassigned DNA; mol_type = unassigned DNA
accagagcaaaggttttgtgaacatttaaaagatgaaaaaggtgaagaatcccagaagcggtttatcttgaagcgagataactctagtattgataaagaagacaatcagtcagtttgctcccaggaaagcctttttgtggaaaacaggtaaaataaaatttacttttccatgtctttagaggaacaacgtctgtcatgtgtgtcttgtgtattcataaatatatatcccatatatgtgtgtgcttgaatatatgtattagcagatacatatatctatgcgtacacacatatatgttatttaacacatctacaaatgatctaatttggaaaaaaaattttctttcagttaattccaaacagaattgtaaaactttttcttatttaaagtctcaatttctggtccttgcaaaggtatacttcctattaccttcaccaggcattaagaataataaatatggagacatca

SEQ ID NO: 1600 - DNA, 837 bp, Homo sapiens
  source 1..837: mol_type = unassigned DNA; mol_type = unassigned DNA
gagtttatcatcaccaggtaataatttcaggattgtggctttatggctctcccattcttaacgtggatcgcatggagtctgcacgctctgctttgatttgaaccctttcccttggcttctgttgtttggtggctgcagctctgcagctccagaagaaaccactagctcggaatccgacggccacacgtttctccagctgtttcattcacatttctcttcttctgacctccatgccgaacagactaaatctaaaacctggagacgtcctgaaggaaaaataccctatgctgcatgagaattgtttacttttctaatcctaaccaacctttttccttttttatttctatcttttgtacctatttttcttaattcttttcccctatgaggggaaagttagttttaaaatcaggcaagtatttgggatccctcagcatatccagaacttctgatccaatgccttttttttatttttcagtcagtttgctcccaggaaagcctttttgtggaaaacagtaggctcttggaagacagtaacatatgcaatgagacctataagaaaagacagctctttcggggcaacagagatggctcagggagaacatctgggagtcgacagagcagctcagaaaatgaactcaagtggtctgaccaccaaagggcctggagcagcacagactccgacagttccaaccgcaatctaaagcccgccatgaccaagacggcgagttttgggggcatcacggtgctgaccaggggtgacagcacttccagtactaggagtaccgggaagctgtccaaagcaggttccgagtcttccagcagtgcaggctcctcagg

SEQ ID NO: 1601 - DNA, 2014 bp, Homo sapiens
  source 1..2014: mol_type = unassigned DNA; mol_type = unassigned DNA
gggagtcgacagagcagctcagaaaatgaactcaagtggtctgaccaccaaagggcctggagcagcacagactccgacagttccaaccgcaatctaaagcccgccatgaccaagacggcgagttttgggggcatcacggtgctgaccaggggtgacagcacttccagtactaggagtaccgggaagctgtccaaagcaggttccgagtcttccagcagtgcaggctcctcaggatcgctgtcccgcacccatccacctctccagagcacacccctagtctcaggtgtggcagctggctctccaggctgtgtgccttatccagagaatggaatagggggccaggttgctcccagcagcaccagctacatcctccttccacttgaagctgcaacaggcatcccgcctggaagcatccttcttaatccacacacagccctttgtgaatcccgatggaactcctgcaatatacaacccacccaccagtcagcagcccctgcgaagcgccatggtggggcagtcccaacagcagccaccacagcagcagccctccccgcagccccaacagcaggtccagccaccgcagccacagatggcaggccctctggtcactcagtctgtccaggggctgcaggcttcctcccagtcagtgcaatatccagcagtctcttttcctccccagcacctcctacctgtgtctccaacgcagcactttcccatgagagatgatgtggcaacacagtttggccagatgaccctgagccggcagtcctcgggggagactcctgaacccccatcaggtcctgtctacccatcctcccttatgccacagccggcccagcagcccagctatgtaatcgcctctacaggccagcagcttcctacaggaggattctcaggctctggccctcccatctcccagcaggtcctccagccccctccctcaccacagggatttgtgcaacagcctccgcctgcacagatgcctgtatattattacccatctggtcagtaccctacctcaaccacgcaacagtaccggcccatggccccggttcagtacaacgctcagaggagtcaacagatgccacaggcagcacagcaagcaggttaccagccagtcttgtctggtcaacagggattccaaggcctaataggagtgcagcagccacctcagagtcagaacgtgataaataaccaacaaggaactccggtgcaaagcgtgatggtttcctacccaacaatgtcttcttatcaggtgccaatgacccagggttctcaaggactgccccagcagtcataccaacagccaatcatgctacctaaccaggcaggtcaagggtcactcccagccactggaatgcctgtttactgtaatgtcacaccgcccacccctcagaacaaccttaggctgattggcccacactgcccctccagcactgtcccagtgatgtcagctagctgcagaacaaactgtgcaagtatgagcaatgctggttggcaggtcaaattctgagagctctggctgtggtacatttcttcagatatttctcatggcctttgatggaagaggaacaaggtgggaaaactggctgaggacttaagtattcactcaacactcaaatgattgctgctggtattctgtaaaaaataaacaaagactaatatacacgttagctggttaatggtgcatatttctgtcatgtctgctaggtatgcctttatagcttagctagtgacatgaattcatcaaggtaagattttctcctaccactgaataccactgtgtagattataatatccctaatttggattagttttgtactttgtgttgagtttgtgatgctaaaagtatttaaaaattatatactaaatcacattgtaccaaagctgtaatggaaaagcaaagaagaattgatgaattgaaggaataatttatatacattatagagttttcttttttaatggatatatactgtattgtagtgtttaatcaaaataaaactatttgacctta

SEQ ID NO: 1602 - DNA, 647 bp, Homo sapiens
  source 1..647: mol_type = unassigned DNA; mol_type = unassigned DNA
gcttcctcccagtcagtgcaatatccagcagtctcttttcctccccagcacctcctacctgtgtctccaacgcagcactttcccatggtcctccagccccctccctcaccacagggatttgtgcaacagcctccgcctgcacagatgcctgtatattattacccatctggtcagtaccctacctcaaccacgcaacagtaccggcccatggccccggttcagtacaacgctcagaggagtcaacagatgccacaggcagcacagcaagcagttgcagtgacaggtggatttctacagactgaatctgtggccatagtacttatttcaagataattggccaaggctaggttacatcctgtagccatgcaacagtgacagtaatttgatcacaataatgctgaccccatgacttttgacttcataattatcttgctgtagtcagctggccaacagcacttcatcaatgaaaatatccaccaggaggaatattatcatggggacagttattagagccacctccattttgactttgccccaagcttggtctggggaaaaagcttcttaaagttgcctcagcagtagtttgctgcctcccagcctggttttaagtatatccataattaacacgacgggtagaggtgcaagaa

SEQ ID NO: 1603 - DNA, 420 bp, Homo sapiens
  source 1..420: mol_type = unassigned DNA; mol_type = unassigned DNA
ttttgtatgtggctaggtacagttaactagaaaagggcctcaatacttttatcaaatctttgatgtgatccatatttctttataaatattaaatgtcagtgtccttgatcaataatttttcttagtagtgccctgttcttcccatttcaaagatgagtgagaaaactaagcagcagttcctaaactgaggactgaaggtttctgggagtttctgctgttaaagatagttaccagccagtcttgtctggtcaacagggattccaaggcctaataggagtgcagcagccacctcagagtcagaacgtgataaataaccaacaaggaactccggtgcaaagcgtgatggtttcctacccaacaatgtcttcttatcaggtgccaatgacccagggttctcaaggactgccccagcagtcatac

SEQ ID NO: 1604 - DNA, 407 bp, Homo sapiens
  source 1..407: mol_type = unassigned DNA; mol_type = unassigned DNA
aattattataaaatctgatttaagtgttgaccatagcctccagttccagccagctgaaaagataagcacatttgtatttgtgtggacaagtctgcagacttcttattgttgtctcaagccagacaatacaacccttttaaataacagttcctcataaggttaccagccagtcttgtctggtcaacagggattccaaggcctaataggagtgcagcagccacctcagagtcagaacgtgataaataaccaacaaggaactccggtgcaaagcgtgatggtttcctacccaacaatgtcttcttatcaggtgccaatgacccagggttctcaaggactgccccagcagtcataccaacagccaatcatgctacctaaccaggcaggtcaagggtcactcccagccactg

SEQ ID NO: 1605 - DNA, 1104 bp, Homo sapiens
  source 1..1104: mol_type = unassigned DNA; mol_type = unassigned DNA
tgaatttttaaagccataatcttgttcactcttagaagtaaaaaaaagagaaaatgcattcttagggaataaacatctgataacacattctgaatgtggagactgagatgtctgaaggctgccttttgaaccagtagttttaccccatgaaacatcactgtgttctttctgcacaaccagttcaaaagatctcttttcttcgcaggttaccagccagtcttgtctggtcaacagggattccaaggcctaataggagtgcagcagccacctcagagtcagaacgtgataaataaccaacaaggaactccggtgcaaagcgtgatggtttcctacccaacaatgtcttcttatcaggtgccaatgacccagggttctcaaggactgccccagcagtcataccaacagccaatcatgctacctaaccaggcaggtcaagggtcactcccagccactggaatgcctgtttactgtaatgtcacaccgcccacccctcagaacaaccttaggctgattggcccacactgcccctccagcactgtcccagtgatgtcagctagctgcagaacaaactgtgcaagtatgagcaatgctggttggcaggtcaaattctgagagctctggctgtggtacatttcttcagatatttctcatggcctttgatggaagaggaacaaggtgggaaaactggctgaggacttaagtattcactcaacactcaaatgattgctgctggtattctgtaaaaaataaacaaagactaatatacacgttagctggttaatggtgcatatttctgtcatgtctgctaggtatgcctttatagcttagctagtgacatgaattcatcaaggtaagattttctcctaccactgaataccactgtgtagattataatatccctaatttggattagttttgtactttgtgttgagtttgtgatgctaaaagtatttaaaaattatatactaaatcacattgtaccaaagctgtaatggaaaagcaaagaagaattgatgaattgaaggaataatttatatacattatagagttttcttttttaatggatatatactgtattgtagtgtttaatcaaaataaaactat

SEQ ID NO: 1606 - DNA, 3336 bp, Homo sapiens
  source 1..3336: mol_type = unassigned DNA; mol_type = unassigned DNA
gggagccgggagcgggctggcccgcgctcctcctgctggctggggattttccagcctgggcgctgacgccgcggacctccctgcgaccgtcgcggaccatgggcgacaaagggacccgagtgttcaagaaggccagtccaaatggaaagctcaccgtctacctgggaaagcgggactttgtggaccacatcgacctcgtggaccctgtggatggtgtggtcctggtggatcctgagtatctcaaagagcggagagtctatgtgacgctgacctgcgccttccgctatggccgggaggacctggatgtcctgggcctgacctttcgcaaggacctgtttgtggccaacgtacagtcgttcccaccggcccccgaggacaagaagcccctgacgcggctgcaggaacgcctcatcaagaagctgggcgagcacgcttaccctttcacctttgagatccctccaaaccttccatgttctgtgacactgcagccggggcccgaagacacggggaaggcttgcggtgtggactatgaagtcaaagccttctgcgcggagaatttggaggagaagatccacaagcggaattctgtgcgtctggtcatccggaaggttcagtatgccccagagaggcctggcccccagcccacagccgagaccaccaggcagttcctcatgtcggacaagcccttgcacctagaagcctctctggataaggagatctattaccatggagaacccatcagcgtcaacgtccacgtcaccaacaacaccaacaagacggtgaagaagatcaagatctcagtgcgccagtatgcagacatctgccttttcaacacagctcagtacaagtgccctgttgccatggaagaggctgatgacactgtggcacccagctcgacgttctgcaaggtctacacactgacccccttcctagccaataaccgagagaagcggggcctcgccttggacgggaagctcaagcacgaagacacgaacttggcctctagcaccctgttgagggaaggtgccaaccgtgagatcctggggatcattgtttcctacaaagtgaaagtgaagctggtggtgtctcggggcggcctgttgggagatcttgcatccagcgacgtggccgtggaactgcccttcaccctaatgcaccccaagcccaaagaggaacccccgcatcgggaagttccagagaacgagacgccagtagataccaatctcatagaacttgacacaaatgatgacgacattgtatttgaggactttgctcgccagagactgaaaggcatgaaggatgacaaggaggaagaggaggatggtaccggctctccacagctcaacaacagatagacgggccggccctgcctccacgtggctccggctccactctcgtgcactcggatgcttactcgtcttcttcctgttctggtttcttttcccctttgttcttccagtttctaccagggggccccgtgggcttccagatcacggtgatgaacctctggcctcaggattggccccacatcaccacgccaacaggaccacagcgcactggctccaccccatctctgccatctccactcccctccttttcatgctgtctcccagaaaagctgccagggctctggccttggaattggacttgagatggggagcagacaggggaggatggggaatgtgggacacggtgtggtgggcatgagggcttggaggggtggggatgagggctcaagacacgagagaagatgtccacggtcccaggtggttaacaaagttctggcagctaaaagatgaccgcgttgaaggccacctccttctggctgggaggggcagaactgtggacagattctcaatgcctttttgaagttctgacccaccaaagaccttctgccttcaccctcctccccacctgatgtccctctgtgtctgatagtgatgttggtgaaagttcgtagaccccaggagtagagaaaagcaactggactgactttcttaccagcagttacctagactgaggcaagctgtgtggactcacccaagtatatttcagtactgtcaggctgtgacatcttagctaccttgtatttcaagtgcatggccctgtctagagatatgcacagagagaaaagcagagggagggagggagggggtcttcagcaagcaccagcccccagcagagtgagctgaagctcctgaggagggttcccgaaggggggcgctcagagatgggggcagggggcggggagaggagagtctgccttatgtcccttccttgtggacttcacatggtcatgcaggaagtgaggatgggtgtccagcgggggccgaggccactagtatcctcctgcttccccctgccattctccagggctggactgaccctatggactgggagagagtgcctgaggccaccatgccacagtcaaagggggtcctatctcagaaggtggcagcatccactgagatatcctcacccgaagggaaggaggctgctgggtagcaaataagccccttcttttcttggtgagttgatgacctccaatagctcccagtgtcatgggtacccagtacgcattagctggtgttgggttgattgagacctggggcagttcctggggcaagaagccagatgggagatgagatagaaagtgttaggagttatcctctttgcctggcctttgagaataacttactgtgtgactttgggcaagttccttccccactctgggcctcagtttctcacttgggaaagcaaggagtttgaccagatgatcacaatgggccttcctagctctggccaccaagaatttgtgaacattagagctcctggtctggtgggtagagccagagctgctgactggtctctctgcctccagaggggatttattggacctcagaggtggcagggccctatggagcaccaactgccctcaaccccaccctgtgcccaagactgggaagggattgatgtcaggctgtggccataggtagcatgagttgcccaaggagggacagagcatatctttgctgaggcttggctgaggggcttatgatagggcttgcagtacctcacagccccctgtgggcacagacaccctgaggtttacccaggcaaatatattgattagcaggacaagggctctctcctcagtttctgctcccttccatctctctcccatacttgtctgaaaagggagacaaaaaatcttatacaagtggcatctcaatcctttccagtccagcacctcctggggcaggcagtgtgacttatttcctgtggtgaaatcacctgtttcacaagcctggcagcgcgacttctgagtctcatgac

SEQ ID NO: 1607 - DNA, 1895 bp, Homo sapiens
  source 1..1895: mol_type = unassigned DNA; mol_type = unassigned DNA
gggagccgggagcgggctggcccgcgctcctcctgctggctggggattttccagcctgggcgctgacgccgcggacctccctgcgaccgtcgcggaccatgggcgacaaagggacccgagtgttcaagaaggccagtccaaatggaaagctcaccgtctacctgggaaagcgggactttgtggaccacatcgacctcgtggaccctgtggatggtgtggtcctggtggatcctgagtatctcaaagagcggagagtctatgtgacgctgacctgcgccttccgctatggccgggaggacctggatgtcctgggcctgacctttcgcaaggacctgtttgtggccaacgtacagtcgttcccaccggcccccgaggacaagaagcccctgacgcggctgcaggaacgcctcatcaagaagctgggcgagcacgcttaccctttcacctttgagatccctccaaaccttccatgttctgtgacactgcagccggggcccgaagacacggggaaggcttgcggtgtggactatgaagtcaaagccttctgcgcggagaatttggaggagaagatccacaagcggaattctgtgcgtctggtcatccggaaggttcagtatgccccagagaggcctggcccccagcccacagccgagaccaccaggcagttcctcatgtcggacaagcccttgcacctagaagcctctctggataaggagatctattaccatggagaacccatcagcgtcaacgtccacgtcaccaacaacaccaacaagacggtgaagaagatcaagatctcagtgcgccagtatgcagacatctgccttttcaacacagctcagtacaagtgccctgttgccatggaagaggctgatgacactgtggcacccagctcgacgttctgcaaggtctacacactgacccccttcctagccaataaccgagagaagcggggcctcgccttggacgggaagctcaagcacgaagacacgaacttggcctctagcaccctgttgagggaaggtgccaaccgtgagatcctggggatcattgtttcctacaaagtgaaagtgaagctggtggtgtctcggggcggcgacgtggccgtggaactgcccttcaccctaatgcaccccaagcccaaagaggaacccccgcatcgggaagttccagagaacgagacgccagtagataccaatctcatagaacttgacacaaatgatgacgacattgtatttgaggactttgctcgccagagactgaaaggcatgaaggatgacaaggaggaagaggaggatggtaccggctctccacagctcaacaacagatagacgggccggccctgcctccacgtggctccggctccactctcgtgcactcggatgcttactcgtcttcttcctgttctggtttcttttcccctttgttcttccagtttctaccagggggccccgtgggcttccagatcacggtgatgaacctctggcctcaggattggccccacatcaccacgccaacaggaccacagcgcactggctccaccccatctctgccatctccactcccctccttttcatgctgtctcccagaaaagctgccagggctctggccttggaattggacttgagatggggagcagacaggggaggatggggaatgtgggacacggtgtggtgggcatgagggcttggaggggtggggatgagggctcaagacacgagagaagatgtccacggtcccaggtggttaacaaagttctggcagctaaaagatgaccgcgttgaaggccacctccttctggctgggaggggcagaactgtggacagattctcaatgcctttttgaagttctgacccaccaaagaccttctgccttcaccctcctccccacctgat

SEQ ID NO: 1608 - DNA, 701 bp, Homo sapiens
  source 1..701: mol_type = unassigned DNA; mol_type = unassigned DNA
gaggcctggcccccagcccacagccgagaccaccaggcagttcctcatgtcggacaagcccttgcacctagaagcctctctggataaggagatctattaccatggagaacccatcagcgtcaacgtccacgtcaccaacaacaccaacaagacggtgaagaagatcaagatctcagtgcgccagtatgcagacatctgccttttcaacacagctcagtacaagtgccctgttgccatggaagaggctgatgacactgtggcacccagctcgacgttctgcaaggtctacacactgacccccttcctagccaataaccgagagaagcggggcctcgccttggacgggaagctcaagcacgaagacacgaacttggcctctagcaccctgttgagggaaggtgccaaccgtgagatcctggggatcattgtttcctacaaagtgaaagtgaagctggtggtgtctcggggcggcgacgtggccgtggaactgcccttcaccctaatgcaccccaagcccaaagaggaacccccgcatcgggaagtgatgacgacattgtatttgaggactttgctcgccagagactgaaaggcatgaaggatgacaaggaggaagaggaggatggtaccggctctccacagctcaacaacagatagacgggccggccctgcctccacgtggctccggctccactctcgtgcac

SEQ ID NO: 1609 - DNA, 1744 bp, Homo sapiens
  source 1..1744: mol_type = unassigned DNA
ttgtagcgatggggtcttgctatgttgcccaggctggtctcaaactcctagcctcaagcaatcctcctgtcagcctctcaagttgctgggattacaggcatgagcaactgtgcctgctgtggctgtactttttttttttttttttttgagatggagtcttgctctgtcacccaggctggagtgcagtggagcaatctcggctcactgtaagctccacctcccaggttcatgccattctcctggctcagcctcctgagtagctggaactacaggcgtccaccaccatgcccggctaatttttttgtatttttagtagagacggggtttcaccttgttagccaggatggtctccaactcctgacctcgtgatctacccgcctcggcctcccaaaatgctgggattacaggcgtgagccactgcacccggctggctgtaattctttaaataaatgtgctttttagcactgtgctgcttgactaggataatcttttagaatatccgagattcagtcctgtttgtgcgtagaatgtagatgtgcctcttttgagtggcagtggtctccttgcccgagctgggctggcccaagtggtccgtgtgtctgggggacagaggttgggagagggagacttggagcaggctcagactagatattctgctgggctggagatcagggctggggttggctctggggagggccatctccacagctgcttcctttcttcccagtgacactgtggcacccagctcgacgttctgcaaggtctacacactgacccccttcctagccaataaccgagagaagcggggcctcgccttggacgggaagctcaagcacgaagacacgaacttggcctctagcaccctgttgagggaaggtgccaaccgtgagatcctggggatcattgtttcctacaaagtgaaagtgaagctggtggtgtctcggggcggcctgttgggagatcttgcatccaggtaaattcctcccttccacctggttcacccaccttcctggagggcctggagcccattggcttgactgaccagaatcacagggcactgggttggaaggaatcttagtggtcatttcagatagccaggttcaggtgtgagctgggagacacaatttctccttaacaaacctcaccttgctcttccatcccacctgagtgacagggatctttacagagagcaaagcctgattacactgatacagggagtggcccccaagagagctgtctgaattactgatcacctgaattataggagcttttggagaaatgcagacttcatggctttcaaacttctacactagtgaggagggaactgctggccaagtgttgctaaggagaggtcctcaggagatcctattttgtaaacaaggtctccttgcagccagctggatgcacttatattccaaaaatgcatgtaccccaaacacagcagtttggcctccttctgtcacaagatggcagtgtggctcatcctaagaaatcttaaactaatttgacaggtgaaattcattcaattcaattcagttccatatcattcagcaaagatttcctcaacccaggcttgcgtccaggctggtgctgagtgccagagtcccagagaggaatcagatgtggtccctgaccttatcgttcctggcccggtagaaggttaagatccagattcttccactaaaatgttggcaaacccagtcttccaccagctccattctgaagcaatccccaaagcaaaagg

SEQ ID NO: 1610 - DNA, 404 bp, Homo sapiens
  source 1..404: mol_type = unassigned DNA; mol_type = unassigned DNA
tgcgccagtatgcagacatctgccttttcaacacagctcagtacaagtgccctgttgccatggaagaggctgatgacactgtggcacccagctcgacgttctgcaaggtctacacactgacccccttcctagccaataaccgagagaagcggggcctcgccttggacgggaagctcaagcacgaagacacgaacttggcctctagcaccctgttgagggaaggtgccaaccgtgagatcctggggatcattgtttcctacaaagtgaaagtgaagctggtggtgtctcggggcgggtgagtgctccagccaagcccaagaccccggagtgcagaggggagcgtcccaggtgcccacaggcccctgccccattctgcctgtttgcagcccttttagctgcatcca

SEQ ID NO: 1611 - DNA, 925 bp, Homo sapiens
  source 1..925: mol_type = unassigned DNA; mol_type = unassigned DNA
gggagagctgagcctgcggggctggccctggcctggctgctgctgcctgcagcccccagctcaggctccctccacctcacagtccactgctttggcgctgcttctgggctggcctcttcactccactgaatctttgggctctcatctgtaaaatgggagtgttcaagaaggccagtccaaatggaaagctcaccgtctacctgggaaagcgggactttgtggaccacatcgacctcgtggaccctgtggatggtgtggtcctggtggatcctgagtatctcaaagagcggagagtctatgtgacgctgacctgcgccttccgctatggccgggaggacctggatgtcctgggcctgacctttcgcaaggacctgtttgtggccaacgtacagtcgttcccaccggcccccgaggacaagaagcccctgacgcggctgcaggaacgcctcatcaagaagctgggcgagcacgcttaccctttcacctttgagatccctccaaaccttccatgttctgtgacactgcagccggggcccgaagacacggggaaggcttgcggtgtggactatgaagtcaaagccttctgcgcggagaatttggaggagaagatccacaagcggaattctgtgcgtctggtcatccggaaggttcagtatgccccagagaggcctggcccccagcccacagccgagaccaccaggcagttcctcatgtcggacaagcccttgcacctagaagcctctctggataaggagatctattaccatggagaacccatcagcgtcaacgtccacgtcaccaacaacaccaacaagacggtgaagaagatcaagatctcagtgcgccagtatgcagacatctgccttttcaacacagctcagtacaagtgccctgttgccatggaagaggctgatgacactgtggc

SEQ ID NO: 1612 - DNA, 593 bp, Homo sapiens
  source 1..593: mol_type = unassigned DNA; mol_type = unassigned DNA
gtggaggaaggagaagggagaggccagcagcagccactgcaagagatgggagaggagaggccatggaaggagacttgcagcgggagaggctgagctcaccgtctacctgggaaagcgggactttgtggaccacatcgacctcgtggaccctgtggatggtgtggtcctggtggatcctgagtatctcaaagagcggagagtctatgtgacgctgacctgcgccttccgctatggccgggaggacctggatgtcctgggcctgacctttcgcaaggacctgtttgtggccaacgtacagtcgttcccaccggcccccgaggacaagaagcccctgacgcggctgcaggaacgcctcatcaagaagctgggcgagcacgcttaccctttcacctttgagatccctccaaaccttccatgttctgtgacactgcagccggggcccgaagacacggggaaggcttgcggtgtggactatgaagtcaaagccttctgcgcggagaatttggaggagaagatccacaagcggaattctgtgcgtctggtcatccggaaggttcagtatgccccagagaggcctggcccccagcccacag

SEQ ID NO: 1613 - DNA, 559 bp, Homo sapiens
  source 1..559: mol_type = unassigned DNA; mol_type = unassigned DNA
agccactgcaagagatgggagaggagaggccatggaaggagacttgcagcgggagaggctgagagtgttcaagaaggccagtccaaatggaaagctcaccgtctacctgggaaagcgggactttgtggaccacatcgacctcgtggaccctgtggatggtgtggtcctggtggatcctgagtatctcaaagagcggagagtctatgtgacgctgacctgcgccttccgctatggccgggaggacctggatgtcctgggcctgacctttcgcaaggacctgtttgtggccaacgtacagtcgttcccaccggcccccgaggacaagaagcccctgacgcggctgcaggaacgcctcatcaagaagctgggcgagcacgcttaccctttcacctttgagatccctccaaaccttccatgttctgtgacactgcagccggggcccgaagacacggggaaggcttgcggtgtggactatgaagtcaaagccttctgcgcggagaatttggaggagaagatccacaagcggaattctgtgcgtctggtcatccggaaggttcag

SEQ ID NO: 1614 - DNA, 563 bp, Homo sapiens
  source 1..563: mol_type = unassigned DNA; mol_type = unassigned DNA
gtgtctgccttccgctgccctgtaggtgctctggggaaacaacaccgacaccggggcctgtaccttctgcagagtgttcaagaaggccagtccaaatggaaagctcaccgtctacctgggaaagcgggactttgtggaccacatcgacctcgtggaccctgtggatggtgtggtcctggtggatcctgagtatctcaaagagcggagagtctatgtgacgctgacctgcgccttccgctatggccgggaggacctggatgtcctgggcctgacctttcgcaaggacctgtttgtggccaacgtacagtcgttcccaccggcccccgaggacaagaagcccctgacgcggctgcaggaacgcctcatcaagaagctgggcgagcacgcttaccctttcacctttgagatccctccaaaccttccatgttctgtgacactgcagccggggcccgaagacacggggaaggcttgcggtgtggactatgaagtcaaagccttctgcgcggagaatttggaggagaagatccacaagcggaattctgtgcgtctggtcatccggaagg

SEQ ID NO: 1615 - DNA, 308 bp, Homo sapiens
  source 1..308: mol_type = unassigned DNA; mol_type = unassigned DNA
gtcccctggggcccttggtctgatgggtgtatgggagtgtctgggctgcaatacatgagacaggacagtggtggatgtgacaggtggctcgttctgtcctcttcttgacagatccctccaaaccttccatgttctgtgacactgcagccggggcccgaagacacggggaaggcttgcggtgtggactatgaagtcaaagccttctgcgcggagaatttggaggagaagatccacaagcggtgagtaggatgccagggtgtgggccgcctgctgggtgagggagggagacaggatgggcaaagtccaag

SEQ ID NO: 1616 - DNA, 684 bp, Homo sapiens
  source 1..684: mol_type = unassigned DNA; mol_type = unassigned DNA
gggagaggccgcttactctctgtcctttccccagatggtgtggtcctggtggatcctgagtatctcaaagagcggagagtctatgtgacgctgacctgcgccttccgctatggccgggaggacctggatgtcctgggcctgacctttcgcaaggacctgtttgtggccaacgtacagtcgttcccaccggcccccgaggacaagaagcccctgacgcggctgcaggaacgcctcatcaagaagctgggcgagcacgcttaccctttcacctttgagatccctccaaaccttccatgttctgtgacactgcagccggggcccgaagacacggggaaggtaggtcaccccaaggggaccatctctctggctccaggagtctcatgtccccaggtccctggctttctccctgggaggtgctggacacacaggaccactctccctgttgaacagtctttgtgtctaggctaagctggtcccaccttggacaaccagtctctcttcagacagggcagcaggtacggggtcagcctcactctcccattcagtgatgggtctggaggctctcctgggtggcgttggctgcaacaggaccaaagtgttctgaggacctacacctggcctcatgtaacccctggcaacctggaatcaaagtgcgatcatccccatttcacagatggggaaact

SEQ ID NO: 1617 - DNA, 551 bp, Homo sapiens
  source 1..551: mol_type = unassigned DNA; mol_type = unassigned DNA
attttccagcctgggcgctgacgccgcggacctccctgcgaccgtcgcggaccatgggcgacaaagggacccgagtgttcaagaaggccagtccaaatggaaagctcaccgtctacctgggaaagcgggactttgtggaccacatcgacctcgtggaccctgtggatggtgtggtcctggtggatcctgagtatctcaaagagcggagagtctatgtgacgctgacctgcgccttccgctatggccgggaggacctggatgtcctgggcctgacctttcgcaaggacctgtttgtggccaacgtacagtcgttcccaccggcccccgaggacaagaagcccctgacgcggctgcaggaacgcctcatcaagaagctgggcgagcacgcttaccctttcacctttgagatccctccaaaccttccatgttctgtgacactgcagccggggcccgaagacacggggaaggtaggtcaccccaaggggaccatctctctggctccaggagtctcatgtccccaggtccctggctttctccctgggaggtgctgg

SEQ ID NO: 1618 - DNA, 4188 bp, Homo sapiens
  source 1..4188: mol_type = unassigned DNA; mol_type = unassigned DNA
acaaagctgctcttaaagtgagctggcagcttttagccgcccgtctttgtaaggagaccactgagacgagcgggagcgcggagcagcagcctctgctgccctgactttttaagaaatctcaatgaactatttgtagagaatcactgatccggcctgcaagcattttgcacggcaaaaatatcgatcagtgttaagtgaagatcacattttatatgcgatcttgacttttttgtcttacattatatttttatagattttgttataaacatggtgctgggaaaggtgaagagtttgacaataagctttgactgtcttaatgacagcaatgtccctgtgtattctagtggggataccgtctcaggaagggtaaatttagaagttactggggaaatcagagtaaaatctcttaaaattcatgcaagaggacatgcgaaagtacgctggactgaatctagaaacgccggctccaatactgcctatacacagaattacactgaagaagtagagtatttcaaccataaagacatcttaattgggcacgaaagagatgatgataattccgaagaaggcttccacactattcattcaggaaggcatgaatatgcattcagcttcgagcttccacagacaccactcgctacctcattcgaaggccgacatggcagtgtgcgctattgggtgaaagccgaattgcacaggccttggctactaccagtaaaattaaagaaggaatttacagtctttgagcatatagatatcaacactccttcattactgtcaccccaagcaggcacaaaagaaaagacactctgttgctggttctgtacctcaggcccaatatccttaagtgccaaaattgaaaggaagggctataccccaggtgaatcaattcagatatttgctgagattgagaactgctcttcccgaatggtggtgccaaaggcagccatttaccaaacacaggccttctatgccaaagggaaaatgaaggaagtaaaacagcttgtggctaacttgcgtggggaatccttatcatctggaaagacagagacgtggaatggcaagttgctgaaaattccaccagtttctccctctatcctcgactgtagtataatccgcgtggaatattcactaatggtatatgtggatattcctggagctatggatttatttcttaatttgccacttgtcatcggtaccattcctctacatccatttggtagcagaacctcaagtgtaagcagtcagtgtagcatgaatatgaactggctcagtttatcacttcctgaaagacctgaagcaccacccagctatgcagaagtggtaacagaggaacaaaggcggaacaatcttgcaccagtgagtgcttgtgatgactttgagagagcccttcaaggaccactgtttgcatatatccaggagtttcgattcttgcctccacctctttattcagagattgatccaaatcctgatcagtcagcagatgatagaccatcctgcccctctcgttgaaggaacacttggttgaatcaagttgatgtgggttccgaactgtatctcttccggctgaggacagagaagtatcttggagacacgtttcagaggaagtggaattacttttgcccagaaaaatggcgaatacatgaaacaaccagtgatcatgctttagaagcctacagcaacattctgagactgctccaacatgcttgaagatctaagcttttctcttttaaaactggcacatactcagagcagtcttcttagcctatggtcgtacgtgtcaagacatcacgttgtaaagagggatgatttccttcttttgatttgaaaatttgcacatgctcaatgcttacattgtgcggttcgacgtcactacagcttctttttttttttttttttttttctatttttgccagactcttgatactcttaaaacttgtttgtggtcagcacaacaaggaacaaaacaaagctttgaaaaaactttaacatgaaaaaacgcactgacatttttttttatttaatatagcctggactttacctgcgtatgcacatgctcagaattgtctactaggctgactatgtatcacctcttcagcttggatccaattgtggatttatttacaaacatcaaatgccttcaagccaatcctttttgctgtatgttttgcagcctactgtagtagatacgcaacagataatgtgggaaaaaaagagataagaggaggaagctaataagagactgtcaagattgtataccttcttggtttcttttaagaatttgttgcctttctactattacagcaaagcagcattttgttactgactgcctaaaatcacttaatctcaggtgaacgcatcacttgccaaactgttggaatgctatttgtgttttgttgcactgtttttttcgtttgtttgtttgtttatttggttggctttttggagagggaaatttggaaacgggacatacacaaaagttacacacccacattccctttttatcatgacatacaagaagaaactagcagagctaagaatggagtgaagaaaggcagtatggcaggcaccagcaaagagttgagggctgttgctcttaaaaattattttttttattattattttgaaagtatggaagttttccattcactggggaaaggagggaaaagtgcatttatttttatacagagttacttaattacctccaaaacacatatgttggaaatcgcttttgctggtgcaaagtatattaatgagcaggaatacatacattgaggttatgaatagagagctcaatttgtacctttgctgtcttgctcaagcttggtatggcatgaaaactcgactttattccaaaagtaacttcaaaatttaaaatactagaacgtttgctgcgataaatcttttggatttttgtgtttttctaatgagaatactgtttttcattacctaaagaacaatttgctaaacatgagaaatcactcactttgattatgtatagattacataggaagaacaatcacatcagtaagttatagtttatattaaaggtaattttctgttggctcataacaaatataccagcattcatgatagcatttcagcattttccaaggtaccaagtgtacttattttgttgttgttgttgttgttgtattttagaaggaattcagctctgatgtttttaaagaaaaccagcatctctgatgttgcaacatacgtgtaaaatgggtgttacatctatcctgccatttaaccccacagttaataaagtggctgaaaataatagtagctctggcttggtgcttgacctggttaaatactgtcttaaagctcatacaaaacaaataggcttttccataagtggcctttaagaaaacatggaagacaattcatgtttgacaaatgctgacagggtgaagaaagcccagtgtaaaaatgaatcgcgttttaagtgattcggttaaagagtttgggctcccgtagcaaactaatactagataataaggaaatgggggtgaaatatttttttattgttgaatcattttgtgaatgtccccctcaaaaaaagctaatggaatatttggcataaagggcatttggtggttttatttttgtttgagggggattgtcagaaaatcccttttctctcttacgtctaactgactagggaacaattgttgatatgcatagcattggaatacttgtcattatatactcttacaaataacacatgaagcaagaatgaccaatattctgataattggcactggatcacaaaatgtgataaaactttaaatgtataaaactttatcaaataaagttttattttcccctttaaaatgtatttctttagaggcattacttttttaaaaatattggtcaattcctgacataagatgtgaggttcacagttgtattccagtattcaagatagattcctgatttttcaattaggaaaagtaaaatccaaaatgttagcaaaacaaagtgcaatattaaatgtttgctttatagattatattctatggctgtttgtaatttctctttttttccttttttatttggtgctgaatatgtccttgtaggctctgttttaagaaaacaatatgtgggaaatgatttaatttttcctattgctcttccttgtggaaaataaagtgttttgtttttttctgttttgtataa

SEQ ID NO: 1619 - DNA, 821 bp, Homo sapiens
  source 1..821: mol_type = unassigned DNA; mol_type = unassigned DNA
ccttcagcaccacccagctatgcagaagtggtaacagaggaacaaaggcggaacaatcttgcaccagtgagtgcttgtgatgactttgagagagcccttcaaggaccactgtttgcatatatccaggagtttcgattcttgcctccacctctttattcagagattgatccaaatcctgatcagtcagcagatgatagaccatcctgcccctctcgttgaaggaacacttggttgaatcaagttgatgtgggttccgaactgtatctcttccggctgaggacagagaagtatcttggagacacgtttcagaggaagtggaattacttttgcccagaaaaatggcgaatacatgaaacaaccagtgatcatgctttagaagcctacagcaacattctgagactgctccaacatgcttgaagatctaagcttttctcttttaaaactggcacatactcagagcagtcttcttagcctatggtcgtacgtgtcaagacatcacgttgtaaagagggatgatttccttcttttgatttgaaaatttgcacatgctcaatgcttacattgtgcggttcgacgtcactacagcttctttttttttttttttttttttctatttttgccagactcttgatactcttaaaacttgtttgtggtcagcacaacaaggaacaaaacaaagctttgaaaaaactttaacatgaaaaaacgcactgacatttttttttatttaatatagcctggactttacctgcgtatgcacatgctcagaattgtctactaggctgactatgtatcacctcttcagcttggatccaattgtg

SEQ ID NO: 1620 - DNA, 475 bp, Homo sapiens
  source 1..475: mol_type = unassigned DNA; mol_type = unassigned DNA
tcaaatagctactgattagttcatttctatgactcaagttatttgcagttcctgggacatcttttcatgtatgttagttgcactttcttactttagctttaagaatcttgacttcttttgttgtttttttctaacagtagatatgtatatatttttccctctctaggtgaatcaattcagatatttgctgagattgagaactgctcttcccgaatggtggtgccaaaggcagccatttaccaaacacaggccttctatgccaaagggaaaatgaaggaagtaaaacagcttgtggctaacttgcgtggggaatccttatcatctggaaagacagagacgtggaatggcaagttgctgaaaattccaccagtttctccctctatcctcgactgtagtataatccgcgtggaatattcactaatggtatatgtggatattcctggagctatggatttatttcttaatttgccacttg

SEQ ID NO: 1621 - DNA, 531 bp, Homo sapiens
  source 1..531: mol_type = unassigned DNA; mol_type = unassigned DNA
gagactgctgagctggcacaaaaagggagcgaagagggaagaaagggaaaggaaggcgaacttcgggcgccttcgaggggagcgaatttaaatggcccccagctcatcagctagtttttggttctgaaatccgttcaggggaatttgcacaggggacgaggaaaattatgatgataattccgaagaaggcttccacactattcattcaggaaggcatgaatatgcattcagcttcgagcttccacagactcaccccaagcaggcacaaaagaaaagacactctgttgctggttctgtacctcaggcccaatatccttaagtgccaaaattgaaaggaagggctataccccaggtgaatcaattcagatatttgctgagattgagaactgctcttcccgaatggtggtgccaaaggcagccatttaccaaacacaggccttctatgccaaagggaaaatgaaggaagtaaaacagcttgtggctaacttgcgtggggaatccttatcatctggaaagacagagacgtggaat

SEQ ID NO: 1622 - DNA, 564 bp, Homo sapiens
  source 1..564: mol_type = unassigned DNA; mol_type = unassigned DNA
gagagtgagctcgcgccgcggctggggcgaggctaggaaaccggcgtgcgccggtaaaggttcctccagagcgacccccacccagcccgtactcacgtttgttcccgggcttctgggggcgcccagcccgtgtcaacatcatgttctgtcgcccctcttttgggcctcctaagggccatcgaaaggaaacgacttcaggctttaactgagtagagggcagacgctcctgccggccttacagatgatgataattccgaagaaggcttccacactattcattcaggaaggcatgaatatgcattcagcttcgagcttccacagacaccactcgctacctcattcgaaggccgacatggcagtgtgcgctattgggtgaaagccgaattgcacaggccttggctactaccagtaaaattaaagaaggaatttacagtctttgagcatatagatatcaacactccttcattactgtcaccccaagcaggcacaaaagaaaagacactctgttgctggttctgtacctcaggcccaatatccttaagtgccaaaattgaaaggaagggc

SEQ ID NO: 1623 - DNA, 587 bp, Homo sapiens
  source 1..587: mol_type = unassigned DNA; mol_type = unassigned DNA
agttcttgattgacagcccggcacttgtttaccacggcgcggccgccgccgctcgcttcaatgagactgctgagctggcacaaaaagggagcgaagagggaagaaagggaaaggaaggcgaacttcgggcgccttcgaggggagcgaatttaaatggcccccagctcatcagctagtttttggttctgaaatccgttcaggggaatttgcacaggggacgaggaaaattgtatggagacataagcgaatcaccatgatttttaaatgaaaatgatgataattccgaagaaggcttccacactattcattcaggaaggcatgaatatgcattcagcttcgagcttccacagacaccactcgctacctcattcgaaggccgacatggcagtgtgcgctattgggtgaaagccgaattgcacaggccttggctactaccagtaaaattaaagaaggaatttacagtctttgagcatatagatatcaacactccttcattactgtcaccccaagcaggcacaaaagaaaagacactctgttgctggttctgtacctcaggcccaatatccttaagtgccaaaattgaaagg

SEQ ID NO: 1624 - DNA, 355 bp, Homo sapiens
  source 1..355: mol_type = unassigned DNA; mol_type = unassigned DNA
agaattacactgaagaagtagagtatttcaaccataaagacatcttaattgggcacgaaagagatgatgataattccgaagaaggcttccacactattcattcaggaaggcatgaatatgcattcagcttcgagcttccacagacaccactcgctacctcattcgaaggccgacatggcagtgtgcgctattgggtgaaagccgaattgcacaggccttggctactaccagtaaaattaaagaaggaatttacagtctttgagcatatagatatcaacactccttcattactggtaagaattgactgaattatttattctttgtttttggcatataaatattaaagaataatcaa

SEQ ID NO: 1625 - DNA, 1215 bp, Homo sapiens
  source 1..1215: mol_type = unassigned DNA; mol_type = unassigned DNA
atgcgatcagccagcttgagtggacgcacccgcccgccgccagggaatctttgccggtgctactgtttttatgcttgcttctgaagacgtgtgaacctaaaactgcaaatgcctttaaaccaaatatcctactgatcatggcggatgatctaggcattggggatctcggttgctatgggaacaatacactgagaatgccaaatattgaccagcttgcagaggaaggtgtgaggctcactcagcacctggcggccaccctgctctgcaccccaagccgagctgcattcctcatggggagacattctttcaggtcaggcatggacgccagcaatggatactgggcccttcagtggaatgcaggctcaggtggctccctgagaacgaaaccacttttgcaagaatcttgcagcaccgcgactatgcaactggcctcataagtaagattcttaatgccatcgaagacaatgatttaagaaactcaacattcacgtatttcacctctgaccatggaggacatttagaggcaagagatggacacaggagttagggggatggaacagaatttacaaaggtgggaagggcataggaggatgggaagatgggatccatgtgcccgggattttccactggcccagggtgctcctggctggctgagtgattggagagcccacgagcctgatggacgtgttccctcctgtggtccagctggcaggcggcaaggtgccccaggacagggtgatcgacaaccgcagcttggtgcccttgctgcagggagctgaggcatgcttagcacatgagttcctgtttcattactgtgggtagcatctccacacagcacactggcaactgaaggacagtggaagcatctggaaggttcattacgtgatcccacagttccaccccatgggagcaggggcctgctacagctgaggcatctgcccatgctccagggagggcatgacccatcacagaccccctttgctctttgacctctccacggaccactctgaggcacagcccctgacccctgactccaagcacctgtaccacgccatgatagcaagggtaggtgccgcagtgtcgaagcattggcagaccctgagtcctgtgccccagcagttttccacaagcaacatcttgtggaagctgtggctgcagccgtgctgcagacatttcccgttctgctcatgcccaaggatggggatggcaccccga

SEQ ID NO: 1626 - DNA, 4642 bp, Homo sapiens
  source 1..4642: mol_type = unassigned DNA; mol_type = unassigned DNA
ggctgcgcccaggccggcgggcccagcagctgcgaaccgccggcgcaccacctgtttccgcgcccggggacttccccggcggggctcagaagtgtgggatcggtcgcttggcttcccctggcgtcagcgacccagggtaacctcctccactgctgcgtgccgtgcaggcctgcctgtgtgagagccacgtgtgccgcgctctgggcacagccttggaaagtcaggaccgcgacggcagcagagcagaaaccttacagaaacatgaagccctcaaccatctgctactcagttattcggggctgacggcggcttctagaacatccaggtgttctgcagatgcgagaactcatcctgtagtcaccagatggagtcccaaacagccaagcagatgtaaggcctgtgctgtggctctgaggccctgaatacagaagggtcactttcttagtggccaaagagcagttgttgacattgatgtctaattattgaacacgaccagtcattttactgagctgcggtgaggaaacactgaccatagaagatcaagccaaatgagggattgcaaatttcctgattcttttgaattaggattccagatgggggcctcatttctacagcccccaacattcctatagccgttatcactgccatcaccactgccaccagcatcttcttgcagattccacccctgctccccagagacttcctgctttgaaagtgagcagaaaggaagctctcagaaaaatctctagtggtggctgccgtcgctccagacaatcggaatcctgccttcaccaccatgggctggctttttctaaaggttttgttggcgggagtgagtttctcaggatttctttatcctcttgtggatttttgcatcagtgggaaaacaagaggacagaagccaaactttgtgattattttggccgatgacatggggtggggtgacctgggagcaaactgggcagaaacaaaggacactgccaaccttgataagatggcttcggagggaatgaggtttgtggatttccatgcagctgcctccacctgctcaccctcccgggcttccttgctcaccggccggcttggccttcgcaatggagtcacacgcaactttgcagtcacttctgtgggaggccttccgctcaacgagaccaccttggcagaggtgctgcagcaggcgggttacgtcactgggataataggcaaatggcatcttggacaccacggctcttatcaccccaacttccgtggttttgattactactttggaatcccatatagccatgatatgggctgtactgatactccaggctacaaccaccctccttgtccagcgtgtccacagggtgatggaccatcaaggaaccttcaaagagactgttacactgacgtggccctccctctttatgaaaacctcaacattgtggagcagccggtgaacttgagcagccttgcccagaagtatgctgagaaagcaacccagttcatccagcgtgcaagcaccagcgggaggcccttcctgctctatgtggctctggcccacatgcacgtgcccttacctgtgactcagctaccagcagcgccacggggcagaagcctgtatggtgcagggctctgggagatggacagtctggtgggccagatcaaggacaaagttgaccacacagtgaaggaaaacacattcctctggtttacaggagacaatggcccgtgggctcagaagtgtgagctagcgggcagtgtgggtcccttcactggattttggcaaactcgtcaagggggaagtccagccaagcagacgacctgggaaggagggcaccgggtcccagcactggcttactggcctggcagagttccagttaatgtcaccagcactgccttgttaagcgtgctggacatttttccaactgtggtagccctggcccaggccagcttacctcaaggacggcgctttgatggtgtggacgtctccgaggtgctctttggccggtcacagcctgggcacagggtgctgttccaccccaacagcggggcagctggagagtttggagccctgcagactgtccgcctggagcgttacaaggccttctacattaccggtggagccagggcgtgtgatgggagcacggggcctgagctgcagcataagtttcctctgattttcaacctggaagacgataccgcagaagctgtgcccctagaaagaggtggtgcggagtaccaggctgtgctgcccgaggtcagaaaggttcttgcagacgtcctccaagacattgccaacgacaacatctccagcgcagattacactcaggacccttcagtaactccctgctgtaatccctaccaaattgcctgccgctgtcaagccgcataacagaccaatttttattccacgaggaggagtacctggaaattaggcaagtttgcttccaaatttcatttttaccctctttacaaacacacgctttagtttagtcttggagtttagttttggagttagccttgcatatcccttctgtatcctgtccctcctccacgccgacccgagagcagctgagctgcgctggctctgggcagggagtgtgccttaatgggaagcacacgggctttggagtcaggcacaggtgccagctccagcttttgaacttgggcaattgtttaacctaacctgcaagttgattttgagggttaaataaaggcatacatgaaaatgcctggcaaattacctgacacagagcagacattcaatacattttagtttccttgtttctctggttcccagtttctctggtcattttggtgtaaatccattctaattagtatttagggcagagcttctctctcttttctctttttttccttccacaaaccagtgtactcactggtctccatctttaatatgcaaacaaatcacctgggatcttgtgagaatccggattccgtctcagtagggctcgagtagatcctgaaatcctacatttctatcaaacaatgccttgaggagcacagatttagaccaaagttaggtcgttttccagatctcagagcagacgagtccatggataagtctgtggcccaatccccttcctctccttttaagggtgaaatgactgcatttaaaagaagttaaagagttcctcctgtcccctataaccacaaggaaacaaaaaaatatataaaaacctcaaaaatgcattgccatgattttattattagtgtccaaaatgggactcccaagtaataaatgatttattccagccacagccaaaaaagactttgcctggctaaaagagtctctctctaagtatgtaatatacaagaaatacaattcaaagagatgttcctataagtacattttttacacggcatatatttaaaaaggaggccccttttaatataaaattccggttatataccaatatggttaattagcatttacactatagtttgaacgtattttaaatagcatgatgtgtatacaatgtctcccgcgcccattggcaaccagggtcgtgggaagcttggtgaggagttaaccaggtcctgtggtttaagcagtggagcacccgggattcctgcccccctttctgctcacacaattgcactccattcttccgccttccttgttttctccaaaaccacctgataggggggatgtcctgatttctgaggtgtgcttctcatcatgactgcttcgttttgcccttctgatttccacggcacaagattatctaccaaaatcaaaacagaatggccttactcttctcaggaagaggctggtaggcaggtgcattatcaacaggtctgtgcccatgcagagtgagcagggagaggctgggcactgtggaatttttctgtctgaactcgctcatggccacagaatggtcacccagcttatttaggtgtagacaagtatgacacagttctagaaaatactgactataaaaatgtctctgtgtgtgtgtgtatgtatttatatgtatatgtatatatttttaaaaggctcatcttacttgtaaacatggactgctcaatcactattaaaaagtcagtttaggctgggcgcggtggctcacgcctgtaatcccagaactttgggaggctgaggtgggtggatcactaggtcaggagtttgagaccagcctggccaacatggtgaaaccccatcgctactaaaaaatacaaaaattagccgggcatggtggcgctcacctgtaatcccagctactcgggaggctgaggcaggagagaatcgcttgaaccggggaggtggaggctgcagtgagccgagatcgcaccactgcactccagcctgggcgatggagcaagactccatctcaaaaaaaaaaaagtcagtttaggctgggcgcagtggctcacacctgtaatcccagcactttaggaggctgaggggggtgatcacctgaggtcaggagtttgagaccagcctggccaacatggtgaaatcctgtctctactaaaaatacaaaatttagctgggcatggtagcatgcctgaaaccccagctacttgggaggctgaggcactagaatcacttgaacctaggaggtggaggttgcagtgagtggagatcacgccaacacattctagcctgagggacagagtgagactctatcatctc

SEQ ID NO: 1627 - DNA, 701 bp, Homo sapiens
  source 1..701: mol_type = unassigned DNA; mol_type = unassigned DNA
gtcaggaccgcgacggcagcagagcatgtctagacaacttctgagccaaagaggaacacttaccagagatgatgccgatggcgacgtacatatgagaaacctcttgtgagaaggaggcggccaccatcccggtgctgacaagtagcccccccaacatcactaccagacggtgtccgaaacgattgctcaggactgtggcgaggggagctgccgggaaagaacaaaacgatattttaactcacagaggcttcagggttagctgccataagactccttcctccacgtcttgcacatggagagatgatgtcgaatataaatatggccgagcgcagtggctcatgcctgtaatcccagcactttgggaggttgaggacggaggatcgcttgagcccaggagttcaagactagcccgggcaacatggtgaaaccccgtctctacaaaaaatacaaaaattagccaggcatggtggtgtgcacctgtagtcccagctacttggcaggcagagatgggaggattgtttgagcctgggaggcagacgatgcagtgagccaagattgcaccactgcactccatactgggtgacagagtgagaccctgtctcaagaaaaaacaaaaccaaaccataacacatttcatgcaaagtcagtgcaggaattattttactatttgttcaaattcaacacgatttgtcagactcctg

SEQ ID NO: 1628 - DNA, 715 bp, Homo sapiens
  source 1..715: mol_type = unassigned DNA; mol_type = unassigned DNA
gcgcgccgtcccacgtggacctgagccgcgccggtcgcgcgcccgccagcctgccgcctgggctgggggtcacgaaaggaaaccttacagaaacatgaagccctcaaccatctgctactcagttattcggggctgacggcggcttctagaacatccaggtgttctgcagatgcgagaactcatcctgtagtcaccagatggagtcccaaacagccaagcagatgtaaggcctgtgctgtggctctgaggccctgaatacagaagggtcactttcttagtggccaaagagcagttgttgacattgatgtctaattattgaacacgaccagtcattttactgagctgcggtgaggaaacactgaccatagaagatcaagccaaatgagggattgcaaatttcctgattcttttgaattaggattccagatgggggcctcatttctacagcccccaacattcctatagccgttatcactgccatcaccactgccaccagcatcttcttgcagattccacccctgctccccagagacttcctgctttgaaagtgagcagaaaggaagctctcagaaaaatctctagtggtggctgccgtcgctccagacaatcggaatcctgccttcaccaccatgggctggctttttctaaaggttttgttggcgggagtgagtttctcaggatttctttatcctcttgtggatttttgcatcagtgg

SEQ ID NO: 1629 - DNA, 1733 bp, Homo sapiens
  source 1..1733: mol_type = unassigned DNA; mol_type = unassigned DNA
gcgccggtcgcgcgcccgccagcctgccgcctgggctgggggtcacgaaaggtttgtggatttccatgcagctgcctccacctgctcaccctcccgggcttccttgctcaccggccggcttggccttcgcaatggagtcacacgcaactttgcagtcacttctgtgggaggccttccgctcaacgagaccaccttggcagaggtgctgcagcaggcgggttacgtcactgggataataggcaaatggcatcttggacaccacggctcttatcaccccaacttccgtggttttgattactactttggaatcccatatagccatgatatgggctgtactgatactccaggctacaaccaccctccttgtccagcgtgtccacagggtgatggaccatcaaggaaccttcaaagagactgttacactgacgtggccctccctctttatgaaaacctcaacattgtggagcagccggtgaacttgagcagccttgcccagaagtatgctgagaaagcaacccagttcatccagcgtgcaagcaccagcgggaggcccttcctgctctatgtggctctggcccacatgcacgtgcccttacctgtgactcagctaccagcagcgccacggggcagaagcctgtatggtgcagggctctgggagatggacagtctggtgggccagatcaaggacaaagttgaccacacagtgaaggaaaacacattcctctggtttacaggagacaatggcccgtgggctcagaagtgtgagctagcgggcagtgtgggtcccttcactggattttggcaaactcgtcaagggggaagtccagccaagcagacgacctgggaaggagggcaccgggtcccagcactggcttactggcctggcagagttccagttaatgtcaccagcactgccttgttaagcgtgctggacatttttccaactgtggtagccctggcccaggccagcttacctcaaggacggcgctttgatggtgtggacgtctccgaggtgctctttggccggtcacagcctgggcacagggtgctgttccaccccaacagcggggcagctggagagtttggagccctgcagactgtccgcctggagcgttacaaggccttctacattaccggtggagccagggcgtgtgatgggagcacggggcctgagctgcagcataagtttcctctgattttcaacctggaagacgataccgcagaagctgtgcccctagaaagaggtggtgcggagtaccaggctgtgctgcccgaggtcagaaaggttcttgcagacgtcctccaagacattgccaacgacaacatctccagcgcagattacactcaggacccttcagtaactccctgctgtaatccctaccaaattgcctgccgctgtcaagccgcataacagaccaatttttattccacgaggaggagtacctggaaattaggcaagtttgcttccaaatttcatttttaccctctttacaaacacacgctttagtttagtcttggagtttagttttggagttagccttgcatatcccttctgtatcctgtccctcctccacgccgacccgagagcagctgagctgcgctggctctgggcagggagtgtgccttaatgggaagcacacgggctttggagtcaggcacaggtgccagctccagcttttgaacttgggcaattgtttaacctaacctgcaagttgattttgagggttaaataa

SEQ ID NO: 1630 - DNA, 1398 bp, Homo sapiens
  source 1..1398: mol_type = unassigned DNA; mol_type = unassigned DNA
accctgggcctcctggtgcctttgcagggccccagcgcgggagggcaaagtgaaggagcccatgtggggttgctgtgtctgtggagccctctttgaggggcagaggctcaggcttctccgggctcctggtgatgggctgtcttcccctttcactgtggtttcccgcaaatggcatcttggacaccacggctcttatcaccccaacttccgtggttttgattactactttggaatcccatatagccatgatatgggctgtactgatactccaggctacaaccaccctccttgtccagcgtgtccacagggtgatggaccatcaaggaaccttcaaagagactgttacactgacgtggccctccctctttatgaaaacctcaacattgtggagcagccggtgaacttgagcagccttgcccagaagtatgctgagaaagcaacccagttcatccagcgtgcaagcaccagcgggaggcccttcctgctctatgtggctctggcccacatgcacgtgcccttacctgtgactcagctaccagcagcgccacggggcagaagcctgtatggtgcagggctctgggagatggacagtctggtgggccagatcaaggacaaagttgaccacacagtgaaggaaaacacattcctctggtttacaggagacaatggcccgtgggctcagaagtgtgagctagcgggcagtgtgggtcccttcactggattttggcaaactcgtcaagggggaagtccagccaagcagacgacctgggaaggagggcaccgggtcccagcactggcttactggcctggcagagttccagttaatgtcaccagcactgccttgttaagcgtgctggacatttttccaactgtggtagccctggcccaggccagcttacctcaaggacggcgctttgatggtgtggacgtctccgaggtgctctttggccggtcacagcctgggcacagggtgctgttccaccccaacagcggggcagctggagagtttggagccctgcagactgtccgcctggagcgttacaaggccttctacattaccggtggagccagggcgtgtgatgggagcacggggcctgagctgcagcataagtttcctctgattttcaacctggaagacgataccgcagaagctgtgcccctagaaagaggtggtgcggagtaccaggctgtgctgcccgaggtcagaaaggttcttgcagacgtcctccaagacattgccaacgacaacatctccagcgcagattacactcaggacccttcagtaactccctgctgtaatccctaccaaattgcctgccgctgtcaagccgcataacagaccaatttttattccacgaggaggagtacctggaaattaggcaagtttgcttccaaatt

SEQ ID NO: 1631 - DNA, 577 bp, Homo sapiens
  source 1..577: mol_type = unassigned DNA; mol_type = unassigned DNA
cacggctcttatcaccccaacttccgtggttttgattactactttggaatcccatatagccatgatatgggctgtactgatactccaggctacaaccaccctccttgtccagcgtgtccacagggtgatggaccatcaaggaaccttcaaagagactgttacactgacgtggccctccctctttatgaaaacctcaacattgtggagcagccggtgaacttgagcagccttgcccagaagtatgctgagaaagcaacccagttcatccagcgtgcaaggagattccactcctcaagggcaatggactccaagaaacttggtgttttctacagccttagcctaagtggtcaagaaagcacgtgctgcacggctgtccacttgggcagaattaaaaagggactctacctgtggctaagtgatcacagcagccccttgaatatgcaggaatcccccacccctcgctcagccacattggacgtttttagaagctcagcagggagggttgaggcagcaatgcaggagatccaggcatcctgttttcttggtaataaaacctatttaaggattgaatctcaaa

SEQ ID NO: 1632 - DNA, 979 bp, Homo sapiens
  source 1..979: mol_type = unassigned DNA; mol_type = unassigned DNA
atgtaagtgcctttccagccctatatacggttgtgattcataccaaggcagtctcatgcttttagcccagacccaccaacctaccaaggacactggccttttgttttctttcacatccttccctcgagaaccctgatttaggtgtttccattctgtacggtaattcttttatttgtgacctgatgaggaaagatttcctcagtccaaatatagtcggattgagtcatagctgtgggcgtctgtgaccagagtctgggctgtgcccgattctgcggaaatcaaggatgccttcttttgtaccatccttgctcaagggagagttggaacattgacttgatgctgaagaagcctttcttcaaagacagctgagggtcacctgcatcagaacccttggaaatacttgtaaaacaagtgctgttccaccccaacagcggggcagctggagagtttggagccctgcagactgtccgcctggagcgttacaaggccttctacattaccggtggagccagggcgtgtgatgggagcacggggcctgagctgcagcataagtttcctctgattttcaacctggaagacgataccgcagaagctgtgcccctagaaagaggtggtgcggagtaccaggctgtgctgcccgaggtcagaaaggttcttgcagacgtcctccaagacattgccaacgacaacatctccagcgcagattacactcaggacccttcagtaactccctgctgtaatccctaccaaattgcctgccgctgtcaagccgcataacagaccaatttttattccacgaggaggagtacctggaaattaggcaagtttgcttccaaatttcatttttaccctctttacaaacacacgctttagtttagtcttggagtttagttttggagttagccttgcatatcccttctgtatcctgtccctcctccacgccgacccgagagcagctgagctgcgctggctctgggca

SEQ ID NO: 1633 - DNA, 791 bp, Homo sapiens
  source 1..791: mol_type = unassigned DNA; mol_type = unassigned DNA
gagacaggatcttgctctatcacccaggctggagtgcagtggtatgatcatagctcactgcagcgttgacctcccaggctcaaacaatcctctcacctcagcttccaagtagctaggaccacaggtgtgcaccaccatgcctggttaacttttgtatttttttgtagggaggggtcttgctgtgttgcccaggctggtttcaaactcctgggctcaagtgatcctcctgcctcgacctcccaaggtattgggattacaggcatgagtcaccgagttctgccaatttttctattagtaagctctgccaccctttctcaggtgctgttccaccccaacagcggggcagctggagagtttggagccctgcagactgtccgcctggagcgttacaaggccttctacattaccggtggagccagggcgtgtgatgggagcacggggcctgagctgcagcataagtttcctctgattttcaacctggaagacgataccgcagaagctgtgcccctagaaagaggtggtgcggagtaccaggctgtgctgcccgaggtcagaaaggttcttgcagacgtcctccaagacattgccaacgacaacatctccagcgcagattacactcaggacccttcagtaactccctgctgtaatccctaccaaattgcctgccgctgtcaagccgcataacagaccaatttttattccacgaggaggagtacctggaaattaggcaagtttgcttccaaatttcatttttaccctctttacaaacacacgctttagtttagtcttgg

SEQ ID NO: 1634 - DNA, 2599 bp, Homo sapiens
  source 1..2599: mol_type = unassigned DNA; mol_type = unassigned DNA
gccgtcccacgtggacctgagccgcgccggtcgcgcgcccgccagcctgccgcctgggctgggggtcacgaaaggaaaccttacagaaacatgaagccctcaaccatctgctactcagttattcggggctgacggcggcttctagaacatccaggtgttctgcagatgcgagaactcatcctgtagtcaccagatggagtcccaaacagccaagcagatgtaaggcctgtgctgtggctctgaggccctgaatacagaagggtcactttcttagtggccaaagagcagttgttgacattgatgtctaattattgaacacgaccagtcattttactgagctgcggtgaggaaacactgaccatagaagatcaagccaaatgagggattgcaaatttcctgattcttttgaattaggattccagatgggggcctcatttctacagcccccaacattcctatagccgttatcactgccatcaccactgccaccagcatcttcttgcagattccacccctgctccccagagacttcctgctttgaaagtgagcagaaaggaagctctcagaaaaatctctagtggtggctgccgtcgctccagacaatcggaatcctgccttcaccaccatgggctggctttttctaaaggttttgttggcgggagtgagtttctcaggatttctttatcctcttgtggatttttgcatcagtgggaaaacaagaggacagaagccaaactttgtgattattttggccgatgacatggggtggggtgacctgggagcaaactgggcagaaacaaaggacactgccaaccttgataagatggcttcggagggaatgaggtttgtggatttccatgcagctgcctccacctgctcaccctcccgggcttccttgctcaccggccggcttggccttcgcaatggagtcacacgcaactttgcagtcacttctgtgggaggccttccgctcaacgagaccaccttggcagaggtgctgcagcaggcgggttacgtcactgggataataggcaaatggcatcttggacaccacggctcttatcaccccaacttccgtggttttgattactactttggaatcccatatagccatgatatgggctgtactgatactccaggctacaaccaccctccttgtccagcgtgtccacagggtgatggaccatcaaggaaccttcaaagagactgttacactgacgtggccctccctctttatgaaaacctcaacattgtggagcagccggtgaacttgagcagccttgcccagaagtatgctgagaaagcaacccagttcatccagcgtgcaagcaccagcgggaggcccttcctgctctatgtggctctggcccacatgcacgtgcccttacctgtgactcagctaccagcagcgccacggggcagaagcctgtatggtgcagggctctgggagatggacagtctggtgggccagatcaaggacaaagttgaccacacagtgaaggaaaacacattcctctggtttacaggagacaatggcccgtgggctcagaagtgtgagctagcgggcagtgtgggtcccttcactggattttggcaaactcgtcaagggggaagtccagccaagcagacgacctgggaaggagggcaccgggtcccagcactggcttactggcctggcagagttccagttaatgtcaccagcactgccttgttaagcgtgctggacatttttccaactgtggtagccctggcccaggccagcttacctcaaggacggcgctttgatggtgtggacgtctccgaggtgctctttggccggtcacagcctgggcacagggtgctgttccaccccaacagcggggcagctggagagtttggagccctgcagactgtccgcctggagcgttacaaggccttctacattaccggtggagccagggcgtgtgatgggagcacggggcctgagctgcagcataagtttcctctgattttcaacctggaagacgataccgcagaagctgtgcccctagaaagaggtggtgcggagtaccaggctgtgctgcccgaggtcagaaaggttcttgcagacgtcctccaagacattgccaacgacaacatctccagcgcagattacactcaggacccttcagtaactccctgctgtaatccctaccaaattgcctgccgctgtcaagccgcataacagaccaatttttattccacgaggaggagtacctggaaattaggcaagtttgcttccaaatttcatttttaccctctttacaaacacacgctttagtttagtcttggagtttagttttggagttagccttgcatatcccttctgtatcctgtccctcctccacgccgacccgagagcagctgagctgcgctggctctgggcagggagtgtgccttaatgggaagcacacgggctttggagtcaggcacaggtgccagctccagcttttgaacttgggcaattgtttaacctaacctgcaagttgattttgagggttaaataaaggcatacatgaaaatgcctggcaaattacctgacacagagcagacattcaatacattttagtttccttgtttc

SEQ ID NO: 1635 - DNA, 2876 bp, Homo sapiens
  source 1..2876: mol_type = unassigned DNA; mol_type = unassigned DNA
ttgtcctgagcgcggagagggcgagctcgggccgcgggcagggcgggagccggcagccggcaaccaagggaggcagaaaggcacaaagatcgcaataatatccgttataacccgctatctaaccccacccccaacacacacccatccatcccaccctccgggagaggcagccggcgatccgctctctgcgccctgggaaaaagccccagccatgagcaatcagtaccaggaggagggctgctccgagaggcccgagtgcaaaagtaaatctccaactttgctctcctcctactgcatcgacagcatcctgggccggaggagcccgtgcaaaatgcggttgctgggagccgcgcagagcttgcctgctccgctgaccagccgcgccgacccggaaaaggccgtgcaaggctcccctaagagcagcagcgccccgttcgaggccgagctgcacctgccgcccaagctgcggcgcctgtacggcccgggcgggggccgcctccttcagggtgcggcagcggcggcggcggcggcggcggcggcggcggcagcggccgccacggccacggcgggtccacgcggggaggcccctccgccgccaccgccaaccgcgcggcccggggaacggccggacggcgcaggggccgccgcggcagccgcggccgcggccgccgcggcctgggacacgctcaagatcagccaggcgccgcaggtgagcatcagccgcagcaagtcgtaccgcgagaacggggcgcccttcgtgccgccgccgcccgcgctggacgagctgggcggcccggggggcgtcacgcacccggaggagcgcctcggcgtggccggcggcccgggcagcgccccggctgcgggtggtggcaccggcaccgaggacgacgaggaggagctgctggaggacgaagaagatgaggacgaggaagaggaactgctggaggacgacgaggaggagctgctggaggacgacgcccgcgcgctgctcaaggagccccggcgctgtcctgtggccgccactggcgccgtggccgcagcagctgccgctgcagtggccacagagggcggggagctgtcacccaaggaggagctgctgctgcacccggaagacgctgagggcaaggacggcgaggacagcgtgtgcctctctgcgggcagcgactcggaggaggggctgctgaaacgcaaacagaggcgctaccgcaccacgttcaccagctaccagctggaggaactggagcgggccttccagaagacgcactacccggacgtcttcaccagggaggaactggccatgaggctggacttgaccgaggcccgagtccaggtctggttccagaaccgtcgggccaagtggcgcaagcgggagaaggcaggcgcgcagacccacccccctgggctgcccttcccggggccgctctccgccacccacccgctcagcccctacctggacgccagccccttccctccgcaccacccggcgctcgactccgcttggactgccgctgccgccgccgccgccgccgccttcccgagcctacctccgcctccgggctcggccagcctgccgcccagcggggcgccgctgggcctgagcactttcctcggagcggcagtgttccgacacccagctttcatcagcccggcattcggcaggctcttttccacaatggcccccctgaccagcgcgtcgaccgcggccgcgctcctgagacagcccacacccgccgtggagggcgcagtggcatcgggcgccctggccgacccggccacggcggccgcagacagacgcgcctctagcatagccgcgctgaggctcaaggccaaggagcacgcggcgcagctcacgcagctcaacatcctgccgggcaccagcacgggcaaggaggtgtgctaaaggctgccctccacacccgcgccccgcgcgcgccccgaaaggtcacctcactcagcaccactcaagaccaaatggaaacagaggaccagcacactcccgagacggcactgagagagcgcagccgccttcacagcagtctggatgcgggcatggcagccctcggcgctccgggacgtggcacctcctcggctggctgtccacccgcccctgcccctgcccctgctactgccaacctcgctccaactccaacatccactctctcttgttcttactttcctgaaaatatcggggaggttttctcccccagacgcctgatattgaagtaaaaaatttaaaaagcccaacctcttcctcctgacaccccacttagcctttcttttctttctttctttctttcttttttttttttaaatagcattttggcgctcgaagttgatctccccagcgagggccccagcgtgaagccagggcccgggaagcaaatgcgagcctgtaagatagctaacagtgcacttaaaggaaaggggcgtcttgttcttgttctcttctttatcatacaccaaccaaggtttttatatcaaaccaaagggaaataatactctgctagaatatggactgttgaagtcaccaaactgtgattattgattctgtacataccattgttattaaaaaaaaaaaaaaaagaacagagctttgtatatttgaaatgttataacgcaattgcactcagcgtggtatggtaaaagtttgtcctcccgtagattcttactgtgttgtagatacggtagggttcctagacaaatatttatgtactcaagccctttatttaacttattaactgtagaggcttccgaaaccttcaagataaaggcaatggtacagtacttttgtgtaatgtgtaattgttaccacttttccttgctatctagtggagaagtgtcacgctcaaaataaaaaaattatatgtttaacaaaa

SEQ ID NO: 1636 - DNA, 87 bp, Homo sapiens
  source 1..87: mol_type = unassigned DNA; mol_type = unassigned DNA
ggcttgggagaaggaggcggcgctcggtgagcccaggctcttttccacaatggcccccctgaccagcgcgtcgaccgcggccgcgct

SEQ ID NO: 1637 - DNA, 144 bp, Homo sapiens
  source 1..144: mol_type = unassigned DNA; mol_type = unassigned DNA
gcactttcctcggagcggcagtgttccgacacccagctttcatcagcccggcattcggcagactccatcttccttgtcactcaagtgacccgctgccaacgacacccccatatgtgcaagccccgatctacacggcagtacaag

SEQ ID NO: 1638 - DNA, 100 bp, Homo sapiens
  source 1..100: mol_type = unassigned DNA; mol_type = unassigned DNA
agctgcaggaagaggatagcggacttagaaaattgcatcctgggccggaggagcccgtgcaaaatgcggttgctgggagccgcgcagagcttgcctgctc

SEQ ID NO: 1639 - DNA, 100 bp, Homo sapiens
  source 1..100: mol_type = unassigned DNA; mol_type = unassigned DNA
gcaattgagcgccagggaggtcaaggcggtgtcctgggagcccaatatcggctttgaaaagtgccgacatcctgggccggaggagcccgtgcaaaatgcg

SEQ ID NO: 1640 - DNA, 2552 bp, Homo sapiens
  source 1..2552: mol_type = unassigned DNA; mol_type = unassigned DNA
cgtctattttcctacgactccagctggccttgaacatgggaaacacgagcttcaatgaggtcatggaggcccagctaccctcacacggcggccctaaaccctcagctgagagtgacatgggcacccgcagggactacattatggccaagtatgtggagcataggtttgcacgccggtgcacacctgagcctcagcgactctggacagccatttgcaacagggacctcctgtcggtactggaggcctttgccaatgggcaggactttggacagccgctgccagggcctgatgcacaggcacctgaagaactcgtcttgcatttggctgtcaaagtcgccaaccaggcttccctgcctctggtggatttcatcatccagaacggtggtcacctggatgccaaggctgctgacgggaacacggctctgcactacgcagcactctacaaccagcccgactgcctcaagctgctgctgaaggggagagctttggttggcacagtaaatgaagcaggcgagacagctctggacatagccaggaagaagcaccacaaggagtgtgaggagctgctggagcaggcccaggcggggacctttgccttccctctacatgtggactactcctgggtaatttccacagagcctggctctgacagtgaggaggatgaggaagagaagcgctgcttgctgaagctcccggcccaggctcactgggccagtgggaggctggacatcagcaacaagacctatgagactgtcgccagcctgggagcagccacccctcagggcgagagtgaggactgtcccccgcccttgccagtcaaaaactcttctcggactttggtccaagggtgtgcaagacatgccagtggagatcgttctgaagtctccagcctgagttcagaggcccctgagacccctgagagcctgggcagtccagcctcctcctccagtctgatgagccccttggaacctggggatcccagccaagccccacccaactctgaagagggcctccgagagcccccaggcacctccagacccagcctgacatccgggaccaccccttcggagatgtacctccccgtcagattcagctccgagagcactcgctcctatcggcggggggcgcggagccctgaagatggtccctcagccaggcagcctctgcccagaaggaacgtgccggttggcatcactgaaggagatggctcaaggactgggagtctcccagcaagttctgtgcaacttttgcaagactagctccttgctggcccccacatgccccatgctaggccccaatgttcagagctgggacttgagctcacaaaactggggagctgagacatttgttctcttggatctcactctctctgtcccttgtgcctctgtagctggccttcttcctgccacaggccatgcctctaccaaggacacatggcctttccctgttaggactgatggcggttctttcctatctcattacccgctaggggcctgggagccctgtggctggatctgagtgctcctgagctggcttcagctgcagaactctcagtccctcatcagatcgagactctatttcccccgtcagtctgggggcttcacaagggcaggagagccctccatcactgacttccagatcagggaccctgccaagtagggactgtcttctcagccagccatttattagtctaatattccttcactaaattccaactctatgtctggacctgtgttaggcacttcagataccacacgagtaagacaagggccctgcaggggtggtcctttggtggaaagctggtcttaagggttgggcttgggaataggcagggtcagattccagggcatggctctggactcagctggtttatacctatatgaccattacaattgtctacagatcacatccattctggctggtcaacatgcatgctgtactggctgttaaataaaaatattctgaatgtcactccttttgagggacagcacagccttccctaggcattctcctatattccccagccaaattgtagagtcagatgcacccacatttgcctgtgtccttgatttagcaggaaggaaaggaatagtcagggttgatggatgcccacttctcttctctttctcttggtcaactcaggagccttttagtctgagggaatggagaggcaaagaaagaagggagagtaatagaattgggagggcagagacttaagggttctgcttcccagccctagaaattctatcattgctcagccccaatgagaaagcagatacacctaagccatcatcaaccactaacatctcaacttgccagttgctgggtgctgggccctggcaggaatgggccaagccaagcaggggagactagagagcaccaatggccaacacagctgcctggctggggaggctgtgctgtttcccctggagacctgactggtctgtggttcccacaggaacagggttgtcttttgagcccccagtgtctggtttcattcatctcagacttgttatttcactcatctctaataaaggattggggggtcagtt

SEQ ID NO: 1641 - DNA, 4050 bp, Homo sapiens
  source 1..4050: mol_type = unassigned DNA; mol_type = unassigned DNA
gtgccccccgcgccccgctccggcagctccacgctcgcgcccgccatgccggagcagttcagcgtcgccgagttcctggccgtcaccgcggaggacctcagctccccggctggggccgccgccttcgccgccaagatgccccggtaccgaggggcggcgctggcgcgggaggagatcttggaaggagaccaagccatcctgcagagaataaagaaggctgtgcgggcaatccatagctccggccttggccatgtggagaatgaagagcagtaccgagaggccgtggaatccttaggcaacagccacctgtcccagaacagccatgagctgtccacaggcttcctaaacttggccgtgttcacccgcgaggttgctgcgctcttcaagaacctgattcagaacttgaacaacattgtctctttccccctggacagtctgatgaaggggcagctgagggacggtcgacaggattccaaaaaacagctggagaaggcatggaaggactatgaagccaaaatggccaagctggagaaggagcgcgatcgggccagggtgacaggagggatccctggggaggtggcccaggacatgcagagagagcggcgcatcttccagctgcacatgtgtgagtatctgctcaaagccggggagagccagatgaagcaaggtcctgacttccttcagagcctcatcaagttcttccacgcccagcacaactttttccaagatggctggaaggctgcccagagcctgttccccttcatcgagaagctggcggcctcagtacatgcactccatcaggcccaggaggacgagctacagaagctgacccagctccgggactccctccgagggacactgcagcttgagagcagagaggaacacctgagccggaagaactcaggatgtggctatagcatccaccagcaccaaggcaacaagcagtttgggacggagaaagtgggctttctatacaagaaaagtgacggaattcgaagagtctggcagaaaaggaagtgtggagtcaagtatggctgcctgaccatctcacacagcacgataaaccggcccccggtgaagctgaccctgctgacgtgccaagtgaggccaaaccctgaggagaaaaagtgcttcgacctggtgacccacaaccggacgtaccactttcaggcagaggacgagcacgagtgtgaggcgtgggtgtcagtgttgcagaacagcaaggacgaagccctgagcagcgccttcctcggggagcccagcgctggcccggggtcctgggggtccgccggccatgatggggagccgcacgacctcacaaagctgctcatcgcggaggtgaagagcaggcctgggaatagccagtgctgcgactgcggggctgcagaccccacgtggctcagcaccaacctgggcgtgctcacctgcatccagtgctcgggcgtccaccgcgaactgggcgtgcgcttttcgcgcatgcagtcactcaccttggacctgctgggcccctccgagttgttgctggccttgaacatgggaaacacgagcttcaatgaggtcatggaggcccagctaccctcacacggcggccctaaaccctcagctgagagtgacatgggcacccgcagggactacattatggccaagtatgtggagcataggtttgcacgccggtgcacacctgagcctcagcgactctggacagccatttgcaacagggacctcctgtcggtactggaggcctttgccaatgggcaggactttggacagccgctgccagggcctgatgcacaggcacctgaagaactcgtcttgcatttggctgtcaaagtcgccaaccaggcttccctgcctctggtggatttcatcatccagaacggtggtcacctggatgccaaggctgctgacgggaacacggctctgcactacgcagcactctacaaccagcccgactgcctcaagctgctgctgaaggggagagctttggttggcacagtaaatgaagcaggcgagacagctctggacatagccaggaagaagcaccacaaggagtgtgaggagctgctggagcaggcccaggcggggacctttgccttccctctacatgtggactactcctgggtaatttccacagagcctggctctgacagtgaggaggatgaggaagagaagcgctgcttgctgaagctcccggcccaggctcactgggccagtgggaggctggacatcagcaacaagacctatgagactgtcgccagcctgggagcagccacccctcagggcgagagtgaggactgtcccccgcccttgccagtcaaaaactcttctcggactttggtccaagggtgtgcaagacatgccagtggagatcgttctgaagtctccagcctgagttcagaggcccctgagacccctgagagcctgggcagtccagcctcctcctccagtctgatgagccccttggaacctggggatcccagccaagccccacccaactctgaagagggcctccgagagcccccaggcacctccagacccagcctgacatccgggaccaccccttcggagatgtacctccccgtcagattcagctccgagagcactcgctcctatcggcggggggcgcggagccctgaagatggtccctcagccaggcagcctctgcccagaaggaacgtgccggttggcatcactgaaggagatggctcaaggactgggagtctcccagcaagttctgtgcaacttttgcaagactagctccttgctggcccccacatgccccatgctaggccccaatgttcagagctgggacttgagctcacaaaactggggagctgagacatttgttctcttggatctcactctctctgtcccttgtgcctctgtagctggccttcttcctgccacaggccatgcctctaccaaggacacatggcctttccctgttaggactgatggcggttctttcctatctcattacccgctaggggcctgggagccctgtggctggatctgagtgctcctgagctggcttcagctgcagaactctcagtccctcatcagatcgagactctatttcccccgtcagtctgggggcttcacaagggcaggagagccctccatcactgacttccagatcagggaccctgccaagtagggactgtcttctcagccagccatttattagtctaatattccttcactaaattccaactctatgtctggacctgtgttaggcacttcagataccacacgagtaagacaagggccctgcaggggtggtcctttggtggaaagctggtcttaagggttgggcttgggaataggcagggtcagattccagggcatggctctggactcagctggtttatacctatatgaccattacaattgtctacagatcacatccattctggctggtcaacatgcatgctgtactggctgttaaataaaaatattctgaatgtcactccttttgagggacagcacagccttccctaggcattctcctatattccccagccaaattgtagagtcagatgcacccacatttgcctgtgtccttgatttagcaggaaggaaaggaatagtcagggttgatggatgcccacttctcttctctttctcttggtcaactcaggagccttttagtctgagggaatggagaggcaaagaaagaagggagagtaatagaattgggagggcagagacttaagggttctgcttcccagccctagaaattctatcattgctcagccccaatgagaaagcagatacacctaagccatcatcaaccactaacatctcaacttgccagttgctgggtgctgggccctggcaggaatgggccaagccaagcaggggagactagagagcaccaatggccaacacagctgcctggctggggaggctgtgctgtttcccctggagacctgactggtctgtggttcccacaggaacagggttgtcttttgagcccccagtgtctggtttcattcatctcagacttgttatttcactcatctctaataaaggattggggggtcagtt

SEQ ID NO: 1642 - DNA, 936 bp, Homo sapiens
  source 1..936: mol_type = unassigned DNA; mol_type = unassigned DNA
ctggagcaggcccaggcggggacctttgccttccctctacatgtggactactcctgggtaatttccacagagcctggctctgacagtgaggaggatgaggaagagaagcgctgcttgctgaagctcccggcccaggctcactgggccagtgggaggctggacatcagcaacaagacctatgagactgtcgccagcctgggagcagccacccctcagggcgagaatcgttctgaagtctccagcctgagttcagaggcccctgagacccctgagagcctgggcagtccagcctcctcctccagtctgatgagccccttggaacctggggatcccagccaagccccacccaactctgaagagggcctccgagagcccccaggcacctccagacccagcctgacatccgggaccaccccttcggagatgtacctccccgtcagattcagctccgagagcactcgctcctatcggcggggggcgcggagccctgaagatggtccctcagccaggcagcctctgcccagaaggaacgtgccggttggcatcactgaaggagatggctcaaggactgggagtctcccagcaagttctgtgcaacttttgcaagactagctccttgctggcccccacatgccccatgctaggccccaatgttcagagctgggacttgagctcacaaaactggggagctgagacatttgttctcttggatctcactctctctgtcccttgtgcctctgtagctggccttcttcctgccacaggccatgcctctaccaaggacacatggcctttccctgttaggactgatggcggttctttcctatctcattacccgctaggggcctgggagccctgtggctggatctgagtgctcctgagctggcttcagctgcagaactctcagtccctcatcagatcgagactctatttccc

SEQ ID NO: 1643 - DNA, 3024 bp, Homo sapiens
  source 1..3024: mol_type = unassigned DNA; mol_type = unassigned DNA
agctcagtgccccccgcgccccgctccggcagctccacgctcgcgcccgccatgccggagcagttcagcgtcgccgagttcctggccgtcaccgcggaggacctcagctccccggctggggccgccgccttcgccgccaagatgccccgatcttggaaggagaccaagccatcctgcagagaataaagaaggctgtgcgggcaatccatagctccggccttggccatgtggagaatgaagagcagtaccgagaggccgtggaatccttaggcaacagccacctgtcccagaacagccatgagctgtccacaggcttcctaaacttggccgtgttcacccgcgaggttgctgcgctcttcaagaacctgattcagaacttgaacaacattgtctctttccccctggacagtctgatgaaggggcagctgagggacggtcgacaggattccaaaaaacagctggagaaggcatggaaggactatgaagccaaaatggccaagctggagaaggagcgcgatcgggccagggtgacaggagggatccctggggaggtggcccaggacatgcagagagagcggcgcatcttccagctgcacatgtgtgagtatctgctcaaagccggggagagccagatgaagcaaggtcctgacttccttcagagcctcatcaagttcttccacgcccagcacaactttttccaagatggctggaaggctgcccagagcctgttccccttcatcgagaagctggcggcctcagtacatgcactccatcaggcccaggaggacgagctacagaagctgacccagctccgggactccctccgagggacactgcagcttgagagcagagaggaacacctgagccggaagaactcaggatgtggctatagcatccaccagcaccaaggcaacaagcagtttgggacggagaaagtgggctttctatacaagaaaagtgacggaattcgaagagtctggcagaaaaggaagtgtggagtcaagtatggctgcctgaccatctcacacagcacgataaaccggcccccggtgaagctgaccctgctgacgtgccaagtgaggccaaaccctgaggagaaaaagtgcttcgacctggtgacccacaaccggacgtaccactttcaggcagaggacgagcacgagtgtgaggcgtgggtgtcagtgttgcagaacagcaaggacgaagccctgagcagcgccttcctcggggagcccagcgctggcccggggtcctgggggtccgccggccatgatggggagccgcacgacctcacaaagctgctcatcgcggaggtgaagagcaggcctgggaatagccagtgctgcgactgcggggctgcagaccccacgtggctcagcaccaacctgggcgtgctcacctgcatccagtgctcgggcgtccaccgcgaactgggcgtgcgcttttcgcgcatgcagtcactcaccttggacctgctgggcccctccgagttgttgctggccttgaacatgggaaacacgagcttcaatgaggtcatggaggcccagctaccctcacacggcggccctaaaccctcagctgagagtgacatgggcacccgcagggactacattatggccaagtatgtggagcataggtttgcacgccggtgcacacctgagcctcagcgactctggacagccatttgcaacagggacctcctgtcggtactggaggcctttgccaatgggcaggactttggacagccgctgccagggcctgatgcacaggcacctgaagaactcgtcttgcatttggctgtcaaagtcgccaaccaggcttccctgcctctggtggatttcatcatccagaacggtggtcacctggatgccaaggctgctgacgggaacacggctctgcactacgcagcactctacaaccagcccgactgcctcaagctgctgctgaaggggagagctttggttggcacagtaaatgaagcaggcgagacagctctggacatagccaggaagaagcaccacaaggagtgtgaggagctgctggagcaggcccaggcggggacctttgccttccctctacatgtggactactcctgggtaatttccacagagcctggctctgacagtgaggaggatgaggaagagaaggtgggtcccagccctgtccctcaggcctctggatggcagaaggaaagagccagattgggcctgcgctgcttgctgaagctcccggcccaggctcactgggccagtgggaggctggacatcagcaacaagacctatgagactgtcgccagcctgggagcagccacccctcagggcgagagtgaggactgtcccccgcccttgccagtcaaaaactcttctcggactttggtccaagggtgtgcaagacatgccagtggagatcgttctgaagtctccagcctgagttcagaggcccctgagacccctgagagcctgggcagtccagcctcctcctccagtctgatgagccccttggaacctggggatcccagccaagccccacccaactctgaagagggcctccgagagcccccaggcacctccagacccagcctgacatccgggaccaccccttcggagatgtacctccccgtcagattcagctccgagagcactcgctcctatcggcggggggcgcggagccctgaagatggtccctcagccaggcagcctctgcccagaaggaacgtgccggttggcatcactgaaggagatggctcaaggactgggagtctcccagcaagttctgtgcaacttttgcaagactagctccttgctggcccccacatgccccatgctaggccccaatgttcagagctgggacttgagctcacaaaactggggagctgagacatttgttctcttggatctcactctctctgtcccttgtgcctctgtagctggccttcttcctgccacaggccatgcctctaccaaggacacatggcctttccctgttaggactgatggcggttctttcctatctcattacccgcta

SEQ ID NO: 1644 - DNA, 2865 bp, Homo sapiens
  source 1..2865: mol_type = unassigned DNA; mol_type = unassigned DNA
agtgccccccgcgccccgctccggcagctccacgctcgcgcccgccatgccggagcagttcagcgtcgccgagttcctggccgtcaccgcggaggacctcagctccccggctggggccgccgccttcgccgccaagatgccccggtaccgaggggcggcgctggcgcgggaggagatcttggaaggagaccaagccatcctgcagagaataaagaaggctgtgcgggcaatccatagctccggccttggccatgtggagaatgaagagcagtaccgagaggccgtggaatccttaggcaacagccacctgtcccagaacagccatgagctgtccacaggcttcctaaacttggccgtgttcacccgcgaggttgctgcgctcttcaagaacctgattcagaacttgaacaacattgtctctttccccctggacagtctgatgaaggggcagctgagggacggtcgacaggcttctctttccttggggtctagggccaagctggagaaggagcgcgatcgggccagggtgacaggagggatccctggggaggtggcccaggacatgcagagagagcggcgcatcttccagctgcacatgtgtgagtatctgctcaaagccggggagagccagatgaagcaaggtcctgacttccttcagagcctcatcaagttcttccacgcccagcacaactttttccaagatggctggaaggctgcccagagcctgttccccttcatcgagaagctggcggcctcagtacatgcactccatcaggcccaggaggacgagctacagaagctgacccagctccgggactccctccgagggacactgcagcttgagagcagagaggaacacctgagccggaagaactcaggatgtggctatagcatccaccagcaccaaggcaacaagcagtttgggacggagaaagtgggctttctatacaagaaaagtgacggaattcgaagagtctggcagaaaaggaagtgtggagtcaagtatggctgcctgaccatctcacacagcacgataaaccggcccccggtgaagctgaccctgctgacgtgccaagtgaggccaaaccctgaggagaaaaagtgcttcgacctggtgacccacaaccggacgtaccactttcaggcagaggacgagcacgagtgtgaggcgtgggtgtcagtgttgcagaacagcaaggacgaagccctgagcagcgccttcctcggggagcccagcgctggcccggggtcctgggggtccgccggccatgatggggagccgcacgacctcacaaagctgctcatcgcggaggtgaagagcaggcctgggaatagccagtgctgcgactgcggggctgcagaccccacgtggctcagcaccaacctgggcgtgctcacctgcatccagtgctcgggcgtccaccgcgaactgggcgtgcgcttttcgcgcatgcagtcactcaccttggacctgctgggcccctccgagttgttgctggccttgaacatgggaaacacgagcttcaatgaggtcatggaggcccagctaccctcacacggcggccctaaaccctcagctgagagtgacatgggcacccgcagggactacattatggccaagtatgtggagcataggtttgcacgccggtgcacacctgagcctcagcgactctggacagccatttgcaacagggacctcctgtcggtactggaggcctttgccaatgggcaggactttggacagccgctgccagggcctgatgcacaggcacctgaagaactcgtcttgcatttggctgtcaaagtcgccaaccaggcttccctgcctctggtggatttcatcatccagaacggtggtcacctggatgccaaggctgctgacgggaacacggctctgcactacgcagcactctacaaccagcccgactgcctcaagctgctgctgaaggggagagctttggttggcacagtaaatgaagcaggcgagacagctctggacatagccaggaagaagcaccacaaggagtgtgaggagctgctggagcaggcccaggcggggacctttgccttccctctacatgtggactactcctgggtaatttccacagagcctggctctgacagtgaggaggatgaggaagagaagcgctgcttgctgaagctcccggcccaggctcactgggccagtgggaggctggacatcagcaacaagacctatgagactgtcgccagcctgggagcagccacccctcagggcgagagtgaggactgtcccccgcccttgccagtcaaaaactcttctcggactttggtccaagggtgtgcaagacatgccagtggagatcgttctgaagtctccagcctgagttcagaggcccctgagacccctgagagcctgggcagtccagcctcctcctccagtctgatgagccccttggaacctggggatcccagccaagccccacccaactctgaagagggcctccgagagcccccaggcacctccagacccagcctgacatccgggaccaccccttcggagatgtacctccccgtcagattcagctccgagagcactcgctcctatcggcggggggcgcggagccctgaagatggtccctcagccaggcagcctctgcccagaaggaacgtgccggttggcatcactgaaggagatggctcaaggactgggagtctcccagcaagttctgtgcaacttttgcaagactagctccttgctggcccccacatgccccatgctaggccccaatgttcagagctgggacttgagctcacaaaactggggagctgagacatttgttctcttggatctcactctctctgtcccttgtgcctctgtagctg

SEQ ID NO: 1645 - DNA, 907 bp, Homo sapiens
  source 1..907: mol_type = unassigned DNA; mol_type = unassigned DNA
gcgcttttcgcgcatgcagtcactcaccttggacctgctgggcccctccgagttgttgctggccttgaacatgggaaacacgagcttcaatgaggtcatggaggcccagctaccctcacacggcggccctaaaccctcagctgagagtgacatgggcacccgcagggactacattatggccaagtatgtggagcataggtttgcacgccggtgcacacctgagcctcagcgactctggacagccatttgcaacagggacctcctgtcggtactggaggcctttgccaatgggcaggactttggacagccgctgccagggcctgatgcacaggtgagaacccctccaagggccacttataacccacctgtctaacatattccccagttcttctccaggaccagctgttactcccctccaccccacctctgacatctgctcagatctcacccatcagagtggcacctgaagaactcgtcttgcatttggctgtcaaagtcgccaaccaggcttccctgcctctggtggatttcatcatccagaacggtggtcacctggatgccaaggctgctgacgggaacacggctctgcactacgcagcactctacaaccagcccgactgcctcaagctgctgctgaaggggagagctttggttggcacagtaaatgaagcaggcgagacagctctggacatagccaggaagaagcaccacaaggagtgtgaggagctgctggagcaggcccaggcggggacctttgccttccctctacatgtggactactcctgggtaatttccacagagcctggctctgacagtgaggaggatgaggaagagaagcgctgcttgctgaagctcccggcccaggctcactgggccagtgggaggctggacatcagcaacaagacct

SEQ ID NO: 1646 - DNA, 805 bp, Homo sapiens
  source 1..805: mol_type = unassigned DNA; mol_type = unassigned DNA
tatctgctcaaagccggggagagccagatgaagcaaggtcctgacttccttcagagcctcatcaagttcttccacgcccagcacaactttttccaagatggctggaaggctgcccagagcctgttccccttcatcgagaagctggcggcctcagtacatgcactccatcaggcccaggaggacgagctacagaagctgacccagctccgggactccctccgagggacactgcagcttgagagcagagaggaacacctgagccggaagaactcaggatgtggctatagcatccaccagcaccaaggcaacaagcagtttgggacggagaaagtgggctttctatacaagaaaagtgacggataaaccggcccccggtgaagctgaccctgctgacgtgccaagtgaggccaaaccctgaggagaaaaagtgcttcgacctggtgacccacaaccggacgtaccactttcaggcagaggacgagcacgagtgtgaggcgtgggtgtcagtgttgcagaacagcaaggacgaagccctgagcagcgccttcctcggggagcccagcgctggcccggggtcctgggggtccgccggccatgatggggagccgcacgacctcacaaagctgctcatcgcggaggtgaagagcaggcctgggaatagccagtgctgcgactgcggggctgcagaccccacgtggctcagcaccaacctgggcgtgctcacctgcatccagtgctcgggcgtccaccgcgaactgggcgtgcgcttttcgcgcatgcagtcactcaccttggacctgctggg

SEQ ID NO: 1647 - DNA, 591 bp, Homo sapiens
  source 1..591: mol_type = unassigned DNA; mol_type = unassigned DNA
gggacctgaaggccccaatctagtcttagtctacacttcacatccttgaggtgctgctgggtgaggagaaacacaaatggaacaggatgattatgcccatttaacagagtgggaaatggaggcctaaagaatgtggagggccagaggtaatgcatacatcctccgcccctaaattcccacagataaaccggcccccggtgaagctgaccctgctgacgtgccaagtgaggccaaaccctgaggagaaaaagtgcttcgacctggtgacccacaaccggacgtaccactttcaggcagaggacgagcacgagtgtgaggcgtgggtgtcagtgttgcagaacagcaaggacgaagccctgagcagcgccttcctcggggagcccagcgctggcccggggtcctgggggtccgccggccatgatggggagccgcacgacctcacaaagctgctcatcgcggaggtgaagagcaggcctgggaatagccagtgctgcgactgcggggctgcagaccccacgtggctcagcaccaacctgggcgtgctcacctgcatccagtgctcgggcgtccaccgcgaactgggcgtgcgct

SEQ ID NO: 1648 - DNA, 888 bp, Homo sapiens
  source 1..888: mol_type = unassigned DNA; mol_type = unassigned DNA
cgcggagcagctcagtgccccccgcgccccgctccggcagctccacgctcgcgcccgccatgccggagcagttcagcgtcgccgagttcctggccgtcaccgcggaggacctcagctccccggctggggccgccgccttcgccgccaagatgccccgatcttggaaggagaccaagccatcctgcagagaataaagaaggctgtgcgggcaatccatagctccggccttggccatgtggagaatgaagagcagtaccgagaggccgtggaatccttaggcaacagccacctgtcccagaacagccatgagctgtccacaggcttcctaaacttggccgtgttcacccgcgaggttgctgcgctcttcaagaacctgattcagaacttgaacaacattgtctctttccccctggacagtctgatgaaggggcagctgagggacggtcgacaggattccaaaaaacagctggagaaggcatggaaggactatgaagccaaaatggccaagctggagaaggagcgcgatcgggccagggtgacaggagggatccctggggaggtggcccaggacatgcagagagagcggcgcatcttccagctgcacatgtgtgagtatctgctcaaagccggggagagccagatgaagcaaggtcctgacttccttcagagcctcatcaagttcttccacgcccagcacaaatggctggaaggctgcccagagcctgttccccttcatcgagaagctggcggcctcagtacatgcactccatcaggcccaggaggacgagctacagaagctgacccagctccgggactccctccgagggacactgcagcttgagagcagagaggtcagcccctgaactatcccaaaaggaatgccctccc

SEQ ID NO: 1649 - DNA, 589 bp, Homo sapiens
  source 1..589: mol_type = unassigned DNA; mol_type = unassigned DNA
gaggaggatttggaagacccagagcgggatgaaacgggacagagccctgaaggggcagggatgggggaaggcggaggagtttctactgaggccagggctccacgctcgcgcccgccatgccggagcagttcagcgtcgccgagttcctggccgtcaccgcggaggacctcagctccccggctggggccgccgccttcgccgccaagatgccccggtaccgaggggcggcgctggcgcgggaggagatcttggaaggagaccaagccatcctgcagagaataaagaaggctgtgcgggcaatccatagctccggccttggccatgtggagaatgaagagcagtaccgagaggccgtggaatccttaggcaacagccacctgtcccagaacagccatgagctgtccacaggcttcctaaacttggccgtgttcacccgcgaggttgctgcgctcttcaagaacctgattcagaacttgaacaacattgtctctttccccctggacagtctgatgaaggggcagctgagggacggtcgacaggattccaaaaaacagctggagaaggcatggaaggactatgaagccaaaat

SEQ ID NO: 1650 - DNA, 480 bp, Homo sapiens
  source 1..480: mol_type = unassigned DNA; mol_type = unassigned DNA
attattattttattttttgagacagggtctcactctgtcacccaggctagagtacagtggcacaatcatggctcaccacagcctcaacctcctgggctcaggtgattttcccacctcagcctcctgagtagctaggattactggcgccggcttaatttttgtattttttgtagggttggggtttcactatgttgcccggctggtcttgaactcctgggctcaagtgatctgcccacctcagcctccaaaaatgttaggattacaggcgtgagccactatgctcggccagggcataatttgtaataagtaatttaaaacataacagaaaaggcctatgaacaactatctcaatccctgtattctccccagagatcttggaaggagaccaagccatcctgcagagaataaagaaggctgtgcgggcaatccatagctccggccttggccatgtggagaatgaagagcagtaccgagaggccg

SEQ ID NO: 1651 - DNA, 2226 bp, Homo sapiens
  source 1..2226: mol_type = unassigned DNA; mol_type = unassigned DNA
aggatttggaagacccagagcgggatgaaacgggacagagccctgaaggggcagggatgggggaaggcggaggagtttctactgaggccagggctccacgctcgcgcccgccatgccggagcagttcagcgtcgccgagttcctggccgtcaccgcggaggacctcagctccccggctggggccgccgccttcgccgccaagatgccccggtaccgaggggcggcgctggcgcgggaggagatcttggaaggagaccaagccatcctgcagagaataaagaaggctgtgcgggcaatccatagctccggccttggccatgtggagaatgaagagcagtaccgagaggccgtggaatccttaggcaacagccacctgtcccagaacagccatgagctgtccacaggcttcctaaacttggccgtgttcacccgcgaggttgctgcgctcttcaagaacctgattcagaacttgaacaacattgtctctttccccctggacagtctgatgaaggggcagctgagggacggtcgacaggattccaaaaaacagctggagaaggcatggaaggactatgaagccaaaatggccaagctggagaaggagcgcgatcgggccagggtgacaggagggatccctgggaacctggggatcccagccaagccccacccaactctgaagagggcctccgagagcccccaggcacctccagacccagcctgacatccgggaccaccccttcggagatgtacctccccgtcagattcagctccgagagcactcgctcctatcggcggggggcgcggagccctgaagatggtccctcagccaggcagcctctgcccagaaggaacgtgccggttggcatcactgaaggagatggctcaaggactgggagtctcccagcaagttctgtgcaacttttgcaagactagctccttgctggcccccacatgccccatgctaggccccaatgttcagagctgggacttgagctcacaaaactggggagctgagacatttgttctcttggatctcactctctctgtcccttgtgcctctgtagctggccttcttcctgccacaggccatgcctctaccaaggacacatggcctttccctgttaggactgatggcggttctttcctatctcattacccgctaggggcctgggagccctgtggctggatctgagtgctcctgagctggcttcagctgcagaactctcagtccctcatcagatcgagactctatttcccccgtcagtctgggggcttcacaagggcaggagagccctccatcactgacttccagatcagggaccctgccaagtagggactgtcttctcagccagccatttattagtctaatattccttcactaaattccaactctatgtctggacctgtgttaggcacttcagataccacacgagtaagacaagggccctgcaggggtggtcctttggtggaaagctggtcttaagggttgggcttgggaataggcagggtcagattccagggcatggctctggactcagctggtttatacctatatgaccattacaattgtctacagatcacatccattctggctggtcaacatgcatgctgtactggctgttaaataaaaatattctgaatgtcactccttttgagggacagcacagccttccctaggcattctcctatattccccagccaaattgtagagtcagatgcacccacatttgcctgtgtccttgatttagcaggaaggaaaggaatagtcagggttgatggatgcccacttctcttctctttctcttggtcaactcaggagccttttagtctgagggaatggagaggcaaagaaagaagggagagtaatagaattgggagggcagagacttaagggttctgcttcccagccctagaaattctatcattgctcagccccaatgagaaagcagatacacctaagccatcatcaaccactaacatctcaacttgccagttgctgggtgctgggccctggcaggaatgggccaagccaagcaggggagactagagagcaccaatggccaacacagctgcctggctggggaggctgtgctgtttcccctggagacctgactggtctgtggttcccacaggaacagggttgtcttttgagcccccagtgtctggtttcattcatctcagacttgttatttcactcatctctaataaaggattggggggtcagtt

SEQ ID NO: 1652 - DNA, 2552 bp, Homo sapiens; identical to SEQ ID NO: 1640
  source 1..2552: mol_type = unassigned DNA; mol_type = unassigned DNA

SEQ ID NO: 1653 - DNA, 4050 bp, Homo sapiens; identical to SEQ ID NO: 1641
  source 1..4050: mol_type = unassigned DNA; mol_type = unassigned DNA

SEQ ID NO: 1654 - DNA, 2226 bp, Homo sapiens; identical to SEQ ID NO: 1651
  source 1..2226: mol_type = unassigned DNA; mol_type = unassigned DNA

SEQ ID NO: 1655 - DNA, 936 bp, Homo sapiens; identical to SEQ ID NO: 1642
  source 1..936: mol_type = unassigned DNA; mol_type = unassigned DNA

SEQ ID NO: 1656 - DNA, 3024 bp, Homo sapiens; identical to SEQ ID NO: 1643
  source 1..3024: mol_type = unassigned DNA; mol_type = unassigned DNA

SEQ ID NO: 1657 - DNA, 2865 bp, Homo sapiens; identical to SEQ ID NO: 1644
  source 1..2865: mol_type = unassigned DNA; mol_type = unassigned DNA

SEQ ID NO: 1658 - DNA, 907 bp, Homo sapiens; identical to SEQ ID NO: 1645
  source 1..907: mol_type = unassigned DNA; mol_type = unassigned DNA

SEQ ID NO: 1659 - DNA, 805 bp, Homo sapiens; identical to SEQ ID NO: 1646
  source 1..805: mol_type = unassigned DNA; mol_type = unassigned DNA

SEQ ID NO: 1660 - DNA, 591 bp, Homo sapiens; identical to SEQ ID NO: 1647
  source 1..591: mol_type = unassigned DNA; mol_type = unassigned DNA

SEQ ID NO: 1661 - DNA, 888 bp, Homo sapiens; identical to SEQ ID NO: 1648
  source 1..888: mol_type = unassigned DNA; mol_type = unassigned DNA

SEQ ID NO: 1662 - DNA, 589 bp, Homo sapiens; identical to SEQ ID NO: 1649
  source 1..589: mol_type = unassigned DNA; mol_type = unassigned DNA

SEQ ID NO: 1663 - DNA, 480 bp, Homo sapiens; identical to SEQ ID NO: 1650
  source 1..480: mol_type = unassigned DNA; mol_type = unassigned DNA

SEQ ID NO: 1664 - DNA, 2472 bp, Homo sapiens
  source 1..2472: mol_type = unassigned DNA; mol_type = unassigned DNA
cttctggccagggaacgtggaaggcgcaccgacagggatccggccagggagggcgagtgaaagaaggaaatcagaaaggaagggagttaacaaaataataaaaacagcctgagccacggctggagagaccgagacccggcgcaagagagcgcagccttagtaggagaggaacgcgagacgcggcagagcgcgttcagcactgacttttgctgctgcttctgcttttttttttcttagaaacaagaaggcgccagcggcagcctcacacgcgagcgccacgcgaggctcccgaagccaacccgcgaagggaggaggggagggaggaggaggcggcgtgcagggaggagaaaaagcattttcactttttttgctcccactctaagaagtctcccggggattttgtatatattttttaacttccgtcagggctcccgcttcatatttccttttctttccctctctgttcctgcacccaagttctctctgtgtccccctcgcgggccccgcacctcgcgtcccggatcgctctgattccgcgactccttggccgccgctgcgcatggaaagctctgccaagatggagagcggcggcgccggccagcagccccagccgcagccccagcagcccttcctgccgcccgcagcctgtttctttgccacggccgcagccgcggcggccgcagccgccgcagcggcagcgcagagcgcgcagcagcagcagcagcagcagcagcagcagcagcaggcgccgcagctgagaccggcggccgacggccagccctcagggggcggtcacaagtcagcgcccaagcaagtcaagcgacagcgctcgtcttcgcccgaactgatgcgctgcaaacgccggctcaacttcagcggctttggctacagcctgccgcagcagcagccggccgccgtggcgcgccgcaacgagcgcgagcgcaaccgcgtcaagttggtcaacctgggctttgccacccttcgggagcacgtccccaacggcgcggccaacaagaagatgagtaaggtggagacactgcgctcggcggtcgagtacatccgcgcgctgcagcagctgctggacgagcatgacgcggtgagcgccgccttccaggcaggcgtcctgtcgcccaccatctcccccaactactccaacgacttgaactccatggccggctcgccggtctcatcctactcgtcggacgagggctcttacgacccgctcagccccgaggagcaggagcttctcgacttcaccaactggttctgaggggctcggcctggtcaggccctggtgcgaatggactttggaagcagggtgatcgcacaacctgcatctttagtgctttcttgtcagtggcgttgggagggggagaaaaggaaaagaaaaaaaaaagaagaagaagaagaaaagagaagaagaaaaaaacgaaaacagtcaaccaaccccatcgccaactaagcgaggcatgcctgagagacatggctttcagaaaacgggaagcgctcagaacagtatctttgcactccaatcattcacggagatatgaagagcaactgggacctgagtcaatgcgcaaaatgcagcttgtgtgcaaaagcagtgggctcctggcagaagggagcagcacacgcgttatagtaactcccatcacctctaacacgcacagctgaaagttcttgctcgggtcccttcacctcctcgccctttcttaaagtgcagttcttagccctctagaaacgagttggtgtctttcgtctcagtagcccccaccccaataagctgtagacattggtttacagtgaaactatgctattctcagccctttgaaactctgcttctcctccagggcccgattcccaaaccccatggcttccctcacactgtcttttctaccattttcattatagaatgcttccaatcttttgtgaattttttattataaaaaatctatttgtatctatcctaaccagttcggggatatattaagatatttttgtacataagagagaaagagagagaaaaatttatagaagttttgtacaaatggtttaaaatgtgtatatcttgatactttaacatgtaatgctattacctctgcatattttagatgtgtagttcaccttacaactgcaattttccctatgtggttttgtaaagaactctcctcataggtgagatcaagaggccaccagttgtacttcagcaccaatgtgtcttactttatagaaatgttgttaatgtattaatgatgttattaaatactgttcaagaagaacaaagtttatgcagctactgtccaaactcaaagtggcagccagttggttttgataggttgccttttggagatttctattactgcctttttttttcttactgttttattacaaacttacaaaaatatgtataaccctgttttatacaaactagtttcgtaataaaactttttcctttttttaaaatgaaaataa

SEQ ID NO: 1665 - DNA, 1504 bp, Homo sapiens
  source 1..1504: mol_type = unassigned DNA; mol_type = unassigned DNA
cccaaacggtgcacggaagagtgaggtgactggcatgtgtgggggcaacacgattctcctccctggggagcagagcagaggcaacccatcccccactcccacccccacactcccctaagttccaatccatttccacctctgtttactgtccaaagtcccgggcactggagatgccacgtttggcgtgcttggacacacagacacgcagacacagagacaccggggcccagggccctcctatggaccctgcccgctcccctcccattgtccacggctgtccgcccacccccattctccaagcttcagccccctccttagttcggcatctgcacagcactgaagaacctgggaatcagaccctgagaccctgagcaatcccaggtccagcgccagccctatcatgaccaaggagtatcaagaccttcagcatctggacaatgaggagagtgaccaccatcagctcagaaaagggccacctcctccccagcccctcctgcagcgtctctgctccggacctcgcctcctcctgctctccctgggcctcagcctcctgctgcttgtggttgtctgtgtgatcggatcccaaaactcccagctgcaggaggagctgcggggcctgagagagacgttcagcaacttcacagcgagcacggaggcccaggtcaagggcttgagcacccagggaggcaatgtgggaagaaagatgaagtcgctagagtcccagctggagaaacagcagaaggacctgagtgaagatcactccagcctgctgctccacgtgaagcagttcgtgtctgacctgcggagcctgagctgtcagatggcggcgctccagggcaatggctcagaaaggacctgctgcccggtcaactgggtggagcacgagcgcagctgctactggttctctcgctccgggaaggcctgggctgacgccgacaactactgccggctggaggacgcgcacctggtggtggtcacgtcctgggaggagcagaaatttgtccagcaccacataggccctgtgaacacctggatgggcctccacgaccaaaacgggccctggaagtgggtggacgggacggactacgagacgggcttcaagaactggaggccggagcagccggacgactggtacggccacgggctcggaggaggcgaggactgtgcccacttcaccgacgacggccgctggaacgacgacgtctgccagaggccctaccgctgggtctgcgagacagagctggacaaggccagccaggagccacctctcctttaatttatttcttcaatgcctcgacctgccgcaggggtccgggattgggaatccgcccatctgggggcctcttctgctttctcgggaattttcatctaggattttaagggaaggggaaggatagggtgatgttccgaaggtgaggagcttgaaacccgtggcgctttctgcagtttgcaggttatcattgtgaactttttttttttaagagtaaaaagaaatatacctaaa

SEQ ID NO: 1666 - DNA, 944 bp, Homo sapiens
  source 1..944: mol_type = unassigned DNA; mol_type = unassigned DNA
tgtcagtgatcagtttggtgaagggggaaaagggccacctcctccccagcccctcctgcagcgtctctgctccggacctcgcctcctcctgctctccctgggcctcagcctcctgctgcttgtggttgtctgtgtgatcggatcccaaaactcccagctgcaggaggagctgcggggcctgagagagacgttcagcaacttcacagcgagcacggaggcccaggtcaagggcttgagcacccagggaggcaatgtgggaagaaagatgaagtcgctagagtcccagctggagaaacagcagaaggacctgagtgaagatcactccagcctgctgctccacgtgaagcagttcgtgtctgacctgcggagcctgagctgtcagatggcggcgctccagggcaatggctcagaaaggacctgctgcccggtcaactgggtggagcacgagcgcagctgctactggttctctcgctccgggaaggcctgggctgacgccgacaactactgccggctggaggacgcgcacctggtggtggtcacgtcctgggaggagcagaaatttgtccagcaccacataggccctgtgaacacctggatgggcctccacgaccaaaacgggccctggaagtgggtggacgggacggactacgagacgggcttcaagaactggaggccggagcagccggacgactggtacggccacgggctcggaggaggcgaggactgtgcccacttcaccgacgacggccgctggaacgacgacgtctgccagaggccctaccgctgggtctgcgagacagagctggacaaggccagccaggagccacctctcctttaatttatttcttcaatgcctcgacctgccgcaggggtccgggattgggaatccgcccatctgggggcctcttctgctttctcgggaattttcatctaggattttaagg

SEQ ID NO: 1667 - DNA, 887 bp, Homo sapiens
  source 1..887: mol_type = unassigned DNA; mol_type = unassigned DNA
tgagagagacgttcagcaacttcacagcgagcacggaggcccaggtcaagggcttgagcacccagggaggcaatgtgggaagaaagatgaagtcgctagagtcccagctggagaaacagcagaaggacctgagtgaagatcactccagcctgctgctccacgtgaagcagttcgtgtctgacctgcggagcctgagctgtcagatggcggcgctccagggcaatggctcagaaaggacctgctgcccggtcaactgggtggagcacgagcgcagctgctactggttctctcgctccgggaaggcctgggctgacgccgacaactactgccggctggaggacgcgcacctggtggtggtcacgtcctgggaggagcagaaatttgtccagcaccacataggccctgtgaacacctggatgggcctccacgaccaaaacgggccctggaagtgggtggacgggacggactacgagacgggcttcaagtgagtgcgcgccctccctcggcctgggtccggccgccttcgcgccctggggccctgggctgaggagtctggagcgacccgcctgcggatccgacctcctggggcccacagctggctctgtccccaggaactggaggccggagcagccggacgactggtacggccacgggctcggaggaggcgaggactgtgcccacttcaccgacgacggccgctggaacgacgacgtctgccagaggccctaccgctgggtctgcgagacagagctggacaaggccagccaggagccacctctcctttaatttatttcttcaatgcctcgacctgccgcaggggtccgggattgggaatccgcccatctgggggcctcttctgctttctcgggaattttcatctaggattt

SEQ ID NO: 1668 - DNA, 1552 bp, Homo sapiens
  source 1..1552: mol_type = unassigned DNA; mol_type = unassigned DNA
acacagagacaccggggcccagggccctcctatggaccctgcccgctcccctcccattgtccacggctgtccgcccacccccattctccaagcttcagccccctccttagttcggcatctgcacagcactgaagaacctgggaatcagaccctgagaccctgagcaagtaaaatgggaagagaggtggcgggaggctggctgggggtgcaggggtgcggagggaacccagggtgtgttggggggtgctgggtgggaaacatcagaggatggattctggatgtcaggcctgggaggggatggaggaaagaagaaagctcccggtggggcgcggtggtccacgcctgtaatcccagcacgttgggaggctggggtgggtggattgcctgagctcaggagtttgagacaagcctgggcaacacggtgaaaccccgtctctactaaaatacaaaaaagtagccaggcgtggtggcgtgcacctgttgtcccagctactccagaggctgaggcaggagaaccgcttgaacccgggaggcagaggttgcagtaagctgagatcatgccactgcactccggcctggggacagagcaagactccctctcaaaaaaaaaaaaaaaaagaaaagaaaaaaaagaaaaagaaaagaaagaaagaagaaaggtctccatgatggagccgtcaatcagatgggagtaaagagatgggcccctcattcccactctagtcctggtgagcccccacctcagccccagcctcagtcttgactcagtcccaggtccagcgccagccctatcatgaccaaggagtatcaagaccttcagcatctggacaatgaggagagtgaccaccatcagctcagaaaagactcccagctgcaggaggagctgcggggcctgagagagacgttcagcaacttcacagcgagcacggaggcccaggtcaagggcttgagcacccagggaggcaatgtgggaagaaagatgaagtcgctagagtcccagctggagaaacagcagaaggacctgagtgaagatcactccagcctgctgctccacgtgaagcagttcgtgtctgacctgcggagcctgagctgtcagatggcggcgctccagggcaatggctcagaaaggacctgctgcccggtcaactgggtggagcacgagcgcagctgctactggttctctcgctccgggaaggcctgggctgacgccgacaactactgccggctggaggacgcgcacctggtggtggtcacgtcctgggaggagcagaaatttgtccagcaccacataggccctgtgaacacctggatgggcctccacgaccaaaacgggccctggaagtgggtggacgggacggactacgagacgggcttcaagaactggaggccggagcagccggacgactggtacggccacgggctcggaggaggcgaggactgtgcccacttcaccgacgacggccgctggaacgacgacgtctgccagaggccctaccgctgggtctgcgagacagagctggacaaggccagccaggagccacctctcctttaa

SEQ ID NO: 1669 - DNA, 797 bp, Homo sapiens
  source 1..797: mol_type = unassigned DNA; mol_type = unassigned DNA
tctggccctgcagggtcgcccaccgcccgcatttcttcatgtacatggttcctcctagactactagggccgccttagcttgctacccttttaggaccctggagctgtgccagggtcccctctgtccccgcgctcctgacaccccctcctcttgcagggccacctcctccccagcccctcctgcagcgtctctgctccggacctcgcctcctcctgctctccctgggcctcagcctcctgctgcttgtggttgtctgtgtgatcggatcccaaaactcccagctgcaggaggagctgcggggcctgagagagacgttcagcaacttcacagcgagcacggaggcccaggtcaagggcttgagcacccaggatcactccagcctgctgctccacgtgaagcagttcgtgtctgacctgcggagcctgagctgtcagatggcggcgctccagggcaatggctcagaaaggacctgctgcccggtcaactgggtggagcacgagcgcagctgctactggttctctcgctccgggaaggcctgggctgacgccgacaactactgccggctggaggacgcgcacctggtggtggtcacgtcctgggaggagcagaaatttgtccagcaccacataggccctgtgaacacctggatgggcctccacgaccaaaacgggccctggaagtgggtggacgggacggactacgagacgggcttcaagtgagtgcgcgccctccctcggcctgggtccggccgccttcgcgccctggggccctgggctgaggagtctggagcgacccgc

SEQ ID NO: 1670 - DNA, 627 bp, Homo sapiens
  source 1..627: mol_type = unassigned DNA; mol_type = unassigned DNA
ggagggggtggactgaggttcctggattggctgcagtgacgcagtcatgccattaggtgtcagcaaaagctcagggcctcggtgggatggggcggctcagcgcttagcccccttccccagccctcttttctccccgatttccagttgcctctggccctgcagggtcgcccaccgcccgcatttcttcatgtacatggttcctcctagactactagggccgccttagcttgctacccttttaggaccctggagctgtgccagggtcccctctgtccccgcgctcctgacaccccctcctcttgcagggccacctcctccccagcccctcctgcagcgtctctgctccggacctcgcctcctcctgctctccctgggcctcagcctcctgctgcttgtggttgtctgtgtgatcggatcccaaaactcccagctgcaggaggagctgcggggcctgagagagacgttcagcaacttcacagcgagcacggaggcccaggtcaagggcttgagcacccagggaggcaatgtgggaagaaagatgaagtcgctagagtcccagctggagaaacagcagaaggacctgagtgaagatcactccagcctgctgctccacgtgaagcagttcgt

SEQ ID NO: 1671 - DNA, 2083 bp, Homo sapiens
  source 1..2083: mol_type = unassigned DNA; mol_type = unassigned DNA
ttggacacacagacacgcagacacagagacaccggggcccagggccctcctatggaccctgcccgctcccctcccattgtccacggctgtccgcccacccccattctccaagcttcagccccctccttagttcggcatctgcacagcactgaagaacctgggaatcagaccctgagaccctgagcaatcccaggtccagcgccagccctatcatgaccaaggagtatcaagaccttcagcatctggacaatgaggagagtgaccaccatcagctcagaaaaggtgagggccaccttgccctgcctctgcaaggcgagaatttggcggttctccaccccccagccacagctcctactcttgcccgtgagcctggctctctctctgggtctgtctccctcccccaacactgggaaaggtgtcggaactgcctctctcaggagaggggcggagtgtggggttggagtccctttattggtgacaggtgcccaaagctttcctgtgcctcctggccctcggaggtggacccgggggtgtgggaacagctggaagctggagagatgaggtcactgtcggcttcctatgacgaagtcacgccccctcttcctttccccttccaacaccacccagggaccccggtcgtgcgagcgtgtgcgtgtgtgtgtcagtgatcagtttggtgaagggggaaaaggtttctgtgaagggtctgaggattctgtgaggggggcgatgaggggtctctgacctgagggagaacgagactcttttgcttcaaaaacaaattccccttgacccatttctttgtcctccgagcagggaattgtttaggctgagcaaggatgaagttcgtgggggatggggtgcagcgcgctttgacggaaggagggtccgcagcggaggagacccggcagggaggcccccccaaccctccagctctcagggcacagggctaacgtgtctcttccccctgctgggtggaagacttgagggcctgaatggtagctattgcaccttctctccctgcacgcagccaaagacaagtggaattcatggacagagaaagaaaccttccttctttccccactttcaggggaagcagcgactccgaggcgcgggccactcaattgcgtttcaaggcgcgggaggagggggtggactgaggttcctggattggctgcagtgacgcagtcatgccattaggtgtcagcaaaagctcagggcctcggtgggatggggcggctcagcgcttagcccccttccccagccctcttttctccccgatttccagttgcctctggccctgcagggtcgcccaccgcccgcatttcttcatgtacatggttcctcctagactactagggccgccttagcttgctacccttttaggaccctggagctgtgccagggtcccctctgtccccgcgctcctgacaccccctcctcttgcagggccacctcctccccagcccctcctgcagcgtctctgctccggacctcgcctcctcctgctctccctgggcctcagcctcctgctgcttgtggttgtctgtgtgatcggatcccaaagtgggtgccccaggggtgggaagggggcaacattggggggtgttgacgggggaccgtggcaagggagtggtgggtgcagtggtggcggacacagcgatcccgttttcttctctctgcacgctgtcctggccagactcccagctgcaggaggagctgcggggcctgagagagacgttcagcaacttcacagcgagcacggaggcccaggtcaagggcttgagcacccagggaggcaatgtgggaagaaagatgaagtcgctagagtcccagctggagaaacagcagaaggacctgagtgaaggtcagagagggagtgtgtgtgtgtgtgtgtgtgtgtgaaagagagtgagaatgtgtggatgtgtgtgagaaagtgtgagtgtgtgtggatgtgtgtgagaatgagagggagtgtgtgtgtgtgtgagtctgtgtgtgagaatgagggggagtgtgttttgggtgtgtgtatgagagccttgtgtggatgtgagaatgagagggagtgtgtatgtct

SEQ ID NO: 1672 - DNA, 855 bp, Homo sapiens
  source 1..855: mol_type = unassigned DNA
cacagagacaccggggcccagggccctcctatggaccctgcccgctcccctcccattgtccacggctgtccgcccacccccattctccaagcttcagccccctccttagttcggcatctgcacagcactgaagaacctgggaatcagaccctgagaccctgagcaaccaggcgtggtggcgtgcacctgttgtcccagctactccagaggctgaggcaggagaaccgcttgaacccgggaggcagaggttgcagtaagctgagatcatgccactgcactccggcctggggacagagcaagactccctctcaaaaaaaaaaaaaaaaagaaaagaaaaaaaagaaaaagaaaagaaagaaagaagaaaggtctccatgatggagccgtcaatcagatgggagtaaagagatgggcccctcattcccactctagtcctggtgagcccccacctcagccccagcctcagtcttgactcagtcccaggtccagcgccagccctatcatgaccaaggagtatcaagaccttcagcatctggacaatgaggagagtgaccaccatcagctcagaaaagggccacctcctccccagcccctcctgcagcgtctctgctccggacctcgcctcctcctgctctccctgggcctcagcctcctgctgcttgtggttgtctgtgtgatcggatcccaaaactcccagctgcaggaggagctgcggggcctgagagagacgttcagcaacttcacagcgagcacggaggcccaggtcaagggcttgagcacccagggaggcaatgtgggaagaaagatgaagtcgctagagtcccagctggagaaacagcagaaggacctgagtga

SEQ ID NO: 1673 - DNA, 1384 bp, Homo sapiens
  source 1..1384: mol_type = unassigned DNA
cccaaacggtgcacggaagagtgaggtgactggcatgtgtgggggcaacacgattctcctccctggggagcagagcagaggcaacccatcccccactcccacccccacactcccctaagttccaatccatttccacctctgtttactgtccaaagtcccgggcactggagatgccacgtttggcgtgcttggacacacagacacgcagacacagagacaccggggcccagggccctcctatggaccctgcccgctcccctcccattgtccacggctgtccgcccacccccattctccaagcttcagccccctccttagttcggcatctgcacagcactgaagaacctgggaatcagaccctgagaccctgagcaatcccaggtccagcgccagccctatcatgaccaaggagtatcaagaccttcagcatctggacaatgaggagagtgaccaccatcagctcagaaaagactcccagctgcaggaggagctgcggggcctgagagagacgttcagcaacttcacagcgagcacggaggcccaggtcaagggcttgagcacccagggaggcaatgtgggaagaaagatgaagtcgctagagtcccagctggagaaacagcagaaggacctgagtgaagatcactccagcctgctgctccacgtgaagcagttcgtgtctgacctgcggagcctgagctgtcagatggcggcgctccagggcaatggctcagaaaggacctgctgcccggtcaactgggtggagcacgagcgcagctgctactggttctctcgctccgggaaggcctgggctgacgccgacaactactgccggctggaggacgcgcacctggtggtggtcacgtcctgggaggagcagaaatttgtccagcaccacataggccctgtgaacacctggatgggcctccacgaccaaaacgggccctggaagtgggtggacgggacggactacgagacgggcttcaagaactggaggccggagcagccggacgactggtacggccacgggctcggaggaggcgaggactgtgcccacttcaccgacgacggccgctggaacgacgacgtctgccagaggccctaccgctgggtctgcgagacagagctggacaaggccagccaggagccacctctcctttaatttatttcttcaatgcctcgacctgccgcaggggtccgggattgggaatccgcccatctgggggcctcttctgctttctcgggaattttcatctaggattttaagggaaggggaaggatagggtgatgttccgaaggtgaggagcttgaaacccgtggcgctttctgcagtttgcaggttatcattgtgaactttttttttttaagagtaaaaagaaatatacct

SEQ ID NO: 1674 - DNA, 4072 bp, Homo sapiens
  source 1..4072: mol_type = unassigned DNA
agacagcctcgcagacactcgtaggcgcgcacgcgcaccctctcccctccccctcccctcccgccgcctcccggccggacgatggatccctgcagatcccagggctgagagcaccgcgcaccgcgccgagcccgggcagaccgagccgaggcgagcgagccagcgagccagcgcgcgcgggcgggcggacagatcggagccgagcggggccgggcggggcgctccctgcagggctctgcgcggcgtgccgcggcggccgcgggctccggccccgggccatgagcccctccgcgactcggcgctgagcccgccaccggtccagcgccccaggacccgccgccggctgccggcttgccgaagccccctcaggatcccctcaacaaggatggaactgaaggccgaggaggaggaggtgggtggcgtccagccggtgagcatccaggccttcgccagcagctccacactgcacggcctggcccacatcttctcctacgagcggctgtctctgaagcgggcactgtgggccctgtgcttcctgggctccctggctgtgctgctgtgtgtgtgcacggagcgtgtgcagtactacttccactaccaccatgtcaccaagctcgacgaggtggctgcctctcagcttaccttccctgctgtcacgctgtgcaacctcaacgagttccgctttagccaagtctccaagaatgacctgtatcatgctggggagctgctggccctgctcaacaacaggtatgagataccagacacacagatggcagatgaaaagcagctggagatactgcaggacaaagccaacttccgcagcttcaaacccaaacccttcaacatgcgtgagttctacgaccgagctgggcacgacattcgagacatgctgctctcctgccacttccggggggaggtctgcagcgctgaagacttcaaggtggtcttcacacgctatggaaagtgctacacgttcaactcgggccgagatgggcggccgcggctgaagaccatgaagggtgggacgggcaatgggctggaaatcatgctggacatccagcaggacgagtacctgcctgtgtggggggagactgacgagacgtccttcgaagcaggcatcaaagtgcagatccatagtcaggatgaacctcctttcatcgaccagctgggctttggcgtggccccaggcttccagacctttgtggcctgccaggagcagcggctcatctacctgcccccaccctggggcacctgcaaagctgttaccatggactcggatttggatttcttcgactcctacagcatcactgcctgccgcatcgactgtgagacgcgctacctggtggagaactgcaactgccgcatggtgcacatgccaggggatgccccatactgtactccagagcagtacaaggagtgtgcagatcctgctctggacttcctggtggagaaggaccaggagtactgcgtgtgtgaaatgccttgcaacctgacccgctatggcaaagagctgtccatggtcaagatccccagcaaagcctcagccaagtacctggccaagaagttcaacaaatctgagcaatacataggggagaacatcctggtgctggacattttctttgaagtcctcaactatgagaccattgaacagaagaaggcctatgagattgcagggctcctgggtgagctgctgatgacacctgtccccttctcatgccatgggcatggcgtggctccctatcatccaaaagcagggtgctcacttctgtcccatgagggtcctccaccccagaggcccttccccaaaccctgttgtcttggtgacatcgggggccagatggggctgttcatcggggccagcatcctcacggtgctggagctctttgactacgcctacgaggtcattaagcacaagctgtgccgacgaggaaaatgccagaaggaggccaaaaggagcagtgcggacaagggcgtggccctcagcctggacgacgtcaaaagacacaacccgtgcgagagccttcggggccaccctgccgggatgacatacgctgccaacatcctacctcaccatccggcccgaggcacgttcgaggactttacctgctgagccccgcaggccgctgaaccaaaggcctagatggggaggactaggagagcgagggggcccccagctgcctcctcacatctgccctggggactccccacactccggggcagatctttcctcttgtctgtggtaaggaaggagtcttgaccatagagtcctctctctgcctctatcccattctttttacatttaacaaaactaatctaaaaaagaactaaaaagggagaacggggcaagggacctcaggctgcccctctctcctccatgctgcctcccctagctcccagcctgaattctgtctatctagctgtctgccatctgagtgtccatctacattctgctgccaccagtcaccaaaggcccttcccagtgaggggtggaagggatctctggggtctggaatttggccccaaaccagagaatgtaccttaagggggagggctagtgtgggggagggaggcttccccagccttaagagaccctctcagcccagtgactgtccccaaacccaagtctcctggcaggaactaaaacctcagccccactctctcacaccatgtggaatctcgtgggggtcggggatccccttaagaagtggtaatggggacaagatgcggccctggtgctgtaggctacatcctgatacctataagttcacccccaccccacagctgctggagagaaatcccaagaggcagcccttcctcaccatcccattaaagaccgggctggttagcgtccagctcagggagaagggcgctagtgcctaacctcactggtccctctcccggaggcccttgtagagggccacgtccataaattttcttatggaactctcccacatcctcttccccaacttcatttgcttctctcaacaacctcatctgcattttctatttctatatgatacagactctatattgctatatctctgtatatactttcccagccctgtctgtctccaccccatcccctcttgtctctgagaaccattctcccaccccaagttccaccttctatgtttctactccctccctggtctctgaatgccttcgcctgtataaagagttggactctctcccctggtgtctgtactgtgtacacacatccctctgagaagcacaaggagacgacacgcgcattgtaacctttgcactgtctcagtggcgacaaaggaagctgtgaatcacaagctctgcctctttctggcctcaccctctcccccaacccgggcaccctcggccctccctgcagccttaacattctcttcccctgctcctcctatcccattgccctctgcccagctgacagtggcatccccagggaaggggttgctgtagagatagcccccacccaggggatggaggtctaccctggacactaagccaagtgtgtcagagacagaagggagctggggattggcgactcctgaagttggggcagtgggatgctgacaggcagaagctgaggtcctcagtcagtggcctttcctccttctgggtgcccagccccctttcctcacctgatacccaagcccaccacttttattttctggtgaggtgggtttgggaggaaagagaggcctagaggaggagttgaaagctctgctgttgtctcaccctatcttaatgagagacaagtgaggtggagggcctgccccccctccctccaccagacactccttccaggcctgagccccaacccctcttcaggccttccttccctagctgtgtcttggtcttcaatcccagaacaggacctgtgagcagctgcattggcctggagctggagagtaaggctgtaggatctttggaatctcttggttcctaagagtttcctcagagatcatacctccccagagggaagcaggaatgaggccaaaaagtgtgcattggataggggaacagcaggcagggctctgggtgacgcatgcctctggtctaataaactgggtttcaacca

SEQ ID NO: 1675 - DNA, 3778 bp, Homo sapiens
  source 1..3778: mol_type = unassigned DNA
gagccagcgagccagcgcgcgcgggcgggcggacagatcggagccgagcggggccgggcggggcgctccctgcagggctctgcgcggcgtgccgcggcggccgcgggctccggccccgggccatgagcccctccgcgactcggcgctgagcccgccaccggtccagcgccccaggacccgccgccggctgccggcttgccgaagccccctcaggatcccctcaacaaggatggaactgaaggccgaggaggaggaggtgggtggcgtccagccggtgagcatccaggccttcgccagcagctccacactgcacggcctggcccacatcttctcctacgagcggctgtctctgaagcgggcactgtgggccctgtgcttcctgggctccctggctgtgctgctgtgtgtgtgcacggagcgtgtgcagtactacttccactaccaccatgtcaccaagctcgacgaggtggctgcctctcagcttaccttccctgctgtcacgctgtgcaacctcaacgagttccgctttagccaagtctccaagaatgacctgtatcatgctggggagctgctggccctgctcaacaacaggtatgagataccagacacacagatggcagatgaaaagcagctggagatactgcaggacaaagccaacttccgcagcttcaaacccaaacccttcaacatgcgtgagttctacgaccgagctgggcacgacattcgagacatgctgctctcctgccacttccggggggaggtctgcagcgctgaagacttcaaggtggtcttcacacgctatggaaagtgctacacgttcaactcgggccgagatgggcggccgcggctgaagaccatgaagggtgggacgggcaatgggctggaaatcatgctggacatccagcaggacgagtacctgcctgtgtggggggagactgacgagacgtccttcgaagcaggcatcaaagtgcagatccatagtcaggatgaacctcctttcatcgaccagctgggctttggcgtggccccaggcttccagacctttgtggcctgccaggagcagcggctcatctacctgcccccaccctggggcacctgcaaagctgttaccatggactcggatttggatttcttcgactcctacagcatcactgcctgccgcatcgactgtgagacgcgctacctggtggagaactgcaactgccgcatggtgcacatgccaggggatgccccatactgtactccagagcagtacaaggagtgtgcagatcctgctctggacttcctggtggagaaggaccaggagtactgcgtgtgtgaaatgccttgcaacctgacccgctatggcaaagagctgtccatggtcaagatccccagcaaagcctcagccaagtacctggccaagaagttcaacaaatctgagcaatacataggggagaacatcctggtgctggacattttctttgaagtcctcaactatgagaccattgaacagaagaaggcctatgagattgcagggctcctgggtgacatcgggggccagatggggctgttcatcggggccagcatcctcacggtgctggagctctttgactacgcctacgaggtcattaagcacaagctgtgccgacgaggaaaatgccagaaggaggccaaaaggagcagtgcggacaagggcgtggccctcagcctggacgacgtcaaaagacacaacccgtgcgagagccttcggggccaccctgccgggatgacatacgctgccaacatcctacctcaccatccggcccgaggcacgttcgaggactttacctgctgagccccgcaggccgctgaaccaaaggcctagatggggaggactaggagagcgagggggcccccagctgcctcctcacatctgccctggggactccccacactccggggcagatctttcctcttgtctgtggtaaggaaggagtcttgaccatagagtcctctctctgcctctatcccattctttttacatttaacaaaactaatctaaaaaagaactaaaaagggagaacggggcaagggacctcaggctgcccctctctcctccatgctgcctcccctagctcccagcctgaattctgtctatctagctgtctgccatctgagtgtccatctacattctgctgccaccagtcaccaaaggcccttcccagtgaggggtggaagggatctctggggtctggaatttggccccaaaccagagaatgtaccttaagggggagggctagtgtgggggagggaggcttccccagccttaagagaccctctcagcccagtgactgtccccaaacccaagtctcctggcaggaactaaaacctcagccccactctctcacaccatgtggaatctcgtgggggtcggggatccccttaagaagtggtaatggggacaagatgcggccctggtgctgtaggctacatcctgatacctataagttcacccccaccccacagctgctggagagaaatcccaagaggcagcccttcctcaccatcccattaaagaccgggctggttagcgtccagctcagggagaagggcgctagtgcctaacctcactggtccctctcccggaggcccttgtagagggccacgtccataaattttcttatggaactctcccacatcctcttccccaacttcatttgcttctctcaacaacctcatctgcattttctatttctatatgatacagactctatattgctatatctctgtatatactttcccagccctgtctgtctccaccccatcccctcttgtctctgagaaccattctcccaccccaagttccaccttctatgtttctactccctccctggtctctgaatgccttcgcctgtataaagagttggactctctcccctggtgtctgtactgtgtacacacatccctctgagaagcacaaggagacgacacgcgcattgtaacctttgcactgtctcagtggcgacaaaggaagctgtgaatcacaagctctgcctctttctggcctcaccctctcccccaacccgggcaccctcggccctccctgcagccttaacattctcttcccctgctcctcctatcccattgccctctgcccagctgacagtggcatccccagggaaggggttgctgtagagatagcccccacccaggggatggaggtctaccctggacactaagccaagtgtgtcagagacagaagggagctggggattggcgactcctgaagttggggcagtgggatgctgacaggcagaagctgaggtcctcagtcagtggcctttcctccttctgggtgcccagccccctttcctcacctgatacccaagcccaccacttttattttctggtgaggtgggtttgggaggaaagagaggcctagaggaggagttgaaagctctgctgttgtctcaccctatcttaatgagagacaagtgaggtggagggcctgccccccctccctccaccagacactccttccaggcctgagccccaacccctcttcaggccttccttccctagctgtgtcttggtcttcaatcccagaacaggacctgtgagcagctgcattggcctggagctggagagtaaggctgtaggatctttggaatctcttggttcctaagagtttcctcagagatcatacctccccagagggaagcaggaatgaggccaaaaagtgtgcattggataggggaacagcaggcagggctctgggtgacgcatgcctctggtctaataaactgggtttcaacca

SEQ ID NO: 1676 - DNA, 3819 bp, Homo sapiens
  source 1..3819: mol_type = unassigned DNA
agccgagcggggccgggcggggcgctccctgcagggctctgcgcggcgtgccgcggcggccgcgggctccggccccgggccatgagcccctccgcgactcggcgctgagcccgccaccggtccagcgccccaggacccgccgccggctgccggcttgccgaagccccctcaggatcccctcaacaaggatggaactgaaggccgaggaggaggaggtgggtggcgtccagccggtgagcatccaggccttcgccagcagctccacactgcacggcctggcccacatcttctcctacgagcggctgtctctgaagcgggcactgtgggccctgtgcttcctgggctccctggctgtgctgctgtgtgtgtgcacggagcgtgtgcagtactacttccactaccaccatgtcaccaagctcgacgaggtggctgcctctcagcttaccttccctgctgtcacgctgtgcaacctcaacgagttccgctttagccaagtctccaagaatgacctgtatcatgctggggagctgctggccctgctcaacaacaggtatgagataccagacacacagatggcagatgaaaagcagctggagatactgcaggacaaagccaacttccgcagcttcaaacccaaacccttcaacatgcgtgagttctacgaccgagctgggcacgacattcgagacatgctgctctcctgccacttccggggggaggtctgcagcgctgaagacttcaaggtgaagcccatgcaggtggcaaaggagctcaggcgatgcaccctaccaggaacagttttccagggcacacagagggcaagaaagggtcttcacacgctatggaaagtgctacacgttcaactcgggccgagatgggcggccgcggctgaagaccatgaagggtgggacgggcaatgggctggaaatcatgctggacatccagcaggacgagtacctgcctgtgtggggggagactgacgagacgtccttcgaagcaggcatcaaagtgcagatccatagtcaggatgaacctcctttcatcgaccagctgggctttggcgtggccccaggcttccagacctttgtggcctgccaggagcagcggctcatctacctgcccccaccctggggcacctgcaaagctgttaccatggactcggatttggatttcttcgactcctacagcatcactgcctgccgcatcgactgtgagacgcgctacctggtggagaactgcaactgccgcatggtgcacatgccaggggatgccccatactgtactccagagcagtacaaggagtgtgcagatcctgctctggacttcctggtggagaaggaccaggagtactgcgtgtgtgaaatgccttgcaacctgacccgctatggcaaagagctgtccatggtcaagatccccagcaaagcctcagccaagtacctggccaagaagttcaacaaatctgagcaatacataggggagaacatcctggtgctggacattttctttgaagtcctcaactatgagaccattgaacagaagaaggcctatgagattgcagggctcctgggtgacatcgggggccagatggggctgttcatcggggccagcatcctcacggtgctggagctctttgactacgcctacgaggtcattaagcacaagctgtgccgacgaggaaaatgccagaaggaggccaaaaggagcagtgcggacaagggcgtggccctcagcctggacgacgtcaaaagacacaacccgtgcgagagccttcggggccaccctgccgggatgacatacgctgccaacatcctacctcaccatccggcccgaggcacgttcgaggactttacctgctgagccccgcaggccgctgaaccaaaggcctagatggggaggactaggagagcgagggggcccccagctgcctcctcacatctgccctggggactccccacactccggggcagatctttcctcttgtctgtggtaaggaaggagtcttgaccatagagtcctctctctgcctctatcccattctttttacatttaacaaaactaatctaaaaaagaactaaaaagggagaacggggcaagggacctcaggctgcccctctctcctccatgctgcctcccctagctcccagcctgaattctgtctatctagctgtctgccatctgagtgtccatctacattctgctgccaccagtcaccaaaggcccttcccagtgaggggtggaagggatctctggggtctggaatttggccccaaaccagagaatgtaccttaagggggagggctagtgtgggggagggaggcttccccagccttaagagaccctctcagcccagtgactgtccccaaacccaagtctcctggcaggaactaaaacctcagccccactctctcacaccatgtggaatctcgtgggggtcggggatccccttaagaagtggtaatggggacaagatgcggccctggtgctgtaggctacatcctgatacctataagttcacccccaccccacagctgctggagagaaatcccaagaggcagcccttcctcaccatcccattaaagaccgggctggttagcgtccagctcagggagaagggcgctagtgcctaacctcactggtccctctcccggaggcccttgtagagggccacgtccataaattttcttatggaactctcccacatcctcttccccaacttcatttgcttctctcaacaacctcatctgcattttctatttctatatgatacagactctatattgctatatctctgtatatactttcccagccctgtctgtctccaccccatcccctcttgtctctgagaaccattctcccaccccaagttccaccttctatgtttctactccctccctggtctctgaatgccttcgcctgtataaagagttggactctctcccctggtgtctgtactgtgtacacacatccctctgagaagcacaaggagacgacacgcgcattgtaacctttgcactgtctcagtggcgacaaaggaagctgtgaatcacaagctctgcctctttctggcctcaccctctcccccaacccgggcaccctcggccctccctgcagccttaacattctcttcccctgctcctcctatcccattgccctctgcccagctgacagtggcatccccagggaaggggttgctgtagagatagcccccacccaggggatggaggtctaccctggacactaagccaagtgtgtcagagacagaagggagctggggattggcgactcctgaagttggggcagtgggatgctgacaggcagaagctgaggtcctcagtcagtggcctttcctccttctgggtgcccagccccctttcctcacctgatacccaagcccaccacttttattttctggtgaggtgggtttgggaggaaagagaggcctagaggaggagttgaaagctctgctgttgtctcaccctatcttaatgagagacaagtgaggtggagggcctgccccccctccctccaccagacactccttccaggcctgagccccaacccctcttcaggccttccttccctagctgtgtcttggtcttcaatcccagaacaggacctgtgagcagctgcattggcctggagctggagagtaaggctgtaggatctttggaatctcttggttcctaagagtttcctcagagatcatacctccccagagggaagcaggaatgaggccaaaaagtgtgcattggataggggaacagcaggcagggctctgggtgacgcatgcctctggtctaataaactgggtttcaacca

SEQ ID NO: 1677 - DNA, 1481 bp, Homo sapiens
  source 1..1481: mol_type = unassigned DNA
acattcgagacatgctgctctcctgccacttccggggggaggtctgcagcgctgaagacttcaaggtgaagcccatgcaggtggcaaaggagctcaggcgatgcaccctaccaggaacagttttccagggcacacagagggcaagaaagggtgagaaacaggtcttcacacgctatggaaagtgctacacgttcaactcgggccgagatgggcggccgcggctgaagaccatgaagggtgggacgggcaatgggctggaaatcatgctggacatccagcaggacgagtacctgcctgtgtggggggagactgacgagacgtccttcgaagcaggcatcaaagtgcagatccatagtcaggatgaacctcctttcatcgaccagctgggctttggcgtggccccaggcttccagacctttgtggcctgccaggagcagcggctcatctacctgcccccaccctggggcacctgcaaagctgttaccatggactcggatttggatttcttcgactcctacagcatcactgcctgccgcatcgactgtgagacgcgctacctggtggagaactgcaactgccgcatggtgcacatgccaggggatgccccatactgtactccagagcagtacaaggagtgtgcagatcctgctctggacttcctggtggagaaggaccaggagtactgcgtgtgtgaaatgccttgcaacctgacccgctatggcaaagagctgtccatggtcaagatccccagcaaagcctcagccaagtacctggccaagaagttcaacaaatctgagcaatacataggggagaacatcctggtgctggacattttctttgaagtcctcaactatgagaccattgaacagaagaaggcctatgagattgcagggctcctgggtgacatcgggggccagatggggctgttcatcggggccagcatcctcacggtgctggagctctttgactacgcctacgaggtcattaagcacaagctgtgccgacgaggaaaatgccagaaggaggccaaaaggagcagtgcggacaagggcgtggccctcagcctggacgacgtcaaaagacacaacccgtgcgagagccttcggggccaccctgccgggatgacatacgctgccaacatcctacctcaccatccggcccgaggcacgttcgaggactttacctgctgagccccgcaggccgctgaaccaaaggcctagatggggaggactaggagagcgagggggcccccagctgcctcctcacatctgccctggggactccccacactccggggcagatctttcctcttgtctgtggtaaggaaggagtcttgaccatagagtcctctctctgcctctatcccattctttttacatttaacaaaactaatctaaaaaagaactaaaaagggagaacggggcaagggacctcaggctgcccctctctcctccatgctgcctcccctagctcccagcctg

SEQ ID NO: 1678 - DNA, 1223 bp, Homo sapiens
  source 1..1223: mol_type = unassigned DNA; mol_type = unassigned DNA
aagtctggaagtcctctctgaagcacttcctggggaatgcaaaggaggaggcccctgccctctgagagctcaagatctggcaggcaggaaaaagatacacacaggacaggacacacaggttcatgcaggagaagcctgaggacagcagctgaaggtcttcacacgctatggaaagtgctacacgttcaactcgggccgagatgggcggccgcggctgaagaccatgaagggtgggacgggcaatgggctggaaatcatgctggacatccagcaggacgagtacctgcctgtgtggggggagactgacgagacgtccttcgaagcaggcatcaaagtgcagatccatagtcaggatgaacctcctttcatcgaccagctgggctttggcgtggccccaggcttccagacctttgtggcctgccaggagcagcggctcatctacctgcccccaccctggggcacctgcaaagctgttaccatggactcggatttggatttcttcgactcctacagcatcactgcctgccgcatcgactgtgagacgcgctacctggtggagaactgcaactgccgcatggtgcacatgccaggggatgccccatactgtactccagagcagtacaaggagtgtgcagatcctgctctggacttcctggtggagaaggaccaggagtactgcgtgtgtgaaatgccttgcaacctgacccgctatggcaaagagctgtccatggtcaagatccccagcaaagcctcagccaagtacctggccaagaagttcaacaaatctgagcaatacatagggcaggtatctccatcagcatctcattttatggatatggaaactgagattcagagaggctgccttgccaaggtcacctggttagtaagagatagagatatgacttgaacctaggtctcctcccccaatccctgtgcagggagaacatcctggtgctggacattttctttgaagtcctcaactatgagaccattgaacagaagaaggcctatgagattgcagggctcctgggtgagctgctgatgacacctgtccccttctcatgccatgggcatggcgtggctccctatcatccaaaagcagggtgctcacttctgtcccatgagggtcctccaccccagaggcccttccccaaaccctgttgtcttggtaagtggtgagggaagggaactgagccttctcttagggcaaagtggaaaagaga

SEQ ID NO: 1679 - DNA, 3327 bp, Homo sapiens
  source 1..3327: mol_type = unassigned DNA
cctggagaaaatgcccatccagatcttctgctccatgtcattctcctctggagaggaagccccagggcccttgggagatatttggggtccccaccaccatcagcagcagcaggacatctcagaatcggaagaggaggaagaagagaaggaaaaggaggcagtgaggaaggaggccagtgaggggcattcacccatggacttggtggcctttgccaacagctgcaccctccatggcaccaaccacatttttgtggaggggggtccagggccaaggcaggtgctgtgggcggtggcctttgtcctggcactgggtgccttcctgtgccaggtaggggaccgcgttgcttattacctcagctacccacacgtgacccttctaaacgaagtggccaccacggagctggccttcccggcagtcaccctctgcaacactaatgctgtgcggctgtcccagctcagctaccctgacttgctttatttggcccccatgctgggactggatgaaagtgatgaccccggggtgcccctcgctccaccgggccctgaggccttctctggggagccctttaacctgcaccgcttctacaatcgctcctgccaccggctggaggacatgctgctctattgctcctaccaagggggaccctgcggccctcacaacttctcagtggtcttcacacgctatggaaagtgctacacgttcaactcgggccgagatgggcggccgcggctgaagaccatgaagggtgggacgggcaatgggctggaaatcatgctggacatccagcaggacgagtacctgcctgtgtggggggagactgacgagacgtccttcgaagcaggcatcaaagtgcagatccatagtcaggatgaacctcctttcatcgaccagctgggctttggcgtggccccaggcttccagacctttgtggcctgccaggagcagcggctcatctacctgcccccaccctggggcacctgcaaagctgttaccatggactcggatttggatttcttcgactcctacagcatcactgcctgccgcatcgactgtgagacgcgctacctggtggagaactgcaactgccgcatggtgcacatgccaggggatgccccatactgtactccagagcagtacaaggagtgtgcagatcctgctctggacttcctggtggagaaggaccaggagtactgcgtgtgtgaaatgccttgcaacctgacccgctatggcaaagagctgtccatggtcaagatccccagcaaagcctcagccaagtacctggccaagaagttcaacaaatctgagcaatacataggggagaacatcctggtgctggacattttctttgaagtcctcaactatgagaccattgaacagaagaaggcctatgagattgcagggctcctgggtgacatcgggggccagatggggctgttcatcggggccagcatcctcacggtgctggagctctttgactacgcctacgaggtcattaagcacaagctgtgccgacgaggaaaatgccagaaggaggccaaaaggagcagtgcggacaagggcgtggccctcagcctggacgacgtcaaaagacacaacccgtgcgagagccttcggggccaccctgccgggatgacatacgctgccaacatcctacctcaccatccggcccgaggcacgttcgaggactttacctgctgagccccgcaggccgctgaaccaaaggcctagatggggaggactaggagagcgagggggcccccagctgcctcctcacatctgccctggggactccccacactccggggcagatctttcctcttgtctgtggtaaggaaggagtcttgaccatagagtcctctctctgcctctatcccattctttttacatttaacaaaactaatctaaaaaagaactaaaaagggagaacggggcaagggacctcaggctgcccctctctcctccatgctgcctcccctagctcccagcctgaattctgtctatctagctgtctgccatctgagtgtccatctacattctgctgccaccagtcaccaaaggcccttcccagtgaggggtggaagggatctctggggtctggaatttggccccaaaccagagaatgtaccttaagggggagggctagtgtgggggagggaggcttccccagccttaagagaccctctcagcccagtgactgtccccaaacccaagtctcctggcaggaactaaaacctcagccccactctctcacaccatgtggaatctcgtgggggtcggggatccccttaagaagtggtaatggggacaagatgcggccctggtgctgtaggctacatcctgatacctataagttcacccccaccccacagctgctggagagaaatcccaagaggcagcccttcctcaccatcccattaaagaccgggctggttagcgtccagctcagggagaagggcgctagtgcctaacctcactggtccctctcccggaggcccttgtagagggccacgtccataaattttcttatggaactctcccacatcctcttccccaacttcatttgcttctctcaacaacctcatctgcattttctatttctatatgatacagactctatattgctatatctctgtatatactttcccagccctgtctgtctccaccccatcccctcttgtctctgagaaccattctcccaccccaagttccaccttctatgtttctactccctccctggtctctgaatgccttcgcctgtataaagagttggactctctcccctggtgtctgtactgtgtacacacatccctctgagaagcacaaggagacgacacgcgcattgtaacctttgcactgtctcagtggcgacaaaggaagctgtgaatcacaagctctgcctctttctggcctcaccctctcccccaacccgggcaccctcggccctccctgcagccttaacattctcttcccctgctcctcctatcccattgccctctgcccagctgacagtggcatccccagggaaggggttgctgtagagatagcccccacccaggggatggaggtctaccctggacactaagccaagtgtgtcagagacagaagggagctggggattggcgactcctgaagttggggcagtgggatgctgacaggcagaagctgaggtcctcagtcagtggcctttcctccttctgggtgcccagccccctttcctcacctgatacccaagcccaccacttttattttctggtgaggtgggtttgggaggaaagagaggcctagaggaggagttgaaagctctgctgttgtctcaccctatctta

SEQ ID NO: 1680 - DNA, 350 bp, Homo sapiens
  source 1..350: mol_type = unassigned DNA
agtgagcagtactaggaaatcgttatcacttctaggctgaagaagcacaaaagaagacagtgctctgtagggagccctggcaggatctgtaatcatggagggcctaaggcactactagagctacagaggggcgagggctggggaaggattcataccccaatctttcctcctgccttctgagccattaccaatacctcccaactgtcaaccccaactagaagcccatgcaggtggcaaaggagctcaggcgatgcaccctaccaggaacagttttccagggcacacagagggcaagaaagggtcttcacacgctatggaaagtgctacacgttcaactcgggccgagatgg

SEQ ID NO: 1681 - DNA, 560 bp, Homo sapiens
  source 1..560: mol_type = unassigned DNA
taccatggactcggatttggatttcttcgactcctacagcatcactgcctgccgcatcgactgtgagacgcgctacctggtggagaactgcaactgccgcatggtgcacatgccaggtcaggcctggggctccgagcatactcctggggtccctgggcctttgctgcccttcactagctccccatccatatcaatctcccaaccccagttccagcccaccccatcccacacccacctggctcatgtctctctgacctcagttcccgcctgcacccccagggatgggtgggaagggtctagaaggtatggacctggagtgggtcacttctggggcagcatgggggcctgccagtcctcccttcccatcttctcccagcttacaccttctaggcctttggtactaccaccatcaccagaccccttgaattcccatcctgcatcattgtcttttctcctctgtaggggatgccccatactgtactccagagcagtacaaggagtgtgcagatcctgctctggacttcctggtggagaaggaccaggagtactgcgtgtgtgaa

SEQ ID NO: 1682 - DNA, 614 bp, Homo sapiens
  source 1..614: mol_type = unassigned DNA
ggagaacatcctggtgctggacattttctttgaagtcctcaactatgagaccattgaacagaagaaggcctatgagattgcagggctcctgggtgacatcgggggccagatggggctgttcatcggggccagcatcctcacggtgctggagctctttgactacgcctacgaggtcattaagcacaagctgtgccgacgaggaaaatgccagaaggaggccaaaaggagcagtgcggacaagggcgtggccctcagcctggacgacgtcaaaagacacaacccgtgcgagagccttcggggccaccctgccgggatgacatacgctgccaacatcctacctcaccatccggcccgaggcacgttcgaggactttacctgctgagccccgcaggccgctgaaccaaaggcctagatggggaggactaggagagcgagggggcccccagctgcctcctcacatctgccctggggactccccacactccggggcagatctttcctcttgtctgtgagttggactctctcccctggtgtctgtactgtgtacacacatccctctgagaagcacaaggagacgacacgcgcattgtaacctttgcactgtctcagtggcg

SEQ ID NO: 1683 - DNA, 3443 bp, Homo sapiens
  source 1..3443: mol_type = unassigned DNA
cacctgggagagccgaggcgagaagcgacacttccctgcggctagcatccttgaaggaccccggcggcgaacagcctcccgcaggacgccctgagaagctctcagccccaggcgagagcgggcgcctggcaggacttaggcgcaggacttggggaagcctaagcaggtctctgccgagcgcagcccagggagcagtaacaaggaagggtcctggaggggaagggaaagaaggcggcagccggcaaggcgaccactcacccccgtacacacccaccccgcccgcccagccaggagccgcggtgcgcctctgggggcgctcgttccttggcgccttctctcccgtgtcccagcaccgctgggctacgggccgggctggtggggtccctggggatgtccagatcaggcatggtggccgagtggcccttctcccaggaccagcgtaaaagctggggttaggcggggcaggggggactcggctcagggtcccccgaggtccaggacgagggaaggcgggcgcagcacccagggactggagaggcggctcccagtgggacccctccagaagtagtgccgggcgccgggcatcctccaggaagaccaggggccgggaaagcctgggaggcgctcgggagaggccactgccaggggctgcgggctgaggcggcgctcagccccgggcgggcgcccgcggaggcggcagcggcggcgccgggcgggcatgccgcgccaccggagctcctttcgggcgcacgcttccctggcgcgggctgcgcgcggctgccgctgctgctgcttccactgctgctgcggactcccatggcggctccgcccggccggggccgccgccgctgccgccagccgcgggctgaatgaatgagccggattggcggagccgggctgcccgcagccgcgctcaccggcccgggacgcttccgcatggcccgcgaggagccggcgcccgcggcgttggcggctgccgggcagcccgggggcggcagaggcggcgagcgggcgctgcaggggccaggggtcgcccgcagggggcggccatcgctgagccgcgctaaactgcacgggctgcggcacatgtgtgccgggcgcacggcggctgggggctccttccagcggcgggcgctgtgggtgctggccttctgtacatccttcggcttgctgctgtcctggtcctcgaaccgcttgctctactggctcagcttcccgtcacacacgcgggtgcaccgcgagtggagccgccagttacccttccccgccgtcactgtgtgcaacaacaacccgctgcgcttcccgcgcctctccaagggggacctctactatgccggccactggctcgggctgctgctgcccaaccgcaccgcgcgcccgcttgtcagcgagctgctgcggggcgacgagccgcgccgccagtggttccgcaagctggcggacttccgcctcttcctgcctccgcgccacttcgagggaatcagcgccgccttcatggaccgcctgggccaccagctggaggacatgctgctctcctgcaagtaccgcggcgagctctgcgggccgcacaacttctcctccgtgtttacaaaatatgggaagtgttacatgtttaactcaggcgaggatggcaaacctctgctcaccacggtcaagggggggacaggcaacgggctggagatcatgctggacattcagcaggatgagtacctgcccatctggggagagacagaggaaacgacatttgaagcaggagtgaaagttcagatccacagtcagtctgagccacctttcatccaagagctgggctttggggtggctccagggttccagacctttgtggccacacaggagcagaggctcacatacctgcccccaccgtggggtgagtgccgatcctcagagatgggcctcgacttttttcctgtttacagcatcaccgcctgtaggattgactgtgagacccgctacattgtggaaaactgcaactgccgcatggttcacatgccaggggatgcccctttttgtacccctgagcagcacaaggagtgtgcagagcctgccctaggtctgttggcggaaaaggacagcaattactgtctctgcaggacaccctgcaacctaacccgctacaacaaagagctctccatggtgaagatccccagcaagacatcagccaagtaccttgagaagaaatttaacaaatcagaaaaatatatctcagagaacatccttgttctggatatattttttgaagctctcaattatgagacaattgaacagaagaaggcgtatgaagttgctgccttacttggtgatattggtggtcagatgggattgttcattggtgctagtatccttacaatactagagctctttgattatatttatgagctgatcaaagagaagctattagacctgcttggcaaagaggaggacgaagggagccacgatgagaatgtgagtacttgtgacacaatgccaaaccactctgaaaccatcagtcacactgtgaacgtgcccctgcagacgaccctggggaccttggaggagattgcctgctgacacccctcgagtcacccagcactccctccaaacagaccttgaggcccaagacccaggacaaggaacagcaagctcaggtgggatggccccagtgctggaaagaagcaagagccccctatgcacacattgcagactagctgcctagacctcgctccggccacgtccaacacgacgcatccttgggccccgccgtgcgtccctcttaggagagatgagtcacactctggaactgtccaagaacgaacctgccatcacatctcactgccagatgtataaagcacctgcatgctcagacttcttgtggcgccacctccacgtctgtcttgtacatgacactcctccacgcggtttccagtgtccacactgctgcccgtgcagtgggaccagattccaggtccaaagtcaccatgaggccaccctggaatcagaactgcacaatcaagagggaacccatgggactctctgctacattcagttcttgtgtcgtttgtgaaagttcttaacctgcccaaaaacccccttttccccaagctgcccatggggcttcggcgccaaaggtgacccgcgccaacctccctcccccccagtgcctatgacggcggcacagcagccagcgggtgggggacgcctgtgttcacccatggtgcccatgtcgttcttctctccctgtgacacagcttgtacagtctgattctttttatctggggtaggggggcttttatgtttgtccgatggagatttgttttgttttgcttcattttatgcttttttattttagttttgatgttctgaggtttgctttggtttttccattttctttggcatttatttattcgtgcttcaaatcacagtcatattaaaagctggtcttgtggaaa

SEQ ID NO: 1684 - DNA, 3179 bp, Homo sapiens
  source 1..3179: mol_type = unassigned DNA
ttttttcccaggaggcgaggagagaatggatcccggtctgagctccccgcttccgtccccagtctccagataccggtcctcgcctctccgcgccgcgcgctgcctcctctccccggtgctagcagcggccgctggcatttggaattctgcccacaaaagggggcctggaggaggaggagaggagggacggaggccggcggcgagaaacggcattcggagtccaaaacatcatgggaaaaggaaccgagcggcggcggctctgaaggctgtgccgctgcgcccgaccgcagtgcatcagcgtggccgccctgacatcccccaggatggttaacatggggcattatgcgctggttaacaggctccgagctgctcagcgacttgttttaagcattttctctctcgctctcgcttttaatcttgtctctagtggcgtgtgtaggggggaggactttatttccattggctaagctctcccttcccacccacatctcttccacatcaccttggtgtctccctaaataaaaccagccctccttatcgcctggaaaaaatcaagagctagagtttgaatgggttttatataaacactcacccctgtcagcgtgcggctgggctctcaggataaactcacagcatctggcgcgatgcttgccttgcgttctctcccctgaacgtcaaggtttaagcagagcccgaggactgggagctcttctctgaaattcgatcaacctgaagccagttgcggaactgcacggggtcccgatggacctcaaggaaagccccagtgagggcagcctgcaaccttctagcatccagatctttgccaacacctccaccctccatggcatccgccacatcttcgtgtatgggccgctgaccatccggcgtgtgctgtgggcagtggccttcgtgggctctctgggcctgctgctggtggagagctctgagagggtgtcctactacttctcctaccagcatgtcactaaggtggacgaagtggtggctcaaagcctggtcttcccagctgtgaccctctgtaacctgaatggcttccggttctccaggctcaccaccaatgacctgtaccatgctggggagctgctggccctgctggatgtcaacctgcagatcccggacccccatctggctgacccctccgtgctggaggccctgcggcagaaggccaacttcaagcactacaaacccaagcagttcagcatgctggagttcctgcaccgtgtgggccatgacctgaaggatatgatgctctactgcaagttcaaagggcaggagtgcggccaccaagacttcaccacagtgtttacaaaatatgggaagtgttacatgtttaactcaggcgaggatggcaaacctctgctcaccacggtcaagggggggacaggcaacgggctggagatcatgctggacattcagcaggatgagtacctgcccatctggggagagacagaggaaacgacatttgaagcaggagtgaaagttcagatccacagtcagtctgagccacctttcatccaagagctgggctttggggtggctccagggttccagacctttgtggccacacaggagcagaggctcacatacctgcccccaccgtggggtgagtgccgatcctcagagatgggcctcgacttttttcctgtttacagcatcaccgcctgtaggattgactgtgagacccgctacattgtggaaaactgcaactgccgcatggttcacatgccaggggatgcccctttttgtacccctgagcagcacaaggagtgtgcagagcctgccctaggtctgttggcggaaaaggacagcaattactgtctctgcaggacaccctgcaacctaacccgctacaacaaagagctctccatggtgaagatccccagcaagacatcagccaagtaccttgagaagaaatttaacaaatcagaaaaatatatctcagagaacatccttgttctggatatattttttgaagctctcaattatgagacaattgaacagaagaaggcgtatgaagttgctgccttacttggtgatattggtggtcagatgggattgttcattggtgctagtatccttacaatactagagctctttgattatatttatgagctgatcaaagagaagctattagacctgcttggcaaagaggaggacgaagggagccacgatgagaatgtgagtacttgtgacacaatgccaaaccactctgaaaccatcagtcacactgtgaacgtgcccctgcagacgaccctggggaccttggaggagattgcctgctgacacccctcgagtcacccagcactccctccaaacagaccttgaggcccaagacccaggacaaggaacagcaagctcaggtgggatggccccagtgctggaaagaagcaagagccccctatgcacacattgcagactagctgcctagacctcgctccggccacgtccaacacgacgcatccttgggccccgccgtgcgtccctcttaggagagatgagtcacactctggaactgtccaagaacgaacctgccatcacatctcactgccagatgtataaagcacctgcatgctcagacttcttgtggcgccacctccacgtctgtcttgtacatgacactcctccacgcggtttccagtgtccacactgctgcccgtgcagtgggaccagattccaggtccaaagtcaccatgaggccaccctggaatcagaactgcacaatcaagagggaacccatgggactctctgctacattcagttcttgtgtcgtttgtgaaagttcttaacctgcccaaaaacccccttttccccaagctgcccatggggcttcggcgccaaaggtgacccgcgccaacctccctcccccccagtgcctatgacggcggcacagcagccagcgggtgggggacgcctgtgttcacccatggtgcccatgtcgttcttctctccctgtgacacagcttgtacagtctgattctttttatctggggtaggggggcttttatgtttgtccgatggagatttgttttgttttgcttcattttatgcttttttattttagttttgatgttctgaggtttgctttggtttttccattttctttggcatttatttattcgtgcttcaaatcacagtcatattaaaagctggtcttgtggaaa

SEQ ID NO: 1685 - DNA, 750 bp, Homo sapiens
  source 1..750: mol_type = unassigned DNA
cggcgagctctgcgggccgcacaacttctcctccgagtcttgagcatccagcggaactgagcagtggtgcgccagggttgggcccttcacctggcctccgtcccccataaaatgtgtttacaaaatatgggaagtgttacatgtttaactcaggcgaggatggcaaacctctgctcaccacggtcaagggggggacaggcaacgggctggagatcatgctggacattcagcaggatgagtacctgcccatctggggagagacagaggaaacgacatttgaagcaggagtgaaagttcagatccacagtcagtctgagccacctttcatccaagagctgggctttggggtggctccagggttccagacctttgtggccacacaggagcagaggctcacatacctgcccccaccgtggggtgagtgccgatcctcagagatgggcctcgacttttttcctgtttacagcatcaccgcctgtaggattgactgtgagacccgctacattgtggaaaactgcaactgccgcatggttcacatgccaggggatgcccctttttgtacccctgagcagcacaaggagtgtgcagagcctgccctaggtctgttggcggaaaaggacagcaattactgtctctgcaggacaccctgcaacctaacccgctacaacaaagagctctccatggtgaagatccccagcaagacatcagccaagtaccttgagaagaaatttaacaaatcagaaaaatata

SEQ ID NO: 1686 - DNA, 559 bp, Homo sapiens
  source 1..559: mol_type = unassigned DNA
agtcagcctccttcttcccgacctcaactccaggccctcaggactccaagaaactgctctgtgtttggagtgtagatctcttaagtgcggacttcttgtctttgggaaaaccaatagacggctcttaaaaaaaaaaaaaaaaaaaaggaagcgcttgaaaaatggatcatcaggggaatcacgcagagtccctaagcaggcctacgatccgaagcagcttatgtcttcaaagttcccaaacacttagaatctaggagaacttgtgaggaaactcccagaaaaccaacactgaagctgtagacagtttggtgggagaggcagcagcatgctttggctactttttcaaaatgcaggagtcttgagcatccagcggaactgagcagtggtgcgccagggttgggcccttcacctggcctccgtcccccataaaatgtgtttacaaaatatgggaagtgttacatgtttaactcaggcgaggatggcaaacctctgctcaccacggtcaagggggggacaggcaacgggctggagatcatgctggacattcagcaggatgagt

SEQ ID NO: 1687 - DNA, 508 bp, Homo sapiens
  source 1..508: mol_type = unassigned DNA
cattcatgccctactcctagcatgtgtttggtgcacagcgagcactatagtaactattgatgttgttaacacattatttccttcctattatccttaagagggagttcttaccttctcatcccatctctttagttttcttaatataactctaaattaaaataaaactcttcactttgttaggaagaggaccatgacttgcttaggcccgactaacatttgcactcaccattttgttacacagatggcaaaccaggaaaacagagctcagtacagaagggagttgggcagcctctgttcctgtttggctctgtccttgaagaaagtgataagaagtgcacagattttggaattaaacagaccatggtttgaagtctggatcttccagttgtaaccaggtggcattgggaggcgaggagagaatggatcccggtctgagctccccgcttccgtccccagtctccagataccggtcctcgcctctccgcgccgcgcgctgcctcctctcccc

SEQ ID NO: 1688 - DNA, 3340 bp, Homo sapiens
  source 1..3340: mol_type = unassigned DNA
acccagtgagcggctagggtgcagcaggagtttgggggatagccccagtcttgggatctctgtcctgggctggggactgccccctcccctggcctggctcctgacgcccgtgctgccggtgaaacgctgttgacatgtcctgaattattaagcgtggggagggctccggagcacatgctgagcggagcggctggggctgcgcggcgtggcggagcagcgctcgctccctcgctcactcgctcgctcgcagggacacacgcaggggctgacagctgtgctggtgctgataagggaagccacaaggagacgatcgaggagagagacaagcggcagcagaggcagcagcggcagaggcagcaccagggctgcggagctgctgggagtgggagtgactcccccacctcgggcccccaccctgtccctgtcctcttcccgcttgccctgagtttagaagagcagccgctgccaccactgccactcgggagggcaccagggctgctggctagggagggacagggcagggaggctctggccagtcccagcagccggggacagatgccgatcgagattgtgtgcaaaatcaaatttgctgaggaggatgcgaaacccaaggagaaggaggcaggggatgagcagagcctcctcggggctgttgcccctggagcagccccccgagacctggccacctttgccagcaccagcaccctgcatggactgggccgggcctgtggcccaggcccccacggactgcgcagaaccctgtgggcactggccctactcacctcgctggctgccttcctgtaccaggcggctggcctggcccggggctacctgacccggcctcacctggtggcaatggaccccgctgccccagccccagtggcgggcttcccggctgtcaccctctgcaatatcaaccgcttccggcattcggcactcagcgatgccgacatcttccacctggccaatctgacagggctgccccccaaagaccgggatgggcaccgtgcggctggcctgcgctacccagagcctgacatggtagacatcctcaaccgcactggccaccagctcgccgacatgcttaagagctgcaacttcagtgggcatcactgctccgccagcaacttctctgtggtctatactcgctatgggaagtgttacaccttcaacgcggacccgcggagctcgctgcccagccgggcagggggcatgggcagtggcctggagatcatgctggacatccagcaggaggagtacctgcccatctggagggagacaaatgagacgtcgtttgaggcaggtattcgggtgcagatccacagccaggaggagccgccctacatccaccagctggggttcggggtgtccccaggcttccagacctttgtgtcctgccaggaacagcgggtgagcatctcctgctaggccctggattgggcacagggctcgcctttgggctcagaggggatgtggagcaaacctgccctctagaagctcagagcctgccagctgtgttgactttgctggggctgtgggcactggaggactgggtgggattcctgagcatgacctcatcatgccccacctctgcagctgacctacctgccccagccctggggcaactgccgcgcagagagtgagctcagggagcctgagcttcagggctactcggcctacagtgtgtctgcctgccggctgcgctgtgaaaaggaggccgtgcttcagcgctgccactgccggatggtgcacatgccaggtgggcaccccacccccagccagccctccatgccaccctgctaggctccagagcctcccggggcaaggcactgctcatgtgcacaggcaggtgcatgtatacaacatgtgtatgtgtctgtacccgtgtgagtgtgagtgtttgggatttttaaacatggtttcacatatgcatgtgggaatgccggcatgcagatgcctgtgtgcatgttaatatgtatttgtgtacgtgcatgctcatttatatccgtggttgcgtatttgtgggggttgtgtgtgtggtgttcaagcacatttatgcaaatgtgtgcatatgtgtgtgcatgcatgtatgtgcttacatttgggcgtgtgggggacaggggaagtgatcgtagattccaggaataatcttctctcctttcaggcaatgagaccatctgcccaccaaatatctacatcgagtgtgcagaccacacactgggtccgtgctgcctaccctttcctacctctccatcagcctcttcatgtctctgtccactcttctcctcactgtcttggatcctcccctcccaatctcttcctggagggttcttcctgggggttgagccttagcccatacttcagtggggttggggagaggtctgcggacctctgcaggtacagacacttgggtaagtggaggcagcagggtggggggttgcagagaagccaggactgggagtgaaggtctgggcttctcatcttggttcagccaatgagctcacccactttgagaaagtgaaatgacttctctcttggtctcaggaaaaatgcattgctggctatcggtgtgggtaaggcaaaccccatctgtccacagatcttgcctgatctgcagttcatccatctatccatccattcatcgattcgcgcattctccagacctttacagcctgtgctgggtactggaggtgagagtgggggcgacagccctgcccttggagagcttacaccccggcagggctgtggacagccattcccacacagcccgtcaactcctggagaggggagcctcgggtgtgctgcaaggccccaaggaggggtgtgcagccctagcctgggaaggtagggaggattcctagaggaagggacacattagctgaggcttgatgggtgtataagagtcaggtgcaaagggggacatacactgaagacctgtggccagaaagagcatgctgtgtccggggcactgaaaggtctgtgtggctgcagggcagagaacaggggagggagtagaaagagtagaggagggaggccaggcacggtggctcacaagtgtagacccagcactttgggaggccagggtctgtggatcacttgagcccagtagttcaagaccagcctgggcaacatggtgagaccctgtctctgcaaaaaataaaaaagtgaactgggtgtggtggtgcacatctatagtcccacctattcgggaggctgaggcaagaggataggcttgagcctgggaggttgaggctgcggtgagctgggatcacaccattgcactctagtctgagctacagagttaccctgtctcaaaaaaaaaaaaaaaaaaaaaaaaaaa

SEQ ID NO: 1689 - DNA, 2684 bp, Homo sapiens
  source 1..2684: mol_type = unassigned DNA
gggctccggagcacatgctgagcggagcggctggggctgcgcggcgtggcggagcagcgctcgctccctcgctcactcgctcgctcgcagggacacacgcaggggctgacagctgtgctggtgctgataagggaagccacaaggagacgatcgaggagagagacaagcggcagcagaggcagcagcggcagaggcagcaccagggctgcggagctgctgggagtgggagtgactcccccacctcgggcccccaccctgtccctgtcctcttcccgcttgccctgagtttagaagagcagccgctgccaccactgccactcgggagggcaccagggctgctggctagggagggacagggcagggaggctctggccagtcccagcagccggggacagatgccgatcgagattgtgtgcaaaatcaaatttgctgaggaggatgcgaaacccaaggagaaggaggcaggggatgagcagagcctcctcggggctgttgcccctggagcagccccccgagacctggccacctttgccagcaccagcaccctgcatggactgggccgggcctgtggcccaggcccccacggactgcgcagaaccctgtgggcactggccctactcacctcgctggctgccttcctgtaccaggcggctggcctggcccggggctacctgacccggcctcacctggtggcaatggaccccgctgccccagccccagtggcgggcttcccggctgtcaccctctgcaatatcaaccgcttccggcattcggcactcagcgatgccgacatcttccacctggccaatctgacagggctgccccccaaagaccgggatgggcaccgtgcggctggcctgcgctacccagagcctgacatggtagacatcctcaaccgcactggccaccagctcgccgacatgcttaagagctgcaacttcagtgggcatcactgctccgccagcaacttctctgtggtctatactcgctatgggaagtgttacaccttcaacgcggacccgcggagctcgctgcccagccgggcagggggcatgggcagtggcctggagatcatgctggacatccagcaggaggagtacctgcccatctggagggagacaaatgagacgtcgtttgaggcaggtattcgggtgcagatccacagccaggaggagccgccctacatccaccagctggggttcggggtgtccccaggcttccagacctttgtgtcctgccaggaacagcggctgacctacctgccccagccctggggcaactgccgcgcagagagtgagctcagggagcctgagcttcagggctactcggcctacagtgtgtctgcctgccggctgcgctgtgaaaaggaggccgtgcttcagcgctgccactgccggatggtgcacatgccagactccctgggtgggggccctgagggcccgtgcttctgccccaccccctgcaacctgacacgctatgggaaagagatctccatggtcaggatccccaacaggggctcagcccggtacctggcgaggaagtacaaccgcaacgagacctacatacgggagaacttcctggtcctagatgtcttctttgaggccctgacctctgaagccatggagcagcgagcagcctatggcctgtcagccctgctgggagacctcgggggacagatgggcctgttcattggggccagcatcctcacgttgctggagatcctcgactacatctatgaggtgtcctgggatcgactgaagcgggtatggaggcgtcccaagacccccctgcggacctccactgggggcatctccactttggggcttcaggagctgaaggaacagagtccctgcccgagccggggccgagtggagggtgggggggtcagcagtctgctccccaatcaccaccacccccacggtcccccaggaggtctctttgaagattttgcttgctaggacggtgctgtgactgaaaggacccaggagtctgggacccctcctgggatccccagcacattctcctgctcctgggagaggcctgggggcggtgctcactgggagggccaggactcagttcctgctctcatcctcccctgccctgatgtcagctgctttgcacaaaggtccttcttgtccacaccccttatccccaggctggtgccccgggagggctggagaccaggccatgggccctcacggagaggaagggaaggaaggagagggagggggaggatagagcccatcccagccggggagggggagccctctgtacatttgtaaatatttagggaaagccgggtggggggaggggatacagatgtagaaggtgggtagggctacaggggtgggtgatttagggacagccagggtcccagccccaatgtcagcaggatagggagagccccaggactcaggagtgctgggctggtcctacttcctgcccctctccaggcccagctcccctcttggcagggggagaggatggcccagcaggcctggcccagctcccagttccccctgcaccagccccacccctagagtcccttctatagggagggggcaggagaccttccagacttcggctgagcttggagggtgggaagggagccttctcagtcctctctccctccagtctgattttataaagtgctgacgagattgggaataaagaggcataaagaa

SEQ ID NO: 1690 - DNA, 2741 bp, Homo sapiens
  source 1..2741: mol_type = unassigned DNA
gggctccggagcacatgctgagcggagcggctggggctgcgcggcgtggcggagcagcgctcgctccctcgctcactcgctcgctcgcagggacacacgcaggggctgacagctgtgctggtgctgataagggaagccacaaggagacgatcgaggagagagacaagcggcagcagaggcagcagcggcagaggcagcaccagggctgcggagctgctgggagtgggagtgactcccccacctcgggcccccaccctgtccctgtcctcttcccgcttgccctgagtttagaagagcagccgctgccaccactgccactcgggagggcaccagggctgctggctagggagggacagggcagggaggctctggccagtcccagcagccggggacagatgccgatcgagattgtgtgcaaaatcaaatttgctgaggaggatgcgaaacccaaggagaaggaggcaggggatgagcagagcctcctcggggctgttgcccctggagcagccccccgagacctggccacctttgccagcaccagcaccctgcatggactgggccgggcctgtggcccaggcccccacggactgcgcagaaccctgtgggcactggccctactcacctcgctggctgccttcctgtaccaggcggctggcctggcccggggctacctgacccggcctcacctggtggcaatggaccccgctgccccagccccagtggcgggcttcccggctgtcaccctctgcaatatcaaccgcttccggcattcggcactcagcgatgccgacatcttccacctggccaatctgacagggctgccccccaaagaccgggatgggcaccgtgcggctggcctgcgctacccagagcctgacatggtagacatcctcaaccgcactggccaccagctcgccgacatgcttaagagctgcaacttcagtgggcatcactgctccgccagcaacttctctgtggtctatactcgctatgggaagtgttacaccttcaacgcggacccgcggagctcgctgcccagccgggcagggggcatgggcagtggcctggagatcatgctggacatccagcaggaggagtacctgcccatctggagggagacaaatgagacgtcgtttgaggcaggtattcgggtgcagatccacagccaggaggagccgccctacatccaccagctggggttcggggtgtccccaggcttccagacctttgtgtcctgccaggaacagcggctgacctacctgccccagccctggggcaactgccgcgcagagagtgagctcagggagcctgagcttcagggctactcggcctacagtgtgtctgcctgccggctgcgctgtgaaaaggaggccgtgcttcagcgctgccactgccggatggtgcacatgccaggcaatgagaccatctgcccaccaaatatctacatcgagtgtgcagaccacacactggactccctgggtgggggccctgagggcccgtgcttctgccccaccccctgcaacctgacacgctatgggaaagagatctccatggtcaggatccccaacaggggctcagcccggtacctggcgaggaagtacaaccgcaacgagacctacatacgggagaacttcctggtcctagatgtcttctttgaggccctgacctctgaagccatggagcagcgagcagcctatggcctgtcagccctgctgggagacctcgggggacagatgggcctgttcattggggccagcatcctcacgttgctggagatcctcgactacatctatgaggtgtcctgggatcgactgaagcgggtatggaggcgtcccaagacccccctgcggacctccactgggggcatctccactttggggcttcaggagctgaaggaacagagtccctgcccgagccggggccgagtggagggtgggggggtcagcagtctgctccccaatcaccaccacccccacggtcccccaggaggtctctttgaagattttgcttgctaggacggtgctgtgactgaaaggacccaggagtctgggacccctcctgggatccccagcacattctcctgctcctgggagaggcctgggggcggtgctcactgggagggccaggactcagttcctgctctcatcctcccctgccctgatgtcagctgctttgcacaaaggtccttcttgtccacaccccttatccccaggctggtgccccgggagggctggagaccaggccatgggccctcacggagaggaagggaaggaaggagagggagggggaggatagagcccatcccagccggggagggggagccctctgtacatttgtaaatatttagggaaagccgggtggggggaggggatacagatgtagaaggtgggtagggctacaggggtgggtgatttagggacagccagggtcccagccccaatgtcagcaggatagggagagccccaggactcaggagtgctgggctggtcctacttcctgcccctctccaggcccagctcccctcttggcagggggagaggatggcccagcaggcctggcccagctcccagttccccctgcaccagccccacccctagagtcccttctatagggagggggcaggagaccttccagacttcggctgagcttggagggtgggaagggagccttctcagtcctctctccctccagtctgattttataaagtgctgacgagattgggaataaagaggcataaagaa

SEQ ID NO: 1691 - DNA, 2403 bp, Homo sapiens
  source 1..2403: mol_type = unassigned DNA
gtgagaggaaaggagaggaagagctggagggggtgaggaagtaaggggagggaggcagagggttctgcttggtctccaggctaggaggcggtgcctggaggatacaggaacggggatcctctgatcaaggctggtctatactcgctatgggaagtgttacaccttcaacgcggacccgcggagctcgctgcccagccgggcagggggcatgggcagtggcctggagatcatgctggacatccagcaggaggagtacctgcccatctggagggagacaaatgagacgtcgtttgaggcaggtattcgggtgcagatccacagccaggaggagccgccctacatccaccagctggggttcggggtgtccccaggcttccagacctttgtgtcctgccaggaacagcggctgacctacctgccccagccctggggcaactgccgcgcagagagtgagctcagggagcctgagcttcagggctactcggcctacagtgtgtctgcctgccggctgcgctgtgaaaaggaggccgtgcttcagcgctgccactgccggatggtgcacatgccaggcaatgagaccatctgcccaccaaatatctacatcgagtgtgcagaccacacactggactccctgggtgggggccctgagggcccgtgcttctgccccaccccctgcaacctgacacgctatgggaaagagatctccatggtcaggatccccaacaggggctcagcccggtacctggcgaggaagtacaaccgcaacgagacctacatacgggagaacttcctggtcctagatgtcttctttgaggccctgacctctgaagccatggagcagcgagcagcctatggcctgtcagccctgctgggagacctcgggggacagatgggcctgttcattggggccagcatcctcacgttgctggagatcctcgactacatctatgaggcaagggccctggagaaggcagggtgggagtgggggccgtgggcaaagcagaagggggcagtgcggggtgcctggtggagctggcctggctggaaagtcaggttcagggttctctgccagggtcccctgactggctggcaggcctgagggctcagagtcaggagaaggggatgggtgaggaggaggagggtgtcctactgggagtttgctgtggcagtaagtcctgtgggcagctgggcatggtaaggctcacgcttctcctcaaccaaatttcctgagcccactgctgtccccgaccctgaaccccaaggtgtcctgggatcgactgaagcgggtatggaggcgtcccaagacccccctgcggacctccactgggggcatctccactttggggcttcaggagctgaaggaacaggtgaggacaagctctaaatgcctgcagcatgcagccacacctccccaggactgaatacatccattgtttctgaaccagcctgtggagggggccctggagcctctgcccgaggtgacaaggaaaggctggcggtgtgagccctgggggcaccacttgagctctcccggtcccactctctcttttctttctcctgcagagtccctgcccgagccggggccgagtggagggtgggggggtcagcagtctgctccccaatcaccaccacccccacggtcccccaggaggtctctttgaagattttgcttgctaggacggtgctgtgactgaaaggacccaggagtctgggacccctcctgggatccccagcacattctcctgctcctgggagaggcctgggggcggtgctcactgggagggccaggactcagttcctgctctcatcctcccctgccctgatgtcagctgctttgcacaaaggtccttcttgtccacaccccttatccccaggctggtgccccgggagggctggagaccaggccatgggccctcacggagaggaagggaaggaaggagagggagggggaggatagagcccatcccagccggggagggggagccctctgtacatttgtaaatatttagggaaagccgggtggggggaggggatacagatgtagaaggtgggtagggctacaggggtgggtgatttagggacagccagggtcccagccccaatgtcagcaggatagggagagccccaggactcaggagtgctgggctggtcctacttcctgcccctctccaggcccagctcccctcttggcagggggagaggatggcccagcaggcctggcccagctcccagttccccctgcaccagccccacccctagagtcccttctatagggagggggcaggagaccttccagacttcggctgagcttggagggtgggaagggagccttctcagtcctctctccctccagtctgattttataaagtgctgacgagattgggaataaagaggcataaagaa

SEQ ID NO: 1692 - DNA, 613 bp, Homo sapiens
  source 1..613: mol_type = unassigned DNA
aggaacggggatcctctgatcaaggctggtctatactcgctatgggaagtgttacaccttcaacgcggacccgcggagctcgctgcccagccgggcagggggcatgggcagtggcctggagatcatgctggacatccagcaggaggagtacctgcccatctggagggagacaaatgagacgtcgtttgaggcaggtattcgggtgcagatccacagccaggaggagccgccctacatccaccagctggggttcggggtgtccccaggcttccagacctttgtgtcctgccaggaacagcggctgacctacctgccccagccctggggcaactgccgcgcagagagtgagctcagggagcctgagcttcagggctactcggcctacagtgtgtctgcctgccggctgcgctgtgaaaaggaggccgtgcttcagcgctgccactgccggatggtgcacatgccaggcaatgagaccatctgcccaccaaatatctacatcgagtgtgcagaccacacactgggtccgtgctgcctaccctttcctacctctccatcagcctcttcatgtctctgtccactcttctcctcactgtcttggatcctcccctcccaa

SEQ ID NO: 1693 - DNA, 2289 bp, Homo sapiens
  source 1..2289: mol_type = unassigned DNA
tttctgtcctggttccctgaagcatcgagagggaaccgcggccggcaggccggaccgctccggagaggaggcagcggcagtttgagcccctgtaaatgttatatgtgtacttttttttactatgtggcgtcgaagcctgtggacattttcgcggtccgggtccctgcggcggacgggtcggatcgtgctcgtggccagggcgcagtcaggtgtcgcgtggtcctgatctaggaagagactgcggccttatcaccgtctcggtgtctgctttcaccttcaactgcccccctcctcacctggaccgctcaccctcctcctcccctctcaccccgccatccccaccagtccccacctgtctctgtagactgcaagactcatcaagtgacttgctgagcaaaccctgccgagaagagattttcttcaatcacatctgaataaatcacttgaagaaagcttatagcttcattgcaccatgtgtggcatttgggcgctgtttggcagtgatgattgcctttctgttcagtgtctgagtgctatgaagattgcacacagaggtccagatgcattccgttttgagaatgtcaatggatacaccaactgctgctttggatttcaccggttggcggtagttgacccgctgtttggaatgcagccaattcgagtgaagaaatatccgtatttgtggctctgttacaatggtgaaatctacaaccataagaagatgcaacagcattttgaatttgaataccagaccaaagtggatggtgagataatccttcatctttatgacaaaggaggaattgagcaaacaatttgtatgttggatggtgtgtttgcatttgttttactggatactgccaataagaaagtgttcctgggtagagatacatatggagtcagacctttgtttaaagcaatgacagaagatggatttttggctgtatgttcagaagctaaaggtcttgttacattgaagcactccgcgactccctttttaaaagtggagccttttcttcctggacactatgaagttttggatttaaagccaaatggcaaagttgcatccgtggaaatggttaaatatcatcactgtcgggatgtacccctgcacgccctctatgacaatgtggagaaactctttccaggttttgagatagaaactgtgaagaacaacctcaggatcctttttaataatgctgtaaagaaacgtttgatgacagacagaaggattggctgccttttatcagggggcttggactccagcttggttgctgccactctgttgaagcagctgaaagaagcccaagtacagtatcctctccagacatttgcaattggcatggaagacagccccgatttactggctgctagaaaggtggcagatcatattggaagtgaacattatgaagtcctttttaactctgaggaaggcattcaggctctggatgaagtcatattttccttggaaacttatgacattacaacagttcgtgcttcagtaggtatgtatttaatttccaagtatattcggaagaacacagatagcgtggtgatcttctctggagaaggatcagatgaacttacgcagggttacatatattttcacaaggctccttctcctgaaaaagccgaggaggagagtgagaggcttctgagggaactctatttgtttgatgttctccgcgcagatcgaactactgctgcccatggtcttgaactgagagtcccatttctagatcatcgattttcttcctattacttgtctctgccaccagaaatgagaattccaaagaatgggatagaaaaacatctcctgagagagacgtttgaggattccaatctgatacccaaagagattctctggcgaccaaaagaagccttcagtgatggaataacttcagttaagaattcctggtttaagattttacaggaatacgttgaacatcaggttgatgatgcaatgatggcaaatgcagcccagaaatttcccttcaatactcctaaaaccaaagaaggatattactaccgtcaagtctttgaacgccattacccaggccgggctgactggctgagccattactggatgcccaagtggatcaatgccactgacccttctgcccgcacgctgacccactacaagtcagctgtcaaagcttaggtggtctttatgctgtaatgtgaaagcaaatatttcttcgtgttggatggggactgtgggtagataggggaacaatgagagtcaactcaggctaacttgggtgtgaaaaaaataaaagtcctaaatctaaa

SEQ ID NO: 1694 - DNA, 1947 bp, Homo sapiens
  source 1..1947: mol_type = unassigned DNA
attttcttcaatcacatctgaataaatcacttgaagaaagcttatagcttcattgcaccatgtgtggcatttgggcgctgtttggcagtgatgattgcctttctgttcagtgtctgagtgctatgaagattgcacacagaggtccagatgcattccgttttgagaatgtcaatggatacaccaactgctgctttggatttcaccggttggcggtagttgacccgctgtttggaatgcagccaattcgagtgaagaaatatccgtatttgtggctctgttacaatggtgaaatctacaaccataagaagatgcaacagcattttgaatttgaataccagaccaaagtggatggtgagataatccttcatctttatgacaaaggaggaattgagcaaacaatttgtatgttggatggtgtgtttgcatttgttttactggatactgccaataagaaagtgttcctgggtagagatacatatggagtcagacctttgtttaaagcaatgacagaagatggatttttggctgtatgttcagaagctaaaggtcttgttacattgaagcactccgcgactccctttttaaaagtggagccttttcttcctggacactatgaagttttggatttaaagccaaatggcaaagttgcatccgtggaaatggttaaatatcatcactgtcgggatgtacccctgcacgccctctatgacaatgtggagaaactctttccaggttttgagatagaaactgtgaagaacaacctcaggatcctttttaataatgctgtaaagaaacgtttgatgacagacagaaggattggctgccttttatcagggggcttggactccagcttggttgctgccactctgttgaagcagctgaaagaagcccaagtacagtatcctctccagacatttgcaattggcatggaagacagccccgatttactggctgctagaaaggtggcagatcatattggaagtgaacattatgaagtcctttttaactctgaggaaggcattcaggctctggatgaagtcatattttccttggaaacttatgacattacaacagttcgtgcttcagtaggtatgtatttaatttccaagtatattcggaagaacacagatagcgtggtgatcttctctggagaaggatcagatgaacttacgcagggttacatatattttcacaaggattggagagggagaaagaaaaactgctttgtgtgccaaaagcaaaactcttggtgtttttgtttgtgaaataggctccttctcctgaaaaagccgaggaggagagtgagaggcttctgagggaactctatttgtttgatgttctccgcgcagatcgaactactgctgcccatggtcttgaactgagagtcccatttctagatcatcgattttcttcctattacttgtctctgccaccagaaatgagaattccaaagaatgggatagaaaaacatctcctgagagagacgtttgaggattccaatctgatacccaaagagattctctggcgaccaaaagaagccttcagtgatggaataacttcagttaagaattcctggtttaagattttacaggaatacgttgaacatcaggttgatgatgcaatgatggcaaatgcagcccagaaatttcccttcaatactcctaaaaccaaagaaggatattactaccgtcaagtctttgaacgccattacccaggccgggctgactggctgagccattactggatgcccaagtggatcaatgccactgacccttctgcccgcacgctgacccactacaagtcagctgtcaaagcttaggtggtctttatgctgtaatgtgaaagcaaatatttcttcgtgttggatggggactgtgggtagataggggaacaatgagagtcaactcaggctaacttgggtgtgaaaaaaataaaagtcctaaatct

SEQ ID NO: 1695 - DNA, 1638 bp, Homo sapiens
  source 1..1638: mol_type = unassigned DNA
gaagcatcgagagggaaccgcggccggcaggccggaccgctccggagaggaggcagcggcagtttgagcccctatgcaacagcattttgaatttgaataccagaccaaagtggatggtgagataatccttcatctttatgacaaaggaggaattgagcaaacaatttgtatgttggatggtgtgtttgcatttgttttactggatactgccaataagaaagtgttcctgggtagagatacatatggagtcagacctttgtttaaagcaatgacagaagatggatttttggctgtatgttcagaagctaaaggtcttgttacattgaagcactccgcgactccctttttaaaagtggagccttttcttcctggacactatgaagttttggatttaaagccaaatggcaaagttgcatccgtggaaatggttaaatatcatcactgtcgggatgtacccctgcacgccctctatgacaatgtggagaaactctttccaggttttgagatagaaactgtgaagaacaacctcaggatcctttttaataatgctgtaaagaaacgtttgatgacagacagaaggattggctgccttttatcagggggcttggactccagcttggttgctgccactctgttgaagcagctgaaagaagcccaagtacagtatcctctccagacatttgcaattggcatggaagacagccccgatttactggctgctagaaaggtggcagatcatattggaagtgaacattatgaagtcctttttaactctgaggaaggcattcaggctctggatgaagtcatattttccttggaaacttatgacattacaacagttcgtgcttcagtaggtatgtatttaatttccaagtatattcggaagaacacagatagcgtggtgatcttctctggagaaggatcagatgaacttacgcagggttacatatattttcacaaggctccttctcctgaaaaagccgaggaggagagtgagaggcttctgagggaactctatttgtttgatgttctccgcgcagatcgaactactgctgcccatggtcttgaactgagagtcccatttctagatcatcgattttcttcctattacttgtctctgccaccagaaatgagaattccaaagaatgggatagaaaaacatctcctgagagagacgtttgaggattccaatctgatacccaaagagattctctggcgaccaaaagaagccttcagtgatggaataacttcagttaagaattcctggtttaagattttacaggaatacgttgaacatcaggttgatgatgcaatgatggcaaatgcagcccagaaatttcccttcaatactcctaaaaccaaagaaggatattactaccgtcaagtctttgaacgccattacccaggccgggctgactggctgagccattactggatgcccaagtggatcaatgccactgacccttctgcccgcacgctgacccactacaagtcagctgtcaaagcttaggtggtctttatgctgtaatgtgaaagcaaatatttcttcgtgttggatggggactgtgggtagataggggaacaatgagagtcaactcaggctaacttgggtgtgaaaaaaataaaagtcctaaatct

SEQ ID NO: 1696 - DNA, 1994 bp, Homo sapiens
  source 1..1994: mol_type = unassigned DNA
aaacttcccgcacgcgttacaggagccaggtcggtataagcgccagcggcctcgccgcccgtcaagctgtccacatccctggcctcagcccgccacatcaccctgacctgcttacgcccagattttcttcaatcacatctgaataaatcacttgaagaaagcttatagcttcattgcaccatgtgtggcatttgggcgctgtttggcagtgatgattgcctttctgttcagtgtctgagtgctatgaagattgcacacagaggtccagatgcattccgttttgagaatgtcaatggatacaccaactgctgctttggatttcaccggttggcggtagttgacccgctgtttggaatgcagccaattcgagtgaagaaatatccgtatttgtggctctgttacaatggtgaaatctacaaccataagaagatgcaacagcattttgaatttgaataccagaccaaagtggatggtgagataatccttcatctttatgacaaaggaggaattgagcaaacaatttgtatgttggatggtgtgtttgcatttgttttactggatactgccaataagaaagtgttcctgggtagagatacatatggagtcagacctttgtttaaagcaatgacagaagatggatttttggctgtatgttcagaagctaaaggtcttgttacattgaagcactccgcgactccctttttaaaagtggagccttttcttcctggacactatgaagttttggatttaaagccaaatggcaaagttgcatccgtggaaatggttaaatatcatcactgtcgggatgtacccctgcacgccctctatgacaatgtggagaaactctttccaggttttgagatagaaactgtgaagaacaacctcaggatcctttttaataatgctgtaaagaaacgtttgatgacagacagaaggattggctgccttttatcagggggcttggactccagcttggttgctgccactctgttgaagcagctgaaagaagcccaagtacagtatcctctccagacatttgcaattggcatggaagacagccccgatttactggctgctagaaaggtggcagatcatattggaagtgaacattatgaagtcctttttaactctgaggaaggcattcaggctctggatgaagtcatattttccttggaaacttatgacattacaacagttcgtgcttcagtaggtatgtatttaatttccaagtatattcggaagaacacagatagcgtggtgatcttctctggagaaggatcagatgaacttacgcagggttacatatattttcacaaggctccttctcctgaaaaagccgaggaggagagtgagaggcttctgagggaactctatttgtttgatgttctccgcgcagatcgaactactgctgcccatggtcttgaactgagagtcccatttctagatcatcgattttcttcctattacttgtctctgccaccagaaatgagaattccaaagaatgggatagaaaaacatctcctgagagagacgtttgaggattccaatctgatacccaaagagattctctggcgaccaaaagaagccttcagtgatggaataacttcagttaagaattcctggtttaagattttacaggaatacgttgaacatcaggttgatgatgcaatgatggcaaatgcagcccagaaatttcccttcaatactcctaaaaccaaagaaggatattactaccgtcaagtctttgaacgccattacccaggccgggctgactggctgagccattactggatgcccaagtggatcaatgccactgacccttctgcccgcacgctgacccactacaagtcagctgtcaaagcttaggtggtctttatgctgtaatgtgaaagcaaatatttcttcgtgttggatggggactgtgggtagataggggaacaatgagagtcaactcaggctaacttgggtgtgaaaaaaataaaagtcctaaatct

SEQ ID NO: 1697 - DNA, 1865 bp, Homo sapiens
  source 1..1865: mol_type = unassigned DNA
ttcccgcacgcgttacaggagccaggtcggtataagcgccagcggcctcgccgcccgtcaagctgtccacatccctggcctcagcccgccacatcaccctgacctgcttacgcccagtgtctgagtgctatgaagattgcacacagaggtccagatgcattccgttttgagaatgtcaatggatacaccaactgctgctttggatttcaccggttggcggtagttgacccgctgtttggaatgcagccaattcgagtgaagaaatatccgtatttgtggctctgttacaatggtgaaatctacaaccataagaagatgcaacagcattttgaatttgaataccagaccaaagtggatggtgagataatccttcatctttatgacaaaggaggaattgagcaaacaatttgtatgttggatggtgtgtttgcatttgttttactggatactgccaataagaaagtgttcctgggtagagatacatatggagtcagacctttgtttaaagcaatgacagaagatggatttttggctgtatgttcagaagctaaaggtcttgttacattgaagcactccgcgactccctttttaaaagtggagccttttcttcctggacactatgaagttttggatttaaagccaaatggcaaagttgcatccgtggaaatggttaaatatcatcactgtcgggatgtacccctgcacgccctctatgacaatgtggagaaactctttccaggttttgagatagaaactgtgaagaacaacctcaggatcctttttaataatgctgtaaagaaacgtttgatgacagacagaaggattggctgccttttatcagggggcttggactccagcttggttgctgccactctgttgaagcagctgaaagaagcccaagtacagtatcctctccagacatttgcaattggcatggaagacagccccgatttactggctgctagaaaggtggcagatcatattggaagtgaacattatgaagtcctttttaactctgaggaaggcattcaggctctggatgaagtcatattttccttggaaacttatgacattacaacagttcgtgcttcagtaggtatgtatttaatttccaagtatattcggaagaacacagatagcgtggtgatcttctctggagaaggatcagatgaacttacgcagggttacatatattttcacaaggctccttctcctgaaaaagccgaggaggagagtgagaggcttctgagggaactctatttgtttgatgttctccgcgcagatcgaactactgctgcccatggtcttgaactgagagtcccatttctagatcatcgattttcttcctattacttgtctctgccaccagaaatgagaattccaaagaatgggatagaaaaacatctcctgagagagacgtttgaggattccaatctgatacccaaagagattctctggcgaccaaaagaagccttcagtgatggaataacttcagttaagaattcctggtttaagattttacaggaatacgttgaacatcaggttgatgatgcaatgatggcaaatgcagcccagaaatttcccttcaatactcctaaaaccaaagaaggatattactaccgtcaagtctttgaacgccattacccaggccgggctgactggctgagccattactggatgcccaagtggatcaatgccactgacccttctgcccgcacgctgacccactacaagtcagctgtcaaagcttaggtggtctttatgctgtaatgtgaaagcaaatatttcttcgtgttggatggggactgtgggtagataggggaacaatgagagtcaactcaggctaacttgggtgtgaaaaaaat

SEQ ID NO: 1698 - DNA, 1588 bp, Homo sapiens
  source 1..1588: mol_type = unassigned DNA
cctggcctcagcccgccacatcaccctgacctgcttacgcccagatgcaacagcattttgaatttgaataccagaccaaagtggatggtgagataatccttcatctttatgacaaaggaggaattgagcaaacaatttgtatgttggatggtgtgtttgcatttgttttactggatactgccaataagaaagtgttcctgggtagagatacatatggagtcagacctttgtttaaagcaatgacagaagatggatttttggctgtatgttcagaagctaaaggtcttgttacattgaagcactccgcgactccctttttaaaagtggagccttttcttcctggacactatgaagttttggatttaaagccaaatggcaaagttgcatccgtggaaatggttaaatatcatcactgtcgggatgtacccctgcacgccctctatgacaatgtggagaaactctttccaggttttgagatagaaactgtgaagaacaacctcaggatcctttttaataatgctgtaaagaaacgtttgatgacagacagaaggattggctgccttttatcagggggcttggactccagcttggttgctgccactctgttgaagcagctgaaagaagcccaagtacagtatcctctccagacatttgcaattggcatggaagacagccccgatttactggctgctagaaaggtggcagatcatattggaagtgaacattatgaagtcctttttaactctgaggaaggcattcaggctctggatgaagtcatattttccttggaaacttatgacattacaacagttcgtgcttcagtaggtatgtatttaatttccaagtatattcggaagaacacagatagcgtggtgatcttctctggagaaggatcagatgaacttacgcagggttacatatattttcacaaggctccttctcctgaaaaagccgaggaggagagtgagaggcttctgagggaactctatttgtttgatgttctccgcgcagatcgaactactgctgcccatggtcttgaactgagagtcccatttctagatcatcgattttcttcctattacttgtctctgccaccagaaatgagaattccaaagaatgggatagaaaaacatctcctgagagagacgtttgaggattccaatctgatacccaaagagattctctggcgaccaaaagaagccttcagtgatggaataacttcagttaagaattcctggtttaagattttacaggaatacgttgaacatcaggttgatgatgcaatgatggcaaatgcagcccagaaatttcccttcaatactcctaaaaccaaagaaggatattactaccgtcaagtctttgaacgccattacccaggccgggctgactggctgagccattactggatgcccaagtggatcaatgccactgacccttctgcccgcacgctgacccactacaagtcagctgtcaaagcttaggtggtctttatgctgtaatgtgaaagcaaatatttcttcgtgttggatggggactgtgggtagataggggaacaatgagagtcaactcaggctaacttgggtgtgaa

SEQ ID NO: 1699 - DNA, 1812 bp, Homo sapiens
  source 1..1812: mol_type = unassigned DNA
ataagcgccagcggcctcgccgcccgtcaagctgtccacatccctggcctcagcccgccacatcaccctgacctgcttacgcccagattttcttcaatcacatctgaataaatcacttgaagtgtctgagtgctatgaagattgcacacagaggtccagatgcattccgttttgagaatgtcaatggatacaccaactgctgctttggatttcaccggttggcggtagttgacccgctgtttggaatgcagccaattcgagtgaagaaatatccgtatttgtggctctgttacaatggtgaaatctacaaccataagaagatgcaacagcattttgaatttgaataccagaccaaagtggatggtgagataatccttcatctttatgacaaaggaggaattgagcaaacaatttgtatgttggatggtgtgtttgcatttgttttactggatactgccaataagaaagtgttcctgggtagagatacatatggagtcagacctttgtttaaagcaatgacagaagatggatttttggctgtatgttcagaagctaaaggtcttgttacattgaagcactccgcgactccctttttaaaagtggagccttttcttcctggacactatgaagttttggatttaaagccaaatggcaaagttgcatccgtggaaatggttaaatatcatcactgtcgggatgtacccctgcacgccctctatgacaatgtggagaaactctttccaggttttgagatagaaactgtgaagaacaacctcaggatcctttttaataatgctgtaaagaaacgtttgatgacagacagaaggattggctgccttttatcagggggcttggactccagcttggttgctgccactctgttgaagcagctgaaagaagcccaagtacagtatcctctccagacatttgcaattggcatggaagacagccccgatttactggctgctagaaaggtggcagatcatattggaagtgaacattatgaagtcctttttaactctgaggaaggcattcaggctctggatgaagtcatattttccttggaaacttatgacattacaacagttcgtgcttcagtaggtatgtatttaatttccaagtatattcggaagaacacagatagcgtggtgatcttctctggagaaggatcagatgaacttacgcagggttacatatattttcacaaggctccttctcctgaaaaagccgaggaggagagtgagaggcttctgagggaactctatttgtttgatgttctccgcgcagatcgaactactgctgcccatggtcttgaactgagagtcccatttctagatcatcgattttcttcctattacttgtctctgccaccagaaatgagaattccaaagaatgggatagaaaaacatctcctgagagagacgtttgaggattccaatctgatacccaaagagattctctggcgaccaaaagaagccttcagtgatggaataacttcagttaagaattcctggtttaagattttacaggaatacgttgaacatcaggttgatgatgcaatgatggcaaatgcagcccagaaatttcccttcaatactcctaaaaccaaagaaggatattactaccgtcaagtctttgaacgccattacccaggccgggctgactggctgagccattactggatgcccaagtggatcaatgccactgacccttctgcccgcacgctgacccactacaagtcagctgtcaaagcttaggtggtctttatgctgtaatgtgaaagcaaatatttcttcgtgttggatggggact

SEQ ID NO: 1700 - DNA, 689 bp, Homo sapiens
  source 1..689: mol_type = unassigned DNA
tattctaatattagcagtttggtaggaaggaaggcatgttttgtgaagcattgcttacctctgttcagttatttactcccttccctaaatttgtttaactttttgtcttatccacctttaggattggagagggagaaagaaaaactgctttgtgtgccaaaagcaaaactcttggtgtttttgtttgtgaaataggctccttctcctgaaaaagccgaggaggagagtgagaggcttctgagggaactctatttgtttgatgttctccgcgcagatcgaactactgctgcccatggtcttgaactgagagtcccatttctagatcatcgattttcttcctattacttgtctctgccaccagaaatgagaattccaaagaatgggatagaaaaacatctcctgagagagacgtttgaggattccaatctgatacccaaagagattctctggcgaccaaaagaagccttcagtgatggaataacttcagttaagaattcctggtttaagattttacaggaatacgttgaacatcaggttgatgatgcaatgatggcaaatgcagcccagaaatttcccttcaatactcctaaaaccaaagaaggatattactaccgtcaagtctttgaacgccattacccaggccgggctgactggctgagccattactggatgcccaagtggatcaatgc

SEQ ID NO: 1701 - DNA, 698 bp, Homo sapiens
  source 1..698: mol_type = unassigned DNA
gccactctgttgaagcagctgaaagaagcccaagtacagtatcctctccagacatttgcaattggcatggaagacagccccgatttactggctgctagaaaggtggcagatcatattggaagtgaacattatgaagtcctttttaactctgaggaaggcattcaggctctggatgaagtcatattttccttggaaacttatgacattacaacagttcgtgcttcagtaggtatgtatttaatttccaagtatattcggaagaacacagatagcgtggtgatcttctctggagaaggatcagatgaacttacgcagggttacatatattttcacaaggtaaccactctgaagtggagggatattcatgctatattaagaaaagtatgaattgtttgactattttctatcatctttcagtatgacagtgatatttttgagtatcttgtgaggttacaaaagggaatctgatagtgtttgctttctatctcttggggaagaaagaaattttaatgtgtcagataatttttattctttaaaactagttacagctgggtatgagggctcatgctcatacccccagctgctgaggaggctgaggtgggaggatcacctgaacccaggagattgaggctgcagtgagctgtgattgcaccactgcactcctgcctggttgacagagtaagaccccgtctcttaaa

SEQ ID NO: 1702 - DNA, 828 bp, Homo sapiens
  source 1..828: mol_type = unassigned DNA
gattgttacgcacctgacagctagcggaaggacctttctgtcctggttccctgaagcatcgagagggaaccgcggccggcaggccggaccgctccggagaggaggcagcggcagtttgagcccctattttcttcaatcacatctgaataaatcacttgaagaaagcttatagcttcattgcaccatgtgtggcatttgggcgctgtttggcagtgatgattgcctttctgttcagtgtctgagtgctatgaagattgcacacagaggtccagatgcattccgttttgagaatgtcaatggatacaccaactgctgctttggatttcaccggttggcggtagttgacccgctgtttggaatgcagccaattcgagtgaagaaatatccgtatttgtggctctgttacaatggtgaaatctacaaccataagaagatgcaacagcattttgaatttgaataccagaccaaagtggatggtgagataatccttcatctttatgacaaaggaggaattgagcaaacaatttgtatgttggatggtgtgtttgcatttgttttactggatactgccaataagaaagtgttcctgggtagagatacatatggagtcagacctttgtttaaagcaatgacagaagatggatttttggctgtatgttcagaagctaaaggtcttgttacattgaagcactccgcgactccctttttaaaagtggagccttttcttcctggacactatgaagttttggatttaaagccaaatggcaaagttgcatccgtggaaatggttaaatatcatcactgtcgggatgtacccctgcacgccct

SEQ ID NO: 1703 - DNA, 1678 bp, Homo sapiens
  source 1..1678: mol_type = unassigned DNA
catagaaagcttatagcttcattgcaccatgtgtggcatttgggcgctgtttggcagtgatgattgcctttctgttcagtgtctgagtgctatgaagattgcacacagaggtccagatgcattccgttttgagaatgtcaatggatacaccaactgctgctttggatttcaccggttggcggtagttgacccgctgtttggaatgcagccaattcgagtgaagaaatatccgtatttgtggctctgttacaatggtgaaatctacaaccataagaagatgcaacagcattttgaatttgaataccagaccaaagtggatggtgagataatccttcatctttatgacaaaggaggaattgagcaaacaatttgtatgttggatggtgtgtttgcatttgttttactggatactgccaataagaaagtgttcctgggtagagatacatatggagtcagacctttgtttaaagcaatgacagaagatggatttttggctgtatgttcagaagctaaaggtaataataaatttttctatagattttcattattgtcttggttgtacgttttcttttaaattatatttgaaaatctcttagagagcaatccagaattttacaagtgactaagttatgagtctttacctttttttaaaaaaacagaggagttgtactctccttttcagcacttaaattctgtaatccttgaaggatgattctttagtgcagtcgtttattttttgctgtgctaatatgctctacatctagcttgatcttaagtgcagttttaagttttcctgtgtcatactataatcgtagggttgactctgcaattattgcattgtggtactttgcgcagttatagcacagcaagtgttaggatttctaaaacagctttattgataattcacataccatgtaattcacccacttgaagtatacagttcagtggtttttagtatattcacagatgttggtaaacaacactccaatcagttttaggattgtttttccacctcaaaaaaaaccaaatcaaatcctatgccctttaccttagtttttgctggcaggatcaactaggtttttgtttgtttgtttgtttgaagagatggggtcttgctcagtcgcccagcccaggctggagtgcggtggtttgatagctcagtgcagccttgaactcgtgggctcaagcgattctcccacctcagcctccctagtagctaggagtataggcatgcaccacaacaccctgcctcctgtgccctttagctttgaattccatctctccatatccatcagctgcacccctgcagttgtagccccggcaatcaccagtctttctgcctctggattccctattctgtatgtttcatatgaacgggattatatatcataccggcttttgtgactggattctttcacttggtatagtgctttcaagatttgtctatgccgtagcatgtatcagtacttacttcttatggccaaatgatattccattacatggatacactgcattttgtttattcgcttgtcagttgatggacatttaggacattatttaccccttttggctattatgaataatgctgctataaacattggtgtacaagtttttgtgtggacatttcccttgggtgtatatctaggagtagaattgctgggacacatgataactatgt

SEQ ID NO: 1704 - DNA, 745 bp, Homo sapiens
  source 1..745: mol_type = unassigned DNA
ccgtctcggtgtctgctttcaccttcaactgcccccctcctcacctggaccgctcaccctcctcctcccctctcaccccgccatccccaccagtccccacctgtctctgtagactgcaagactcatcaagtgacttgctgagcaaaccctgccgagaagaggtctgtttagggacacaggcgaccaagtacagaaaaagattttcttcaatcacatctgaataaatcacttgaagaaagcttatagcttcattgcaccatgtgtggcatttgggcgctgtttggcagtgatgattgcctttctgttcagtgtctgagtgctatgaagattgcacacagaggtccagatgcattccgttttgagaatgtcaatggatacaccaactgctgctttggatttcaccggttggcggtagttgacccgctgtttggaatgcagccaattcgagtgaagaaatatccgtatttgtggctctgttacaatggtgaaatctacaaccataagaagatgcaacagcattttgaatttgaataccagaccaaagtggatggtgagataatccttcatctttatgacaaaggaggaattgagcaaacaatttgtatgttggatggtgtgtttgcatttgttttactggatactgccaataagaaagtgttcctgggtagagatacatatggagtcagacctttgtttaaagcaatgacagaagatggatttttggctgtatgttcagaagctaaag

SEQ ID NO: 1705 - DNA, 579 bp, Homo sapiens
  source 1..579: mol_type = unassigned DNA
tactgaacaatgcaactttgagacagaaatatttgagaacatttttgtcagtgaggacattttgatagtgaatattttgtatcttctattaacttgaaatgttttatttgttataaagccaggatatctgatatcaaattaaattgttttttttttccctttagattttcttcaatcacatctgaataaatcacttgaagaaagcttatagcttcattgcaccatgtgtggcatttgggcgctgtttggcagtgatgattgcctttctgttcagtgtctgagtgctatgaagattgcacacagaggtccagatgcattccgttttgagaatgtcaatggatacaccaactgctgctttggatttcaccggttggcggtagttgacccgctgtttggaatgcagccaattcgagtgaagaaatatccgtatttgtggctctgttacaatggtgaaatctacaaccataagaagatgcaacagcattttgaatttgaataccagaccaaagtggatggtgagataatccttcatctttatgacaaaggaggaattgagcaaacaatttgtatgttggatgg

SEQ ID NO: 1706 - DNA, 573 bp, Homo sapiens
  source 1..573: mol_type = unassigned DNA
aagctgtccacatccctggcctcagcccgccacatcaccctgacctgcttacgcccagcctgtggacattttcgcggtccgggtccctgcggcggacgggtcggatcgtgctcgtggccagggcgcagtcaggtgtcgcgtggtcctgatctaggaagagactgcggccttatcaccgtctcggtgtctgctttcaccttcaactgcccccctcctcacctggaccgctcaccctcctcctcccctctcaccccgccatccccaccagtccccacctgtctctgtagactgcaagactcatcaagtgacttgctgagcaaaccctgccgagaagagattttcttcaatcacatctgaataaatcacttgaagtgtctgagtgctatgaagattgcacacagaggtccagatgcattccgttttgagaatgtcaatggatacaccaactgctgctttggatttcaccggttggcggtagttgacccgctgtttggaatgcagccaattcgagtgaagaaatatccgtatttgtggctctgttacaatggtgaaatctacaaccataagaaggtg

SEQ ID NO: 1707 - DNA, 562 bp, Homo sapiens
  source 1..562: mol_type = unassigned DNA
atgatgaaacttcccgcacgcgttacaggagccaggtcggtataagcgccagcggcctcgccgcccgtcaagctgtccacatccctggcctcagcccgccacatcaccctgacctgcttacgcccagcctgtggacattttcgcggtccgggtccctgcggcggacgggtcggatcgtgctcgtggccagggcgcagtcaggtgtcgcgtggtcctgatctaggaagagactgcggccttatcaccgtctcggtgtctgctttcaccttcaactgcccccctcctcacctggaccgctcaccctcctcctcccctctcaccccgccatccccaccagtccccacctgtctctgtagactgcaagactcatcaagtgacttgctgagcaaaccctgccgagaagagattttcttcaatcacatctgaataaatcacttgaagaaagcttatagcttcattgcaccatgtgtggcatttgggcgctgtttggcagtgatgattgcctttctgttcagtgtctgagtgctatgaagattgcacacagaggtccagatgcattccg

SEQ ID NO: 1708 - DNA, 584 bp, Homo sapiens
  source 1..584: mol_type = unassigned DNA
acgcacctgacagctagcggaaggacctttctgtcctggttccctgaagcatcgagagggaaccgcggccggcaggccggaccgctccggagaggaggcagcggcagtttgagcccctgtaaatgttatatgtgtacttttttttactatgtggcgtcgaagcctgtggacattttcgcggtccgggtccctgcggcggacgggtcggatcgtgctcgtggccagggcgcagtcaggtgtcgcgtggtcctgatctaggaagagactgcggccttatcaccgtctcggtgtctgctttcaccttcaactgcccccctcctcacctggaccgctcaccctcctcctcccctctcaccccgccatccccaccagtccccacctgtctctgtagactgcaagactcatcaagtgacttgctgagcaaaccctgccgagaagagattttcttcaatcacatctgaataaatcacttgaagaaagcttatagcttcattgcaccatgtgtggcatttgggcgctgtttggcagtgatgattgcctttctgttcagtgtctgagtgctatgaagattgcacacagaggtc

SEQ ID NO: 1709 - DNA, 2356 bp, Homo sapiens
  source 1..2356: mol_type = unassigned DNA
agtcctgctccgccccggacaccccgcggccccgcccctgtgcgcgctggttggtcctcgcaggcatgatgaaacttcccgcacgcgttacaggagccaggtcggtataagcgccagcggcctcgccgcccgtcaagctgtccacatccctggcctcagcccgccacatcaccctgacctgcttacgcccagcctgtggacattttcgcggtccgggtccctgcggcggacgggtcggatcgtgctcgtggccagggcgcagtcaggtgtcgcgtggtcctgatctaggaagagactgcggccttatcaccgtctcggtgtctgctttcaccttcaactgcccccctcctcacctggaccgctcaccctcctcctcccctctcaccccgccatccccaccagtccccacctgtctctgtagactgcaagactcatcaagtgacttgctgagcaaaccctgccgagaagagattttcttcaatcacatctgaataaatcacttgaagaaagcttatagcttcattgcaccatgtgtggcatttgggcgctgtttggcagtgatgattgcctttctgttcagtgtctgagtgctatgaagattgcacacagaggtccagatgcattccgttttgagaatgtcaatggatacaccaactgctgctttggatttcaccggttggcggtagttgacccgctgtttggaatgcagccaattcgagtgaagaaatatccgtatttgtggctctgttacaatggtgaaatctacaaccataagaagatgcaacagcattttgaatttgaataccagaccaaagtggatggtgagataatccttcatctttatgacaaaggaggaattgagcaaacaatttgtatgttggatggtgtgtttgcatttgttttactggatactgccaataagaaagtgttcctgggtagagatacatatggagtcagacctttgtttaaagcaatgacagaagatggatttttggctgtatgttcagaagctaaaggtcttgttacattgaagcactccgcgactccctttttaaaagtggagccttttcttcctggacactatgaagttttggatttaaagccaaatggcaaagttgcatccgtggaaatggttaaatatcatcactgtcgggatgtacccctgcacgccctctatgacaatgtggagaaactctttccaggttttgagatagaaactgtgaagaacaacctcaggatcctttttaataatgctgtaaagaaacgtttgatgacagacagaaggattggctgccttttatcagggggcttggactccagcttggttgctgccactctgttgaagcagctgaaagaagcccaagtacagtatcctctccagacatttgcaattggcatggaagacagccccgatttactggctgctagaaaggtggcagatcatattggaagtgaacattatgaagtcctttttaactctgaggaaggcattcaggctctggatgaagtcatattttccttggaaacttatgacattacaacagttcgtgcttcagtaggtatgtatttaatttccaagtatattcggaagaacacagatagcgtggtgatcttctctggagaaggatcagatgaacttacgcagggttacatatattttcacaaggctccttctcctgaaaaagccgaggaggagagtgagaggcttctgagggaactctatttgtttgatgttctccgcgcagatcgaactactgctgcccatggtcttgaactgagagtcccatttctagatcatcgattttcttcctattacttgtctctgccaccagaaatgagaattccaaagaatgggatagaaaaacatctcctgagagagacgtttgaggattccaatctgatacccaaagagattctctggcgaccaaaagaagccttcagtgatggaataacttcagttaagaattcctggtttaagattttacaggaatacgttgaacatcaggttgatgatgcaatgatggcaaatgcagcccagaaatttcccttcaatactcctaaaaccaaagaaggatattactaccgtcaagtctttgaacgccattacccaggccgggctgactggctgagccattactggatgcccaagtggatcaatgccactgacccttctgcccgcacgctgacccactacaagtcagctgtcaaagcttaggtggtctttatgctgtaatgtgaaagcaaatatttcttcgtgttggatggggactgtgggtagataggggaacaatgagagtcaactcaggctaacttgggtgtgaaaaaaataaaagtcctaaatctaaaccattgctgt

SEQ ID NO: 1710 - DNA, 563 bp, Homo sapiens
  source 1..563: mol_type = unassigned DNA
aggggaagccgcgtggtgtgcgaccctgggcgttgagctccaggcttcctggcaaagaggactgtggattcctggccctgtgaccttgggcaaaaaatgaggaagattcataagtaagttaacacagaattaccaaaaacctcatgagaaagaaatgaagggatgtttcagggtagcttttcgagtcccaagtgatcattgatttggcccttctgtttctgattgtgaaaaagcattctgaaagaatgggcgccggttcaagaggaggtctctgagggtcagcctttggctgtttatagagaaatcagataaaaactacttggtgaaatgacttcttgtcacattgctgaagaacatatacaaaaggttgctatctttggaggaacccatgggaatgagctaaccggagtatttctggttaagcattggctagagaatggcgctgagattcagagaacagggctggaggtaaaaccatttattactaaccccagagcagtgaagaagtgtaccagatatattgactgtgacctgaatcgcatttttgaccttgaaaatcttgg

SEQ ID NO: 1711 - DNA, 1090 bp, Homo sapiens
  source 1..1090: mol_type = unassigned DNA
tttcggaagttaacttggtataagagtatgaaaagcctctgttgctctacttctgaggaaatgctctcctttttcctaataaagctttccacagaagacaaactctgtacacaaaaaacaagaaatcagataaaaactacttggtgaaatgacttcttgtcacattgctgaagaacatatacaaaaggttgctatctttggaggaacccatgggaatgagctaaccggagtatttctggttaagcattggctagagaatggcgctgagattcagagaacagggctggaggtaaaaccatttattactaaccccagagcagtgaagaagtgtaccagatatattgactgtgacctgaatcgcatttttgaccttgaaaatcttggcaaaaaaatgtcagaagatttgccatatgaagtgagaagggctcaagaaataaatcatttatttggtccaaaagacagtgaagattcctatgacattatttttgaccttcacaacaccacctctaacatggggtgcactcttattcttgaggattccaggaataactttttaattcagatgtttcattacattaagacttctctggctccactaccctgctacgtttatctgattgagcatccttccctcaaatatgcgaccactcgttccatagccaagtatcctgtgggtatagaagttggtcctcagcctcaaggggttctgagagctgatatcttggatcaaatgagaaaaatgattaaacatgctcttgattttatacatcatttcaatgaaggaaaagaatttcctccctgcgccattgaggtctataaaattatagagaaagttgattacccccgggatgaaaatggagaaattgctgctatcatccatcctaatctgcaggatcaagactggaaaccactgcatcctggggatcccatgtttttaactcttgatgggaagacgatcccactgggcggagactgtaccgtgtaccccgtgtttgtgaatgaggccgcatattacgaaaagaaagaagcttttgcaaagacaactaaactaacgctcaatgcaaaaagtattcgctgctgtttacattag

SEQ ID NO: 1712 - DNA, 5431 bp, Homo sapiens
  source 1..5431: mol_type = unassigned DNA
ttgtaacagaaaattaaaatatactccactcaagggaattctgtactttgccctttgggtaaagtctcatttacatttctaaacctttcttaagaaaatcgaatttcctttgatctctcttctgaattgcagaaatcagataaaaactacttggtgaaatgacttcttgtcacattgctgaagaacatatacaaaaggttgctatctttggaggaacccatgggaatgagctaaccggagtatttctggttaagcattggctagagaatggcgctgagattcagagaacagggctggaggtaaaaccatttattactaaccccagagcagtgaagaagtgtaccagatatattgactgtgacctgaatcgcatttttgaccttgaaaatcttggcaaaaaaatgtcagaagatttgccatatgaagtgagaagggctcaagaaataaatcatttatttggtccaaaagacagtgaagattcctatgacattatttttgaccttcacaacaccacctctaacatggggtgcactcttattcttgaggattccaggaataactttttaattcagatgtttcattacattaagacttctctggctccactaccctgctacgtttatctgattgagcatccttccctcaaatatgcgaccactcgttccatagccaagtatcctgtgggtatagaagttggtcctcagcctcaaggggttctgagagctgatatcttggatcaaatgagaaaaatgattaaacatgctcttgattttatacatcatttcaatgaaggaaaagaatttcctccctgcgccattgaggtctataaaattatagagaaagttgattacccccgggatgaaaatggagaaattgctgctatcatccatcctaatctgcaggatcaagactggaaaccactgcatcctggggatcccatgtttttaactcttgatgggaagacgatcccactgggcggagactgtaccgtgtaccccgtgtttgtgaatgaggccgcatattacgaaaagaaagaagcttttgcaaagacaactaaactaacgctcaatgcaaaaagtattcgctgctgtttacattagaaatcacttccagcttacatcttacacggtgtcttacaaattctgctagtctgtaagctccttaagagtagggttgtgccttattcaactgcatacatagctcctagcacagtgccttattcggtaggcatctaagcacatttcttaaattaattaatatatctttaaagatatcatattttatgtatgtagcttattcaaagaagtgtttcctatttctatatagtttattatacatgatacttgggtagctcaacattcttaataaacagcctttgtattcagaatataaaattgaaatagatatatataaagttatttgttttattgtgctttgccttactacacttcacggatactgtacttgtactttttttccaaattgaaggtttttggcaaccctgtgtctagaaagtctaacagtgccatgtttccaacagcatgtgctcactccttgtctctgtgtcaccctttgataatatttcaagcttttttatgatttatttattatatctgctatggtgatctgtgatcagtggcctttgatgttactgttgttaagtgttttggggcaccatgaatcgtgcccatgtgagactgcgaacttagtgaatgttgtgtgagttctaactgctctactgaccggccatttccttgtctctctccctgtcctctggcctccctgttccttgagacacaataattaataagtctacagcagactctgtgtgttcaagtgaaagaaagggtcatacttctagaaattaagcttagtaaggaaggcatgtcaaaagctgagacaggctgaaagctaggcctcttgcactggttagccaagttgtgaattcaaagaaaaggatcttgaagaaaattaaaaattctactccagtgcacacacacaaatgataagaaagcaaaacaaccttattgctgatatggagacagttttagtggtctggatagaagatcaaaccagccacacattaagccaaagcatgacccacagcaaggccctaactctcttcaattctgtgaaggctgagagaggtgaggaagctgcaggaagctgggagaggttggttcacaaggtttaaggaaagaagacagctctaaaacctacaagtggaaagcgaaccagcaagttgctgatgtggaagctgtagcaagttatccagaagatgtagctaaaatcattgacaaagatggctacactaaacaacggatcttcagtgtagttgaaacagccttctattggaagaagatgctatctaggactttcctagctagaggggagaaatgaatgcctagcttcaaagcttcaaaggacagcctgactctcttaagagctaacacagctggtgactttgggttaaagccaaagctcattaactgtttcaaaaatcctaaaactcttgttttttgttttttttttgagacggagtcttgctctgtcgtccaggctggagtgcagtggcgcaatctcggctcactgcaagctccgcctcccaggttcatgccattctcctgcctcagcctccccagtagctgagattacaggtgcctgccaccacgcccggctaattttttgcatttttttagtagagatggggtttcactctgctagccaggatggtctcgatctcctgacctcatgatccgcctgcctcggcctcccaaagtgctgggattacaggcatgagccaccacgcccggcccaaaaatcgtaggactctgaagactgatgctaaacctgctgtgtctgagctctataaatggaacaacaaagcctcgctggcagcacatctgtttgcggcatggtttactgtatattttaagcccactgttgagacctactgcttgggaaaaaaaaaaattcctttcaaaatactactgctgattgacaatacaccatgttacccaagagctctgctggagatgtgcgaagagattagcattgttttcgcgcctgctaccacgacatccagccgaagcccatggatcaaggcgtcattgtgactttcaaatctaactatttaagaaatacatttcaggctgggggaggggagaaaaaagaaaaaaaagaaaggaagaaaaaaatcatttcataaggctatagctgccatagatagtgattcctctgatggagctgggcaaagtaaacagaaaacctctggaaaggattcagcattccagatgccattaagaacattcaggatccgtgggaggagatcaaaatatcaacattaacaggagtttggaaaaagtgaattccaaccctcttggatgactctgaggaattcgagacttgagtaaaggaagtcatgcagatgtacagcaagagaatgagaagtggagcctgaagatgtaactgaactgctgcaatctcatgatcacacttgaatggatgaggagtcgcttcttataaatgagcaaaaaagtggtttcttggctgcaatcaactcttgttgcagatgctgtgaacactgttgaaatgacaaaggatttagaatattacgtaaacatagttgataaagcagcagcagggtttaagaggattgactcctattttgaaatgagttcggctgggagaagtggctcatgcctgtcgtcctagcactttgggaggccaaggcagacagagcacctgaggtaaggagttcgagaccagcctggccaacatggtgaaaccccctctctactaaaaataccaacatattagccaggcgtggtggcacgtgcctgtagtcccagctacttgggaggctgaggcagaaggatcacttgaacccaggaggcagaggttgcagtaagccaagactgcgccactgcactccagcctggtggacacagcaagcctccatctcaaaaaaaaaaaaaaaaaaaaaatgagttctactgtgaataaaatgttattaaacagcatttcatgctacagagaaatctttcacgaaaggaagagtcaatcaatgcagcgaacttgttgttttattttaagaaattgtcacggccatcccaaccctcagtgcccaaccaccctgatcaggcagccatcatcaaggcaaggccctccaccagcaaaaagatcatgaattgctgaaagctcaaatgatggttagcttttttagcaataaagcatttttaatgaaggaatgtacatgttttagatataatgctattacacatttaacatactacatatagtgtgagcataacttttacacgtactggaaaatcaaaaaatatgtgtggctcatctgttataatgtttgttttattgtggtgatctggagccaaggctgaaatatctctgaggtatgcctgtaatgtataagtgctagtagaaatgagttgtgcagaattgctatttttttcaatttttatatttgggttaatggtaatatactaagcgtccagtctataaacttcagcattcgttgcgaaatccagaggagacttttaagtgctgttttgtagatgaaatatgaaagagaaacaagggcttaatggtaaagatgacatatgactatattaagaaactgaatggccctttgtccacaaacagtaacccacacagcattgctactgtggcatgcccactgctctgcactgacctcatggagcagagaacctccttcagacacctcacgcaccccctgaggagctaatgtttcttcccaacatggaaaatttggaagaggcctattcttcacagctgtcacttctcattttgaaagaatatgcccacccttattcgcaggcaaggtgtgaggaggtctttgggctccagctgttgccagcagaggtggtgaaagtcaacaacagggcactggacacacatagaaatgtgacccacagctatggtttgcaaatacagtctttcaagaagtcctgccatgtcctaaatgcccaaaccccttgcctcccatgattcttctcctcaaaggaccttctgctggacgccgccccctccctctccagccccaccagggccctccccgccatcctcttaggccacagcagccaataaagagtgtttttattccatgatctgtacccccaatgaatccataatcatagtttcaaatgtatttaccaaaaatactaacattatctggaatgaatgaatgaatgaatgaatgaataaatattatatatttatacattttcattcttccaaagtgaaccccactatgccagttttactccatactcagtgttctggaaagcccatattctttctaaatttttcagcatttttttctatttttgtactttaccaaaattatttacattggaataaactctcttccttctgaattctgtagtaaaaa

SEQ ID NO: 1713 - DNA, 584 bp, Homo sapiens
  source 1..584: mol_type = unassigned DNA
actccactcaagggaattctgtactttgccctttgggtaaagtctcatttacatttctaaacctttcttaagaaaatcgaatttcctttgatctctcttctgaattgcagaaatcagataaaaactacttggtgaaatgacttcttgtcacattgctgaagaacatatacaaaaggttgctatctttggaggaacccatgggaatgagctaaccggagtatttctggttaagcattggctagagaatggcgctgagattcagagaacagggctggagcaaaaaaatgtcagaagatttgccatatgaagtgagaagggctcaagaaataaatcatttatttggtccaaaagacagtgaagattcctatgacattatttttgaccttcacaacaccacctctaacatggggtgcactcttattcttgaggattccaggaataactttttaattcagatgtttcattacattaagacttctctggctccactaccctgctacgtttatctgattgagcatccttccctcaaatatgcgaccactcgttccatagccaagtatcctgtgggtatagaagttggtcct

SEQ ID NO: 1714 - DNA, 4851 bp, Homo sapiens
  source 1..4851: mol_type = unassigned DNA
cgccccgggcctcctccgcgcagtccctgagtcccgcaggccctgcgtccccgctgcacacccccgtccactcccgtggtccccggtccggcatggcgcgcgcggtggggcccgagcggaggctgctggccgtctacaccggcggcaccattggcatgcggagtgagctcggcgtgcttgtgcccgggacgggcctggctgccatcctgaggacactgcccatgttccatgacgaggagcacgcccgagcccgcggcctctctgaggacaccctggtgctacccccggccagccgcaaccagaggattctctacaccgtgctggagtgccagcccctcttcgactccagtgacatgaccatcgctgagtgggtttgccttgcccagaccatcaagaggcactacgagcagtaccacggctttgtggtcatccacggcaccgacaccatggcctttgctgcctcgatgctgtccttcatgctggagaacctgcagaagactgtcatcctcactggggcccaggtgcccatccatgccctgtggagcgacggccgtgagaacctgctgggggcactgctcatggctggccagtatgtgatcccagaggtctgccttttcttccagaatcagctgtttcggggcaaccgggcaaccaaggtagacgctcggaggttcgcagctttctgctccccgaacctgctgcctctggccacagtgggtgctgacatcacaatcaacagggagctggtgcggaaggtggacgggaaggctgggctggtggtgcacagcagcatggagcaggacgtgggcctgctgcgcctctaccctgggatccctgccgccctggttcgggccttcttgcagcctcccctgaagggcgtggtcatggagaccttcggttcagggaacggacccaccaagcccgacctgctgcaggagctgcgggtggccaccgagcgcggcctggtcatcgtcaactgtacccactgcctccagggggctgtgaccacagactatgcagctggcatggccatggcgggagccggcgtcatctcaggcttcgacatgacatcggaggccgccctggccaagctatcgtatgtgctgggccagccagggctgagcctggatgtcaggaaggagctgctgaccaaggaccttcggggggagatgacgccaccctcggtggaagagcgccggccctcactgcagggcaacacgctgggcggtggggtctcctggctcctcagtctgagcggcagccaggaggcagatgccctgcggaatgccctggtgcccagcctggcctgtgctgctgcccacgccggtgacgtggaggcgctgcaggcgcttgtggagctgggcagtgacctgggcctggtggactttaacggccaaaccccactgcacgcggccgcccggggaggccacacagaggcagtcaccatgctgctgcagagaggtgtggacgtgaacacccgggacacggatggcttcagcccgctgctgctggccgtgcggggcaggcatccgggtgtcattgggttgctgcgggaagccggggcctccctgtccacccaggagctggaggaagcagggacggagctgtgcaggctggcatacagggccgacctcgaaggcctgcaggtgtggtggcaggcaggggctgacctggggcagccgggctatgacgggcacagcgccctgcacgtcgcagaggcagccgggaacctggcagtggtggcctttctacagagcctggagggtgcggttggtgcccaggccccatgcccagaagtgctgcctggtgtctaacctgaaggcgtcctgctgcagtataagccattccttcctcccatgacctgctggaggggtctcaggcatgaccccactgctggggctgcttcccagcctgctctcatgtaaagcctgaaggcctttgttgggcaggacggcaataaagtctctgacatcccctcaccaggtctgtacagcctggctctgagaggctctgtctgggtccgggactgtggatgtgtgtggggagtcaggcccaggctctgtggggtctctgcgggggtcacttggcccatccttccgggggcagctgtgcgtgtgagctgggcagggtggggtgcatggacgtgacttggccaagtggtcctttcccagctgccactcccccttcctgccaccctgcctttgcccaggctggtccctcctccagacaccctctgcccatctccttacctcctgcgccttcattctggagcttgaagtcccctcccccaggcagccctccaacccctggatgagcatgctgcccctgcttaactctttagtcctcacagtcccgtcccagttgctgtctggttttctgtcaccccagtatcgctgcacccggcccccctctcaggccagggccacaccagggctccatagggctgcggaagcctgtgagtgtcaagggggcttcacactctggtggtgagcccctggggaccattccagcccctgctctgcctgaagctcctgatgcagcctccaccgtgagccaggccaccctgtaagggaagaggtgagctgtgcctgcctggttgcacagcctgggcaggtgggcgggtggggcgggccctgctgctgcccggtgggggtggtgctccaaggccaagggcagcctcgtgccttctttcagctggggctgaaatcgggggtgtggacccctggcccccatcatgtgtgcatgcactggcctgggatggccagggactccctgctgctgcccccagcccctgaccccttcttgctgggtgtgaggagcatgggggctgcctccctccaggcctctctacctgcccaggtgacggttccttttgtccctctgtttggctggcctctggactggagccccaggagggcaaaagcatgaccccagagctggcccttggcacctgggcataccccaggctcctcagcctggttcccaagcctggctggtactgccgctggcatccttgctgtcctcaccccgacacaggtgtgcctgggccttgcacaacaaggtgacgccatgcgagcgtggcagggccggggaagcctttgctcctcaccctggtgaggcccatgaggggctgcaggtggagggagggtggcaccgggccccagagccaggagcccctgctgtccccggatggccgagacccttggagggccttgggagaggcggtggggcatctggacaaatgcctggtgcaggtgagaaggggtgggactacctccggcatccctgggctgagcccacctggtctccccggttgctcctgcacacggcagtgcccacctgcttccctcagctcctgaggggctgggcagagcctgttgctcacgccaccccactcagtgctgctccgggttgtgaaagctgcaggtggctcacgttagcccacatggcagcaccctcccagagcaggtgccaacctgccagtgtagacacaccgactgatgccgggggtgagtgtcctgtagtgtagaaacgcccactcatcctgcttgtcccgcagagagcatttgtcaagctggcctttctccaactgggtcactgatggagttcggcagagacggcttgggggccacgggctgggcagatggggagagctcctcacaaggctgggcagccagacccccattgtcagtcccctccaaaccctcgtgggatgtagggccctaccacagggagccccgggactgggccagtgtctcaggaggctgtgaagagtcataggcttgagtctgggagctttctcgggggccgttttgtgccccttggggagaggccagaggggccctgggtaaggggactcctctagaatcacccagaagtggcaggaggtgcagggccactgctcggggctccctgggctctgagctgggcagtgacctggccccaaggcctctggctctctggcgtgcagtgggaacagccgggacagacaggcttggagcgttcgtgtcctgcgccgcgttggtgtgtttcgtccccactgtgcctgtaggagggcaccgggtccccgtctatcctacttcatggctgaggaagctaaggcacagagtggccccgtcctgcgcccagggctctgcgttggcacagggcagagctgggctgtgaatcagggccgccttgtctcttgctgtggtgtgaggctgtgggagactcaggaatgaggcacagccaggtgcccagtgcccgtgggacccgcctccccacagtggggtggcgccgctcacacctggtaatttcacgctgggggaggccttggttcctatagcccatctcgaatcacctggatcccagggctatctctggggaacatctcctctccatcacgactactgtctttttcaccagcattttctatcctaaaatcagactcctcagctgagggccctccaggaccgcccttccccagctggaggtaaccagatttctcgtgtatgctaggaagttccccttctggtcacacctcaatatttcctgctgctggtgggaactgcaggtgcttgtacttgtcaccttctccccgtcctctctcgtcagttcccttggatgctggacacgggagccacctgggcgaggggagcccatccaagtggctgtgcgtcgggaagagtctgcccaggactgggctagaccagaacttagaattaaggagtggtggccaggcttggtggctcacacctgcaatcccagcactttgggaggccgaggcgggtggatagcttgagcctaggagtttgagaacagccaacatggcgaaactctgtctcttaaaaaataaataaaaacattagccag

SEQ ID NO: 1715 - DNA, 2157 bp, Homo sapiens
  source 1..2157: mol_type = unassigned DNA
ggcctcctccgcgcagtccctgagtcccgcaggccctgcgtccccgctgcacacccccgtccactcccgtggtccccggtccggcatggcgcgcgcggtggggcccgagcggaggctgctggccgtctacaccggcggcaccattggcatgcggagtgagctcggcgtgcttgtgcccgggacgggcctggctgccatcctgaggacactgcccatgttccatgacgaggagcacgcccgagcccgcggcctctctgaggacaccctggtgctaccgtgagtgtgggctcctcccagtcccggacagggcatggctgctgaggggcaccgatcctgaggctgggcactgctggccaggcccacgtgagccatttgctcacccctgtctctaacatcccctcagcttacagggctttaggactgaccagcagtcgccttccaccagagcctgaacctctgagggtgccccgtgcctggtcccaccttccctccccaccctcctcccacacccccagccaggctgcttcggcaagtgtgatgagggcgccccgtctagggatcctgtatatcaggagccagctggcccaggtggccttgcccccagcatagaggtccttccatttctcagctctgggcccagctccctgatgtcccccacagctgggggtgagctgggagttgccctcgtggtggctgaccaccacagccgccacaggcgagcctcctgcaagcatcctctcctgcctggggatggctggtcccagcccccctcttcgagctggtgtgggaagaagactgctgggagtggcccatcctgacctacgtccttgcctctgtggggagctccaggtggaaggggggccgggccccgtacctgggatgctgagaacttgctatgtgcggagcccttggcgtaggggccccagctctgccagaggggaacagagcgggtcagggcatttagagcaggaggaggtgcagagcgggagcctgctgttccgcctcctgctgtttctgtcccgcagcccggccagccgcaaccagaggattctctacaccgtgctggagtgccagcccctcttcgactccagtgacatgaccatcgctgagtgggtttgccttgcccagaccatcaagaggcactacgagcagtaccacggctttgtggtcatccacggcaccgacaccatggcctttgctgcctcgatgctgtccttcatgctggagaacctgcagaagactgtcatcctcactggggcccaggtgcccatccatgccctgtggagcgacggccgtgagaacctgctgggggcactgctcatggctggccagtatgtgatcccagaggtctgccttttcttccagaatcagctgtttcggggcaaccgggcaaccaaggtagacgctcggaggttcgcagctttctgctccccgaacctgctgcctctggccacagtgggtgctgacatcacaatcaacagggagctggtgcggaaggtggacgggaaggctgggctggtggtgcacagcagcatggagcaggacgtgggcctgctgcgcctctaccctgggatccctgccgccctggttcgggccttcttgcagcctcccctgaagggcgtggtcatggagaccttcggttcagggaacggacccaccaagcccgacctgctgcaggagctgcgggtggccaccgagcgcggcctggtcatcgtcaactgtacccactgcctccagggggctgtgaccacagactatgcagctggcatggccatggcgggagccggcgtcatctcaggcttcgacatgacatcggaggccgccctggccaagctatcgtatgtgctgggccagccagggctgagcctggatgtcaggaaggagctgctgaccaaggaccttcggggggagatgacgccaccctcggtggaagagcgccggccctcactgcagggcaacacgctgggcggtggggtctcctggctcctcagtctgagcggcagccaggaggcagatgccctgcggaatgccctggtgcccagcctggcctgtgctgctgcccacgccggtgacgtggaggcgctgcaggcgcttgtggagctgggcagtgacctgggcctggtggactttaacggccaaaccccactgcacgcggcc

SEQ ID NO: 1716 - DNA, 1791 bp, Homo sapiens
  source 1..1791: mol_type = unassigned DNA
cctccgcgcagtccctgagtcccgcaggccctgcgtccccgctgcacacccccgtccactcccgtggtccccggtccggcatggcgcgcgcggtggggcccgagcggaggctgctggccgtctacaccggcggcaccattggcatgcggagtgagctcggcgtgcttgtgcccgggacgggcctggctgccatcctgaggacactgcccatgttccatgacgaggagcacgcccgagcccgcggcctctctgaggacaccctggtgctacccccggccagccgcaaccagaggattctctacaccgtgctggagtgccagcccctcttcgactccagtgacatgaccatcgctgagtgggtttgccttgcccagaccatcaagaggcactacgagcagtaccacggctttgtggtcatccacggcaccgacaccatggcctttgctgcctcgatgctgtccttcatgctggagaacctgcagaagactgtcatcctcactggggcccaggtgcccatccatgccctgtggagcgacggccgtgagaacctgctgggggcactgctcatggctggccagtatgtgatcccagaggtctgccttttcttccagaatcagctgtttcggggcaaccgggcaaccaaggtagacgctcggaggttcgcagctttctgctccccgaacctgctgcctctggccacagtgggtgctgacatcacaatcaacagggagctggtgcggaaggtggacgggaaggctgggctggtggtgcacagcagcatggagcaggacgtgggcctgctgcgcctctaccctgggatccctgccgccctggttcgggccttcttgcagcctcccctgaagggcgtggtcatggagaccttcggttcagggaacggacccaccaagcccgacctgctgcaggagctgcgggtggccaccgagcgcggcctggtcatcgtcaactgtacccactgcctccagggggctgtgaccacagactatgcagctggcatggccatggcgggagccggcgtcatctcaggcttcgacatgacatcggaggccgccctggccaagctatcgtatgtgctgggccagccagggctgagcctggatgtcaggaaggagctgctgaccaaggaccttcggggggagatgacgccaccctcggtggaagagcgccggccctcactgcagggcaacacgctgggcggtggggtctcctggctcctcagtctgagcggcagccaggaggcagatgccctgcggaatgccctggtgcccagcctggcctgtgctgctgcccacgccggtgacgtggaggcgctgcaggcgcttgtggagctgggcagtgacctgggcctggtggactttaacggccaaaccccactgcacgcggccgcccggggaggccacacagaggcagtcaccatgctgctgcagagaggtgtggacgtgaacacccgggacacggatggcttcagcccgctgctgctggccgtgcggggcaggcatccgggtgtcattgggttgctgcgggaagccggggcctccctgtccacccaggagctggaggaagcagggacggagctgtgcaggcagaggcagccgggaacctggcagtggtggcctttctacagagcctggagggtgcggttggtgcccaggccccatgcccagaagtgctgcctggtgtctaacctgaaggcgtcctgctgcagtataagccattccttcctcccatgacctgctggaggggtctcaggcatgaccccactgctggggctgc

SEQ ID NO: 1717 - DNA, 377 bp, Homo sapiens
  source 1..377: mol_type = unassigned DNA
cccggccagccgcaaccagaggattctctacaccgtgctggagtgccagcccctcttcgactccagtgacatgaccatcgctgagtgggtttgccttgcccagaccatcaagaggcactacgagcagtaccacggctttgtggtcatccacggcaccgacaccatggcctttgctgcctcgatgctgtccttcatgctggagaacctgcagaagactgtcatcctcactggggcccaggtgcccatccatgccctgtggagcgacggccgtgagaacctgctgggggcactgctcatggctggccagtatgtgatcccagagctgctgaccaaggaccttcggggggagatgacgccaccctcggtggaagagcgcc

SEQ ID NO: 1718 - DNA, 387 bp, Homo sapiens
  source 1..387: mol_type = unassigned DNA
ctggactcccagcccaggctccgcctgtccttgtgccttctcagactgcatggagacctgaggctcccctaactgtcgccaggaaatcctctcctgctctccactcttcctcgaggctgctgaccaaggaccttcggggggagatgacgccaccctcggtggaagagcgccggccctcactgcagggcaacacgctgggcggtggggtctcctggctcctcagtctgagcggcagccaggaggcagatgccctgcggaatgccctggtgcccagcctggcctgtgctgctgcccacgccggtgacgtggaggcgctgcaggcgcttgtggagctgggcagtgacctgggcctggtggactttaacggccaaaccccactgcacgcgg

SEQ ID NO: 1719 - DNA, 244 bp, Homo sapiens
  source 1..244: mol_type = unassigned DNA
tgccttctcagactgcatggagacctgaggctcccctaactgtcgccaggaaatcctctcctgctctccactcttcctcgaggctgctgaccaaggaccttcggggggagatgacgccaccctcggtggaagagcgccggccctcactgcagggcaacacgctgggcggtggggtctcctggctcctcagtctgagcggcagccagggcagtgacctgggcctggtggactttaacggccaaac

SEQ ID NO: 1720 - DNA, 171 bp, Homo sapiens
  source 1..171: mol_type = unassigned DNA
gacctgaggctcccctaactgtcgccaggaaatcctctcctgctctccactcttcctcgagggtggggttcagacacagctggccccagacccttgggttgccagcctctggggctggacggaggcttttggggcccctggagaccctgagctgctgctgaccaaggacct

SEQ ID NO: 1721 - DNA, 467 bp, Homo sapiens
  source 1..467: mol_type = unassigned DNA
gcggccgcccggggaggccacacagaggcagtcaccatgctgctgcagagaggtgtggacgtgaacacccgggacacggatggcttcagcccgctgctgctggccgtgcggggcaggcatccgggtgtcattgggttgctgcgggaagccggggcctccctgtccacccaggagctggaggaagcagggacggagctgtgcaggctggcatacagggccgacctcgaaggcctgcaggtgtggtggcaggcaggggctgacctggggcagccgggctatgacgggcacagcgccctgcacgtcgcagaggcagccgggaacctggcagtggtggcctttctacagagcctggagggtgcggttggtgcccaggccccatgcccagagccctcatgttttcaggaagtgctgcctggtgtctaacctgaaggcgtcctgctgcagtataagccattccttcctcccat

SEQ ID NO: 1722 - DNA, 565 bp, Homo sapiens
  source 1..565: mol_type = unassigned DNA
gcaccctctccaaaggctgccacctccaggaaggacacctggacaattcaccagctcactgctctgcccctccccgctctgcccctcccccaaatgcctggccctccccatgcaggacccgcacagactgggtccccttcccggggctctgagtggtgggggtgacgagagtggaggagctgctggggccctgtgtgtgtgggctggggacaggggagggcatcctggggatggggatccttgggccaggctgctagtcagtggccccaaggcagcccctccccactgcttccccataggcagaggcagccgggaacctggcagtggtggcctttctacagagcctggagggtgcggttggtgcccaggccccatgcccagaagtgctgcctggtgtctaacctgaaggcgtcctgctgcagtataagccattccttcctcccatgacctgctggaggggtctcaggcatgaccccactgctggggctgcttcccagcctgctctcatgtaaagcctgaaggcctttgttgggcaggacggcaataaagtctctgacatcccctc

SEQ ID NO: 1723 - DNA, 2356 bp, Homo sapiens
  source 1..2356: mol_type = unassigned DNA
ccaagcgcgcggggcaaggcggccctgcaggggtgagctttcctctgagaacccggggccttagcgacacgtaatccagttttccgtctccttggtgcagatgaagaaaccgacgcccatgggcgaaagggacctgctcaagttcactcagtaagtcaggagataagccagaatgcgtatctgactccagtctcaatgtctaccccttcacaaaacggtagcctccagggtagtcctcagcaaagcgttggcaccttactgaatctgtttttccatctgagaaatgggccaacggaaaaatcaaacttccattctggggaagtcgagaaccgggactccctaggaagggcagtgctttggcctcatgttctgtgctctgacagagagctgcactagagacaagtttatccatgaacacattgctctgtaaaggaatgttttgcctactcagctgggaggccgacagcagaggcagacttggggagtacactctgcagcccctgtccctgcagactgaagagaccacagagctgggcagcaagaaggagctcaagtccatgcccttcatcacctacctctcaggtttgctgacagcccagatgctgtcagatgaccagctcatttcaggtgtggagattcgctgtgaggagaaggggcgctgtccatctacctgtcacctttgccgccggccaggcaaggagcagctgagccccacaccagtgctgctggaaatcaaccgtgtggtgccactttataccctcatccaagacaatggcacaaaggaggccttcaagagtgcactgatgagttcctactggtgctcagggaaaggggatgtgatcgatgactggtgcaggtgtgacctcagcgcctttgatgccaatgggctccccaactgcagcccccttctgcagccggtgctgcggctgtccccaacagtggagccctccagtactgtggtctccttggagtgggtggatgttcagccagctattgggaccaaggtctccgactatattctgcagcataagaaagtggatgaatacacagacactgacctgtacacaggagaattcctgagttttgctgatgacttactctctggcctgggcacatcttgtgtagcagctggtcgaagccatggagaggtccctgaagtcagtatctactcagtcatcttcaagtgtctggagcccgacggtctctacaagttcactctgtatgctgtggatacacgagggaggcactcagagctaagcacggtgaccctgaggacggcctgtccactggtagatgacaacaaggcagaagaaatagctgacaagatctacaatctgtacaatgggtacacaagtggaaaggagcagcagatggcctacaacacactgatggaggtctcagcctcgatgctgttccgagtccagcaccactacaactctcactatgaaaagtttggcgacttcgtctggagaagtgaggatgagctggggcccaggaaggcccacctgattctacggcgactggagagggtgagtagccactgctccagcctcctgcggagtgcctacatccagagccgcgtggaaacagtgccctatcttttctgccgcagcgaggaggtccggcctgcaggcatggtgtggtatagcatcctcaaggacaccaaaatcacgtgtgaggagaagatggtgtcaatggcccgaaacacgtacggggagtccaagggccggtgagggagggtattgccctccgtgagcacagagactctccatgggagggggagcagtattctcctggatcctggggcctgggtgggctgggggacagctgaggatgggcctagcagatgaagcttgccagcaaggccaaagcaaacggtttctcctgtggatagtggacagagacctttgtaaccaatggaattattcatttttctctatcttttattttttcaaagatattatttgactctatcaaaagtctctcctttttaaaccttttcttatggatggctgtcaatcccgaggcagaagttttcaggtggagaccaagcggcctttgctcttcttccttcttcctgccacactctgctttcttcctgccatggacccctggaggagacctatggagggacagttttgacctgacccctagaggagacagttttgacctcttcagcaccaggaaggaagctctgaggatggttgcagtgaggaagcatgggtctttaaggacttctctctcttttttgctggacattattgagtttgtgggaccctgcctcttcctgctacctgtgggtctgcccagagtccctgcaggcctgtccatgcattaaaaattcctattgtctctc

SEQ ID NO: 1724 - DNA, 1757 bp, Homo sapiens
  source 1..1757: mol_type = unassigned DNA
gcttgtcgtgcagctggccccaagcgcgcggggcaaggcggccctgcaggggtgagctttcctctgagaacccggggccttagcgacacgtaatccagttttccgtctccttggtgcagatgaagaaaccgacgcccatgggcgaaagggacctgctcaagttcactcaagaccacagagctgggcagcaagaaggagctcaagtccatgcccttcatcacctacctctcaggtttgctgacagcccagatgctgtcagatgaccagctcatttcaggtgtggagattcgctgtgaggagaaggggcgctgtccatctacctgtcacctttgccgccggccaggcaaggagcagctgagccccacaccagtgctgctggaaatcaaccgtgtggtgccactttataccctcatccaagacaatggcacaaaggaggccttcaagagtgcactgatgagttcctactggtgctcagggaaaggggatgtgatcgatgactggtgcaggtgtgacctcagcgcctttgatgccaatgggctccccaactgcagcccccttctgcagccggtgctgcggctgtccccaacagtggagccctccagtactgtggtctccttggagtgggtggatgttcagccagctattgggaccaaggtctccgactatattctgcagcataagaaagtggatgaatacacagacactgacctgtacacaggagaattcctgagttttgctgatgacttactctctggcctgggcacatcttgtgtagcagctggtcgaagccatggagaggtccctgaagtcagtatctactcagtcatcttcaagtgtctggagcccgacggtctctacaagttcactctgtatgctgtggatacacgagggaggcactcagagctaagcacggtgaccctgaggacggcctgtccactggtagatgacaacaaggcagaagaaatagctgacaagatctacaatctgtacaatgggtacacaagtggaaaggagcagcagatggcctacaacacactgatggaggtctcagcctcgatgctgttccgagtccagcaccactacaactctcactatgaaaagtttggcgacttcgtctggagaagtgaggatgagctggggcccaggaaggcccacctgattctacggcgactggagagggtgagtagccactgctccagcctcctgcggagtgcctacatccagagccgcgtggaaacagtgccctatcttttctgccgcagcgaggaggtccggcctgcaggcatggtgtggtatagcatcctcaaggacaccaaaatcacgtgtgaggagaagatggtgtcaatggcccgaaacacatattatttgactctatcaaaagtctctcctttttaaaccttttcttatggatggctgtcaatcccgaggcagaagttttcaggtggagaccaagcggcctttgctcttcttccttcttcctgccacactctgctttcttcctgccatggacccctggaggagacctatggagggacagttttgacctgacccctagaggagacagttttgacctcttcagcaccaggaaggaagctctgaggatggttgcagtgaggaagcatgggtctttaaggacttctctctcttttttgctggacattattgagtttgtgggaccctgcctcttcctgctacctgtgggtctgcccagagtccctgcaggcctgtccatgcattaaaaattcctattgtctctc

SEQ ID NO: 1725 - DNA, 3812 bp, Homo sapiens
  source 1..3812: mol_type = unassigned DNA
caaacccacaattccgtcattggcgtgcccatccgggagactcccatcctggatgactatgactgtgaggaggatgaggagccacctaggcgggccaaccatgtctcccgcgaggacgagtttggcagccaggtgacccacactctggacagtctgggacatccaggggaagagaaggtggactttgagaagaaagcagcagctgaggcgactcaggagacagtggagtccctgatgcagaagttcaaggagagtttccgcgctaacacgcccatcgagatcggtcagctgcaaccacccctgcgcagcacatcggcagggaagaggaagcggaggagcaagtctcgaggaggaatcagctttgggagagccaaggggacgtcgggctcagaggcagacgatgaaactcagctgacattctacacggagcagtaccgcagtcgccgccgcagcaaaggtttgctgaaaagcccagtgaacaagacagccctgacactgattgctgtgagttcctgcatcctggccatggtgtgtggcagccagatgtcttgtccactcactgtgaaggtgactctgcatgtgcccgagcacttcatagcagatggaagcagcttcgtggtgagtgaagggagctacctggacatctccgactggttaaacccggccaagctttccctgtattaccagatcaatgccacctccccatgggtgagggacctctgtggacaaaggacgacagatgcctgtgagcagctctgcgacccagaaaccggagagtgcagctgtcatgaaggctatgcccctgaccctgttcacagacacctgtgtgtgcgcagtgactggggacagagtgaaggaccttggccctacacgacacttgagaggggctatgatctggtgacaggggagcaagcccctgaaaagattctcagcttgggccaaggcctctggcttcctgtcagcaaaagctttgtggttccgcctgtggagctgtccatcaaccccctggccagctgcaagaccgatgtgctcgtcacggaagaccctgcagatgtcagggaagaagcgatgctgtccacatactttgaaaccatcaatgacctgctgtcttccttcgggccagttcgtgactgctctcggaacaatgggggctgcactcgcaacttcaagtgtgtgtctgaccggcaggtggattcctcgggatgtgtgtgccctgaggagctgaaacccatgaaggatggctctggctgctacgaccactccaaaggcattgactgctctgatggctttaatggcggctgtgagcagctgtgcctgcagcagacgctgcccctgccctacgatgccacttcgagcaccatcttcatgttctgcggttgcgtggaggagtacaaactggctcctgatggaaaatcctgcttaatgctctcagatgtctgcgagggccccaagtgcctcaaacctgactccaaattcaatgataccctctttggagagatgctacatggttacaacaaccggacccagcatgtgaaccaaggccaagtcttccagatgacctttagggagaacaacttcatcaaggactttccccagctggccgatgggctgttggtgatcccgctgccggtggaggagcagtgccggggggtcctctccgagccccttccagacctccaactgctcactggagatatcaggtatgatgaggccatgggttaccccatggtgcagcagtggcgggtccggagcaacctctaccgtgtgaagctcagcaccatcaccctcgcagcaggcttcactaatgttctcaagatcctgaccaaggagagcagtcgggaggagctgctgtccttcatccagcactatggctcccactacatcgcagaggccctctatggctcagagctcacctgcatcatccactttcccagcaagaaggtccagcagcagctgtggctccagtatcagaaagagaccacagagctgggcagcaagaaggagctcaagtccatgcccttcatcacctacctctcaggtttgctgacagcccagatgctgtcagatgaccagctcatttcaggtgtggagattcgctgtgaggagaaggggcgctgtccatctacctgtcacctttgccgccggccaggcaaggagcagctgagccccacaccagtgctgctggaaatcaaccgtgtggtgccactttataccctcatccaagacaatggcacaaaggaggccttcaagagtgcactgatgagttcctactggtgctcagggaaaggggatgtgatcgatgactggtgcaggtgtgacctcagcgcctttgatgccaatgggctccccaactgcagcccccttctgcagccggtgctgcggctgtccccaacagtggagccctccagtactgtggtctccttggagtgggtggatgttcagccagctattgggaccaaggtctccgactatattctgcagcataagaaagtggatgaatacacagacactgacctgtacacaggagaattcctgagttttgctgatgacttactctctggcctgggcacatcttgtgtagcagctggtcgaagccatggagaggtccctgaagtcagtatctactcagtcatcttcaagtgtctggagcccgacggtctctacaagttcactctgtatgctgtggatacacgagggaggcactcagagctaagcacggtgaccctgaggacggcctgtccactggtagatgacaacaaggcagaagaaatagctgacaagatctacaatctgtacaatgggtacacaagtggaaaggagcagcagatggcctacaacacactgatggaggtctcagcctcgatgctgttccgagtccagcaccactacaactctcactatgaaaagtttggcgacttcgtctggagaagtgaggatgagctggggcccaggaaggcccacctgattctacggcgactggagagggtgagtagccactgctccagcctcctgcggagtgcctacatccagagccgcgtggaaacagtgccctatcttttctgccgcagcgaggaggtccggcctgcaggcatggtgtggtatagcatcctcaaggacaccaaaatcacgtgtgaggagaagatggtgtcaatggcccgaaacacgtacggggagtccaagggccggtgagggagggtattgccctccgtgagcacagagactctccatgggagggggagcagtattctcctggatcctggggcctgggtgggctgggggacagctgaggatgggcctagcagatgaagcttgccagcaaggccaaagcaaacggtttctcctgtggatagtggacagagacctttgtaaccaatggaattattcatttttctctatcttttattttttcaaagatattatttgactctatcaaaagtctctcctttttaaaccttttcttatggatggctgtcaatcccgaggcagaagttttcaggtggagaccaagcggcctttgctcttcttccttcttcctgccacactctgctttcttcctgccatggacccctggaggagacctatggagggacagttttgacctgacccctagaggagacagttttgacctcttcagcaccaggaaggaagctctgaggatggttgcagtgaggaagcatgggtctttaaggacttctctctcttttttgctggacattattgagtttgtgggaccctgcctcttcctgctacctgtgggtctgcccagagtccctgcaggcctgtccatgcattaaaaattcctattgtctctc

SEQ ID NO: 1726 - DNA, 4622 bp, Homo sapiens
  source 1..4622: mol_type = unassigned DNA
ggctctctccgctccttagctcgggcgtcctggttcgcttcggcgtccgccgtctccgcagctgcctcctcttcctccttcgccaccgccgccaccgccgccgccgcccgcagcaccgcagcccctcccgccatggccgccgccggcgcccggctcagccccggccccggctcggggctccgggggcggccgaggctctgcttccacccggggccgccgccactgctgccgctgctgctgctgttcctgctcctgctgccgccgccgccgctgctggccggcgccaccgccgctgcctcgcgggagcccgacagcccgtgccggctgaagaccgtcacggtgtccacactgcccgccctgcgggagagcgacatcggctggagcggcgcccgcgccggggccggggctgggaccggggccggagccgccgccgccgccgcgtccccgggctctcctggctctgccggcaccgccgccgagtcgcgcctcctgctctttgtgcgtaacgagctgccggggcgcatcgcggtgcaggacgacctggacaacaccgagctgcccttcttcaccctggagatgtctggcacagcagcggacatctcgctggtgcactggagacagcagtggctggagaatggcaccttgtacttccacgtctccatgagcagctccgggcagctggcccaagccaccgcccccactctccaggagccctcggagattgttgaggagcagatgcacatcctccacatttctgtgatgggtggcctcatcgcgctgctgctgctgctgctggtgttcaccgtggcgctgtacgcccagcgacgttggcagaagcgtcgccgcatcccccagaagagcgcaagcacagaagccactcatgagatccactacatcccatctgtgctgctgggtccccaggcgcgggagagcttccgttcatcccggctgcaaacccacaattccgtcattggcgtgcccatccgggagactcccatcctggatgactatgactgtgaggaggatgaggagccacctaggcgggccaaccatgtctcccgcgaggacgagtttggcagccaggtgacccacactctggacagtctgggacatccaggggaagagaaggtggactttgagaagaaaggaggaatcagctttgggagagccaaggggacgtcgggctcagaggcagacgatgaaactcagctgacattctacacggagcagtaccgcagtcgccgccgcagcaaaggtttgctgaaaagcccagtgaacaagacagccctgacactgattgctgtgagttcctgcatcctggccatggtgtgtggcagccagatgtcttgtccactcactgtgaaggtgactctgcatgtgcccgagcacttcatagcagatggaagcagcttcgtggtgagtgaagggagctacctggacatctccgactggttaaacccggccaagctttccctgtattaccagatcaatgccacctccccatgggtgagggacctctgtggacaaaggacgacagatgcctgtgagcagctctgcgacccagaaaccggagagtgcagctgtcatgaaggctatgcccctgaccctgttcacagacacctgtgtgtgcgcagtgactggggacagagtgaaggaccttggccctacacgacacttgagaggggctatgatctggtgacaggggagcaagcccctgaaaagattctcaggtctactttcagcttgggccaaggcctctggcttcctgtcagcaaaagctttgtggttccgcctgtggagctgtccatcaaccccctggccagctgcaagaccgatgtgctcgtcacggaagaccctgcagatgtcagggaagaagcgatgctgtccacatactttgaaaccatcaatgacctgctgtcttccttcgggccagttcgtgactgctctcggaacaatgggggctgcactcgcaacttcaagtgtgtgtctgaccggcaggtggattcctcgggatgtgtgtgccctgaggagctgaaacccatgaaggatggctctggctgctacgaccactccaaaggcattgactgctctgatggctttaatggcggctgtgagcagctgtgcctgcagcagacgctgcccctgccctacgatgccacttcgagcaccatcttcatgttctgcggttgcgtggaggagtacaaactggctcctgatggaaaatcctgcttaatgctctcagatgtctgcgagggccccaagtgcctcaaacctgactccaaattcaatgataccctctttggagagatgctacatggttacaacaaccggacccagcatgtgaaccaaggccaagtcttccagatgacctttagggagaacaacttcatcaaggactttccccagctggccgatgggctgttggtgatcccgctgccggtggaggagcagtgccggggggtcctctccgagccccttccagacctccaactgctcactggagatatcaggtatgatgaggccatgggttaccccatggtgcagcagtggcgggtccggagcaacctctaccgtgtgaagctcagcaccatcaccctcgcagcaggcttcactaatgttctcaagatcctgaccaaggagagcagtcgggaggagctgctgtccttcatccagcactatggctcccactacatcgcagaggccctctatggctcagagctcacctgcatcatccactttcccagcaagaaggtccagcagcagctgtggctccagtatcagaaagagaccacagagctgggcagcaagaaggagctcaagtccatgcccttcatcacctacctctcaggtttgctgacagcccagatgctgtcagatgaccagctcatttcaggtgtggagattcgctgtgaggagaaggggcgctgtccatctacctgtcacctttgccgccggccaggcaaggagcagctgagccccacaccagtgctgctggaaatcaaccgtgtggtgccactttataccctcatccaagacaatggcacaaaggaggccttcaagagtgcactgatgagttcctactggtgctcagggaaaggggatgtgatcgatgactggtgcaggtgtgacctcagcgcctttgatgccaatgggctccccaactgcagcccccttctgcagccggtgctgcggctgtccccaacagtggagccctccagtactgtggtctccttggagtgggtggatgttcagccagctattgggaccaaggtctccgactatattctgcagcataagaaagtggatgaatacacagacactgacctgtacacaggagaattcctgagttttgctgatgacttactctctggcctgggcacatcttgtgtagcagctggtcgaagccatggagaggtccctgaagtcagtatctactcagtcatcttcaagtgtctggagcccgacggtctctacaagttcactctgtatgctgtggatacacgagggaggcactcagagctaagcacggtgaccctgaggacggcctgtccactggtagatgacaacaaggcagaagaaatagctgacaagatctacaatctgtacaatgggtacacaagtggaaaggagcagcagatggcctacaacacactgatggaggtctcagcctcgatgctgttccgagtccagcaccactacaactctcactatgaaaagtttggcgacttcgtctggagaagtgaggatgagctggggcccaggaaggcccacctgattctacggcgactggagagggtgagtagccactgctccagcctcctgcggagtgcctacatccagagccgcgtggaaacagtgccctatcttttctgccgcagcgaggaggtccggcctgcaggcatggtgtggtatagcatcctcaaggacaccaaaatcacgtgtgaggagaagatggtgtcaatggcccgaaacacgtacggggagtccaagggccggtgagggagggtattgccctccgtgagcacagagactctccatgggagggggagcagtattctcctggatcctggggcctgggtgggctgggggacagctgaggatgggcctagcagatgaagcttgccagcaaggccaaagcaaacggtttctcctgtggatagtggacagagacctttgtaaccaatggaattattcatttttctctatcttttattttttcaaagatattatttgactctatcaaaagtctctcctttttaaaccttttcttatggatggctgtcaatcccgaggcagaagttttcaggtggagaccaagcggcctttgctcttcttccttcttcctgccacactctgctttcttcctgccatggacccctggaggagacctatggagggacagttttgacctgacccctagaggagacagttttgacctcttcagcaccaggaaggaagctctgaggatggttgcagtgaggaagcatgggtctttaaggacttctctctcttttttgctggacattattgagtttgtgggaccctgcctcttcctgctacctgtgggtctgcccagagtccctgcaggcctgtccatgcattaaaaattcctattgtctctc

SEQ ID NO: 1727 - DNA, 395 bp, Homo sapiens
  source 1..395: mol_type = unassigned DNA
agatggcctacaacacactgatggaggtctcagcctcgatgctgttccgagtccagcaccactacaactctcactatgaaaagtttggcgacttcgtctggagaagtgaggatgagctggggcccagcctcctggaatcctttatgagcctccaggacataaatcttctggaaaggcggccgggccgcccacagaggccaggcaatccactcagtaatgtctcctggaggatatctgagattgctccaacatcccacactgatatgtcagcaggaatcaaggaaactgcctcctaatctatcctggtgctgctaataagctcactgtgcaaccctgggctctgccgctttctggccctcagtctcctcacctataacatgataaggacgaactag

SEQ ID NO: 1728 - DNA, 3411 bp, Homo sapiens
  source 1..3411: mol_type = unassigned DNA
ctggccccaagcgcgcggggcaaggcggccctgcaggggtgagctttcctctgagaacccggggccttagcgacacgtaatccagttttccgtctccttggtgcagatgaagaaaccgacgcccatgggcgaaagggacctgctcaagttcactcaagaccacagagctgggcagcaagaaggagctcaagtccatgcccttcatcacctacctctcaggtttgctgacagcccagatgctgtcagatgaccagctcatttcaggtgtggagattcgctgtgaggagaaggggcgctgtccatctacctgtcacctttgccgccggccaggcaaggagcagctgagccccacaccagtgctgctggaaatcaaccgtgtggtgccactttataccctcatccaagacaatggcacaaaggaggccttcaagagtgcactgatgagttcctactggtgctcagggaaaggggatgtgatcgatgactggtgcaggtgtgacctcagcgcctttgatgccaatgggctccccaactgcagcccccttctgcagccggtgctgcggctgtccccaacagtggagccctccagtactgtggtctccttggagtgggtggatgttcagccagctattgggaccaaggtctccgactatattctgcagcataagaaagtggatgaatacacagacactgacctgtacacagtttattgctggattacatttattgatttgcggatattgaaccagccttgcatcccagggatgaagccaacttgattgtggtggataagctttttgatgtgctgctggatttggtttgccaatattttattgaagatttttgcatcgatgttcatcagggatattggtctaaaattctctttttttgttgtgtctctgccaggctttggtatcaggatgatgttggcctcataaaatgaattagggaggattccctctttttctattgatttgaatagtttcagaaggaatggtaccagctcatctttgtacctctggtagaattcggctgtgaatccatctggtcctggacttattttggttagtaggctattaattatggcctcaatttcagaacctgttattggtctattcagggattcaacttcttcctggtttagtcttgggaggaggctgtatgtgtccaggaatttatccatttcttctagattttctagtttatttgcatagaggtgtttatagtattctctaatggtagtttgtatttctgtgggatcggtggtgatatcccctttatcattttttattgcgtctatttgattcttctctcttttattctttatgagtcttgctagtagtctatcaattttgttgattttttcaaaaaaccagctcctggattcattgattttttgaagggtttttttttttttgtctctatctccttcagttctgctctcatcttagttatttcttgccttctgctagcttttgtgtgtttgctcttgcttctctagttcttttaattatgatgttagggtgtcagtttcagatctttcttgctttctcctgtgggcatttagtgctataaatctccctctacacactgctttaaatgtgtcccagagattctggtatgttgtgtcctgttctcattggtttcaaagaacatctttatttccgctttcatttcgttatgtacccagtagtcattcaggagcaagttgttcagtttccatgtagttgagcggttttgagtgagtttcttaatcctgagttctagtttgattgcactgtgttctgagagacagtttgttataatttctttcttttacatttgctgaggagtgctttacttcccactgtgtgatcaattttggaataactgcgatgtggtgctgagaagaatgtatattctgttgattggggtggatagttctgtagatgtctattaggtccgcttggtgcagagctgagttcaattcctggatatccttgttaactttctgtctcattgatctatctaatgttgacagtggggtgttaaagtctcccattattattgtgtgggagtctaagtctctttgtaagtctctaaggacttgctttatgaatctgggtgctcctatattgggtgcatatatatttaggatagttagctcgaagaaggtatcttctatttctagtctgctgcaaaggctctgttttgtttccattggaaacagatgttgaattttctgtgtctattaaaatgattgtatagtttatctctctaaatttgttaatatgataagtcacattgatagattttcatattataaaacaacctactatgtgagatttatcccaggaatgtgtaggttgttttatctgtttgttttaattaggatcattctggtctcacaaaatgaattataaaatattttctccttttcagttttctgaagtgtatctgtcttctcagagaatcactgtggttaaaattgatagtatttttttcttaatcattttttagaattcaccagtgaaggcatctgggcttagaccttttcttgcaagaaggtttttaactactaatttagttatttaatagatatagatttacttagattatctgtttcttcttgagtgatctttggcagcttgtgtgttttaaggaacttgttcattccatgtaaattatcaaatttattggaaaaagttgtttatgacattccgttactattcttttgaaatctgttgagattatagtgatattagtctcatcttgatattggtaatgtgtgtctcctctgttttttttctagatcagtttggctagatagctatgacatttatttgtattttcaaagaatcaactttcggttttatctgtttttgcttattgtttcctatttcattgatttatcctctaatttttattataattttctttgtttggcttactttgagtttggttttctccgcattttaatttttgaaatggtagctgaggctattgatttgagacctttcttgtaatgtagtcattccctcttaactactgctttagtagtatctcaaagattgtgttatgttgcgttttcattttcattcagttcaaagtatttccaatttcacttttgttttcttctttgacttatgagttatttagaggcatgccacttcgttttcaaatatttgggagttttttcagaaatttttgttgttgatttttgattccgctatagtcagaaaatatgtttttatgactttaaacattttaaatttattgagactagtttttggtctagatggtctattgctgtattcagtgttcactttaaaataatgtgtatccacttatttatgggtattttataaatgcctgttagataaaatcggttaattatgttattcaagtcttctggagcctttctgattttct

SEQ ID NO: 1729 - DNA, 4001 bp, Homo sapiens
  source 1..4001: mol_type = unassigned DNA
ggttcgcttcggcgtccgccgtctccgcagctgcctcctcttcctccttcgccaccgccgccaccgccgccgccgcccgcagcaccgcagcccctcccgccatggccgccgccggcgcccggctcagccccggccccggctcggggctccgggggcggccgaggctctgcttccacccggggccgccgccactgctgccgctgctgctgctgttcctgctcctgctgccgccgccgccgctgctggccggcgccaccgccgctgcctcgcgggagcccgacagcccgtgccggctgaagaccgtcacggtgtccacactgcccgccctgcgggagagcgacatcggctggagcggcgcccgcgccggggccggggctgggaccggggccggagccgccgccgccgccgcgtccccgggctctcctggctctgccggcaccgccgccgagtcgcgcctcctgctctttgtgcgtaacgagctgccggggcgcatcgcggtgcaggacgacctggacaacaccgagctgcccttcttcaccctggagatgtctggcacagcagcggacatctcgctggtgcactggagacagcagtggctggagaatggcaccttgtacttccacgtctccatgagcagctccgggcagctggcccaagccaccgcccccactctccaggagccctcggagattgttgaggagcagatgcacatcctccacatttctgtgatgggtggcctcatcgcgctgctgctgctgctgctggtgttcaccgtggcgctgtacgcccagcgacgttggcagaagcgtcgccgcatcccccagaagagcgcaagcacagaagccactcatgagatccactacatcccatctgtgctgctgggtccccaggcgcgggagagcttccgttcatcccggctgcaaacccacaattccgtcattggcgtgcccatccgggagactcccatcctggatgactatgactgtgaggaggatgaggagccacctaggcgggccaaccatgtctcccgcgaggacgagtttggcagccaggtgacccacactctggacagtctgggacatccaggggaagagaaggtggactttgagaagaaaggaggaatcagctttgggagagccaaggggacgtcgggctcagaggcagacgatgaaactcagctgacattctacacggagcagtaccgcagtcgccgccgcagcaaaggtttgctgaaaagcccagtgaacaagacagccctgacactgattgctgtgagttcctgcatcctggccatggtgtgtggcagccagatgtcttgtccactcactgtgaaggtgactctgcatgtgcccgagcacttcatagcagatggaagcagcttcgtggtgagtgaagggagctacctggacatctccgactggttaaacccggccaagctttccctgtattaccagatcaatgccacctccccatgggtgagggacctctgtggacaaaggacgacagatgcctgtgagcagctctgcgacccagaaaccggagagtgcagctgtcatgaaggctatgcccctgaccctgttcacagacacctgtgtgtgcgcagtgactggggacagagtgaaggaccttggccctacacgacacttgagaggggctatgatctggtgacaggggagcaagcccctgaaaagattctcaggtctactttcagcttgggccaaggcctctggcttcctgtcagcaaaagctttgtggttccgcctgtggagctgtccatcaaccccctggccagctgcaagaccgatgtgctcgtcacggaagaccctgcagatgtcagggaagaagcgatgctgtccacatactttgaaaccatcaatgacctgctgtcttccttcgggccagttcgtgactgctctcggaacaatgggggctgcactcgcaacttcaagtgtgtgtctgaccggcaggtggattcctcgggatgtgtgtgccctgaggagctgaaacccatgaaggatggctctggctgctacgaccactccaaaggcattgactgctctgatggctttaatggcggctgtgagcagctgtgcctgcagcagacgctgcccctgccctacgatgccacttcgagcaccatcttcatgttctgcggttgcgtggaggagtacaaactggctcctgatggaaaatcctgcttaatgctctcagatgtctgcgagggccccaagtgcctcaaacctgactccaaattcaatgataccctctttggagagatgctacatggttacaacaaccggacccagcatgtgaaccaaggccaagtcttccagatgacctttagggagaacaacttcatcaaggactttccccagctggccgatgggctgttggtgatcccgctgccggtggaggagcagtgccggggggtcctctccgagccccttccagacctccaactgctcactggagatatcaggtatgatgaggccatgggttaccccatggtgcagcagtggcgggtccggagcaacctctaccgtgtgaagctcagcaccatcaccctcgcagcaggcttcactaatgttctcaagatcctgaccaaggagagcagtcgggaggagctgctgtccttcatccagcactatggctcccactacatcgcagaggccctctatggctcagagctcacctgcatcatccactttcccagcaagaaggtccagcagcagctgtggctccagtatcagaaagagaccacagagctgggcagcaagaaggagctcaagtccatgcccttcatcacctacctctcaggtttgctgacagcccagatgctgtcagatgaccagctcatttcaggtgtggagattcgctgtgaggagaaggggcgctgtccatctacctgtcacctttgccgccggccaggcaaggagcagctgagccccacaccagtgctgctggaaatcaaccgtgtggtgccactttataccctcatccaagacaatggcacaaaggaggccttcaagagtgcactgatgagttcctactggtgctcagggaaaggggatgtgatcgatgactggtgcaggtgtgacctcagcgcctttgatgccaatgggctccccaactgcagcccccttctgcagccggtgctgcggctgtccccaacagtggagccctccagtactgtggtctccttggagtgggtggatgttcagccagctattgggaccaaggtctccgactatattctgcagcataagaaagtggatgaatacacagacactgacctgtacacaggagaattcctgagttttgctgatgacttactctctggcctgggcacatcttgtgtagcagctggtcgaagccatggagaggtccctgaagtcagtatctactcagtcatcttcaagtgtctggagcccgacggtctctacaagttcactctgtatgctgtggatacacgagggaggcactcagagctaagcacggtgaccctgaggacggcctgtccactggtagatgacaacaaggcagaagaaatagctgacaagatctacaatctgtacaatgggtacacaagtggaaaggagcagcagatggcctacaacacactgatggaggtctcagcctcgatgctgttccgagtccagcaccactacaactctcactatgaaaagtttggcgacttcgtctggagaagtgaggatgagctggggcccaggaaggcccacctgattctacggcgactggagagggtgagtagccactgctccagcctcctgcggagtgcctacatccagagccgcgtggaaacagtgccctatcttttctgccgcagcgaggaggtccggcctgcaggcatggtgtggtatagcatcctcaaggacaccaaaatcacgtgtgaggagaagatggtgtcaatggcccgaaacacgtacggggagtccaagggccgatattatttgactctatcaaaagtctctcctttttaa

SEQ ID NO: 1730 - DNA, 4747 bp, Homo sapiens
  source 1..4747: mol_type = unassigned DNA
ggttcgcttcggcgtccgccgtctccgcagctgcctcctcttcctccttcgccaccgccgccaccgccgccgccgcccgcagcaccgcagcccctcccgccatggccgccgccggcgcccggctcagccccggccccggctcggggctccgggggcggccgaggctctgcttccacccggggccgccgccactgctgccgctgctgctgctgttcctgctcctgctgccgccgccgccgctgctggccggcgccaccgccgctgcctcgcgggagcccgacagcccgtgccggctgaagaccgtcacggtgtccacactgcccgccctgcgggagagcgacatcggctggagcggcgcccgcgccggggccggggctgggaccggggccggagccgccgccgccgccgcgtccccgggctctcctggctctgccggcaccgccgccgagtcgcgcctcctgctctttgtgcgtaacgagctgccggggcgcatcgcggtgcaggacgacctggacaacaccgagctgcccttcttcaccctggagatgtctggcacagcagcggacatctcgctggtgcactggagacagcagtggctggagaatggcaccttgtacttccacgtctccatgagcagctccgggcagctggcccaagccaccgcccccactctccaggagccctcggagattgttgaggagcagatgcacatcctccacatttctgtgatgggtggcctcatcgcgctgctgctgctgctgctggtgttcaccgtggcgctgtacgcccagcgacgttggcagaagcgtcgccgcatcccccagaagagcgcaagcacagaagccactcatgagatccactacatcccatctgtgctgctgggtccccaggcgcgggagagcttccgttcatcccggctgcaaacccacaattccgtcattggcgtgcccatccgggagactcccatcctggatgactatgactgtgaggaggatgaggagccacctaggcgggccaaccatgtctcccgcgaggacgagtttggcagccaggtgacccacactctggacagtctgggacatccaggggaagagaaggtggactttgagaagaaagcagcagctgaggcgactcaggagacagtggagtccctgatgcagaagttcaaggagagtttccgcgctaacacgcccatcgagatcggtcagctgcaaccacccctgcgcagcacatcggcagggaagaggaagcggaggagcaagtctcgaggaggaatcagctttgggagagccaaggggacgtcgggctcagaggcagacgatgaaactcagctgacattctacacggagcagtaccgcagtcgccgccgcagcaaaggtttgctgaaaagcccagtgaacaagacagccctgacactgattgctgtgagttcctgcatcctggccatggtgtgtggcagccagatgtcttgtccactcactgtgaaggtgactctgcatgtgcccgagcacttcatagcagatggaagcagcttcgtggtgagtgaagggagctacctggacatctccgactggttaaacccggccaagctttccctgtattaccagatcaatgccacctccccatgggtgagggacctctgtggacaaaggacgacagatgcctgtgagcagctctgcgacccagaaaccggagagtgcagctgtcatgaaggctatgcccctgaccctgttcacagacacctgtgtgtgcgcagtgactggggacagagtgaaggaccttggccctacacgacacttgagaggggctatgatctggtgacaggggagcaagcccctgaaaagattctcaggtctactttcagcttgggccaaggcctctggcttcctgtcagcaaaagctttgtggttccgcctgtggagctgtccatcaaccccctggccagctgcaagaccgatgtgctcgtcacggaagaccctgcagatgtcagggaagaagcgatgctgtccacatactttgaaaccatcaatgacctgctgtcttccttcgggccagttcgtgactgctctcggaacaatgggggctgcactcgcaacttcaagtgtgtgtctgaccggcaggtggattcctcgggatgtgtgtgccctgaggagctgaaacccatgaaggatggctctggctgctacgaccactccaaaggcattgactgctctgatggctttaatggcggctgtgagcagctgtgcctgcagcagacgctgcccctgccctacgatgccacttcgagcaccatcttcatgttctgcggttgcgtggaggagtacaaactggctcctgatggaaaatcctgcttaatgctctcagatgtctgcgagggccccaagtgcctcaaacctgactccaaattcaatgataccctctttggagagatgctacatggttacaacaaccggacccagcatgtgaaccaaggccaagtcttccagatgacctttagggagaacaacttcatcaaggactttccccagctggccgatgggctgttggtgatcccgctgccggtggaggagcagtgccggggggtcctctccgagccccttccagacctccaactgctcactggagatatcaggtatgatgaggccatgggttaccccatggtgcagcagtggcgggtccggagcaacctctaccgtgtgaagctcagcaccatcaccctcgcagcaggcttcactaatgttctcaagatcctgaccaaggagagcagtcgggaggagctgctgtccttcatccagcactatggctcccactacatcgcagaggccctctatggctcagagctcacctgcatcatccactttcccagcaagaaggtccagcagcagctgtggctccagtatcagaaagagaccacagagctgggcagcaagaaggagctcaagtccatgcccttcatcacctacctctcaggtttgctgacagcccagatgctgtcagatgaccagctcatttcaggtgtggagattcgctgtgaggagaaggggcgctgtccatctacctgtcacctttgccgccggccaggcaaggagcagctgagccccacaccagtgctgctggaaatcaaccgtgtggtgccactttataccctcatccaagacaatggcacaaaggaggccttcaagagtgcactgatgagttcctactggtgctcagggaaaggggatgtgatcgatgactggtgcaggtgtgacctcagcgcctttgatgccaatgggctccccaactgcagcccccttctgcagccggtgctgcggctgtccccaacagtggagccctccagtactgtggtctccttggagtgggtggatgttcagccagctattgggaccaaggtctccgactatattctgcagcataagaaagtggatgaatacacagacactgacctgtacacaggagaattcctgagttttgctgatgacttactctctggcctgggcacatcttgtgtagcagctggtcgaagccatggagaggtccctgaagtcagtatctactcagtcatcttcaagtgtctggagcccgacggtctctacaagttcactctgtatgctgtggatacacgagggaggcactcagagctaagcacggtgaccctgaggacggcctgtccactggtagatgacaacaaggcagaagaaatagctgacaagatctacaatctgtacaatgggtacacaagtggaaaggagcagcagatggcctacaacacactgatggaggtctcagcctcgatgctgttccgagtccagcaccactacaactctcactatgaaaagtttggcgacttcgtctggagaagtgaggatgagctggggcccaggaaggcccacctgattctacggcgactggagagggtgagtagccactgctccagcctcctgcggagtgcctacatccagagccgcgtggaaacagtgccctatcttttctgccgcagcgaggaggtccggcctgcaggcatggtgtggtatagcatcctcaaggacaccaaaatcacgtgtgaggagaagatggtgtcaatggcccgaaacacgtacggggagtccaagggccggtgagggagggtattgccctccgtgagcacagagactctccatgggagggggagcagtattctcctggatcctggggcctgggtgggctgggggacagctgaggatgggcctagcagatgaagcttgccagcaaggccaaagcaaacggtttctcctgtggatagtggacagagacctttgtaaccaatggaattattcatttttctctatcttttattttttcaaagatattatttgactctatcaaaagtctctcctttttaaaccttttcttatggatggctgtcaatcccgaggcagaagttttcaggtggagaccaagcggcctttgctcttcttccttcttcctgccacactctgctttcttcctgccatggacccctggaggagacctatggagggacagttttgacctgacccctagaggagacagttttgacctcttcagcaccaggaaggaagctctgaggatggttgcagtgaggaagcatgggtctttaaggacttctctctcttttttgctggacattattgagtttgtgggaccctgcctcttcctgctacctgtgggtctgcccagagtccctgcaggcctgtccatgcattaaaaattcctattgtctctcttt

SEQ ID NO: 1731 - DNA, 4995 bp, Homo sapiens
  source 1..4995: mol_type = unassigned DNA
cggaagagccagagctgcgagcgcctggagctggatctctctccggtcgcgcacgccgaggccagtagggagagaagatggtggttctccgcagcagcttggagctgcacaaccactccgcggcctcggccacgggctccttggacctgtccagtgacttcctcagtctggagcacatcggccggaggcggctccgctcggccggcgcggcgcagaagaaacccgcggcgaccacagccaaagcgggcgcagttggccagacagcaggctgataaaaaaaaagaagagcacagagaagacaaagtgattccagttactcggtcattgagggctagaaacatcgttcaaagtacagaacacttacatgaagataatggtgatgttgaagtgcgtcgaagttgtaggattagaagtcgttatagtggtgtaaaccagtccatgctgtttgacaaacttataactaacactgctgaagctgtacttcaaaaaatggatgacatgaagaagatgcgtagacagcgaatgagagaacttgaagacttgggagtgtttaatgaaacagaagaaagcaatcttaatatgtacacaagaggaaaacagaaagatattcaaagaactgatgaagaaacaactgataatcaagaaggcagtgtggagtcatctgaagagggtgaagaccaagaacatgaagatgatggtgaagatgaagatgatgaagatgatgatgatgatgacgatgatgatgatgatgatgatgatgaagatgatgaagatgaagaagatggagaagaagagaatcagaagcgatattatcttagacagagaaaagctactgtttactatcaggctccattggaaaaacctcgtcaccagagaaagcccaacatattttatagtggcccagcttctcctgcaagaccaagataccgattatcttccgcaggaccaagaagtccttactgtaaacgaatgaacaggcgaaggcatgcaatccacagtagtgactcgacttcatcttcctcctctgaagatgaacagcactttgagaggcggaggaaaaggagtcgtaatagggctatcaataggtgcctcccactaaattttcggaaagatgaattaaaaggcatttataaagatcgaatgaaaattggagcaagccttgccgatgttgatccaatgcaactagattcttcagtacgatttgatagtgttggtggcctgtctaatcatatagcagctctaaaagagatggtggtgtttccattactttatccagaagtctttgaaaaatttaaaattcaacccccaagaggttgtttgttttatgggccacctggaactggaaagactctggttgccagagcacttgccaatgagtgcagtcaaggggataaaagagtagcatttttcatgaggaaaggtgctgattgtctaagtaaatgggtaggagaatctgaaagacagctacgattgctgtttgatcaggcctatcagatgcgcccatcaattattttttttgacgaaattgatggtctggctccagtacggtcaagcaggcaagatcagattcacagttctattgtttccaccctgctagctcttatggatggattggacagcagaggggaaattgtggtcattggtgctacgaacaggctagattctatagatcctgctttacgaaggcctggtcgctttgatagagaattcctctttagcctgcctgataaagaggctcgaaaagagattctaaagattcacaccagggattggaatcccaaaccactggacacatttttagaagagctagcagaaaactgtgttggatactgtggagcagatattaaatcaatatgtgctgaagctgctttatgtgctttacgacgacgctacccacagatctataccactagtgagaaactgcagttggatctctcttcaattaatatctcagctaaggatttcgaggtagctatgcaaaagatgataccagcctcccaaagagctgtgacatcacctgggcaggcactgtccaccgttgtgaaaccactcctgcaaaacactgttgacaagattttagaagccctgcagagagtatttccacatgcagaattcagaacaaataaaacattagactcagatatttcttgtcctctgctagaaagtgacttggcttacagtgatgatgatgttccatcagtttatgaaaatggactttctcagaaatcttctcataaggcaaaagacaattttaattttcttcatttgaatagaaatgcttgttaccaacctatgtcttttcgaccaagaatattgatagtaggagaaccaggatttgggcaaggttctcacttggcaccagctgtcattcatgctttggaaaagtttactgtatatacattagacattcctgttctttttggagttagtactacatcccctgaagaaacatgtgcccaggtgattcgtgaagctaagagaacagcaccaagtatagtgtatgttcctcatatccacgtgtggtgggaaatagttggaccgacacttaaagccacatttaccacattattacagaatattccttcatttgctccagttttactacttgcaacttctgacaaaccccattccgctttgccagaagaggtgcaagaattgtttatccgtgattatggagagatttttaatgtccagttaccggataaagaagaacggacaaaattttttgaagatttaattctaaaacaagctgctaagcctcctatatcaaaaaagaaagcagttttgcaggctttggaggtactcccagtagcaccaccacctgagccaagatcactgacagcagaagaagtgaaacgactagaagaacaagaagaagatacatttagagaactgaggattttcttaagaaatgttacacataggcttgctattgacaagcgattccgagtgtttactaagcctgttgaccctgatgaggttcctgattatgtcactgtaataaagcaaccaatggacctttcatctgtaatcagtaaaattgatctacacaagtatctgactgtgaaagactatttgagagatattgatctaatctgtagtaatgccttagaatacaatccagatagagatcctggagatcgtcttattaggcatagagcctgtgctttaagagatactgcctatgccataattaaagaagaacttgatgaagactttgagcagctctgtgaagaaattcaggaatctagaaagaaaagaggttgtagctcctccaaatatgccccgtcttactaccatgtgatgccaaagcaaaattccactcttgttggtgataaaagatcagacccagagcagaatgaaaagctaaagacaccgagtactcctgtggcttgcagcactcctgaaatgtgtgttctgcgaatgactcgagctagacgttcccaggtagaacagcagcagctcatcactgttgaaaaggctttggcaattctttctcagcctacaccctcacttgttgtggatcatgagcgattaaaaaatcttttgaagactgttgttaaaaaaagtcaaaactacaacatatttcagttggaaaatttgtatgcagtaatcagccaatgtatttatcggcatcgcaaggaccatgataaaacatcacttattcagaaaatggagcaagaggtagaaaacttcagttgttccagatgatgatgtcatggtatcgagtattctttatattcagttcctatttaagtcatttttgtcatgtccgcctaattgatgtagtatgaaaccctgcatctttaaggaaaagattaaaatagtaaaataaaagtatttaaactttcctgatatttatgtacatattaagataaatgtcatgtgtaagataactgataaatattggaactttgctagaacaagaccctgtagtaatagtaataatagttgaagtttggccaactcttaataaagttattttggtaactaatgttttatggcacttaagaataattagcagcgttaaattttgtttgtattaagcacttttaattttatccttcctaaaaatagtttattgtatctgacaagaaacttacttaaccattgtgtccttcccatcttttttgtcatctttgttttcttcaaatgccctcctcccatctgccttgagattccctcgtcttcacttaaaagccagagtgcaagtcatgatttgcgggagggctcttgaaccacttctggctgcaccacaattctgtacttgagtatcacagtcattgtttttgagacaaacatttttataattctaatttgggttaataaagattttaaatatttcttggtttacttttgtaattatatacacaacaaatgtattaataactaccttgttaaacaccttttaatagcacaaggtttttatatttgcaagctgttgatatctttctaaaactgtttaggttatagtctattgatactttttatatacaattttataaatataaatattataattttatattaatggtaccaaaaatacatttcttaaggttaaaagcatgcacttccatgcatacttgcttttggggagagtggggagaagacattctaataatcagtttgtgaaatagcttctgttggaaaccttttgaggggaataaggaatggtcatctaaaatgagagattctggattttaatgcagttcaaagttgagctgtatttttgttgttgatttatctggattttttttaaagccttctaaaacccagtgaattcaataccttaattagtacatactatcttatgtaatgcataaagcaatgccagtcactgagaacatttaaatatatttatattcctggagatacacattctcatttttgttggtttattataaattattcttctagatgcatcttttataactaggatttcattttgtgtgtatagcttatgtaataaattttaaaggtgaaaactctcttaaa

SEQ ID NO: 1732 - DNA, 5565 bp, Homo sapiens
  source 1..5565: mol_type = unassigned DNA
cgcggagcttgtggcgccagaattcggagcgcggaagagccagagctgcgagcgcctggagctggatctctctccggtcgcgcacgccgaggccagtagggagagaagatggtggttctccgcagcagcttggagctgcacaaccactccgcggcctcggccacgggctccttggacctgtccagtgacttcctcagtctggagcacatcggccggaggcggctccgctcggccggcgcggcgcagaagaaacccgcggcgaccacagccaaagcgggcgatgggtcatcagttaaggaagttgaaacctaccaccggacacgtgctttaagatctttgagaaaagatgcacagaattcttcagattctagttttgagaagaatgtggaaataacggagcaacttgctaatggcaggcattttacaaggcagttggccagacagcaggctgataaaaaaaaagaagagcacagagaagacaaagtgattccagttactcggtcattgagggctagaaacatcgttcaaagtacagaacacttacatgaagataatggtgatgttgaagtgcgtcgaagttgtaggattagaagtcgttatagtggtgtaaaccagtccatgctgtttgacaaacttataactaacactgctgaagctgtacttcaaaaaatggatgacatgaagaagatgcgtagacagcgaatgagagaacttgaagacttgggagtgtttaatgaaacagaagaaagcaatcttaatatgtacacaagaggaaaacagaaagatattcaaagaactgatgaagaaacaactgataatcaagaaggcagtgtggagtcatctgaagagggtgaagaccaagaacatgaagatgatggtgaagatgaagatgatgaagatgatgatgatgatgacgatgatgatgatgatgatgatgatgaagatgatgaagatgaagaagatggagaagaagagaatcagaagcgatattatcttagacagagaaaagctactgtttactatcaggctccattggaaaaacctcgtcaccagagaaagcccaacatattttatagtggcccagcttctcctgcaagaccaagataccgattatcttccgcaggaccaagaagtccttactgtaaacgaatgaacaggcgaaggcatgcaatccacagtagtgactcgacttcatcttcctcctctgaagatgaacagcactttgagaggcggaggaaaaggagtcgtaatagggctatcaataggtgcctcccactaaattttcggaaagatgaattaaaaggcatttataaagatcgaatgaaaattggagcaagccttgccgatgttgatccaatgcaactagattcttcagtacgatttgatagtgttggtggcctgtctaatcatatagcagctctaaaagagatggtggtgtttccattactttatccagaagtctttgaaaaatttaaaattcaacccccaagaggttgtttgttttatgggccacctggaactggaaagactctggttgccagagcacttgccaatgagtgcagtcaaggggataaaagagtagcatttttcatgaggaaaggtgctgattgtctaagtaaatgggtaggagaatctgaaagacagctacgattgctgtttgatcaggcctatcagatgcgcccatcaattattttttttgacgaaattgatggtctggctccagtacggtcaagcaggcaagatcagattcacagttctattgtttccaccctgctagctcttatggatggattggacagcagaggggaaattgtggtcattggtgctacgaacaggctagattctatagatcctgctttacgaaggcctggtcgctttgatagagaattcctctttagcctgcctgataaagaggctcgaaaagagattctaaagattcacaccagggattggaatcccaaaccactggacacatttttagaagagctagcagaaaactgtgttggatactgtggagcagatattaaatcaatatgtgctgaagctgctttatgtgctttacgacgacgctacccacagatctataccactagtgagaaactgcagttggatctctcttcaattaatatctcagctaaggatttcgaggtagctatgcaaaagatgataccagcctcccaaagagctgtgacatcacctgggcaggcactgtccaccgttgtgaaaccactcctgcaaaacactgttgacaagattttagaagccctgcagagagtatttccacatgcagaattcagaacaaataaaacattagactcagatatttcttgtcctctgctagaaagtgacttggcttacagtgatgatgatgttccatcagtttatgaaaatggactttctcagaaatcttctcataaggcaaaagacaattttaattttcttcatttgaatagaaatgcttgttaccaacctatgtcttttcgaccaagaatattgatagtaggagaaccaggatttgggcaaggttctcacttggcaccagctgtcattcatgctttggaaaagtttactgtatatacattagacattcctgttctttttggagttagtactacatcccctgaagaaacatgtgcccaggtgattcgtgaagctaagagaacagcaccaagtatagtgtatgttcctcatatccacgtgtggtgggaaatagttggaccgacacttaaagccacatttaccacattattacagaatattccttcatttgctccagttttactacttgcaacttctgacaaaccccattccgctttgccagaagaggtgcaagaattgtttatccgtgattatggagagatttttaatgtccagttaccggataaagaagaacggacaaaattttttgaagatttaattctaaaacaagctgctaagcctcctatatcaaaaaagaaagcagttttgcaggctttggaggtactcccagtagcaccaccacctgagccaagatcactgacagcagaagaagtgaaacgactagaagaacaagaagaagatacatttagagaactgaggattttcttaagaaatgttacacataggcttgctattgacaagcgattccgagtgtttactaagcctgttgaccctgatgaggttcctgattatgtcactgtaataaagcaaccaatggacctttcatctgtaatcagtaaaattgatctacacaagtatctgactgtgaaagactatttgagagatattgatctaatctgtagtaatgccttagaatacaatccagatagagatcctggagatcgtcttattaggcatagagcctgtgctttaagagatactgcctatgccataattaaagaagaacttgatgaagactttgagcagctctgtgaagaaattcaggaatctagaaagaaaagaggttgtagctcctccaaatatgccccgtcttactaccatgtgatgccaaagcaaaattccactcttgttggtgataaaagatcagacccagagcagaatgaaaagctaaagacaccgagtactcctgtggcttgcagcactcctgctcagttgaagaggaaaattcgcaaaaagtcaaactggtacttaggcaccataaaaaagcgaaggaagatttcacaggcaaaggatgatagccagaatgccatagatcacaaaattgagagtgatacagaggaaactcaagacacaagtgtagatcataatgagaccggaaacacaggagagtcttcggtggaagaaaatgaaaaacagcaaaatgcctctgaaagcaaactggaattgagaaataattcaaatacttgtaatatagagaatgagcttgaagactctaggaagactacagcatgtacagaattgagagacaagattgcttgtaatggagatgcttctagctctcagataatacatatttctgatgaaaatgaaggaaaagaaatgtgtgttctgcgaatgactcgagctagacgttcccaggtagaacagcagcagctcatcactgttgaaaaggctttggcaattctttctcagcctacaccctcacttgttgtggatcatgagcgattaaaaaatcttttgaagactgttgttaaaaaaagtcaaaactacaacatatttcagttggaaaatttgtatgcagtaatcagccaatgtatttatcggcatcgcaaggaccatgataaaacatcacttattcagaaaatggagcaagaggtagaaaacttcagttgttccagatgatgatgtcatggtatcgagtattctttatattcagttcctatttaagtcatttttgtcatgtccgcctaattgatgtagtatgaaaccctgcatctttaaggaaaagattaaaatagtaaaataaaagtatttaaactttcctgatatttatgtacatattaagataaatgtcatgtgtaagataactgataaatattggaactttgctagaacaagaccctgtagtaatagtaataatagttgaagtttggccaactcttaataaagttattttggtaactaatgttttatggcacttaagaataattagcagcgttaaattttgtttgtattaagcacttttaattttatccttcctaaaaatagtttattgtatctgacaagaaacttacttaaccattgtgtccttcccatcttttttgtcatctttgttttcttcaaatgccctcctcccatctgccttgagattccctcgtcttcacttaaaagccagagtgcaagtcatgatttgcgggagggctcttgaaccacttctggctgcaccacaattctgtacttgagtatcacagtcattgtttttgagacaaacatttttataattctaatttgggttaataaagattttaaatatttcttggtttacttttgtaattatatacacaacaaatgtattaataactaccttgttaaacaccttttaatagcacaaggtttttatatttgcaagctgttgatatctttctaaaactgtttaggttatagtctattgatactttttatatacaattttataaatataaatattataattttatattaatggtaccaaaaatacatttcttaaggttaaaagcatgcacttccatgcatacttgcttttggggagagtggggagaagacattctaataatcagtttgtgaaatagcttctgttggaaaccttttgaggggaataaggaatggtcatctaaaatgagagattctggattttaatgcagttcaaagttgagctgtatttttgttgttgatttatctggattttttttaaagccttctaaaacccagtgaattcaataccttaattagtacatactatcttatgtaatgcataaagcaatgccagtcactgagaacatttaaatatatttatattcctggagatacacattctcatttttgttggtttattataaattattcttctagatgcatcttttataactaggatttcattttgtgtgtatagcttatgtaataaattttaaaggtgaaaactctcttaaa

SEQ ID NO: 1733 - DNA, 5143 bp, Homo sapiens
  source 1..5143: mol_type = unassigned DNA
aggtttgggcttggagttgggccctgaatggcgctttgctgtgaatctccgcggggaggctcttccaaccaggggctgagcttctgcgctgtggagaagccaggatctcatttgcctctttcaacatcactcctgctggagccaccaccagctcaatccttggcatcatcacctcactgaggagggtggtgtggtccttctcagcaagaaagtcgatgtctcgggaagtgacgatgcccaccggcttgctgcccatggtgcctgtctcagtgatggggataccagagaagccatgccgcatcgtggcctccagcacatcacccacagggtgcgaggggctcagcaccatggggtccgtgatgaagccatgttcaaacttcttgaccttccgcacctccttggcctggaactctggggtgcagttgtggtgaatgaaaccaatacctcccaccagagccatcgtgatggccatgttgccctctgtcacagtgtccatggaggaggagatcagcggcgtcttcagcgtgatcttccaggatgggtcatcagttaaggaagttgaaacctaccaccggacacgtgctttaagatctttgagaaaagatgcacagaattcttcagattctagttttgagaagaatgtggaaataacggagcaacttgctaatggcaggcattttacaaggcagttggccagacagcaggctgataaaaaaaaagaagagcacagagaagacaaagtgattccagttactcggtcattgagggctagaaacatcgttcaaagtacagaacacttacatgaagataatggtgatgttgaagtgcgtcgaagttgtaggattagaagtcgttatagtggtgtaaaccagtccatgctgtttgacaaacttataactaacactgctgaagctgtacttcaaaaaatggatgacatgaagaagatgcgtagacagcgaatgagagaacttgaagacttgggagtgtttaatgaaacagaagaaagcaatcttaatatgtacacaagaggaaaacagaaagatattcaaagaactgatgaagaaacaactgataatcaagaaggcagtgtggagtcatctgaagagggtgaagaccaagaacatgaagatgatggtgaagatgaagatgatgaagatgatgatgatgatgacgatgatgatgatgatgatgatgatgaagatgatgaagatgaagaagatggagaagaagagaatcagaagcgatattatcttagacagagaaaagctactgtttactatcaggctccattggaaaaacctcgtcaccagagaaagcccaacatattttatagtggcccagcttctcctgcaagaccaagataccgattatcttccgcaggaccaagaagtccttactgtaaacgaatgaacaggcgaaggcatgcaatccacagtagtgactcgacttcatcttcctcctctgaagatgaacagcactttgagaggcggaggaaaaggagtcgtaatagggctatcaataggtgcctcccactaaattttcggaaagatgaattaaaaggcatttataaagatcgaatgaaaattggagcaagccttgccgatgttgatccaatgcaactagattcttcagtacgatttgatagtgttggtggcctgtctaatcatatagcagctctaaaagagatggtggtgtttccattactttatccagaagtctttgaaaaatttaaaattcaacccccaagaggttgtttgttttatgggccacctggaactggaaagactctggttgccagagcacttgccaatgagtgcagtcaaggggataaaagagtagcatttttcatgaggaaaggtgctgattgtctaagtaaatgggtaggagaatctgaaagacagctacgattgctgtttgatcaggcctatcagatgcgcccatcaattattttttttgacgaaattgatggtctggctccagtacggtcaagcaggcaagatcagattcacagctcttatggatggattggacagcagaggggaaattgtggtcattggtgctacgaacaggctagattctatagatcctgctttacgaaggcctggtcgctttgatagagaattcctctttagcctgcctgataaagaggctcgaaaagagattctaaagattcacaccagggattggaatcccaaaccactggacacatttttagaagagctagcagaaaactgtgatactgtggagcagatattaaatcaatatgtgctgaagctgctttatgtgctttacgacgacgctacccacagatctataccactagtgagaaactgcagttggatctctcttcaattaatatctcagctaaggatttcgaggtagctatgcaaaagatgataccagcctcccaaagagctgtgacatcacctgggcaggcactgtccaccgttgtgaaaccactcctgcaaaacactgttgacaagattttagaagccctgcagagagtatttccacatgcagaattcagaacaaataaaacattagactcagatatttcttgtcctctgctagaaagtgacttggcttacagtgatgatgatgttccatcagtttatgaaaatggactttctcagaaatcttctcataaggcaaaagacaattttaattttcttcatttgaatagaaatgcttgttaccaacctatgtcttttcgaccaagaatattgatagtaggagaaccaggatttgggcaaggttctcacttggcaccagctgtcattcatgctttggaaaagtttactgtatatacattagacattcctgttctttttggagttagtactacatcccctgaagaaacatgtgcccaggtgattcgtgaagctaagagaacagcaccaagtatagtgtatgttcctcatatccacgtgtggtgggaaatagttggaccgacacttaaagccacatttaccacattattacagaatattccttcatttgctccagttttactacttgcaacttctgacaaaccccattccgctttgccagaagaggtgcaagaattgtttatccgtgattatggagagatttttaatgtccagttaccggataaagaagaacggacaaaattttttgaagatttaattctaaaacaagctgctaagcctcctatatcaaaaaagaaagcagttttgcaggctttggaggtactcccagtagcaccaccacctgagccaagatcactgacagcagaagaagtgaaacgactagaagaacaagaagaagatacatttagagaactgaggattttcttaagaaatgttacacataggcttgctattgacaagcgattccgagtgtttactaagcctgttgaccctgatgaggttcctgattatgtcactgtaataaagcaaccaatggacctttcatctgtaatcagtaaaattgatctacacaagtatctgactgtgaaagactatttgagagatattgatctaatctgtagtaatgccttagaatacaatccagatagagatcctggagatcgtcttattaggcatagagcctgtgctttaagagatactgcctatgccataattaaagaagaacttgatgaagactttgagcagctctgtgaagaaattcaggaatctagaaagaaaagaggttgtagctcctccaaatatgccccgtcttactaccatgtgatgccaaagcaaaattccactcttgttggtgataaaagatcagacccagagcagaatgaaaagctaaagacaccgagtactcctgtggcttgcagcactcctgctcagttgaagaggaaaattcgcaaaaagtcaaactggtacttaggcaccataaaaaagcgaaggaagatttcacaggcaaaggatgatagccagaatgccatagatcacaaaattgagagtgatacagaggaaactcaagacacaagtgtagatcataatgagaccggaaacacaggagagtcttcggtggaagaaaatgaaaaacagcaaaatgcctctgaaagcaaactggaattgagaaataattcaaatacttgtaatatagagaatgagcttgaagactctaggaagactacagcatgtacagaattgagagacaagattgcttgtaatggagatgcttctagctctcagataatacatatttctgatgaaaatgaaggaaaagaaatgtgtgttctgcgaatgactcgagctagacgttcccaggtagaacagcagcagctcatcactgttgaaaaggctttggcaattctttctcagcctacaccctcacttgttgtggatcatgagcgattaaaaaatcttttgaagactgttgttaaaaaaagtcaaaactacaacatatttcagttggaaaatttgtatgcagtaatcagccaatgtatttatcggcatcgcaaggaccatgataaaacatcacttattcagaaaatggagcaagaggtagaaaacttcagttgttccagatgatgatgtcatggtatcgagtattctttatattcagttcctatttaagtcatttttgtcatgtccgcctaattgatgtagtatgaaaccctgcatctttaaggaaaagattaaaatagtaaaataaaagtatttaaactttcctgatatttatgtacatattaagataaatgtcatgtgtaagataactgataaatattggaactttgctagaacaagaccctgtagtaatagtaataatagttgaagtttggccaactcttaataaagttattttggtaactaatgttttatggcacttaagaataattagcagcgttaaattttgtttgtattaagcacttttaattttatccttcctaaaaatagtttattgtatctgacaagaaacttacttaaccattgtgtccttcccatcttttttgtcatctttgttttcttcaaatgccctcctcccatctgccttgagattccctcgtcttcacttaaaagccagagtgcaagtcatgatttgcgggagggctcttgaaccacttctggctgcaccacaattctgtacttgagtatcacagtcattgtttttgagacaaacatttttataattctaatttgggttaataaagattttaaatatt

SEQ ID NO: 1734 - DNA, 4650 bp, Homo sapiens
  source 1..4650: mol_type = unassigned DNA
ccgaggccagtagggagagaagatggtggttctccgcagcagcttggagctgcacaaccactccgcggcctcggccacgggctccttggacctgtccagtgacttcctcagtctggagcacatcggccggaggcggctccgctcggccggcgcggcgcagaagaaacccgcggcgaccacagccaaagcgggcgtgagatgggtcatcagttaaggaagttgaaacctaccaccggacacgtgctttaagatctttgagaaaagatgcacagaattcttcagattctagttttgagaagaatgtggaaataacggagcaacttgctaatggcaggcattttacaaggcagttggccagacagcaggctgataaaaaaaaagaagagcacagagaagacaaagtgattccagttactcggtcattgagggctagaaacatcgttcaaagtacagaacacttacatgaagataatggtgatgttgaagtgcgtcgaagttgtaggattagaagtcgttatagtggtgtaaaccagtccatgctgtttgacaaacttataactaacactgctgaagctgtacttcaaaaaatggatgacatgaagaagatgcgtagacagcgaatgagagaacttgaagacttgggagtgtttaatgaaacagaagaaagcaatcttaatatgtacacaagaggaaaacagaaagatattcaaagaactgatgaagaaacaactgataatcaagaaggcagtgtggtcatctgaagagggtgaagaccaagaacatgaagatgatggtgaagatgaagatgatgaagatgatgatgatgatgacgatgatgatgatgatgatgatgatgaagatgatgaagatgaagaagatggagaagaagagaatcagaagcgatattatcttagacagagaaaagctactgtttactatcaggctccattggaaaaacctcgtcaccagagaaagcccaacatattttatagtggcccagcttctcctgcaagaccaagataccgattatcttccgcaggaccaagaagtccttactgtaaacgaatgaacaggcgaaggcatgcaatccacagtagtgactcgacttcatcttcctcctctgaagatgaacagcactttgagaggcggaggaaaaggagtcgtaatagggctatcaataggtgcctcccactaaattttcggaaagatgaattaaaaggcatttataaagatcgaatgaaaattggagcaagccttgccgatgttgatccaatgcaactagattcttcagtacgatttgatagtgttggtggcctgtctaatcatatagcagctctaaaagagatggtggtgtttccattactttatccagaagtctttgaaaaatttaaaattcaacccccaagaggttgtttgttttatgggccacctggaactggaaagactctggttgccagagcacttgccaatgagtgcagtcaaggggataaaagagtagcatttttcatgaggaaaggtgctgattgtctaagtaaatgggtaggagaatctgaaagacagctacgattgctgtttgatcaggcctatcagatgcgcccatcaattattttttttgacgaaattgatggtctggctccagtacggtcaagcaggcaagatcagattcacagttctattgtttccaccctgctagctcttatggatggattggacagcagaggggaaattgtggtcattggtgctacgaacaggctagattctatagatcctgctttacgaaggcctggtcgctttgatagagaattcctctttagcctgcctgataaagaggctcgaaaagagattctaaagattcacaccagggattggaatcccaaaccactggacacatttttagaagagctagcagaaaactgtgttggatactgtggagcagatattaaatcaatatgtgctgaagctgctttatgtgctttacgacgacgctacccacagatctataccactagtgagaaactgcagttggatctctcttcaattaatatctcagctaaggatttcgaggtagctatgcaaaagatgataccagcctcccaaagagctgtgacatcacctgggcaggcactgtccaccgttgtgaaaccactcctgcaaaacactgttgacaagattttagaagccctgcagagagtatttccacatgcagaattcagaacaaataaaacattagactcagatatttcttgtcctctgctagaaagtgacttggcttacagtgatgatgatgttccatcagtttatgaaaatggactttctcagaaatcttctcataaggcaaaagacaattttaattttcttcatttgaatagaaatgcttgttaccaacctatgtcttttcgaccaagaatattgatagtaggagaaccaggatttgggcaaggttctcacttggcaccagctgtcattcatgctttggaaaagtttactgtatatacattagacattcctgttctttttggagttagtactacatcccctgaagaaacatgtgcccaggtgattcgtgaagctaagagaacagcaccaagtatagtgtatgttcctcatatccacgtgtggtgggaaatagttggaccgacacttaaagccacatttaccacattattacagaatattccttcatttgctccagttttactacttgcaacttctgacaaaccccattccgctttgccagaagaggtgcaagaattgtttatccgtgattatggagagatttttaatgtccagttaccggataaagaagaacggacaaaattttttgaagatttaattctaaaacaagctgctaagcctcctatatcaaaaaagaaagcagttttgcaggctttggaggtactcccagtagcaccaccacctgagccaagatcactgacagcagaagaagtgaaacgactagaagaacaagaagaagatacatttagagaactgaggattttcttaagaaatgttacacataggcttgctattgacaagcgattccgagtgtttactaagcctgttgaccctgatgaggttcctgattatgtcactgtaataaagcaaccaatggacctttcatctgtaatcagtaaaattgatctacacaagtatctgactgtgaaagactatttgagagatattgatctaatctgtagtaatgccttagaatacaatccagatagagatcctggagatcgtcttattaggcatagagcctgtgctttaagagatactgcctatgccataattaaagaagaacttgatgaagactttgagcagctctgtgaagaaattcaggaatctagaaagaaaagaggttgtagctcctccaaatatgccccgtcttactaccatgtgatgccaaagcaaaattccactcttgttggtgataaaagatcagacccagagcagaatgaaaagctaaagacaccgagtactcctgtggcttgcagcactcctgctcagttgaagaggaaaattcgcaaaaagtcaaactggtacttaggcaccataaaaaagcgaaggaagatttcacaggcaaaggatgatagccagaatgccatagatcacaaaattgagagtgatacagaggaaactcaagacacaagtgtagatcataatgagaccggaaacacaggagagtcttcggtggaagaaaatgaaaaacagcaaaatgcctctgaaagcaaactggaattgagaaataattcaaatacttgtaatatagagaatgagcttgaagactctaggaagactacagcatgtacagaattgagagacaagattgcttgtaatggagatgcttctagctctcagataatacatatttctgatgaaaatgaaggaaaagaaatgtgtgttctgcgaatgactcgagctagacgttcccaggtagaacagcagcagctcatcactgttgaaaaggctttggcaattctttctcagcctacaccctcacttgttgtggatcatgagcgattaaaaaatcttttgaagactgttgttaaaaaaagtcaaaactacaacatatttcagttggaaaatttgtatgcagtaatcagccaatgtatttatcggcatcgcaaggaccatgataaaacatcacttattcagaaaatggagcaagaggtagaaaacttcagttgttccagatgatgatgtcatggtatcgagtattctttatattcagttcctatttaagtcatttttgtcatgtccgcctaattgatgtagtatgaaaccctgcatctttaaggaaaagattaaaatagtaaaataaaagtatttaaactttcctgatatttatgtacatattaagataaatgtcatgtgtaagataactgataaatattggaactttgctagaacaagaccctgtagtaatagtaataatagttgaagtttggccaactcttaataaagttattttggtaactaatgttttatggcacttaagaataattagcagcgttaaattttgtttgtattaagcacttttaattttatccttcctaaaaatagtttattgtatctgacaagaaacttacttaaccattgtgtccttcccatcttttttgtcatctttgttttcttcaaatgccctcctcc

SEQ ID NO: 1735 - DNA, 3133 bp, Homo sapiens
  source 1..3133: mol_type = unassigned DNA
gatctctctccggtcgcgcacgccgaggccagtagggagagaagatggtggttctccgcagcagcttggagctgcacaaccactccgcggcctcggccacgggctccttggacctgtccagtgacttcctcagtctggagcacatcggccggaggcggctccgctcggccggcgcggcgcagaagaaacccgcggcgaccacagccaaagcgggcgatgggtcatcagttaaggaagttgaaacctaccaccggacacgtgctttaagatctttgagaaaagatgcacagaattcttcagattctagttttgagaagaatgtggaaataacggagcaacttgctaatggcaggcattttacaaggcagttggccagacagcaggctgataaaaaaaaagaagagcacagagaagacaaagtgattccagttactcggtcattgagggctagaaacatcgttcaaagtacagaacacttacatgaagataatggtgatgttgaagtgcgtcgaagttgtaggattagaagtcgttatagtggtgtaaaccagtccatgctgtttgacaaacttataactaacactgctgaagctgtacttcaaaaaatggatgacatgaagaagatgcgtagacagcgaatgagagaacttgaagacttgggagtgtttaatgaaacagaagaaagcaatcttaatatgtacacaagaggaaaacagaaagatattcaaagaactgatgaagaaacaactgataatcaagaaggcagtgtggagtcatctgaagagggtgaagaccaagaacatgaagatgatggtgaagatgaagatgatgaagatgatgatgatgatgacgatgatgatgatgatgatgatgatgaagatgatgaagatgaagaagatggagaagaagagaatcagaagcgatattatcttagacagagaaaagctactgtttactatcaggctccattggaaaaacctcgtcaccagagaaagcccaacatattttatagtggcccagcttctcctgcaagaccaagataccgattatcttccgcaggaccaagaagtccttactgtaaacgaatgaacaggcgaaggcatgcaatccacagtagtgactcgacttcatcttcctcctctgaagatgaacagcactttgagaggcggaggaaaaggagtcgtaatagggctatcaataggtgcctcccactaaattttcggaaagatgaattaaaaggcatttataaagatcgaatgaaaattggagcaagccttgccgatgttgatccaatgcaactagattcttcagtacgatttgatagtgttggtggcctgtctaatcatatagcagctctaaaagagatggtggtgtttccattactttatccagaagtctttgaaaaatttaaaattcaacccccaagaggttgtttgttttatgggccacctggaactggaaagactctggttgccagagcacttgccaatgagtgcagtcaaggggataaaagagtagcatttttcatgaggaaaggtgctgattgtctaagtaaatgggtaggagaatctgaaagacagctacgattgctgtttgatcaggcctatcagatgcgcccatcaattattttttttgacgaaattgatggtctggctccagtacggtcaagcaggcaagatcagattcacagttctattgtttccaccctgctagctcttatggatggattggacagcagaggggaaattgtggtcattggtgctacgaacaggctagattctatagatcctgctttacgaaggcctggtcgctttgatagagaattcctctttagcctgcctgataaagaggctcgaaaagagattctaaagattcacaccagggattggaatcccaaaccactggacacatttttagaagagctagcagaaaactgtgttggatactgtggagcagatattaaatcaatatgtgctgaagctgctttatgtgctttacgacgacgctacccacagatctataccactagtgagaaactgcagttggatctctcttcaattaatatctcagctaaggatttcgaggtagctatgcaaaagatgataccagcctcccaaagagctgtgacatcacctgggcaggcactgtccaccgttgtgaaaccactcctgcaaaacactgttgacaagattttagaagccctgcagagagtatttccacatgcagaattcagaacaaataaaacattagactcagatatttcttgtcctctgctagaaagtgacttggcttacagtgatgatgatgttccatcagtttatgaaaatggactttctcagaaatcttctcataaggcaaaagacaattttaattttcttcatttgaatagaaatgcttgttaccaacctatgtcttttcgaccaagaatattgatagtaggagaaccaggatttgggcaaggttctcacttggcaccagctgtcattcatgctttggaaaagtttactgtatatacattagacattcctgttctttttggagttagtactacatcccctgaagaaacatgtgcccaggtgattcgtgaagctaagagaacagcaccaagtatagtgtatgttcctcatatccacgtgtggtgggaaatagttggaccgacacttaaagccacatttaccacattattacagaatattccttcatttgctccagttttactacttgcaacttctgacaaaccccattccgctttgccagaagaggtaatttatgtggggcggtatcattatactttcaaaaagagttgtttctaccacaataatcataacttattgaaaaaattcaaatgctgtagaagtgaataaaaggataagttttcttatcaaatataccattggtaactatttggtatatgtgctcattgggcaagatggtatatgtatatgtgtatgtatatattaaggatacataaattttttctcttgaaaaatggtattatatgccgggtgcagtggctcacgcctgtaatcccagcactttgggaggccgaggtgggtggatcatgaggtcaggagattgagaccatcctggctaacagggtgaaaccctgtccctactaaaaatacaaaaaaaa

SEQ ID NO: 1736 - DNA, 438 bp, Homo sapiens
  source 1..438: mol_type = unassigned DNA
gattgtctaagtaaatgggtaggagaatctgaaagacagctacgattgctgtttgatcaggcctatcagatgcgcccatcaattattttttttgacgaaattgatggtctggctccagtacggtcaagcaggcaagatcagattcacaggtaaaacttgcttgatggcacttcaacgtttcttcctatttcctgagtggtattgatgtgtgagagatagaatgttaaatggtgaaagaaactttataagctagtagttcctttttttggtagtagaaccccagtatatagtacaaaaataaaaaatgtggatggttgcagtggctcatacctgtattcctggcactttgggaggccaaggcaggcagatcacttgaggtcaagagtttgagaccagcctggccaacatggtgaaatcctgtctctactaaaaaaaaaa

SEQ ID NO: 1737 - DNA, 544 bp, Homo sapiens
  source 1..544: mol_type = unassigned DNA
gtgctatacatgttatcagctgcaaccctctggacataaatgacttaaaatatgaacagcaaaatattccatagtagatatttactagtacttcatggaaggcgataagcacctttaacctcgtcaccagagaaagcccaacatattttatagtggcccagcttctcctgcaagaccaagataccgattatcttccgcaggaccaagaagtccttactgtaaacgaatgaacaggcgaaggcatgcaatccacagtagtgactcgacttcatcttcctcctctgaagatgaacagcactttgagaggcggaggaaaaggagtcgtaatagggctatcaataggtgcctcccactaaattttcggaaagatgaattaaaaggcatttataaagatcgaatgaaaattggagcaagccttgccgatgttgatccaatgcaactagattcttcagtacgatttgatagtgttggtggcctgtctaatcatatagcagctctaaaagagatggtggtgtttccattactttatccagaagtctttgaa

SEQ ID NO: 1738 - DNA, 411 bp, Homo sapiens
  source 1..411: mol_type = unassigned DNA
tgttatgaactataaaccagtaaatcttatattagctgcttcatagacattgctgatatttgtttatcatgaaatggtttttctagatactaacttgtagtttcttggggagatacaaaatgattctgcacaaaaagcagtttttactaacttgtaatcagagaatactctttggaggaatttaaattggagttttgtaaagaaaaacttagatggctttcttaatttttcttaaaggatgggtcatcagttaaggaagttgaaacctaccaccggacacgtgctttaagatctttgagaaaagatgcacagaattcttcagattctagttttgagaagaatgtggaaataacggagcaacttgctaatggcaggcattttacaaggcagttggccagacagcaggctgat

SEQ ID NO: 1739 - DNA, 680 bp, Homo sapiens
  source 1..680: mol_type = unassigned DNA
ggcggaggtggggttagcttcagttgaccaaccatgccttgaggataaattggatgggatcagatgggaagatgtgacaagaagagaaatcctcctctatataggatgctctgctgtttcctaaggattttcagcaccttgccccaaaatcaaaatgatgcttcaacacccaggccaggtctctgcctcggaagtgagtgcttctgccatcgtcccctgcctgtcccctcctgggtcactggtgtttgaggattttgctaacctgacgccctttgtcaaggaagagctgaggtttgccatccagaacaagcacctctgccaccggatgtcctctgcgctggaatcagtcactgtcagcgacagacccctcggggtgtccatcacaaaagccgaggtagcccctgaagaagatgaaaggaaaaagaggcgacgagaaagaaataagattgcagctgcaaagtgccgaaacaagaagaaggagaagacggagtgcctgcagaaagagtcggagaagctggaaagtgtgaatgctgaactgaaggctcagattgaggagctcaagaacgagaagcagcatttgatatacatgctcaaccttcatcggcccacgtgtattgtccgggctcagaatgggaggactccagaagatgagagaaacctctttatccaacagataaaag

SEQ ID NO: 1740 - DNA, 1626 bp, Homo sapiens
  source 1..1626: mol_type = unassigned DNA
attacgtcagcctgggactggcaacacggagtaaacgaccgcgccgccagcctgagggctataaaaggggtgatgcaacgctctccaagccacagtcgcacgcagccaggcgcgcactgcacagctctcttctctcgccgccgcccgagcgcacccttcagcccgcgcgccggccgtgagtcctcggtgctcgcccgccggccagacaaacagcccgcccgaccccgtcccgaccctggccgccccgagcggagcctggagcaaaatgatgcttcaacacccaggccaggtctctgcctcggaagtgagtgcttctgccatcgtcccctgcctgtcccctcctgggtcactggtgtttgaggattttgctaacctgacgccctttgtcaaggaagagctgaggtttgccatccagaacaagcacctctgccaccggatgtcctctgcgctggaatcagtcactgtcagcgacagacccctcggggtgtccatcacaaaagccgaggtagcccctgaagaagatgaaaggaaaaagaggcgacgagaaagaaataagattgcagctgcaaagtgccgaaacaagaagaaggagaagacggagtgcctgcagaaagtgagtgccttctagccttacccttcctctcgctcacgcctgtcttcaccagcttcatgtggctatcagaagaagagttagaaaaccccctacttggttatagtttcccaagaagggccttgtagctggtagcagaaatgccagttgcagaatgaggaggtggcaaagcagttaacacaatggatgtgacggtggatgtataaaaacaggtgtgtgaattcgtctgatgcctgactcccagcagcctcggccggttcatacatgtccatcagcttccaggctgcaggacatgccagcccagttaaagaggcttcacttgactgttttcctgagaaaaggaagctgccagctctcatttggctcactatgaaaagcctttaattaatctcttcaaacaagttatttccttaatccacaagcagtggttacacttgctttgcattcttgtctggttcctaactctagagcccttctccctggcttagccagtaagctgagcccctggctgcgttcagccggcccgcctgagagacactaggggaaatagcttttgtgggcaagcagggtggccggtggtgctcagcagtctttccagtggctgtgtccctcctccaaatgtggacaggccatgacagagtcttagcccaagtcccacagatccccaaaagttctgttgattgcttcaggggatcagtgaaaattagggaattttgtgtgttgctatatacattttttctggggagatgagcttctcattgagatctgtgactcagaatcgactaagccaccataagtctggatttctccccagctcccaaggcccttttgggtccagaagacctgcatatgggctgttgactcatgcaaatgaggtatctgaactgcagcttcagtattagcagagccacaggccgcctctgtggcatcaccagggtttctctgaagaagagggtctgcattttcctaaacccagtgctgctctcccatctcccatcttcctctcgcagcttgat

SEQ ID NO: 1741 - DNA, 2033 bp, Homo sapiens
  source 1..2033: mol_type = unassigned DNA
attacgtcagcctgggactggcaacacggagtaaacgaccgcgccgccagcctgagggctataaaaggggtgatgcaacgctctccaagccacagtcgcacgcagccaggcgcgcactgcacagctctcttctctcgccgccgcccgagcgcacccttcagcccgcgcgccggccgtgagtcctcggtgctcgcccgccggccagacaaacagcccgcccgaccccgtcccgaccctggccgccccgagcggagcctggagcaaaatgatgcttcaacacccaggccaggtctctgcctcggaagtgagtgcttctgccatcgtcccctgcctgtcccctcctgggtcactggtgtttgaggattttgctaacctgacgccctttgtcaaggaagagctgaggtttgccatccagaacaagcacctctgccaccggatgtcctctgcgctggaatcagtcactgtcagcgacagacccctcggggtgtccatcacaaaagccgaggtagcccctgaagaagatgaaaggaaaaagaggcgacgagaaagaaataagattgcagctgcaaagtgccgaaacaagaagaaggagaagacggagtgcctgcagaaagagtcggagaagctggaaagtgtgaatgctgaactgaaggctcagattgaggagctcaagaacgagaagcagcatttgatatacatgctcaaccttcatcggcccacgtgtattgtccgggctcagaatgggaggactccagaagatgagagaaacctctttatccaacagataaaagaaggaacattgcagagctaagcagtcgtggtatgggggcgactggggagtcctcattgaatcctcattttatacccaaaaccctgaagccattggagagctgtcttcctgtgtacctctagaatcccagcagcagagaaccatcaaggcgggagggcctgcagtgattcagcaggcccttcccattctgccccagagtgggtcttggaccagggcaagtgcatctttgcctcaactccaggatttaggccttaacacactggccattcttatgttccagatggcccccagctggtgtcctgcccgcctttcatctggattctacaaaaaaccaggatgcccaccgttaggattcaggcagcagtgtctgtacctcgggtgggagggatggggccatctccttcaccgtggctaccattgtcactcgtaggggatgtggagtgagaacagcatttagtgaagttgtgcaacggccagggttgtgctttctagcaaatatgctgttatgtccagaaattgtgtgtgcaagaaaactaggcaatgtactcttccgatgtttgtgtcacacaacactgatgtgacttttatatgctttttctcagatctggtttctaagagttttggggggcggggctgtcaccacgtgcagtatctcaagatattcaggtggccagaagagcttgtcagcaagaggaggacagaattctcccagcgttaacacaaaatccatgggcagtatgatggcaggtcctctgttgcaaactcagttccaaagtcacaggaagaaagcagaaagttcaacttccaaagggttaggactctccactcaatgtcttaggtcaggagttgtgtctaggctggaagagccaaagaatattccattttcctttccttgtggttgaaaaccacagtcagtggagagatgtttggaaaccacagtcagtggagcctgggtggtacccaggctttagcattattggatgtcaatagcattgtttttgtcatgtagctgttttaagaaatctggcccagggtgtttgcagctgtgagaagtcactcacactggccacaaggacgctggctactgtctattaaaattctgatgtttctgtgaaattctcagagtgtttaattgtactcaatggtatcattacaattttctgtaagagaaaatattacttatttatcctagtattcctaacctgtcagaataataaatattggaaccaagacatggtaaaca

SEQ ID NO: 1742 - DNA, 516 bp, Homo sapiens
  source 1..516: mol_type = unassigned DNA
cgagcggagcctggagcaaaatgatgcttcaacacccaggccagagctgaggtttgccatccagaacaagcacctctgccaccggatgtcctctgcgctggaatcagtcactgtcagcgacagacccctcggggtgtccatcacaaaagccgaggtagcccctgaagaagatgaaaggaaaaagaggcgacgagaaagaaataagattgcagctgcaaagtgccgaaacaagaagaaggagaagacggagtgcctgcagaaagagtcggagaagctggaaagtgtgaatgctgaactgaaggctcagattgaggagctcaagaacgagaagcagcatttgatatacatgctcaaccttcatcggcccacgtgtattgtccgggctcagaatgggaggactccagaagatgagagaaacctctttatccaacagataaaagaaggaacattgcagagctaagcagtcgtggtatgggggcgactggggagtcctcattgaatcctcattttataccc

SEQ ID NO: 1743 - DNA, 2103 bp, Homo sapiens
  source 1..2103: mol_type = unassigned DNA
ttaattccaaatcctgatgctgccccatattaattctgtgaattcgggcaaatgacttagtttgtctaaacctcaattatctcatctataaaaggcagctagatcttaactcactgggttctcgtgaggattaaatgagatagtgcccctaaggtttctggtatgaaggaggcactccttaaatgttcgagacttgccagagggcttcttctctgtctggactgtgctaatgaccacagatccccggttgagaggaatgcccagaccacactcatcctacactcatccctatactcattgtcccttgggaaccaactgcagggaggaggggaaatggccaccactggagggagtacacagcaggccaagacttatgggggactcttccaaattggggccatggaactgtcactatttctactctttattttccttttgtcatccttttgggttcaccgagctatagaataacagagggagatgaatttagcaaatacatcactgaagcttctccctcggaagttgggcccaagcaatgggaatgagaaaggtaaccttggaccgtgggggccatttgatttgatgaccccatccccacttcatttatcagttggccaatgaggcatggcgagtcaggcattgggccaggctctgggtaaagcaatggtggagactcaatgcttgcattggagaagctggaaagtgtgaatgctgaactgaaggctcagattgaggagctcaagaacgagaagcagcatttgatatacatgctcaaccttcatcggcccacgtgtattgtccgggctcagaatgggaggactccagaagatgagagaaacctctttatccaacagataaaagaaggaacattgcagagctaagcagtcgtggtatgggggcgactggggagtcctcattgaatcctcattttatacccaaaaccctgaagccattggagagctgtcttcctgtgtacctctagaatcccagcagcagagaaccatcaaggcgggagggcctgcagtgattcagcaggcccttcccattctgccccagagtgggtcttggaccagggcaagtgcatctttgcctcaactccaggatttaggccttaacacactggccattcttatgttccagatggcccccagctggtgtcctgcccgcctttcatctggattctacaaaaaaccaggatgcccaccgttaggattcaggcagcagtgtctgtacctcgggtgggagggatggggccatctccttcaccgtggctaccattgtcactcgtaggggatgtggagtgagaacagcatttagtgaagttgtgcaacggccagggttgtgctttctagcaaatatgctgttatgtccagaaattgtgtgtgcaagaaaactaggcaatgtactcttccgatgtttgtgtcacacaacactgatgtgacttttatatgctttttctcagatctggtttctaagagttttggggggcggggctgtcaccacgtgcagtatctcaagatattcaggtggccagaagagcttgtcagcaagaggaggacagaattctcccagcgttaacacaaaatccatgggcagtatgatggcaggtcctctgttgcaaactcagttccaaagtcacaggaagaaagcagaaagttcaacttccaaagggttaggactctccactcaatgtcttaggtcaggagttgtgtctaggctggaagagccaaagaatattccattttcctttccttgtggttgaaaaccacagtcagtggagagatgtttggaaaccacagtcagtggagcctgggtggtacccaggctttagcattattggatgtcaatagcattgtttttgtcatgtagctgttttaagaaatctggcccagggtgtttgcagctgtgagaagtcactcacactggccacaaggacgctggctactgtctattaaaattctgatgtttctgtgaaattctcagagtgtttaattgtactcaatggtatcattacaattttctgtaagagaaaatattacttatttatcctagtattcctaacctgtcagaataataaatattggaaccaagacatggtaaaca

SEQ ID NO: 1744 - DNA, 482 bp, Homo sapiens
  source 1..482: mol_type = unassigned DNA
atgatgcttcaacacccaggccaggtctctgcctcggaagaagagctgaggtttgccatccagaacaagcacctctgccaccggatgtcctctgcgctggaatcagtcactgtcagcgacagacccctcggggtgtccatcacaaaagccgaggtagcccctgaagaagatgaaaggaaaaagaggcgacgagaaagaaataagattgcagctgcaaagtgccgaaacaagaagaaggagaagacggagtgcctgcagaaactcccaaggcccttttgggtccagaagacctgcatatgggctgttgactcatgcaaatgaggtatctgaactgcagcttcagtattagcagagccacaggccgcctctgtggcatcaccagggtttctctgaagaagagggtctgcattttcctaaacccagtgctgctctcccatctcccatcttcctctcgcagcttgatgagccccggtgtgtcccag

SEQ ID NO: 1745 - DNA, 767 bp, Homo sapiens
  source 1..767: mol_type = unassigned DNA
atgatgcttcaacacccaggccaggtctctgcctcggaagtgagtgcttctgccatcgtcccctgcctgtcccctcctgggtcactggtgtttgaggattttgctaacctgacgccctttgtcaaggaagagctgaggtttgccatccagaacaagcacctctgccaccggatgtcctctgcgctggaatcagtcactgtcagcgacagacccctcggggtgtccatcacaaaagccgaggtagcccctgaagaagatgaaaggaaaaagaggcgacgagaaagaaataagattgcagctgcaaagtgccgaaacaagaagaaggagaagacggagtgcctgcagaaactcccaaggcccttttgggtccagaagacctgcatatgggctgttgactcatgcaaatgaggtatctgaactgcagcttcagtattagcagagccacaggccgcctctgtggcatcaccagggtttctctgaagaagagggtctgcattttcctaaacccagtgctgctctcccatctcccatcttcctctcgcagcttgatgagccccggtgtgtcccaggagtcggagaagctggaaagtgtgaatgctgaactgaaggctcagattgaggagctcaagaacgagaagcagcatttgatatacatgctcaaccttcatcggcccacgtgtattgtccgggctcagaatgggaggactccagaagatgagagaaacctctttatccaacagataaaagaaggaacattgcagagctaa

SEQ ID NO: 1746 - DNA, 858 bp, Homo sapiens
  source 1..858: mol_type = unassigned DNA
atgatgcttcaacacccaggccaggtctctgcctcggaagtgagtgcttctgccatcgtcccctgcctgtcccctcctgggtcactggtgtttgaggattttgctaacctgacgccctttgtcaaggaagagctgaggtttgccatccagaacaagcacctctgccaccggatgtcctctgcgctggaatcagtcactgtcagcgacagacccctcggggtgtccatcacaaaagccgaggtagcccctgaagaagatgaaaggaaaaagaggcgacgagaaagaaataagattgcagctgcaaagtgccgaaacaagaagaaggagaagacggagtgcctgcagaaactcccaaggcccttttgggtccagaagacctgcatatgggctgttgactcatgcaaatgaggtatctgaactgcagcttcagtattagcagagccacaggccgcctctgtggcatcaccagggtttctctgaagaagagggtctgcattttcctaaacccagtgctgctctcccatctcccatcttcctctcgcagcttgatgagccccggtgtgtcccaggtacacccctgcatccaggcagcagcccaggccaccccctcctcactggcccttggctcctttcttgatgcctctgttgcttgtcccccaggagtcggagaagctggaaagtgtgaatgctgaactgaaggctcagattgaggagctcaagaacgagaagcagcatttgatatacatgctcaaccttcatcggcccacgtgtattgtccgggctcagaatgggaggactccagaagatgagagaaacctctttatccaacagataaaagaaggaacattgcagagctaa

SEQ ID NO: 1747 - DNA, 581 bp, Homo sapiens
  source 1..581: mol_type = unassigned DNA
cacctctgccaccggatgtcctctgcgctggaatcagtcactgtcagcgacagacccctcggggtgtccatcacaaaagccgaggtagcccctgaagaagatgaaaggaaaaagaggcgacgagaaagaaataagattgcagctgcaaagtgccgaaacaagaagaaggagaagacggagtgcctgcagaaagagtcggagaagctggaaagtgtgaatgctgaactgaaggctcagattgaggagctcaagaacgagaagcagcatttgatatacatgctcaaccttcatcggcccacgtgtattgtccgggctcagaatgggaggactccagaagatgagagaaacctctttatccaacagataaaagaaggaacattgcagagctaagcagtcgtggtatgggggcgactggggagtcctcattgaatcctcattttatacccaaaaccctgaagccattggagagctgtcttcctgtgtacctctagaatcccagcagcagagaaccatcaaggcgggagggcctgcagtgattcagcaggcccttcccattctgccccagagtgggtcttggacca

SEQ ID NO: 1748 - DNA, 1917 bp, Homo sapiens
  source 1..1917: mol_type = unassigned DNA
ggcggaggtggggttagcttcagttgaccaaccatgccttgaggataaattggatgggatcagatgggaagatgtgacaagaagagaaatcctcctctatataggatgctctgctgtttcctaaggattttcagcaccttgccccaaaatcaaaatgatgcttcaacacccaggccaggtctctgcctcggaagtgagtgcttctgccatcgtcccctgcctgtcccctcctgggtcactggtgtttgaggattttgctaacctgacgccctttgtcaaggaagagctgaggtttgccatccagaacaagcacctctgccaccggatgtcctctgcgctggaatcagtcactgtcagcgacagacccctcggggtgtccatcacaaaagccgaggtagcccctgaagaagatgaaaggaaaaagaggcgacgagaaagaaataagattgcagctgcaaagtgccgaaacaagaagaaggagaagacggagtgcctgcagaaagagtcggagaagctggaaagtgtgaatgctgaactgaaggctcagattgaggagctcaagaacgagaagcagcatttgatatacatgctcaaccttcatcggcccacgtgtattgtccgggctcagaatgggaggactccagaagatgagagaaacctctttatccaacagataaaagaaggaacattgcagagctaagcagtcgtggtatgggggcgactggggagtcctcattgaatcctcattttatacccaaaaccctgaagccattggagagctgtcttcctgtgtacctctagaatcccagcagcagagaaccatcaaggcgggagggcctgcagtgattcagcaggcccttcccattctgccccagagtgggtcttggaccagggcaagtgcatctttgcctcaactccaggatttaggccttaacacactggccattcttatgttccagatggcccccagctggtgtcctgcccgcctttcatctggattctacaaaaaaccaggatgcccaccgttaggattcaggcagcagtgtctgtacctcgggtgggagggatggggccatctccttcaccgtggctaccattgtcactcgtaggggatgtggagtgagaacagcatttagtgaagttgtgcaacggccagggttgtgctttctagcaaatatgctgttatgtccagaaattgtgtgtgcaagaaaactaggcaatgtactcttccgatgtttgtgtcacacaacactgatgtgacttttatatgctttttctcagatctggtttctaagagttttggggggcggggctgtcaccacgtgcagtatctcaagatattcaggtggccagaagagcttgtcagcaagaggaggacagaattctcccagcgttaacacaaaatccatgggcagtatgatggcaggtcctctgttgcaaactcagttccaaagtcacaggaagaaagcagaaagttcaacttccaaagggttaggactctccactcaatgtcttaggtcaggagttgtgtctaggctggaagagccaaagaatattccattttcctttccttgtggttgaaaaccacagtcagtggagagatgtttggaaaccacagtcagtggagcctgggtggtacccaggctttagcattattggatgtcaatagcattgtttttgtcatgtagctgttttaagaaatctggcccagggtgtttgcagctgtgagaagtcactcacactggccacaaggacgctggctactgtctattaaaattctgatgtttctgtgaaattctcagagtgtttaattgtactcaatggtatcattacaattttctgtaagagaaaatattacttatttatcctagtattcctaacctgtcagaataataaatattggaaccaagacatggt

SEQ ID NO: 1749 - DNA, 2031 bp, Homo sapiens
  source 1..2031: mol_type = unassigned DNA
tccgctccgttcggccggttctcccgggaagctattaatagcattacgtcagcctgggactggcaacacggagtaaacgaccgcgccgccagcctgagggctataaaaggggtgatgcaacgctctccaagccacagtcgcacgcagccaggcgcgcactgcacagctctcttctctcgccgccgcccgagcgcacccttcagcccgcgcgccggccgtgagtcctcggtgctcgcccgccggccagacaaacagcccgcccgaccccgtcccgaccctggccgccccgagcggagcctggagcaaaatgagtgcttctgccatcgtcccctgcctgtcccctcctgggtcactggtgtttgaggattttgctaacctgacgccctttgtcaaggaagagctgaggtttgccatccagaacaagcacctctgccaccggatgtcctctgcgctggaatcagtcactgtcagcgacagacccctcggggtgtccatcacaaaagccgaggtagcccctgaagaagatgaaaggaaaaagaggcgacgagaaagaaataagattgcagctgcaaagtgccgaaacaagaagaaggagaagacggagtgcctgcagaaagagtcggagaagctggaaagtgtgaatgctgaactgaaggctcagattgaggagctcaagaacgagaagcagcatttgatatacatgctcaaccttcatcggcccacgtgtattgtccgggctcagaatgggaggactccagaagatgagagaaacctctttatccaacagataaaagaaggaacattgcagagctaagcagtcgtggtatgggggcgactggggagtcctcattgaatcctcattttatacccaaaaccctgaagccattggagagctgtcttcctgtgtacctctagaatcccagcagcagagaaccatcaaggcgggagggcctgcagtgattcagcaggcccttcccattctgccccagagtgggtcttggaccagggcaagtgcatctttgcctcaactccaggatttaggccttaacacactggccattcttatgttccagatggcccccagctggtgtcctgcccgcctttcatctggattctacaaaaaaccaggatgcccaccgttaggattcaggcagcagtgtctgtacctcgggtgggagggatggggccatctccttcaccgtggctaccattgtcactcgtaggggatgtggagtgagaacagcatttagtgaagttgtgcaacggccagggttgtgctttctagcaaatatgctgttatgtccagaaattgtgtgtgcaagaaaactaggcaatgtactcttccgatgtttgtgtcacacaacactgatgtgacttttatatgctttttctcagatctggtttctaagagttttggggggcggggctgtcaccacgtgcagtatctcaagatattcaggtggccagaagagcttgtcagcaagaggaggacagaattctcccagcgttaacacaaaatccatgggcagtatgatggcaggtcctctgttgcaaactcagttccaaagtcacaggaagaaagcagaaagttcaacttccaaagggttaggactctccactcaatgtcttaggtcaggagttgtgtctaggctggaagagccaaagaatattccattttcctttccttgtggttgaaaaccacagtcagtggagagatgtttggaaaccacagtcagtggagcctgggtggtacccaggctttagcattattggatgtcaatagcattgtttttgtcatgtagctgttttaagaaatctggcccagggtgtttgcagctgtgagaagtcactcacactggccacaaggacgctggctactgtctattaaaattctgatgtttctgtgaaattctcagagtgtttaattgtactcaatggtatcattacaattttctgtaagagaaaatattacttatttatcctagtattcctaacctgtcagaataataaatattggaaccaagacatggt

SEQ ID NO: 1750 - DNA, 2620 bp, Homo sapiens
  source 1..2620: mol_type = unassigned DNA
aaccgtctcctggttgtggggtgggggggaaagatggcggagctgatgctgctcagcgagattgctgacccgacgcgtttcttcaccgacaacctgcttagcccggaggactggggtctgcagaacagcaccttgtattctggcctagatgaagtggccgaggagcagacgcagctcttccgttgcccggagcaggatgtcccgtttgacggcagctccctggacgtggggatggatgtcagcccctctgagcccccatgggaactcctgccgatcttcccagatcttcaggtgaagtctgagccatcttccccctgctcttcctcctccctcagctccgagtcatcgcgtctctccacagagccatccagcgaggctcttggggtaggggaggtgctccatgtgaagacagagtccttggcacccccactgtgtctcctgggagatgacccaacatcctcatttgaaaccgtccagatcaacgttatccccacctctgatgattcctcagatgtccagaccaagatagaacctgtctctccatgttcttccgtcaactctgaggcctccctgctctcagccgactcctccagccaggcttttataggagaggaggtcctggaagtgaagacagagtccctgtccccttcaggatgcctcctgtgggatgtcccagccccctcacttggagctgtccagatcagcatgggcccatcccttgatggctcctcaggcaaagccctgcccacccggaagccgccactgcagcccaaacctgtagtgctaaccactgtcccaatgccatccagagctgtgcctcccagcaccacagtccttctgcagtccctcgtccagccacccccagtgtccccagttgtcctcatccagggtgctattcgagtccagcctgaagggccggctccctctctaccacggcctgagaggaagagcatcgttcccgctcctatgcctggaaactcctgcccgcctgaagtggatgcaaagctgctgaagcggcagcagcgaatgatcaagaaccgggagtcagcctgccagtcccggagaaagaagaaagagtatctgcagggactggaggctcggctgcaagcagtactggctgacaaccagcagctccgccgagagaatgctgccctccggcggcggctggaggccctgctggctgaaaacagcgagctcaagttagggtctggaaacaggaaggtggtctgcatcatggtcttccttctcttcattgccttcaactttggacctgtcagcatcagtgagcctccttcagctcccatctctcctcggatgaacaagggggagcctcaaccccggagacacttgctggggttctcagagcaagagccagttcagggagttgaacctctccaggggtcctcccagggccctaaggagccccagcccagccccacagaccagcccagtttcagcaacctgacagccttccctgggggcgccaaggagctactactaagagacctagaccagctcttcctctcctctgattgccggcacttcaaccgcactgagtccctgaggcttgctgacgagttgagtggctgggtccagcgccaccagagaggccggaggaagatccctcagagggcccaggagagacagaagtctcagccacggaagaagtcacctccagttaaggcagtccccatccaaccccctggacccccagaaagggattctgtgggccagctgcaactatatcgccacccagaccgttcgcagccagcattcttggatgcaattgaccgacgggaagacacattttatgttgtctctttccgaagggaccacctgctgctcccagccatcagccacaacaagacctcccggcccaagatgtccctggtgatgcctgccatggcccccaatgagaccctgtcaggccgtggggccccgggggactatgaggagatgatgcagatcgagtgtgaggtcatggacaccagggtgattcacatcaagacctccacagtgcccccctcgctccgaaaacagccatccccaaccccaggcaatgccacaggtggccccttgccagtctctgcagccagccaggcccaccaggcctcccaccagcccctctacctcaatcatccctgacctctgccattcacactgacttagaacggggggagggggtaccaggtggccaggtgggactgtttcaaatttccctgatccccaggcttggggcaattggtaaaggaaagagcaggtgtgggggttaagcacttatttgaggtgggggtgttcacctctcttctcatcccttttcagaatatagggctcctctcattcctgtgaacccccagtcctggcttctttgtttgaggggattgtgtgaggttcagttgtggggtgggtggtgagctgctgcatattttttattttgtttctctagtgttatggcagtggaggtgggaatttagtccccaggtgggacaagggaagttttttcattttggagctagttactgggagtaagggagggtggggtgggggggagttcaggtttatgtgtgtgcatttcttttttattattattaaataaacaacttggagggagttgaaggaa

SEQ ID NO: 1751 - DNA, 2624 bp, Homo sapiens
  source 1..2624: mol_type = unassigned DNA
ggcgggccttgggaaccgtctcctggttgtggggtgggggggaaagatggcggagctgatgctgctcagcgagattgctgacccgacgcgtttcttcaccgacaacctgcttagcccggaggactgggacagcaccttgtattctggcctagatgaagtggccgaggagcagacgcagctcttccgttgcccggagcaggatgtcccgtttgacggcagctccctggacgtggggatggatgtcagcccctctgagcccccatgggaactcctgccgatcttcccagatcttcaggtgaagtctgagccatcttccccctgctcttcctcctccctcagctccgagtcatcgcgtctctccacagagccatccagcgaggctcttggggtaggggaggtgctccatgtgaagacagagtccttggcacccccactgtgtctcctgggagatgacccaacatcctcatttgaaaccgtccagatcaacgttatccccacctctgatgattcctcagatgtccagaccaagatagaacctgtctctccatgttcttccgtcaactctgaggcctccctgctctcagccgactcctccagccaggcttttataggagaggaggtcctggaagtgaagacagagtccctgtccccttcaggatgcctcctgtgggatgtcccagccccctcacttggagctgtccagatcagcatgggcccatcccttgatggctcctcaggcaaagccctgcccacccggaagccgccactgcagcccaaacctgtagtgctaaccactgtcccaatgccatccagagctgtgcctcccagcaccacagtccttctgcagtccctcgtccagccacccccagtgtccccagttgtcctcatccagggtgctattcgagtccagcctgaagggccggctccctctctaccacggcctgagaggaagagcatcgttcccgctcctatgcctggaaactcctgcccgcctgaagtggatgcaaagctgctgaagcggcagcagcgaatgatcaagaaccgggagtcagcctgccagtcccggagaaagaagaaagagtatctgcagggactggaggctcggctgcaagcagtactggctgacaaccagcagctccgccgagagaatgctgccctccggcggcggctggaggccctgctggctgaaaacagcgagctcaagttagggtctggaaacaggaaggtggtctgcatcatggtcttccttctcttcattgccttcaactttggacctgtcagcatcagtgagcctccttcagctcccatctctcctcggatgaacaagggggagcctcaaccccggagacacttgctggggttctcagagcaagagccagttcagggagttgaacctctccaggggtcctcccagggccctaaggagccccagcccagccccacagaccagcccagtttcagcaacctgacagccttccctgggggcgccaaggagctactactaagagacctagaccagctcttcctctcctctgattgccggcacttcaaccgcactgagtccctgaggcttgctgacgagttgagtggctgggtccagcgccaccagagaggccggaggaagatccctcagagggcccaggagagacagaagtctcagccacggaagaagtcacctccagttaaggcagtccccatccaaccccctggacccccagaaagggattctgtgggccagctgcaactatatcgccacccagaccgttcgcagccagcattcttggatgcaattgaccgacgggaagacacattttatgttgtctctttccgaagggaccacctgctgctcccagccatcagccacaacaagacctcccggcccaagatgtccctggtgatgcctgccatggcccccaatgagaccctgtcaggccgtggggccccgggggactatgaggagatgatgcagatcgagtgtgaggtcatggacaccagggtgattcacatcaagacctccacagtgcccccctcgctccgaaaacagccatccccaaccccaggcaatgccacaggtggccccttgccagtctctgcagccagccaggcccaccaggcctcccaccagcccctctacctcaatcatccctgacctctgccattcacactgacttagaacggggggagggggtaccaggtggccaggtgggactgtttcaaatttccctgatccccaggcttggggcaattggtaaaggaaagagcaggtgtgggggttaagcacttatttgaggtgggggtgttcacctctcttctcatcccttttcagaatatagggctcctctcattcctgtgaacccccagtcctggcttctttgtttgaggggattgtgtgaggttcagttgtggggtgggtggtgagctgctgcatattttttattttgtttctctagtgttatggcagtggaggtgggaatttagtccccaggtgggacaagggaagttttttcattttggagctagttactgggagtaagggagggtggggtgggggggagttcaggtttatgtgtgtgcatttcttttttattattattaaataaacaacttggagggagttgaaggaa

SEQ ID NO: 1752 - DNA, 425 bp, Homo sapiens
  source 1..425: mol_type = unassigned DNA
ccagcccagccccacagaccagcccagtttcagcaacctgacagccttccctgggggcgccaaggagctactactaagagacctagaccagctcttcctctcctctgattgccggcacttcaaccgcactgagtccctgaggcttgctgacgagttgagtggctgggtccagcgccaccagagaggccggaggaagatccctcagagggcccaggagagacagtccttagatacttctccttccagaagtctcagccacggaagaagtcacctccagttaaggcagtccccatccaaccccctggacccccagaaagggattctgtgggccagctgcaactatatcgccacccagaccgttcgcagccagcattcttggatgcaattgaccgacgggaagacacattttatgttgtctctttccg

SEQ ID NO: 1753 - DNA, 561 bp, Homo sapiens
  source 1..561: mol_type = unassigned DNA
gggtgtggacacaaggaccccacccagcgcacagccctctgacctctgctcacttgccccagtgtccccagttgtcctcatccagggtgctattcgagtccagcctgaagggccggctccctctctaccacggcctgagaggaagagcatcgttcccgctcctatgcctggaaactcctgcccgcctgaagtggatgcaaagctgctgaagcggcagcagcgaatgatcaagaaccgggagtcagcctgccagtcccggagaaagaagaaagagtatctgcagggactggaggctcggctgcaagcagtactggctgacaaccagcagctccgccgagagaatgctgccctccggcggcggctggaggccctgctggctgaagtaagaccagtctgtccctgggagaccaacaggaatacagcctccttggaatgattcccctttttcttgtctccttctttgtaccttagaacagcgagctcaagttagggtctggaaacaggaaggtggtctgcatcatggtcttccttctcttcattgccttcaactttggacctgtc

SEQ ID NO: 1754 - DNA, 819 bp, Homo sapiens
  source 1..819: mol_type = unassigned DNA
taattaattaattaaaaaaaaaaggccaggcacagtggctcacgcctgtaatcccagcactttggcaggccaaggcaggcggatcacaaggtcaggagatcgagaccatcctgactaacacagtgaaaccccgtctctactaaaaatacaaaaaaattagccaggcgtggtggcgtgcgtctgtagttccagctgctggggaggctgaggcaggagaatggcgtgaacccgggaggcggagcttgcagtgagccgagatcgcaccactgcactccagcctggtcgacagagcaagactgcatctcaaaaaagaaaaaaaggagaaaaggaggcgggctgcattgaccctgtcagagagcttgcagccattgaggctgcccaatccttgggtgctcttgtgtgggtgtggacacaaggaccccacccagcgcacagccctctgacctctgctcacttgccccagtgtccccagttgtcctcatccagggtgctattcgagtccagcctgaagggccggctccctctctaccacggcctgagaggaagagcatcgttcccgctcctatgcctggaaactcctgcccgcctgaagtggatgcaaagctgctgaagcggcagcagcgaatgatcaagaaccgggagtcagcctgccagtcccggagaaagaagaaagagtatctgcagggactggaggctcggctgcaagcagtactggctgacaaccagcagctccgccgagagaatgctgccctccggcggcggctggaggccctgctggctgaaaacagcgagctcaagttagggtctggaaacaggaag

SEQ ID NO: 1755 - DNA, 1176 bp, Homo sapiens
  source 1..1176: mol_type = unassigned DNA
gggtgggggggaaagatggcggagctgatgctgctcagcgagattgctgacccgacgcgtttcttcaccgacaacctgcttagcccggaggactggggtctgcagaacagcaccttgtattctggcctagatgaagtggccgaggagcagacgcagctcttccgttgcccggagcaggatgtcccgtttgacggcagctccctggacgtggggatggatgtcagcccctctgagcccccatgggaactcctgccgatcttcccagatcttcaggtgaagtctgagccatcttccccctgctcttcctcctccctcagctccgagtcatcgcgtctctccacagagccatccagcgaggctcttggggtaggggaggtgctccatgtgaagacagagtccttggcacccccactgtgtctcctgggagatgacccaacatcctcatttgaaaccgtccagatcaacgttatccccacctctgatgattcctcagatgtccagaccaagatagaacctgtctctccatgttcttccgtcaactctgaggcctccctgctctcagccgactcctccagccaggcttttataggagaggaggtcctggaagtgaagacagagtccctgtccccttcaggatgcctcctgtgggatgtcccagccccctcacttggagctgtccagatcagcatgggcccatcccttgatggctcctcaggcaaagccctgcccacccggaagccgccactgcagcccaaacctgtagtgctaaccactgtcccaatgccatccagagctgtgcctcccagcaccacagtccttctgcagtccctcgtccagccacccccaggtactgaagaaggagaaaagggccgggcatggtggctcacgccggtaatcccagcactttgggaggctgaggcgggcgaatcacctgaggtcagaagtttaagaccagcctggccaacgtggtgaaaccttgtctctactaaaaatacaaaaattagcgtggagtggtggcaggcgcctgtaatcccagctcctcgggaggctgaggcaggagaatcacttgaacccaggaggcggaggttgcagtgagccgagatcatgccactgcactccagcctgggcgacaaagcgagactttgtctcaaaaaaaaaaaaaagaaaaaagaaaaa

SEQ ID NO: 1756 - DNA, 1020 bp, Homo sapiens
  source 1..1020: mol_type = unassigned DNA
ctcagcatttcttgcagacagcaccttgtattctggcctagatgaagtggccgaggagcagacgcagctcttccgttgcccggagcaggatgtcccgtttgacggcagctccctggacgtggggatggatgtcagcccctctgagcccccatgggaactcctgccgatcttcccagatcttcaggtgaagtctgagccatcttccccctgctcttcctcctccctcagctccgagtcatcgcgtctctccacagagccatccagcgaggctcttggggtaggggaggtgctccatgtgaagacagagtccttggcacccccactgtgtctcctgggagatgacccaacatcctcatttgaaaccgtccagatcaacgttatccccacctctgatgattcctcagatgtccagaccaagatagaacctgtctctccatgttcttccgtcaactctgaggcctccctgctctcagccgactcctccagccaggcttttataggagaggaggtcctggaagtgaagacagagtccctgtccccttcaggatgcctcctgtgggatgtcccagccccctcacttggagctgtccagatcagcatgggcccatcccttgatggctcctcaggcaaagccctgcccacccggaagccgccactgcagcccaaacctgtagtgctaaccactgtcccaatgccatccagagctgtgcctcccagcaccacagtccttctgcagtccctcgtccagccacccccaggtactgaagaaggagaaaagggccgggcatggtggctcacgccggtaatcccagcactttgggaggctgaggcgggcgaatcacctgaggtcagaagtttaagaccagcctggccaacgtggtgaaaccttgtctctactaaaaatacaaaaattagcgtggagtggtggcaggcgcctgtaatcccagctcctcgggaggctgaggcaggagaatcacttgaacccaggaggcggaggttgcagtgagccgagatcatgcc

SEQ ID NO: 1757 - DNA, 564 bp, Homo sapiens
  source 1..564: mol_type = unassigned DNA
gggggggaaagatggcggagctgatgctgctcagcgagattgctgacccgacgcgtttcttcaccgacaacctgcttagcccggaggactggggtctgcagaacagcaccttgtattctggcctagatgaagtggccgaggagcagacgcagctcttccgttgcccggagcaggatgtcccgtttgacggcagctccctggacgtggggatggatgtcagcccctctgagcccccatgggaactcctgccgatcttcccagatcttcaggtgaagtctgagccatcttccccctgctcttcctcctccctcagctccgagtcatcgcgtctctccacagagccatccagcgaggctcttggggtaggggaggtgctccatgtgaagacagagtccttggcacccccactgtgtctcctgggagatgacccaacatcctcatttgaaaccgtccagatcaacgttatccccacctctgatgattcctcaggtaataaaacagcctgcccccaatccttggctctactacgggagaatgtgttatgtgtgtgtgtgtatgtgtgta

SEQ ID NO: 1758 - DNA, 320 bp, Homo sapiens
  source 1..320: mol_type = unassigned DNA
cttcaaccgcactgagtccctgaggcttgctgacgagttgagtggctgggtccagcgccaccagagaggccggaggaagatccctcagagggcccaggagagacagaagtctcagccacggaagaagtcacctccagttaaggcagtccccatccaaccccctggacccccagaaagggattctgtgggccagctgcaactatatcgccacccagaccgttcgcagccagcattcttggatgcaattgaccgacgggaagacacattttatgttgtctctttccgaaggcctcctgaatgatgccagcccagtatgctct

SEQ ID NO: 1759 - DNA, 2620 bp, Homo sapiens
  source 1..2620: mol_type = unassigned DNA
aaccgtctcctggttggggggtgggggggaaagatggcggagctgatgctgctcagcgagattgctgacccgacgcgtttcttcaccgacaacctgcttagcccggaggactggggtctgcagaacagcaccttgtattctggcctagatgaagtggccgaggagcagacgcagctcttccgttgcccggagcaggatgtcccgtttgacggcagctccctggacgtggggatggatgtcagcccctctgagcccccatgggaactcctgccgatcttcccagatcttcaggtgaagtctgagccatcttccccctgctcttcctcctccctcagctccgagtcatcgcgtctctccacagagccatccagcgaggctcttggggtaggggaggtgctccatgtgaagacagagtccttggcacccccactgtgtctcctgggagatgacccaacatcctcatttgaaaccgtccagatcaacgttatccccacctctgatgattcctcagatgtccagaccaagatagaacctgtctctccatgttcttccgtcaactctgaggcctccctgctctcagccgactcctccagccaggcttttataggagaggaggtcctggaagtgaagacagagtccctgtccccttcaggatgcctcctgtgggatgtcccagccccctcacttggagctgtccagatcagcatgggcccatcccttgatggctcctcaggcaaagccctgcccacccggaagccgccactgcagcccaaacctgtagtgctaaccactgtcccaatgccatccagagctgtgcctcccagcaccacagtccttctgcagtccctcgtccagccacccccagtgtccccagttgtcctcatccagggtgctattcgagtccagcctgaagggccggctccctctctaccacggcctgagaggaagagcatcgttcccgctcctatgcctggaaactcctgcccgcctgaagtggatgcaaagctgctgaagcggcagcagcgaatgatcaagaaccgggagtcagcctgccagtcccggagaaagaagaaagagtatctgcagggactggaggctcggctgcaagcagtactggctgacaaccagcagctccgccgagagaatgctgccctccggcggcggctggaggccctgctggctgaaaacagcgagctcaagttagggtctggaaacaggaaggtggtctgcatcatggtcttccttctcttcattgccttcaactttggacctgtcagcatcagtgagcctccttcagctcccatctctcctcggatgaacaagggggagcctcaaccccggagacacttgctggggttctcagagcaagagccagttcagggagttgaacctctccaggggtcctcccagggccctaaggagccccagcccagccccacagaccagcccagtttcagcaacctgacagccttccctgggggcgccaaggagctactactaagagacctagaccagctcttcctctcctctgattgccggcacttcaaccgcactgagtccctgaggcttgctgacgagttgagtggctgggtccagcgccaccagagaggccggaggaagatccctcagagggcccaggagagacagaagtctcagccacggaagaagtcacctccagttaaggcagtccccatccaaccccctggacccccagaaagggattctgtgggccagctgcaactatatcgccacccagaccgttcgcagccagcattcttggatgcaattgaccgacgggaagacacattttatgttgtctctttccgaagggaccacctgctgctcccagccatcagccacaacaagacctcccggcccaagatgtccctggtgatgcctgccatggcccccaatgagaccctgtcaggccgtggggccccgggggactatgaggagatgatgcagatcgagtgtgaggtcatggacaccagggtgattcacatcaagacctccacagtgcccccctcgctccgaaaacagccatccccaaccccaggcaatgccacaggtggccccttgccagtctctgcagccagccaggcccaccaggcctcccaccagcccctctacctcaatcatccctgacctctgccattcacactgacttagaacggggggagggggtaccaggtggccaggtgggactgtttcaaatttccctgatccccaggcttggggcaattggtaaaggaaagagcaggtgtgggggttaagcacttatttgaggtgggggtgttcacctctcttctcatcccttttcagaatatagggctcctctcattcctgtgaacccccagtcctggcttctttgtttgaggggattgtgtgaggttcagttgtggggtgggtggtgagctgctgcatattttttattttgtttctctagtgttatggcagtggaggtgggaatttagtccccaggtgggacaagggaagttttttcattttggagctagttactgggagtaagggagggtggggtgggggggagttcaggtttatgtgtgtgcatttcttttttattattattaaataaacaacttggagggagttgaaggaa

SEQ ID NO: 1760 - DNA, 2624 bp, Homo sapiens
  source 1..2624: mol_type = unassigned DNA
ggcgggccttgggaaccgtctcctggttggggggtgggggggaaagatggcggagctgatgctgctcagcgagattgctgacccgacgcgtttcttcaccgacaacctgcttagcccggaggactgggacagcaccttgtattctggcctagatgaagtggccgaggagcagacgcagctcttccgttgcccggagcaggatgtcccgtttgacggcagctccctggacgtggggatggatgtcagcccctctgagcccccatgggaactcctgccgatcttcccagatcttcaggtgaagtctgagccatcttccccctgctcttcctcctccctcagctccgagtcatcgcgtctctccacagagccatccagcgaggctcttggggtaggggaggtgctccatgtgaagacagagtccttggcacccccactgtgtctcctgggagatgacccaacatcctcatttgaaaccgtccagatcaacgttatccccacctctgatgattcctcagatgtccagaccaagatagaacctgtctctccatgttcttccgtcaactctgaggcctccctgctctcagccgactcctccagccaggcttttataggagaggaggtcctggaagtgaagacagagtccctgtccccttcaggatgcctcctgtgggatgtcccagccccctcacttggagctgtccagatcagcatgggcccatcccttgatggctcctcaggcaaagccctgcccacccggaagccgccactgcagcccaaacctgtagtgctaaccactgtcccaatgccatccagagctgtgcctcccagcaccacagtccttctgcagtccctcgtccagccacccccagtgtccccagttgtcctcatccagggtgctattcgagtccagcctgaagggccggctccctctctaccacggcctgagaggaagagcatcgttcccgctcctatgcctggaaactcctgcccgcctgaagtggatgcaaagctgctgaagcggcagcagcgaatgatcaagaaccgggagtcagcctgccagtcccggagaaagaagaaagagtatctgcagggactggaggctcggctgcaagcagtactggctgacaaccagcagctccgccgagagaatgctgccctccggcggcggctggaggccctgctggctgaaaacagcgagctcaagttagggtctggaaacaggaaggtggtctgcatcatggtcttccttctcttcattgccttcaactttggacctgtcagcatcagtgagcctccttcagctcccatctctcctcggatgaacaagggggagcctcaaccccggagacacttgctggggttctcagagcaagagccagttcagggagttgaacctctccaggggtcctcccagggccctaaggagccccagcccagccccacagaccagcccagtttcagcaacctgacagccttccctgggggcgccaaggagctactactaagagacctagaccagctcttcctctcctctgattgccggcacttcaaccgcactgagtccctgaggcttgctgacgagttgagtggctgggtccagcgccaccagagaggccggaggaagatccctcagagggcccaggagagacagaagtctcagccacggaagaagtcacctccagttaaggcagtccccatccaaccccctggacccccagaaagggattctgtgggccagctgcaactatatcgccacccagaccgttcgcagccagcattcttggatgcaattgaccgacgggaagacacattttatgttgtctctttccgaagggaccacctgctgctcccagccatcagccacaacaagacctcccggcccaagatgtccctggtgatgcctgccatggcccccaatgagaccctgtcaggccgtggggccccgggggactatgaggagatgatgcagatcgagtgtgaggtcatggacaccagggtgattcacatcaagacctccacagtgcccccctcgctccgaaaacagccatccccaaccccaggcaatgccacaggtggccccttgccagtctctgcagccagccaggcccaccaggcctcccaccagcccctctacctcaatcatccctgacctctgccattcacactgacttagaacggggggagggggtaccaggtggccaggtgggactgtttcaaatttccctgatccccaggcttggggcaattggtaaaggaaagagcaggtgtgggggttaagcacttatttgaggtgggggtgttcacctctcttctcatcccttttcagaatatagggctcctctcattcctgtgaacccccagtcctggcttctttgtttgaggggattgtgtgaggttcagttgtggggtgggtggtgagctgctgcatattttttattttgtttctctagtgttatggcagtggaggtgggaatttagtccccaggtgggacaagggaagttttttcattttggagctagttactgggagtaagggagggtggggtgggggggagttcaggtttatgtgtgtgcatttcttttttattattattaaataaacaacttggagggagttgaaggaa

SEQ ID NO: 1761 - DNA, 425 bp, Homo sapiens; identical to SEQ ID NO: 1752
  source 1..425: mol_type = unassigned DNA

SEQ ID NO: 1762 - DNA, 561 bp, Homo sapiens; identical to SEQ ID NO: 1753
  source 1..561: mol_type = unassigned DNA

SEQ ID NO: 1763 - DNA, 819 bp, Homo sapiens; identical to SEQ ID NO: 1754
  source 1..819: mol_type = unassigned DNA

SEQ ID NO: 1764 - DNA, 1176 bp, Homo sapiens; identical to SEQ ID NO: 1755
  source 1..1176: mol_type = unassigned DNA

SEQ ID NO: 1765 - DNA, 1020 bp, Homo sapiens; identical to SEQ ID NO: 1756
  source 1..1020: mol_type = unassigned DNA

SEQ ID NO: 1766 - DNA, 564 bp, Homo sapiens; identical to SEQ ID NO: 1757
  source 1..564: mol_type = unassigned DNA

SEQ ID NO: 1767 - DNA, 2620 bp, Homo sapiens
  source 1..2620: mol_type = unassigned DNA
aaccgtctcctggttggggggtgggggggaaagatggcggagctgatgctgctcagcgagattgctgacccgacgcgtttcttcaccgacaacctgcttagcccggaggactggggtctgcagaacagcaccttgtattctggcctagatgaagtggccgaggagcagacgcagctcttccgttgcccggagcaggatgtcccgtttgacggcagctccctggacgtggggatggatgtcagcccctctgagcccccatgggaactcctgccgatcttcccagatcttcaggtgaagtctgagccatcttccccctgctcttcctcctccctcagctccgagtcatcgcgtctctccacagagccatccagcgaggctcttggggtaggggaggtgctccatgtgaagacagagtccttggcacccccactgtgtctcctgggagatgacccaacatcctcatttgaaaccgtccagatcaacgttatccccacctctgatgattcctcagatgtccagaccaagatagaacctgtctctccatgttcttccgtcaactctgaggcctccctgctctcagccgactcctccagccaggcttttataggagaggaggtcctggaagtgaagacagagtccctgtcgccttcaggatgcctcctgtgggatgtcccagccccctcacttggagctgtccagatcagcatgggcccatcccttgatggctcctcaggcaaagccctgcccacccggaagccgccactgcagcccaaacctgtagtgctaaccactgtcccaatgccatccagagctgtgcctcccagcaccacagtccttctgcagtccctcgtccagccacccccagtgtccccagttgtcctcatccagggtgctattcgagtccagcctgaagggccggctccctctctaccacggcctgagaggaagagcatcgttcccgctcctatgcctggaaactcctgcccgcctgaagtggatgcaaagctgctgaagcggcagcagcgaatgatcaagaaccgggagtcagcctgccagtcccggagaaagaagaaagagtatctgcagggactggaggctcggctgcaagcagtactggctgacaaccagcagctccgccgagagaatgctgccctccggcggcggctggaggccctgctggctgaaaacagcgagctcaagttagggtctggaaacaggaaggtggtctgcatcatggtcttccttctcttcattgccttcaactttggacctgtcagcatcagtgagcctccttcagctcccatctctcctcggatgaacaagggggagcctcaaccccggagacacttgctggggttctcagagcaagagccagttcagggagttgaacctctccaggggtcctcccagggccctaaggagccccagcccagccccacagaccagcccagtttcagcaacctgacagccttccctgggggcgccaaggagctactactaagagacctagaccagctcttcctctcctctgattgccggcacttcaaccgcactgagtccctgaggcttgctgacgagttgagtggctgggtccagcgccaccagagaggccggaggaagatccctcagagggcccaggagagacagaagtctcagccacggaagaagtcacctccagttaaggcagtccccatccaaccccctggacccccagaaagggattctgtgggccagctgcaactatatcgccacccagaccgttcgcagccagcattcttggatgcaattgaccgacgggaagacacattttatgttgtctctttccgaagggaccacctgctgctcccagccatcagccacaacaagacctcccggcccaagatgtccctggtgatgcctgccatggcccccaatgagaccctgtcaggccgtggggccccgggggactatgaggagatgatgcagatcgagtgtgaggtcatggacaccagggtgattcacatcaagacctccacagtgcccccctcgctccgaaaacagccatccccaaccccaggcaatgccacaggtggccccttgccagtctctgcagccagccaggcccaccaggcctcccaccagcccctctacctcaatcatccctgacctctgccattcacactgacttagaacggggggagggggtaccaggtggccaggtgggactgtttcaaatttccctgatccccaggcttggggcaattggtaaaggaaagagcaggtgtgggggttaagcacttatttgaggtgggggtgttcacctctcttctcatcccttttcagaatatagggctcctctcattcctgtgaacccccagtcctggcttctttgtttgaggggattgtgtgaggttcagttgtggggtgggtggtgagctgctgcatattttttattttgtttctctagtgttatggcagtggaggtgggaatttagtccccaggtggaacaagggaagttttttcattttggagctagttactgggagtaagggagggtggggtgggggggagttcaggtttatgtgtgtgcatttcttttttattattattaaataaacaacttggagggagttgaaggaa

SEQ ID NO: 1768 - DNA, 2624 bp, Homo sapiens
  source 1..2624: mol_type = unassigned DNA
ggcgggccttgggaaccgtctcctggttggggggtgggggggaaagatggcggagctgatgctgctcagcgagattgctgacccgacgcgtttcttcaccgacaacctgcttagcccggaggactgggacagcaccttgtattctggcctagatgaagtggccgaggagcagacgcagctcttccgttgcccggagcaggatgtcccgtttgacggcagctccctggacgtggggatggatgtcagcccctctgagcccccatgggaactcctgccgatcttcccagatcttcaggtgaagtctgagccatcttccccctgctcttcctcctccctcagctccgagtcatcgcgtctctccacagagccatccagcgaggctcttggggtaggggaggtgctccatgtgaagacagagtccttggcacccccactgtgtctcctgggagatgacccaacatcctcatttgaaaccgtccagatcaacgttatccccacctctgatgattcctcagatgtccagaccaagatagaacctgtctctccatgttcttccgtcaactctgaggcctccctgctctcagccgactcctccagccaggcttttataggagaggaggtcctggaagtgaagacagagtccctgtcgccttcaggatgcctcctgtgggatgtcccagccccctcacttggagctgtccagatcagcatgggcccatcccttgatggctcctcaggcaaagccctgcccacccggaagccgccactgcagcccaaacctgtagtgctaaccactgtcccaatgccatccagagctgtgcctcccagcaccacagtccttctgcagtccctcgtccagccacccccagtgtccccagttgtcctcatccagggtgctattcgagtccagcctgaagggccggctccctctctaccacggcctgagaggaagagcatcgttcccgctcctatgcctggaaactcctgcccgcctgaagtggatgcaaagctgctgaagcggcagcagcgaatgatcaagaaccgggagtcagcctgccagtcccggagaaagaagaaagagtatctgcagggactggaggctcggctgcaagcagtactggctgacaaccagcagctccgccgagagaatgctgccctccggcggcggctggaggccctgctggctgaaaacagcgagctcaagttagggtctggaaacaggaaggtggtctgcatcatggtcttccttctcttcattgccttcaactttggacctgtcagcatcagtgagcctccttcagctcccatctctcctcggatgaacaagggggagcctcaaccccggagacacttgctggggttctcagagcaagagccagttcagggagttgaacctctccaggggtcctcccagggccctaaggagccccagcccagccccacagaccagcccagtttcagcaacctgacagccttccctgggggcgccaaggagctactactaagagacctagaccagctcttcctctcctctgattgccggcacttcaaccgcactgagtccctgaggcttgctgacgagttgagtggctgggtccagcgccaccagagaggccggaggaagatccctcagagggcccaggagagacagaagtctcagccacggaagaagtcacctccagttaaggcagtccccatccaaccccctggacccccagaaagggattctgtgggccagctgcaactatatcgccacccagaccgttcgcagccagcattcttggatgcaattgaccgacgggaagacacattttatgttgtctctttccgaagggaccacctgctgctcccagccatcagccacaacaagacctcccggcccaagatgtccctggtgatgcctgccatggcccccaatgagaccctgtcaggccgtggggccccgggggactatgaggagatgatgcagatcgagtgtgaggtcatggacaccagggtgattcacatcaagacctccacagtgcccccctcgctccgaaaacagccatccccaaccccaggcaatgccacaggtggccccttgccagtctctgcagccagccaggcccaccaggcctcccaccagcccctctacctcaatcatccctgacctctgccattcacactgacttagaacggggggagggggtaccaggtggccaggtgggactgtttcaaatttccctgatccccaggcttggggcaattggtaaaggaaagagcaggtgtgggggttaagcacttatttgaggtgggggtgttcacctctcttctcatcccttttcagaatatagggctcctctcattcctgtgaacccccagtcctggcttctttgtttgaggggattgtgtgaggttcagttgtggggtgggtggtgagctgctgcatattttttattttgtttctctagtgttatggcagtggaggtgggaatttagtccccaggtggaacaagggaagttttttcattttggagctagttactgggagtaagggagggtggggtgggggggagttcaggtttatgtgtgtgcatttcttttttattattattaaataaacaacttggagggagttgaaggaa

SEQ ID NO: 1769 - DNA, 425 bp, Homo sapiens; identical to SEQ ID NO: 1752
  source 1..425: mol_type = unassigned DNA

SEQ ID NO: 1770 - DNA, 561 bp, Homo sapiens; identical to SEQ ID NO: 1753
  source 1..561: mol_type = unassigned DNA

SEQ ID NO: 1771 - DNA, 819 bp, Homo sapiens; identical to SEQ ID NO: 1754
  source 1..819: mol_type = unassigned DNA

SEQ ID NO: 1772 - DNA, 1176 bp, Homo sapiens
  source 1..1176: mol_type = unassigned DNA
gggtgggggggaaagatggcggagctgatgctgctcagcgagattgctgacccgacgcgtttcttcaccgacaacctgcttagcccggaggactggggtctgcagaacagcaccttgtattctggcctagatgaagtggccgaggagcagacgcagctcttccgttgcccggagcaggatgtcccgtttgacggcagctccctggacgtggggatggatgtcagcccctctgagcccccatgggaactcctgccgatcttcccagatcttcaggtgaagtctgagccatcttccccctgctcttcctcctccctcagctccgagtcatcgcgtctctccacagagccatccagcgaggctcttggggtaggggaggtgctccatgtgaagacagagtccttggcacccccactgtgtctcctgggagatgacccaacatcctcatttgaaaccgtccagatcaacgttatccccacctctgatgattcctcagatgtccagaccaagatagaacctgtctctccatgttcttccgtcaactctgaggcctccctgctctcagccgactcctccagccaggcttttataggagaggaggtcctggaagtgaagacagagtccctgtcgccttcaggatgcctcctgtgggatgtcccagccccctcacttggagctgtccagatcagcatgggcccatcccttgatggctcctcaggcaaagccctgcccacccggaagccgccactgcagcccaaacctgtagtgctaaccactgtcccaatgccatccagagctgtgcctcccagcaccacagtccttctgcagtccctcgtccagccacccccaggtactgaagaaggagaaaagggccgggcatggtggctcacgccggtaatcccagcactttgggaggctgaggcgggcgaatcacctgaggtcagaagtttaagaccagcctggccaacgtggtgaaaccttgtctctactaaaaatacaaaaattagcgtggagtggtggcaggcgcctgtaatcccagctcctcgggaggctgaggcaggagaatcacttgaacccaggaggcggaggttgcagtgagccgagatcatgccactgcactccagcctgggcgacaaagcgagactttgtctcaaaaaaaaaaaaaagaaaaaagaaaaa

SEQ ID NO: 1773 - DNA, 1020 bp, Homo sapiens
  source 1..1020: mol_type = unassigned DNA
ctcagcatttcttgcagacagcaccttgtattctggcctagatgaagtggccgaggagcagacgcagctcttccgttgcccggagcaggatgtcccgtttgacggcagctccctggacgtggggatggatgtcagcccctctgagcccccatgggaactcctgccgatcttcccagatcttcaggtgaagtctgagccatcttccccctgctcttcctcctccctcagctccgagtcatcgcgtctctccacagagccatccagcgaggctcttggggtaggggaggtgctccatgtgaagacagagtccttggcacccccactgtgtctcctgggagatgacccaacatcctcatttgaaaccgtccagatcaacgttatccccacctctgatgattcctcagatgtccagaccaagatagaacctgtctctccatgttcttccgtcaactctgaggcctccctgctctcagccgactcctccagccaggcttttataggagaggaggtcctggaagtgaagacagagtccctgtcgccttcaggatgcctcctgtgggatgtcccagccccctcacttggagctgtccagatcagcatgggcccatcccttgatggctcctcaggcaaagccctgcccacccggaagccgccactgcagcccaaacctgtagtgctaaccactgtcccaatgccatccagagctgtgcctcccagcaccacagtccttctgcagtccctcgtccagccacccccaggtactgaagaaggagaaaagggccgggcatggtggctcacgccggtaatcccagcactttgggaggctgaggcgggcgaatcacctgaggtcagaagtttaagaccagcctggccaacgtggtgaaaccttgtctctactaaaaatacaaaaattagcgtggagtggtggcaggcgcctgtaatcccagctcctcgggaggctgaggcaggagaatcacttgaacccaggaggcggaggttgcagtgagccgagatcatgcc

SEQ ID NO: 1774 - DNA, 564 bp, Homo sapiens; identical to SEQ ID NO: 1757
  source 1..564: mol_type = unassigned DNA

SEQ ID NO: 1775 - DNA, 2620 bp, Homo sapiens
  source 1..2620: mol_type = unassigned DNA
aaccgtctcctggttggggggtgggggggaaagatggcggagctgatgctgctcagcgagattgctgacccgacgcgtttcttcaccgacaacctgcttagcccggaggactggggtctgcagaacagcaccttgtattctggcctagatgaagtggccgaggagcagacgcagctcttccgttgcccggagcaggatgtcccgtttgacggcagctccctggacgtggggatggatgtcagcccctctgagcccccatgggaactcctgccgatcttcccagatcttcaggtgaagtctgagccatcttccccctgctcttcctcctccctcagctccgagtcatcgcgtctctccacagagccatccagcgaggctcttggggtaggggaggtgctccatgtgaagacagagtccttggcacccccactgtgtctcctgggagatgacccaacatcctcatttgaaaccgtccagatcaacgttatccccacctctgatgattcctcagatgtccagaccaagatagaacctgtctctccatgttcttccgtcaactctgaggcctccctgctctcagccgactcctccagccaggcttttataggagaggaggtcctggaagtgaagacagagtccctgtccccttcaggatgcctcctgtgggatgtcccagccccctcacttggagctgtccagatcagcatgggcccatcccttgatggctcctcaggcaaagccctgcccacccggaagccgccactgcagcccaaacctgtagtgctaaccactgtcccaatgccatccagagctgtgcctcccagcaccacagtccttctgcagtccctcgtccagccacccccagtgtccccagttgtcctcatccagggtgctattcgagtccagcctgaagggccggctccctctctaccacggcctgagaggaagagcatcgttcccgctcctatgcctggaaactcctgcccgcctgaagtggatgcaaagctgctgaagcggcagcagcgaatgatcaagaaccgggagtcagcctgccagtcccggagaaagaagaaagagtatctgcagggactggaggctcggctgcaagcagtactggctgacaaccagcagctccgccgagagaatgctgccctccggcggcggctggaggccctgctggctgaaaacagcgagctcaagttagggtctggaaacaggaaggtggtctgcatcatggtcttccttctcttcattgccttcaactttggacctgtcagcatcagtgagcctccttcagctcccatctctcctcggatgaacaagggggagcctcaaccccggagacacttgctggggttctcagagcaagagccagttcagggagttgaacctctccaggggtcctcccagggccctaaggagccccagcccagccccacagaccagcccagtttcagcaacctgacagccttccctgggggcgccaaggagctactactaagagacctagaccagctcttcctctcctctgattgccggcacttcaaccgcactgagtccctgaggcttgctgacgagttgagtggctgggtccagcgccaccagagaggccggaggaagatccctcagagggcccaggagagacagaagtctcagccacggaagaagtcacctccagttaaggcagtccccatccaaccccctggacccccagaaagggattctgtgggccagctgcaactatatcgccacccagaccgttcgcagccagcattcttggatgcaattgaccgacgggaagacacattttatgttgtctctttccgaagggaccacctgctgctcccagccatcagccacaacaagacctcccggcccaagatgtccctggtgatgcctgccatggcccccaatgagaccctgtcaggccgtggggccccgggggactatgaggagatgatgcagatcgagtgtgaggtcatggacaccagggtgattcacatcaagacctccacagtgcccccctcgctccgaaaacagccatccccaaccccaggcaatgccacaggtggccccttgccagtctctgcagccagccaggcccaccaggcctcccaccagcccctctacctcaatcatccctgacctctgccattcacactgacttagaacggggggagggggtaccaggtggccaggtgggactgtttcaaatttccctgatccccaggcttggggcaattggtaaaggaaagagcaggtgtgggggttaagcacttatttgaggtgggggtgttcacctctcttctcatcccttttcagaatatagggctcctctcattcctgtgaacccccagtcccggcttctttgtttgaggggattgtgtgaggttcagttgtggggtgggtggtgagctgctgcatattttttattttgtttctctagtgttatggcagtggaggtgggaatttagtccccaggtgggacaagggaagttttttcattttggagctagttactgggagtaagggagggtggggtgggggggagttcaggtttatgtgtgtgcatttcttttttattattattaaataaacaacttggagggagttgaaggaa

SEQ ID NO: 1776 - DNA, 2624 bp, Homo sapiens
  source 1..2624: mol_type = unassigned DNA
ggcgggccttgggaaccgtctcctggttggggggtgggggggaaagatggcggagctgatgctgctcagcgagattgctgacccgacgcgtttcttcaccgacaacctgcttagcccggaggactgggacagcaccttgtattctggcctagatgaagtggccgaggagcagacgcagctcttccgttgcccggagcaggatgtcccgtttgacggcagctccctggacgtggggatggatgtcagcccctctgagcccccatgggaactcctgccgatcttcccagatcttcaggtgaagtctgagccatcttccccctgctcttcctcctccctcagctccgagtcatcgcgtctctccacagagccatccagcgaggctcttggggtaggggaggtgctccatgtgaagacagagtccttggcacccccactgtgtctcctgggagatgacccaacatcctcatttgaaaccgtccagatcaacgttatccccacctctgatgattcctcagatgtccagaccaagatagaacctgtctctccatgttcttccgtcaactctgaggcctccctgctctcagccgactcctccagccaggcttttataggagaggaggtcctggaagtgaagacagagtccctgtccccttcaggatgcctcctgtgggatgtcccagccccctcacttggagctgtccagatcagcatgggcccatcccttgatggctcctcaggcaaagccctgcccacccggaagccgccactgcagcccaaacctgtagtgctaaccactgtcccaatgccatccagagctgtgcctcccagcaccacagtccttctgcagtccctcgtccagccacccccagtgtccccagttgtcctcatccagggtgctattcgagtccagcctgaagggccggctccctctctaccacggcctgagaggaagagcatcgttcccgctcctatgcctggaaactcctgcccgcctgaagtggatgcaaagctgctgaagcggcagcagcgaatgatcaagaaccgggagtcagcctgccagtcccggagaaagaagaaagagtatctgcagggactggaggctcggctgcaagcagtactggctgacaaccagcagctccgccgagagaatgctgccctccggcggcggctggaggccctgctggctgaaaacagcgagctcaagttagggtctggaaacaggaaggtggtctgcatcatggtcttccttctcttcattgccttcaactttggacctgtcagcatcagtgagcctccttcagctcccatctctcctcggatgaacaagggggagcctcaaccccggagacacttgctggggttctcagagcaagagccagttcagggagttgaacctctccaggggtcctcccagggccctaaggagccccagcccagccccacagaccagcccagtttcagcaacctgacagccttccctgggggcgccaaggagctactactaagagacctagaccagctcttcctctcctctgattgccggcacttcaaccgcactgagtccctgaggcttgctgacgagttgagtggctgggtccagcgccaccagagaggccggaggaagatccctcagagggcccaggagagacagaagtctcagccacggaagaagtcacctccagttaaggcagtccccatccaaccccctggacccccagaaagggattctgtgggccagctgcaactatatcgccacccagaccgttcgcagccagcattcttggatgcaattgaccgacgggaagacacattttatgttgtctctttccgaagggaccacctgctgctcccagccatcagccacaacaagacctcccggcccaagatgtccctggtgatgcctgccatggcccccaatgagaccctgtcaggccgtggggccccgggggactatgaggagatgatgcagatcgagtgtgaggtcatggacaccagggtgattcacatcaagacctccacagtgcccccctcgctccgaaaacagccatccccaaccccaggcaatgccacaggtggccccttgccagtctctgcagccagccaggcccaccaggcctcccaccagcccctctacctcaatcatccctgacctctgccattcacactgacttagaacggggggagggggtaccaggtggccaggtgggactgtttcaaatttccctgatccccaggcttggggcaattggtaaaggaaagagcaggtgtgggggttaagcacttatttgaggtgggggtgttcacctctcttctcatcccttttcagaatatagggctcctctcattcctgtgaacccccagtcccggcttctttgtttgaggggattgtgtgaggttcagttgtggggtgggtggtgagctgctgcatattttttattttgtttctctagtgttatggcagtggaggtgggaatttagtccccaggtgggacaagggaagttttttcattttggagctagttactgggagtaagggagggtggggtgggggggagttcaggtttatgtgtgtgcatttcttttttattattattaaataaacaacttggagggagttgaaggaa

SEQ ID NO: 1777 - DNA, 425 bp, Homo sapiens; identical to SEQ ID NO: 1752
  source 1..425: mol_type = unassigned DNA

SEQ ID NO: 1778 - DNA, 561 bp, Homo sapiens; identical to SEQ ID NO: 1753
  source 1..561: mol_type = unassigned DNA

SEQ ID NO: 1779 - DNA, 819 bp, Homo sapiens; identical to SEQ ID NO: 1754
  source 1..819: mol_type = unassigned DNA

SEQ ID NO: 1780 - DNA, 1176 bp, Homo sapiens; identical to SEQ ID NO: 1755
  source 1..1176: mol_type = unassigned DNA

SEQ ID NO: 1781 - DNA, 1020 bp, Homo sapiens; identical to SEQ ID NO: 1756
  source 1..1020: mol_type = unassigned DNA

SEQ ID NO: 1782 - DNA, 564 bp, Homo sapiens; identical to SEQ ID NO: 1757
  source 1..564: mol_type = unassigned DNA

SEQ ID NO: 1783 - DNA, 2868 bp, Homo sapiens
  source 1..2868: mol_type = unassigned DNA
agatggcggagggggacgaggcagcgcgagggcagcaaccgcaccaggggctgtggcgccggcgacggaccagcgacccaagcgccgcggttaaccacgtctcgtccacgacctccctaggtgagaattatgaagatgatgacctagtaaattctgatgaggttatgaagaaaccatgtccagtacagattgttcttgctcatgaagatgaccataactttgaacttgatgaagaagctttggagcagatattgctacaggagcacatacgagatcttaacatagtagtggtatctgtggcaggagcttttcgtaaagggaagtcatttctactggacttcatgcttagatacatgtataacaaggattctcaaagttggattggtggaaacaatgaaccattgacaggctttacatggcgaggtggctgtgaaagagaaacaacaggcatacaagtttggaatgaagtatttgtgattgacagacctaatggaactaaagttgctgtgctgcttatggatacccagggtgcctttgatagccagtcaactatcaaagactgtgcaacggtgtttgctctgagcactatgactagctctgtccaggtatataatctgtctcagaatattcaagaagatgatcttcaacatttgcaattatttacagagtatggaagacttgcgatggaagaaatctaccagaaaccatttcagacattaatgtttttgattcgagattggagctatccttatgaacattcatatggtttggaaggtggaaagcaatttcttgaaaagagattacaggtaaaacaaaatcaacatgaagagcttcagaatgtaaggaagcacatacacaattgtttctcaaatcttggttgcttccttttgccacatcctggtcttaaagttgcaactaatcctagttttgatgggagattgaaagatattgatgaagactttaaacgagagcttcgaaatctggttccattgctgcttgcccctgaaaatttggtagaaaaagagataagtggatctaaagtcacttgtagagatcttgtagaatattttaaggcttacatcaaaatctatcaaggagaagaacttccacatccaaagtccatgcttcaggcaacagctgaagctaataatcttgctgcagtagcaggagcaagagatacctattgtaaaagtatggaacaggtatgtggaggggacaagccttacattgcaccttcagatctggagcgaaaacacttggatctcaaggaagtggcgataaaacaatttcgttcagtaaaaaagatgggtggagatgagttctgccgtcgttatcaggaccagcttgaagctgaaattgaagaaacctatgcaaattttataaagcacaatgatggcaaaaatatcttctatgctgctcgtaccccagccacactgtttgcggtcatgtttgctatgtatataatctcaggactgactggcttcattggcctaaactctatagctgtcttgtgtaaccttgtcatggggttagcactgatatttctttgtacttgggcatatgttaaatactctggggagttcagagaaattggaacagtgattgatcagattgctgaaacactatgggaacaggtattgaagcccctgggtgataatttgatggaggaaaacataaggcagtctgtaacaaactctatcaaagcaggcctgactgaccaggtgtctcatcatgccagattaaagacagactgacagttcatctcctcacggactccactctctttttttttcatgcttgctgtacaatgagaactcaaataaaaataaaccaaagtttacaatcaactgtagaagtagtttagtgtaactggcttcacagatggctgccacagagtgtgaagattgtttgttagttttaagcattcttttaatggctcctaagacatgcagatggactgaggagcattggttaatcatgcacctttgtgccatgtttaactcttttatttctttttacttaatctaatgttagtgaatttgtcttatgtaaaaggatatttcagggaaatattttcagaaatctatttagagtctctttaacacagtgtcccattgaaattttaatttttagagaatttatgaatcactgtttcaagaaccagattggaaagacaatgaagcctttattgagccactacattaaaagtatatattgctttactgccttcaataccagtattacatcaatgcatgtatcagaaacttcacagaaattacatggcaactcttgtagctaagaaagtaattctgaggtgtacatttgtcttgcctttttaaatttataaacttgccctaaaaggagatgcatatctgggaaactgaactgtctttttgcagtttagccttcatgtatataaaatatgccattaattttattggggaagaaattccatccaaaaatgttgcctacagctatgagttaagagtgtctgtacagtgtgtagcttttattttctaaaatcacagatagggcatgtatatgacttataaatatataaatacgattttgtattaaaagttttgtagtttatggcaaaatctggtcctgtggtaggctaaataagtactgtccctgtgaaaggaatgtttgtggctcatgtcagtgtgtgaatgcatagacaatttgaagtttttgatatatttgtgatatttatcttgagcactgcaatctcaccccccccccgcccaccaagggaattcaatgggaatgtttattgtgactttgtcctctgttgcattttaaagttatttcctgtaatttattttcagtacataattaaaaatttgttgtatatataaaatgaaa

SEQ ID NO: 1784 - DNA, 2864 bp, Homo sapiens
  source 1..2864: mol_type = unassigned DNA
ggagttaattttaaatcggtacaagatggcggagggggacgaggcagcgcgagggcagcaaccgcaccaggggctgtggcgccggcgacggaccagcgacccaagcgccgcggttaaccacgtctcgtccacgacctccctaggattctcaaagttggattggtggaaacaatgaaccattgacaggctttacatggcgaggtggctgtgaaagagaaacaacaggcatacaagtttggaatgaagtatttgtgattgacagacctaatggaactaaagttgctgtgctgcttatggatacccagggtgcctttgatagccagtcaactatcaaagactgtgcaacggtgtttgctctgagcactatgactagctctgtccaggtatataatctgtctcagaatattcaagaagatgatcttcaacatttgcaattatttacagagtatggaagacttgcgatggaagaaatctaccagaaaccatttcagacattaatgtttttgattcgagattggagctatccttatgaacattcatatggtttggaaggtggaaagcaatttcttgaaaagagattacaggtaaaacaaaatcaacatgaagagcttcagaatgtaaggaagcacatacacaattgtttctcaaatcttggttgcttccttttgccacatcctggtcttaaagttgcaactaatcctagttttgatgggagattgaaagatattgatgaagactttaaacgagagcttcgaaatctggttccattgctgcttgcccctgaaaatttggtagaaaaagagataagtggatctaaagtcacttgtagagatcttgtagaatattttaaggcttacatcaaaatctatcaaggagaagaacttccacatccaaagtccatgcttcaggcaacagctgaagctaataatcttgctgcagtagcaggagcaagagatacctattgtaaaagtatggaacaggtatgtggaggggacaagccttacattgcaccttcagatctggagcgaaaacacttggatctcaaggaagtggcgataaaacaatttcgttcagtaaaaaagatgggtggagatgagttctgccgtcgttatcaggaccagcttgaagctgaaattgaagaaacctatgcaaattttataaagcacaatgatggcaaaaatatcttctatgctgctcgtaccccagccacactgtttgcggtcatgtttgctatgtatataatctcaggactgactggcttcattggcctaaactctatagctgtcttgtgtaaccttgtcatggggttagcactgatatttctttgtacttgggcatatgttaaatactctggggagttcagagaaattggaacagtgattgatcagattgctgaaacactatgggaacagaggagtcccaggaaggtgttttccaaactgtttgaagttactagacgtcgaatggttcaccgtgctctttcatcagcacagcgacagagactgtcatccaacaataacaagaagaaaaattagacagtatttttaacctttttctctatctgaagtgttcacacttacacatgtaggacaataagcaggaccgtctgggccggtctgcataaatgctgtatacataccagatttgatgctgcatatagggtatggaattgcacatccatctcataggaattgtaaatggtttgaataagaggaaagtaatttttgttgcattataaaatgtctagtagcatcataagtttttttgagagaagcatctttttatttcccatattcctggttattttcatcattgctttgaattgaatttttatatctatttttatatgtaactctttttttacctcatgtttttgtttgttttgcacatttctcataccacaggtattgaagcccctgggtgataatttgatggaggaaaacataaggcagtctgtaacaaactctatcaaagcaggcctgactgaccaggtgtctcatcatgccagattaaagacagactgacagttcatctcctcacggactccactctctttttttttcatgcttgctgtacaatgagaactcaaataaaaataaaccaaagtttacaatcaactgtagaagtagtttagtgtaactggcttcacagatggctgccacagagtgtgaagattgtttgttagttttaagcattcttttaatggctcctaagacatgcagatggactgaggagcattggttaatcatgcacctttgtgccatgtttaactcttttatttctttttacttaatctaatgttagtgaatttgtcttatgtaaaaggatatttcagggaaatattttcagaaatctatttagagtctctttaacacagtgtcccattgaaattttaatttttagagaatttatgaatcactgtttcaagaaccagattggaaagacaatgaagcctttattgagccactacattaaaagtatatattgctttactgccttcaataccagtattacatcaatgcatgtatcagaaacttcacagaaattacatggcaactcttgtagctaagaaagtaattctgaggtgtacatttgtcttgcctttttaaatttataaacttgccctaaaaggagatgcatatctgggaaactgaactgtctttttgcagtttagccttcatgtatataaaatatgccattaattttattggggaagaaattccatccaaaaatgttgcctacagctatgagttaagagtgtctgtacagtgtgtagcttttattttctaaaatcacagatagggcatgtatatgacttataaatatataaatacgattttgtattaaaagttttgtagtttatg

SEQ ID NO: 1785 - DNA, 1883 bp, Homo sapiens
  source 1..1883: mol_type = unassigned DNA
actgtggtgcgaattgatcgcatgaaatcctgattgaaaattttgatggtacttaagaaaggcataaagttttttcaaaggcttataaatagtaaaagcctacgatttggattctcaaagttggattggtggaaacaatgaaccattgacaggctttacatggcgaggtggctgtgaaagagaaacaacaggcatacaagtttggaatgaagtatttgtgattgacagacctaatggaactaaagttgctgtgctgcttatggatacccagggtgcctttgatagccagtcaactatcaaagactgtgcaacggtgtttgctctgagcactatgactagctctgtccaggtatataatctgtctcagaatattcaagaagatgatcttcaacatttgcaattatttacagagtatggaagacttgcgatggaagaaatctaccagaaaccatttcagacattaatgtttttgattcgagattggagctatccttatgaacattcatatggtttggaaggtggaaagcaatttcttgaaaagagattacaggtaaaacaaaatcaacatgaagagcttcagaatgtaaggaagcacatacacaattgtttctcaaatcttggttgcttccttttgccacatcctggtcttaaagttgcaactaatcctagttttgatgggagattgaaagatattgatgaagactttaaacgagagcttcgaaatctggttccattgctgcttgcccctgaaaatttggtagaaaaagagataagtggatctaaagtcacttgtagagatcttgtagaatattttaaggcttacatcaaaatctatcaaggagaagaacttccacatccaaagtccatgcttcaggcaacagctgaagctaataatcttgctgcagtagcaggagcaagagatacctattgtaaaagtatggaacaggtatgtggaggggacaagccttacattgcaccttcagatctggagcgaaaacacttggatctcaaggaagtggcgataaaacaatttcgttcagtaaaaaagatgggtggagatgagttctgccgtcgttatcaggaccagcttgaagctgaaattgaagaaacctatgcaaattttataaagcacaatgatggcaaaaatatcttctatgctgctcgtaccccagccacactgtttgcggtcatgtttgctatgtatataatctcaggactgactggcttcattggcctaaactctatagctgtcttgtgtaaccttgtcatggggttagcactgatatttctttgtacttgggcatatgttaaatactctggggagttcagagaaattggaacagtgattgatcagattgctgaaacactatgggaacaggtattgaagcccctgggtgataatttgatggaggaaaacataaggcagtctgtaacaaactctatcaaagcaggcctgactgaccaggtgtctcatcatgccagattaaagacagactgacagttcatctcctcacggactccactctctttttttttcatgcttgctgtacaatgagaactcaaataaaaataaaccaaagtttacaatcaactgtagaagtagtttagtgtaactggcttcacagatggctgccacagagtgtgaagattgtttgttagttttaagcattcttttaatggctcctaagacatgcagatggactgaggagcattggttaatcatgcacctttgtgccatgtttaactcttttatttctttttacttaatctaatgttagtgaatttgtcttatgtaaaaggatatttcagggaaatattttcagaaatctatttagagtctctttaacacagtgtcccattgaaattttaatttttagagaatt

SEQ ID NO: 1786 - DNA, 1905 bp, Homo sapiens
  source 1..1905: mol_type = unassigned DNA
aaatcggtacaagatggcggagggggacgaggcagcgcgagggcagcaaccgcaccaggggctgtggcgccggcgacggaccagcgacccaagcgccgcggttaaccacgtctcgtccacgacctccctaggattctcaaagttggattggtggaaacaatgaaccattgacaggctttacatggcgaggtggctgtgaaagagaaacaacaggcatacaagtttggaatgaagtatttgtgattgacagacctaatggaactaaagttgctgtgctgcttatggatacccagggtgcctttgatagccagtcaactatcaaagactgtgcaacggtgtttgctctgagcactatgactagctctgtccaggtatataatctgtctcagaatattcaagaagatgatcttcaacatttgcaattatttacagagtatggaagacttgcgatggaagaaatctaccagaaaccatttcagacattaatgtttttgattcgagattggagctatccttatgaacattcatatggtttggaaggtggaaagcaatttcttgaaaagagattacaggtaaaacaaaatcaacatgaagagcttcagaatgtaaggaagcacatacacaattgtttctcaaatcttggttgcttccttttgccacatcctggtcttaaagttgcaactaatcctagttttgatgggagattgaaagatattgatgaagactttaaacgagagcttcgaaatctggttccattgctgcttgcccctgaaaatttggtagaaaaagagataagtggatctaaagtcacttgtagagatcttgtagaatattttaaggcttacatcaaaatctatcaaggagaagaacttccacatccaaagtccatgcttcaggcaacagctgaagctaataatcttgctgcagtagcaggagcaagagatacctattgtaaaagtatggaacaggtatgtggaggggacaagccttacattgcaccttcagatctggagcgaaaacacttggatctcaaggaagtggcgataaaacaatttcgttcagtaaaaaagatgggtggagatgagttctgccgtcgttatcaggaccagcttgaagctgaaattgaagaaacctatgcaaattttataaagcacaatgatggcaaaaatatcttctatgctgctcgtaccccagccacactgtttgcggtcatgtttgctatgtatataatctcaggactgactggcttcattggcctaaactctatagctgtcttgtgtaaccttgtcatggggttagcactgatatttctttgtacttgggcatatgttaaatactctggggagttcagagaaattggaacagtgattgatcagattgctgaaacactatgggaacaggtattgaagcccctgggtgataatttgatggaggaaaacataaggcagtctgtaacaaactctatcaaagcaggcctgactgaccaggtgtctcatcatgccagattaaagacagactgacagttcatctcctcacggactccactctctttttttttcatgcttgctgtacaatgagaactcaaataaaaataaaccaaagtttacaatcaactgtagaagtagtttagtgtaactggcttcacagatggctgccacagagtgtgaagattgtttgttagttttaagcattcttttaatggctcctaagacatgcagatggactgaggagcattggttaatcatgcacctttgtgccatgtttaactcttttatttctttttacttaatctaatgttagtgaatttgtcttatgtaaaaggatatttcagggaaatattttcagaaatctatttagagtctctttaacacagtgtcccattgaaattttaatttttagagaatt

SEQ ID NO: 1787 - DNA, 2335 bp, Homo sapiens
  source 1..2335: mol_type = unassigned DNA
aaatcggtacaagatggcggagggggacgaggcagcgcgagggcagcaaccgcaccaggggctgtggcgccggcgacggaccagcgacccaagcgccgcggttaaccacgtctcgtccacgacctccctaggtgagaattatgaagatgatgacctagtaaattctgatgaggttatgaagaaaccatgtccagtacagattgttcttgctcatgaagatgaccataactttgaacttgatgaagaagctttggagcagatattgctacaggagcacatacgagatcttaacatagtagtggtatctgtggcaggagcttttcgtaaagggaagtcatttctactggacttcatgcttagatacatgtataacaaggattctcaaagttggattggtggaaacaatgaaccattgacaggctttacatggcgaggtggctgtgaaagagaaacaacaggcatacaagtttggaatgaagtatttgtgattgacagacctaatggaactaaagttgctgtgctgcttatggatacccagggtgcctttgatagccagtcaactatcaaagactgtgcaacggtgtttgctctgagcactatgactagctctgtccaggtatataatctgtctcagaatattcaagaagatgatcttcaacatttgcaattatttacagagtatggaagacttgcgatggaagaaatctaccagaaaccatttcagacattaatgtttttgattcgagattggagctatccttatgaacattcatatggtttggaaggtggaaagcaatttcttgaaaagagattacaggtaaaacaaaatcaacatgaagagcttcagaatgtaaggaagcacatacacaattgtttctcaaatcttggttgcttccttttgccacatcctggtcttaaagttgcaactaatcctagttttgatgggagattgaaagatattgatgaagactttaaacgagagcttcgaaatctggttccattgctgcttgcccctgaaaatttggtagaaaaagagataagtggatctaaagtcacttgtagagatcttgtagaatattttaaggcttacatcaaaatctatcaaggagaagaacttccacatccaaagtccatgcttcaggcaacagctgaagctaataatcttgctgcagtagcaggagcaagagatacctattgtaaaagtatggaacaggtatgtggaggggacaagccttacattgcaccttcagatctggagcgaaaacacttggatctcaaggaagtggcgataaaacaatttcgttcagtaaaaaagatgggtggagatgagttctgccgtcgttatcaggaccagcttgaagctgaaattgaagaaacctatgcaaattttataaagcacaatgatggcaaaaatatcttctatgctgctcgtaccccagccacactgtttgcggtcatgtttgctatgtatataatctcaggactgactggcttcattggcctaaactctatagctgtcttgtgtaaccttgtcatggggttagcactgatatttctttgtacttgggcatatgttaaatactctggggagttcagagaaattggaacagtgattgatcagattgctgaaacactatgggaacaggtgttttccaaactgtttgaagttactagacgtcgaatggttcaccgtgctctttcatcagcacagcgacagagactgtcatccaacaataacaagaagaaaaattagacagtatttttaacctttttctctatctgaagtgttcacacttacacatgtaggacaataagcaggaccgtctgggccggtctgcataaatgctgtatacataccagatttgatgctgcatatagggtatggaattgcacatccatctcataggaattgtaaatggtttgaataagaggaaagtaatttttgttgcattataaaatgtctagtagcatcataagtttttttgagagaagcatctttttatttcccatattcctggttattttcatcattgctttgaattgaatttttatatctatttttatatgtaactctttttttacctcatgtttttgtttgttttgcacatttctcataccacaggtattgaagcccctgggtgataatttgatggaggaaaacataaggcagtctgtaacaaactctatcaaagcaggcctgactgaccaggtgtctcatcatgccagattaaagacagactgacagttcatctcctcacggactccactctctttttttttcatgcttgctgtacaatgagaactcaaataaaaataaaccaaagtttacaatcaa

SEQ ID NO: 1788 - DNA, 2199 bp, Homo sapiens
  source 1..2199: mol_type = unassigned DNA
cttcctggagggaaccgcagtccgcaggccagggctctgtccccgggctcgcgtttcggggctcctcggctcccgaacccattcgcgcgggttgtgcgtggctagggtgcaagtctagattttcgtgtcaaactggggttatgagccgtttacgagtcacttggacgatagtaaggcctgatcactctgaaagtgtctgtagtgtgaagtcacctgatccttggctccctggttttgctgaatgtgagctcctactgtacgtgtaccaggagcgcccctgccccctcgaagacgcagttgcgttggcagcgcagtgtatccctctcactcataacacccctatttataggagtttagcgtttgatctctcactgtggtgcgaattgatcgcatgaaatcctgattgaaaattttgatggtacttaagaaaggcataaagttttttcaaaggcttataaatagtaaaagcctacgatttggtgagaattatgaagatgatgacctagtaaattctgatgaggttatgaagaaaccatgtccagtacagattgttcttgctcatgaagatgaccataactttgaacttgatgaagaagctttggagcagatattgctacaggagcacatacgagatcttaacatagtagtggtatctgtggcaggagcttttcgtaaagggaagtcatttctactggacttcatgcttagatacatgtataacaaggattctcaaagttggattggtggaaacaatgaaccattgacaggctttacatggcgaggtggctgtgaaagagaaacaacaggcatacaagtttggaatgaagtatttgtgattgacagacctaatggaactaaagttgctgtgctgcttatggatacccagggtgcctttgatagccagtcaactatcaaagactgtgcaacggtgtttgctctgagcactatgactagctctgtccaggtatataatctgtctcagaatattcaagaagatgatcttcaacatttgcaattatttacagagtatggaagacttgcgatggaagaaatctaccagaaaccatttcagacattaatgtttttgattcgagattggagctatccttatgaacattcatatggtttggaaggtggaaagcaatttcttgaaaagagattacaggtaaaacaaaatcaacatgaagagcttcagaatgtaaggaagcacatacacaattgtttctcaaatcttggttgcttccttttgccacatcctggtcttaaagttgcaactaatcctagttttgatgggagattgaaagatattgatgaagactttaaacgagagcttcgaaatctggttccattgctgcttgcccctgaaaatttggtagaaaaagagataagtggatctaaagtcacttgtagagatcttgtagaatattttaaggcttacatcaaaatctatcaaggagaagaacttccacatccaaagtccatgcttcaggcaacagctgaagctaataatcttgctgcagtagcaggagcaagagatacctattgtaaaagtatggaacaggtatgtggaggggacaagccttacattgcaccttcagatctggagcgaaaacacttggatctcaaggaagtggcgataaaacaatttcgttcagtaaaaaagatgggtggagatgagttctgccgtcgttatcaggaccagcttgaagctgaaattgaagaaacctatgcaaattttataaagcacaatgatggcaaaaatatcttctatgctgctcgtaccccagccacactgtttgcggtcatgtttgctatgtatataatctcaggactgactggcttcattggcctaaactctatagctgtcttgtgtaaccttgtcatggggttagcactgatatttctttgtacttgggcatatgttaaatactctggggagttcagagaaattggaacagtgattgatcagattgctgaaacactatgggaacaggtattgaagcccctgggtgataatttgatggaggaaaacataaggcagtctgtaacaaactctatcaaagcaggcctgactgaccaggtgtctcatcatgccagattaaagacagactgacagttcatctcctcacggactccactctctttttttttcatgcttgctgtacaatgagaactcaaataaaaataaaccaaagttta

SEQ ID NO: 1789 - DNA, 764 bp, Homo sapiens
  source 1..764: mol_type = unassigned DNA
aaatctatcaaggagaagaacttccacatccaaagtccatgcttcaggcaacagctgaagctaataatcttgctgcagtagcaggagcaagagatacctattgtaaaagtatggaacaggtatgtggaggggacaagccttacattgcaccttcagatctggagcgaaaacacttggatctcaaggaagtggcgataaaacaatttcgttcagtaaaaaagatgggtggagatgagttctgccgtcgttatcaggaccagcttgaagctgaaattgaagaaacctatgcaaattttataaagcacaatgatggcaaaaatatcttctatgctgctcgtaccccagccacactgtttgcggtcatgtttgctatgtatataatctcaggactgactggcttcattggcctaaactctatagctgtcttgtgtaaccttgtcatggggttagcactgatatttctttgtacttgggcatatgttaaatactctggggagttcagagaaattggaacagtgattgatcagattgctgaaacactatgggaacaggttggtatctatcttttggttttttagtgactaatcttattttcctgtgactttccatcctttgcagtatttgtactccgactttgccttcatgtgaggaatgtcaaaaggatgtcttctgttttgttcagatgtagaatctttatgaattgaagattttttctttaaagttataattttaatgtactttggttagcctaaatctgtactatc

SEQ ID NO: 1790 - DNA, 592 bp, Homo sapiens
  source 1..592: mol_type = unassigned DNA
ttttaatggtgttaattatttttatatttaatgacttttctttctttggggatgtggagccaaattgcataatccgtcagtctaacaaatcttctccctttttaggcttacatcaaaatctatcaaggagaagaacttccacatccaaagtccatgcttcaggcaacagctgaagctaataatcttgctgcagtagcaggagcaagagatacctattgtaaaagtatggaacaggtatgtggaggggacaagccttacattgcaccttcagatctggagcgaaaacacttggatctcaaggaagtggcgataaaacaatttcgttcagtaaaaaagatgggtggagatgagttctgccgtcgttatcaggaccagcttgaagctgaaattgaagaaacctatgcaaattttataaagcacaatgatggcaaaaatatcttctatgctgctcgtaccccagccacactgtttgcggtcatgtttgctatgtatataatctcaggactgactggcttcattggcctaaactctatagctgtcttgtgtaaccttgtcatggggttagcactgatatttctttgtacttgggcat

SEQ ID NO: 1791 - DNA, 526 bp, Homo sapiens
  source 1..526: mol_type = unassigned DNA
gatggcggagggggacgaggcagcgcgagggcagcaaccgcaccaggggctgtggcgccggcgacggaccagcgacccaagcgccgcggttaaccacgtctcgtccacgacctccctagagtatggaagacttgcgatggaagaaatctaccagaaaccatttcagacattaatgtttttgattcgagattggagctatccttatgaacattcatatggtttggaaggtggaaagcaatttcttgaaaagagattacaggtaaaacaaaatcaacatgaagagcttcagaatgtaaggaagcacatacacaattgtttctcaaatcttggttgcttccttttgccacatcctggtcttaaagttgcaactaatcctagttttgatgggagattgaaagatattgatgaagactttaaacgagagcttcgaaatctggttccattgctgcttgcccctgaaaatttggtagaaaaagagataagtggatctaaagtcacttgtagagatcttgtagaatattttaag

SEQ ID NO: 1792 - DNA, 775 bp, Homo sapiens
  source 1..775: mol_type = unassigned DNA
cggagggggacgaggcagcgcgagggcagcaaccgcaccaggggctgtggcgccggcgacggaccagcgacccaagcgccgcggttaaccacgtctcgtccacgacctccctaggtgagaattatgaagatgatgacctagtaaattctgatgaggttatgaagaaaccatgtccagtacagattgttcttgctcatgaagatgaccataactttgaacttgatgaagaagctttggagcagatattgctacaggagcacatacgagatcttaacatagtagtggtatctgtggcaggagcttttcgtaaagggaagtcatttctactggacttcatgcttagatacatgtataacaaggtatataatctgtctcagaatattcaagaagatgatcttcaacatttgcaattatttacagagtatggaagacttgcgatggaagaaatctaccagaaaccatttcagacattaatgtttttgattcgagattggagctatccttatgaacattcatatggtttggaaggtggaaagcaatttcttgaaaagagattacaggtaaaacaaaatcaacatgaagagcttcagaatgtaaggaagcacatacacaattgtttctcaaatcttggttgcttccttttgccacatcctggtcttaaagttgcaactaatcctagttttgatgggagattgaaagatattgatgaagactttaaacgagagcttcgaaatctggttccattgctgcttgcccctgaaaatttggtagaaaa

SEQ ID NO: 1793 - DNA, 578 bp, Homo sapiens
  source 1..578: mol_type = unassigned DNA
agatggcggagggggacgaggcagcgcgagggcagcaaccgcaccaggggctgtggcgccggcgacggaccagcgacccaagcgccgcggttaaccacgtctcgtccacgacctccctagagtcttgctctgtcgccaggttggagtgcagtggcacgatcttcgcttactgcaacctcccgggttcaagtgattcctctgcctcagcctcccaagtagctgggattacaggattctcaaagttggattggtggaaacaatgaaccattgacaggctttacatggcgaggtggctgtgaaagagaaacaacaggcatacaagtttggaatgaagtatttgtgattgacagacctaatggaactaaagttgctgtgctgcttatggatacccagggtgcctttgatagccagtcaactatcaaagactgtgcaacggtgtttgctctgagcactatgactagctctgtccaggtatataatctgtctcagaatattcaagaagatgatcttcaacatttgcaattatttacagagtatggaagacttgcgatggaagaaatctaccagaaaccatttca

SEQ ID NO: 1794 - DNA, 597 bp, Homo sapiens
  source 1..597: mol_type = unassigned DNA
ctttgaacttgatgaagaagctttggagcagatattgctacaggagcacatacgagatcttaacatagtagtggtatctgtggcaggagcttttcgtaaagggaagtcatttctactggacttcatgcttagatacatgtataacaaggattctcaaagttggattggtggaaacaatgaaccattgacaggctttacatggcgaggtggctgtgaaagagaaacaacaggcatacaagtttggaatgaagtatttgtgattgacagacctaatggaactaaagttgctgtgctgcttatggatacccagggtgcctttgatagccagtcaactatcaaagactgtgcaacggtgtttgctctgagcactatgactagctctgtccaggtgagacacaagattaagtggtgcgatcagttcacgtaatcatttggccccttttttttttcttttttgagacagagtttcactcttgttgcccaggctggagtacagtggcgtgatctcggctcactgcaacctctgcctcctgggttcattctcctaacccgagtagctgagattacaggcccccgccaccatgcccagctaatttt

SEQ ID NO: 1795 - DNA, 561 bp, Homo sapiens
  source 1..561: mol_type = unassigned DNA
aaatcggtacaagatggcggagggggacgaggcagcgcgagggcagcaaccgcaccaggggctgtggcgccggcgacggaccagcgacccaagcgccgcggttaaccacgtctcgtccacgacctccctaggtgagaattatgaagatgatgacctagtaaattctgatgaggttatgaagaaaccatgtccagtacagattgttcttgctcatgaagatgaccataactttgaacttgatgaagaagctttggagcagatattgctacaggagcacatacgagatcttaacatagtagtggtatctgtggcaggagcttttcgtaaagggaagtcatttctactggacttcatgcttagatacatgtataacaaggattctcaaagttggattggtggaaacaatgaaccattgacaggctttacatggcgaggtggctgtgaaagagaaacaacaggcatacaagtttggaatgaagtatttgtgattgacagacctaatggaactaaagtaaaattctgtttatacttttctaccctgtattctttcttgggctattt

SEQ ID NO: 1796 - DNA, 576 bp, Homo sapiens
  source 1..576: mol_type = unassigned DNA
aattttaaatcggtacaagatggcggagggggacgaggcagcgcgagggcagcaaccgcaccaggggctgtggcgccggcgacggaccagcgacccaagcgccgcggttaaccacgtctcgtccacgacctccctagagtcttgctctgtcgccaggttggagtgcagtggcacgatcttcgcttactgcaacctcccgggttcaagtgattcctctgcctcagcctcccaagtagctgggattacaggtgagaattatgaagatgatgacctagtaaattctgatgaggttatgaagaaaccatgtccagtacagattgttcttgctcatgaagatgaccataactttgaacttgatgaagaagctttggagcagatattgctacaggagcacatacgagatcttaacatagtagtggtatctgtggcaggagcttttcgtaaagggaagtcatttctactggacttcatgcttagatacatgtataacaaggattctcaaagttggattggtggaaacaatgaaccattgacaggctttacatggcgaggtggctgtgaaagagaaacaacagg

SEQ ID NO: 1797 - DNA, 553 bp, Homo sapiens
  source 1..553: mol_type = unassigned DNA
atttcaagtggaaaatagtatgtgaatcctataggaaaaacaactctttgtttcctgatttaatagtaatgaaggaaggagatgaatgacggagtctcgctctgtcgcccaggctggggtgcagtggcacggtctcggctcactgcaagctccgcctcttgggtccacgccattctccggcctcagcctcctgagtatctgggactacaggcgcctgccaccgtgtccggcttactttttttgtatttttaatagagacggggtttccctgtggtctcgatctcctgacctcgtgatccgcccgccttggcctcccaaagtgctgggattacaggtgagaattatgaagatgatgacctagtaaattctgatgaggttatgaagaaaccatgtccagtacagattgttcttgctcatgaagatgaccataactttgaacttgatgaagaagctttggagcagatattgctacaggagcacatacgagatcttaacatagtagtggtatctgtggcaggagcttttcgtaaagggaagtcatttctactggact

SEQ ID NO: 1798 - DNA, 593 bp, Homo sapiens
  source 1..593: mol_type = unassigned DNA
aaatcggtacaagatggcggagggggacgaggcagcgcgagggcagcaaccgcaccaggggctgtggcgccggcgacggaccagcgacccaagcgccgcggttaaccacgtctcgtccacgacctccctagacggagtctcgctctgtcgcccaggctggggtgcagtggcacggtctcggctcactgcaagctccgcctcttgggtccacgccattctccggcctcagcctcctgagtatctgggactacaggcgcctgccaccgtgtccggcttactttttttgtatttttaatagagacggggtttccctgtggtctcgatctcctgacctcgtgatccgcccgccttggcctcccaaagtgctgggattacaggtgagaattatgaagatgatgacctagtaaattctgatgaggttatgaagaaaccatgtccagtacagattgttcttgctcatgaagatgaccataactttgaacttgatgaagaagctttggagcagatattgctacaggagcacatacgagatcttaacatagtagtggtatctgtggcaggagcttttcgtaaagggaagtcatttctactgg

SEQ ID NO: 1799 - DNA, 1242 bp, Homo sapiens
  source 1..1242: mol_type = unassigned DNA
atggatacccagggtgcctttgatagccagtcaactatcaaagactgtgcaacggtgtttgctctgagcactatgactagctctgtccaggtatataatctgtctcagaatattcaagaagatgatcttcaacatttgcaattatttacagagtatggaagacttgcgatggaagaaatctaccagaaaccatttcagacattaatgtttttgattcgagattggagctatccttatgaacattcatatggtttggaaggtggaaagcaatttcttgaaaagagattacaggtaaaacaaaatcaacatgaagagcttcagaatgtaaggaagcacatacacaattgtttctcaaatcttggttgcttccttttgccacatcctggtcttaaagttgcaactaatcctagttttgatgggagattgaaagatattgatgaagactttaaacgagagcttcgaaatctggttccattgctgcttgcccctgaaaatttggtagaaaaagagataagtggatctaaagtcacttgtagagatcttgtagaatattttaaggcttacatcaaaatctatcaaggagaagaacttccacatccaaagtccatgcttcaggcaacagctgaagctaataatcttgctgcagtagcaggagcaagagatacctattgtaaaagtatggaacaggtatgtggaggggacaagccttacattgcaccttcagatctggagcgaaaacacttggatctcaaggaagtggcgataaaacaatttcgttcagtaaaaaagatgggtggagatgagttctgccgtcgttatcaggaccagcttgaagctgaaattgaagaaacctatgcaaattttataaagcacaatgatggcaaaaatatcttctatgctgctcgtaccccagccacactgtttgcggtcatgtttgctatgtatataatctcaggactgactggcttcattggcctaaactctatagctgtcttgtgtaaccttgtcatggggttagcactgatatttctttgtacttgggcatatgttaaatactctggggagttcagagaaattggaacagtgattgatcagattgctgaaacactatgggaacagaggagtcccaggaaggtgttttccaaactgtttgaagttactagacgtcgaatggttcaccgtgctctttcatcagcacagcgacagagactgtcatccaacaataacaagaagaaaaattag

SEQ ID NO: 1800 - DNA, 7135 bp, Homo sapiens
  source 1..7135: mol_type = unassigned DNA
acacgcggcaggcggtggcgggattctgccgcgtgcgctttcccgccccgcctcgcctagcctcgtcctgcgctcgccacgcctcgggctgtccgttgggccacgcagaccgcgctgcgctcgctccgtcgcggctccgcgtgccccaccttctggctagttttttctagagcccaggctccgcccgtttcccgcttccagggcccggttcgttcccgcccgcacccgtccctctcctctgcacccctgctgcttctgctttgaaggcggaggctccatgttgtcccctcagcgagtggcagcagctgcctcaagaggagcagatgatgccatggagagcagcaagcctggtccagtgcaggttgttttggttcagaaagatcaacattcctttgagctagatgagaaagccttggccagcatcctcttgcaggaccacatccgagatcttgatgtggtggtggtttcagtggctggtgccttccgaaagggcaagtccttcattctggattttatgctacgatacttatattctcagaaggaaagtggccattcaaattggttgggtgacccagaagaaccgttaacaggattttcctggagagggggatctgatccagaaaccactgggattcaaatctggagtgaagttttcactgtggagaagccaggtgggaagaaggttgcagttgttctgatggatacccagggggcatttgacagccagtcaactgtgaaagactgtgctaccatctttgctctaagcactatgactagttctgttcagatttataatttatctcagaacattcaagaagatgatcttcaacagctgcagctcttcacagaatacggtcgtctggcaatggatgaaattttccaaaagcctttccagacactgatgtttttggttagagattggagtttcccttatgaatatagctatggactccaaggaggaatggcatttttggataagcgtttacaggtgaaggaacatcaacatgaagaaattcagaatgttcgaaatcacattcactcatgtttctccgatgtcacctgctttctcttaccacatccaggactccaggtggccacaagccctgactttgatgggaaattaaaagatattgctggtgaattcaaagagcagttacaggcactgataccgtatgtattaaacccatctaagttaatggaaaaggagatcaatggctcaaaggtcacctgtcggggactactggagtattttaaggcatatattaaaatttatcaaggagaagatctgcctcaccccaagtccatgcttcaggccactgctgaagccaacaacttagcagctgcagcctctgccaaggacatttattataacaacatggaagaggtttgtgggggagagaaaccttatttgtctccagacattctagaggagaagcactgtgaattcaaacaacttgctctggaccattttaagaagaccaagaagatgggtgggaaggatttcagctttcgttaccagcaggagctggaggaggaaatcaaggaattatatgagaacttctgcaagcacaatggtagcaagaacgtcttcagcaccttccgaacccctgcagtgctgttcacgggcattgtagctttgtacatagcctcaggcctcactggcttcataggtcttgaggttgtagcccagttgttcaactgtatggttggactactgttaatagcactcctcacctggggctacatcaggtattctggtcaatatcgtgagctgggcggagctattgattttggtgccgcatatgtgttggagcaggcttcttctcatatcggtaattccactcaggccactgtgagggatgcagttgttggaagaccatccatggataaaaaagctcaatagcatcttaacgtgaagatcaaacaagaacacaacaagcccctactgatttctgggtttctgccacggccacaggttcatatccagaggaatggcagatctgagacgatccaggaagagctaaaacatggccctgtaataaatgagcagacctctcctgtggtttcaaattattaaacacacttccatttctcttggaagcatttcttttccttgctgttatagatgcaagcctgtgtctattttcatattactctgctttgtgcactttatggaggaggaagctagaggaaaaatggaaatgcagcttttaagttctttatgtgccacttagtgccttttaagattgattccatggttttgcacacacgatggggaggggatggaggataacctcatgaaaggtgccgttttcgggtgaaacttgacatttcttttatactttactcttttgagaaggattctttttttttttttttttttttttgagttggagtctcgctctgtcaccaggcttgagtgcagtggtgtgatcttggctcactgcaacctctgcctgccgggttcaagcagttctcctgcctcagcctcccaagtagctgggactacaggtgtacgccaccatacccagctaatttttttgtatttttagtagagatggggtttcaccatgttggccaggatggtcttggtctcttgaccttgtgatccgcctgcccgccttggcctcccaaagtgctgggattacaggcgtgagccaccgtgcccggccaagaaggattccttttttaaaagtttacagaacttggagaaacttcagaactaaagactaactgaaaatgatgtcattacactcaaaaaaaatttacaatagggaatcctgttgccacatagtgtggaaaaatcatgtcatatttaaatataccatactctgaaatgtgaggtttttacccagtaggctgacagttttgttgcaacttgctctattttttttttttttttggtccctatagcttctttctagaaaaagaggcaaacgtgccttgaaaagccagagtggctcataataaaaggaatgcgctagatacttcaagaaaaaagctaagtttaaatgaaccatgtgacctctgataagtcacttgaacttgtgccttggtcaggttcactgtaggtttacatatgtatgtatgttttacacaactcttgtaattgtcatttgaggggttttgtttttgagagttctgcataagaacagaactttattaaggattagagggaagatacaaatattactgcgtttaattgatgtctaatttcatgtggcttagcagcaattaataacctgatttaaggtctttattcagaatgttaatttgcattctctgccgtgtctaatgttcttaataatgaagctaaaattaacccattttatttagtgaattatctatttaattttactttggctagtctggtagctttaagatagctttgccttagcaaggatcaaagtcctacccaaatataaaaaatatctagaagtatctaagagttctttttttctatttaccttgattaggagataaaagttttatctgttagttgcttttccttttggaattattgtggattttaaaacttaaaacttgcctgcaagtatttatataaacattcaggtatataagccttaatttctaagataatttaacttttgttatgggagggaggtaagagtgtaaattttatatacatgaaggtaagatctgagtgtaaactttacatacatgaagtatgaatggaaggtagaaaaaaagtcccttttcgcatgtaatctctttatcaaagaattttcttttgacactttaccactgaagtatttttgtaagtcctaaattcgcagcatattgtttcatatttatatgccatcttgcaaatagttcttgctattttattcactgctgttacactttagaaaaattccagcttgtttacttgcatttatcagtgatgccaaccaagctttgactgttaacttgaaagcttgcttctgaaatgttggtgcattttcaggtgacctcttatctctctgaaagttcatacctattagcaggctctgtaaatattgacatacttagcttttaatacattctataagtaaatttatagatttcagaataacttaaaaaatttaatggtaagaaggggtgatgtgtcgaaaactcatactaaagtattaggtcactttaaaaaaagtgataatgtatgatttaatgaaatcttaagattcagttactatttaaattcaccatttctgttttggtcttataaagagaccttggtttaattatccagaggaagtcctcttcaccattttttttttttcttagttctgcttctggaaagtgttttataaagttttctcagtgagggttcttaagagttttctttggcctcttttctctcaacagtaaattgatgattttatatcagctttttcaataaaagatgcattatcattactggctataaatcatcctggggagatttataaccaggttaaaaataatatcttttacttctctcaccttttacttgtggttcagatgctcagactgtgcctgtttgcgtcgtgtctgttgctctgccgctttccatgcaggcatttttaattttacacaatcctaacaatatatggaactcattcctatgaatatataaaaggaggcttccaaaattttctattaaaatatttcaggataaattaagtgttgataatttgaaaaaataatttcaatgagctgcttatagtaaaaatggtagaatcagagttttcattctttgagaaatctttctgtaagattggctcatagataaaatgagacaaactactatgtatgataaaacaccttcagagtcatgccttgttttattttattttattttttgagacagaggtctcgctctgtcgcccaggttggagtgcagtggtgcaatctcgctcactgcaacctccacctcccaggttcaagcgattctcctgtctcagcttcctgagtagctgggactacaggtgtacaccaccacgcctggctaatttttgtttttttactagaggtggggttttgccatgttggccaggctggtctcaaactcctgacctcaggtgatccactccccccagcctcccaaagtgctgggattacaggcatgagccaccccgcccagctgagtcatgccttattttcgtagtataccaagaaatgttctatggaagtttacgttttaacacctcttttatacttggtaaaattgcctgtgtttcgctttattcctttttttttttgagacggactcttgtactgtcacccaggctgaagtgcagtggcgcaatcttggctcactacaacctccgcctcctgggttcaagtgattcttttgcctcagcctcccaagtagcagggattacaggcatgtgccaccacacccggcttatttttgtatttttagtagagacagggcttcgccatgttgaccaggctggtctcaactcctctgggaatccgcctgtcttggccttccagggtgctgggattacaggcgtgagccactggaacctggccttgttttgctttattttttctcttacatgaagtaaagcgctttggtcaaacacacaaaaatactgccttgtactggtggttggtttcattagtggatcacacacagtgttctacttggcttgtaaaatggtgccttggatagggtgagtttggataagtatgtatgtatgtatgagttatagcaaaattaagtagattgaatcaagtccatgcaaaagcaataaaacagttttaattttttaattttttaaaaattaaaactttaataaaacagtttttaattttttgctaggttcttttaaaaaatgatgtaacttacatggaagtcttcacaggacttttttctttcctggaactattgaaatgtaatttaggatgatttgatcttccatctcaagttgtcaacatggctgtgtcattctggcttacatatgttttatttaacaaaattctagtcaagggataagggcataatgaagacaagcttcagttatgaaagtacaaactatttgtgtgattaatttttaaaaatgacattaagaagcccattgtaaaataatatttgcagtcaaatggtttttcttgctgtaagtcctgttgtagctatgtttagggtagtggttctcatctaccttggagtgcataagacttacctagcaggcttgtttaaaaagttcagattcctagctttgtacccagggattgcctcaggtggtatgggctgtggtcctggagtcatcacttttataaatagtggttcagagaccacagagagagactgcttcatcgaatgggaagtaccaaggagaaagtacaattcagtattgtctggaggcaagtggacactttgtacctgaggtttagaataggtggtctcttgccagtacaatccccaggcgttttctgtgttcagaagtagtaagaatgcctttaattcagaggattatctaagctctttaaagctgtttttctccattgtcatagtgccttctctgaaaaatgaatgtacaggtatcctattttctaatgtaattaggattttttaaaagcaatttttgatagtttttcttttaaaaagtaaaattcagcactgtgacttgaacccccaaatctttcacatacaggtgaaacattaagccacaaataaaaataatgaacaagaaagaagacaagatcctaattcctgtcattagtgacctaagtaccccatatcagaaactttgcaaaacagatctagggacagaagggctttgaaagacatttttctttggggcaaatttcgtgtgccagaactacagtttaaatgtttttatgagcaagggaaggtagcattgattcccatagctttctaattagatacatgctgtcatggatgtaagccttaaaggagttaatactaatcttgtacatacacaaattttcctcaggtttttttattttaaaaaatgatttgttaaaagtactgtctgctagacccttgcctttgagtggctttgaaacttaatatagtttttaaaaagtgcaatgggatgagattatgctattagtatattaaaagcatgtttctgttttactccaatttgtaagatcatttaatggaataaagatcacaacacca

SEQ ID NO: 1801 - DNA, 1920 bp, Homo sapiens
  source 1..1920: mol_type = unassigned DNA
aaacaccaaagctgtctctcacactggtggttccaggataaagcctcggcctggggcctggtctgcacgttaggcgccggccgcagctcgcaggaggacccgagccagcccgccccttcccgcacagcctgctgggagttgtagttcagtcgtcggagaaccacgccaagccccgccccagatgagtgcgcagtatgaggaccgctggccgggacccagtgagcgcgggactacaattcccaaaggacggtagcactcagcgccccgccaacagatgatgccatggagagcagcaagcctggtccagtgcaggttgttttggttcagaaagatcaacattcctttgagctagatgagaaagccttggccagcatcctcttgcaggaccacatccgagatcttgatgtggtggtggtttcagtggctggtgccttccgaaagggcaagtccttcattctggattttatgctacgatacttatattctcagaaggaaagtggccattcaaattggttgggtgacccagaagaaccgttaacaggattttcctggagagggggatctgatccagaaaccactgggattcaaatctggagtgaagttttcactgtggagaagccaggtgggaagaaggttgcagttgttctgatggatacccagggggcatttgacagccagtcaactgtgaaagactgtgctaccatctttgctctaagcactatgactagttctgttcagatttataatttatctcagaacattcaagaagatgatcttcaacagctgcagctcttcacagaatacggtcgtctggcaatggatgaaattttccaaaagcctttccagacactgatgtttttggttagagattggagtttcccttatgaatatagctatggactccaaggaggaatggcatttttggataagcgtttacaggtgaaggaacatcaacatgaagaaattcagaatgttcgaaatcacattcactcatgtttctccgatgtcacctgctttctcttaccacatccaggactccaggtggccacaagccctgactttgatgggaaattaaaagatattgctggtgaattcaaagagcagttacaggcactgataccgtatgtattaaacccatctaagttaatggaaaaggagatcaatggctcaaaggtcacctgtcggggactactggagtattttaaggcatatattaaaatttatcaaggagaagatctgcctcaccccaagtccatgcttcaggccactgctgaagccaacaacttagcagctgcagcctctgccaaggacatttattataacaacatggaagaggtttgtgggggagagaaaccttatttgtctccagacattctagaggagaagcactgtgaattcaaacaacttgctctggaccattttaagaagaccaagaagatgggtgggaaggatttcagctttcgttaccagcaggagctggaggaggaaatcaaggaattatatgagaacttctgcaagcacaatggtagcaagaacgtcttcagcaccttccgaacccctgcagtgctgttcacgggcattgtagctttgtacatagcctcaggcctcactggcttcataggtcttgaggttgtagcccagttgttcaactgtatggttggactactgttaatagcactcctcacctggggctacatcaggtattctggtcaatatcgtgagctgggcggagctattgattttggtgccgcatatgtgttggagcaggcttcttctcatatcggtaattccactcaggccactgtgagggatgcagttgttggaagaccatccatggataaaaaagctcaatagcatcttaacgtgaagatcaaacaagaacacaacaagcccctactgatttctgggtttctgccacgg

SEQ ID NO: 1802 - DNA, 714 bp, Homo sapiens
  source 1..714: mol_type = unassigned DNA
ccaggcctagttaaacaccaaagctgtctctcacactggtggttccaggataaagcctcggcctggggcctggtctgcacgttaggcgccggccgcagctcgcaggaggacccgagccagcccgccccttcccgcacagcctgctgggagttgtagttcagtcgtcggagaaccacgccaagccccgccccagatgagtgcgcagtatgaggaccgctggccgggacccagtgagcgcgggactacaattcccaaaggacggtagcactcagcgccccgccaacagggcccggttcgttcccgcccgcacccgtccctctcctctgcacccctgctgcttctgctttgaaggcggaggctccatgttgtcccctcagcgagtggcagcagctgcctcaagaggagcagatgatgccatggagagcagcaagcctggtccagtgcaggttgttttggttcagaaagatcaacattcctttgagctagatgagaaagccttggccagcatcctcttgcaggaccacatccgagatcttgatgtggtggtggtttcagtggctggtgccttccgaaagggcaagtccttcattctggattttatgctacgatacttatattctcagaaggaaagtggccattcaaattggttgggtgacccagaagaaccgttaacaggattttcctggagagggggatctgatccagaaaccactg

SEQ ID NO: 1803 - DNA, 828 bp, Homo sapiens
  source 1..828: mol_type = unassigned DNA
cgccaagccccgccccagatgagtgcgcagtatgaggaccgctggccgggacccagtgagcgcgggactacaattcccaaaggacggtagcactcagcgccccgccaacaggtacccggcggctcgcttcgcgcacacgcggcaggcggtggcgggattctgccgcgtgcgctttcccgccccgcctcgcctagcctcgtcctgcgctcgccacgcctcgggctgtccgttgggccacgcagaccgcgctgcgctcgctccgtcgcggctccgcgtgccccaccttctggctagttttttctagagcccaggctccgcccgtttcccgcttccagggcccggttcgttcccgcccgcacccgtccctctcctctgcacccctgctgcttctgctttgaaggcggaggctccatgttgtcccctcagcgagtggcagcagctgcctcaagaggagcagtgtaatgtgtgtgctgttgaaatgaccgtttcacttgcgaaatcgaagagcaaaaaggaaaagaacagtgaagaatttttaaatgagtctcagttctcaaattcaaatacgaagcaatggaacgttttgtcagtcttagaataacggaccaaaaatatgatgccatggagagcagcaagcctggtccagtgcaggttgttttggttcagaaagatcaacattcctttgagctagatgagaaagccttggccagcatcctcttgcaggaccacatccgagatcttgatgtggtggtggtttcagtggctggtgccttccgaaagggcaagtccttcattctggattttatgctacgatacttatattctcag

SEQ ID NO: 1804 - DNA, 1893 bp, Homo sapiens
  source 1..1893: mol_type = unassigned DNA
acacaacctcaccagccacgggcaccccagtcttcagctacacccaagtctgggatgcaagggggccttagcagctggctgacccaggatgcccaaggtcaccattccctagactctaggcatcatgccacatgctgcacatgctgcgtctttgagtccttgcagccgtgtgaggcacggtatcattactcccgttttacagaggaagctactgaagctcagagagtacctgagcagccctggagaaggagtgtcacttttcctccatctctgccactgactggctggatgcacaggaggactgggtctccagacaggagtgtaaagggcacgagggttgcttgtccttatcagaggtttcctgagcaccagcctttagagacagggaggaaggcaagagtgcgcctttgaggaacgcacaagcccaggagttccaacagggctgcagtggaggctaagttgcagcaggacttttgagcaagcatgcacacaggccagcaagagcaattggaggctatggtgccgtgctactcatatgggcagaagctgtccaaactggccatcctgaggatcgcctgtaactacatcctgtccctggcgcggctggctgaccttgactacagtgccgaccacagcaacctcagcttctccgagtgtgtgcagcgctgcacccgcaccctgcaggccgagggacgtgccaagaagcgcaaggagtgactggctgcaggcaagaccaaggccaccactgtgggccctccttccagtcaggcctgaggacaaggtgagctcgctgagtccagcctcgtggtcttctccaagatgccgccagatgcccagcctacagcctctcagggtcggatcggagcacgcctgcctccctctcccctccgccctcacccagccaatccgaggctgcttcgcactttgccctctgcctggtggggaggggagagctcagcccccgactcactcagaccccaaggcccactgtccagctgcagaaattcgttgccaaagattggacagagacaccgaaggaaatggggtggtgaaaccccacagcgaaaagccacaccgttgctctgtgacttttgctcctcctgttgcctgagccccatctcaagccaaagatgagtcagtggttctgctaggaactcatggaatggatgggcatttgatgacccctgggggtcatcttggccctctgacctggtgctctctctccactgggccttgtgctggctgagtgcaagacaagccttaggggctgtgagagggaggctggggtgcctgggcggggctgggagtgggacctgagatccctgcccactctctccccttcattggctgcccaggccactggccccagttctcagtgtcccttgggtccaggctccttgggccctaagcatcaccagaagggagtaagcagggagagaagcaatattactccctcccctacaccagggacttgccccagggcagctacctatgggtctttgcttccccagccagcctctcctcactgtgacccacccccatgggcccccgtcccaggcagccagcaccatgggcaggccctgccatggacagaaaaagagtttttctcttgttcagcctgcacgtggcctgaggaaggagtagaggctgggttggctggagccgtcctactgggcaagatggcgccccacttggagggcggtggtctgttacagggtgtgcaggggcagagaaggaagggaccaggggactgggccagtatgtggaggatggggcctgcgtgttcaaagccaaggcccgccccttccttgtgctcaaatggccaaagctgttcacgtctgtgctcaaccatctgcttcaaattgaagtaaaagccccaaaatgtcaagaaaa

SEQ ID NO: 1805 - DNA, 2438 bp, Homo sapiens
  source 1..2438: mol_type = unassigned DNA
ctcgcgaactgggcttctgtgtaaactgaggctaaacaaacacagatggagcgcagcgggcgttctccagaaatgctggcaaggaggcagcgacttcagatgacactctgagcgctccgggaacggacagcccggcggcttcccgaagccggcggcgcagctgcccggggcgagggggagaaagggagagagggagggggagggcgggcgaagcgggagagccagagactcctcggcgctgagcgcggcggcggcccgggcagccccacgcccctgcctcgcgcgccgcccgcgccatgaagcacatcccggtcctcgaggacgggccgtggaagaccgtgtgcgtgaaggagctgaacggccttaagaagctcaagcggaaaggcaaggagccggcgcggcgcgcgaacggctataaaactttccgactggacttggaagcgcccgagccccgcgccgtagccaccaacgggctgcgggacaggacccatcggctgcagccggtcccggtaccggtgccggtgccagtcccagtggcgccggccgttcccccaagagggggcacggacacagccggggagcgcgggggctctcgggcgcccgaggtctccgacgcgcggaaacgctgcttcgccctaggcgcagtggggccaggactccccacgccgccgccgccgccgcctcctgcgccccagagccaggcacctgggggcccagaggcacagcctttccgggagccgggtctgcgtcctcgcatcttgctgtgcgcaccgcccgcgcgccccgcgccgtcagcacccccagcaccgccagcgcccccggagtccactgtgcgccctgcgcccccgacgcgccccggggaaagttcctactcgtcaatttcacacgtaatttacaataaccaccaggattcctccgcgtcgcctaggaaacgaccgggcgaagcgactgccgcctcctccgagatcaaagccctgcagcagacccggaggctcctggcgaacgccagggagcggacgcgggtgcacaccatcagcgcagccttcgaggcgctcaggaagcaggtgccgtgctactcatatgggcagaagctgtccaaactggccatcctgaggatcgcctgtaactacatcctgtccctggcgcggctggctgaccttgactacagtgccgaccacagcaacctcagcttctccgagtgtgtgcagcgctgcacccgcaccctgcaggccgagggacgtgccaagaagcgcaaggagtgactggctgcaggcaagaccaaggccaccactgtgggccctccttccagtcaggcctgaggacaaggtgagctcgctgagtccagcctcgtggtcttctccaagatgccgccagatgcccagcctacagcctctcagggtcggatcggagcacgcctgcctccctctcccctccgccctcacccagccaatccgaggctgcttcgcactttgccctctgcctggtggggaggggagagctcagcccccgactcactcagaccccaaggcccactgtccagctgcagaaattcgttgccaaagattggacagagacaccgaaggaaatggggtggtgaaaccccacagcgaaaagccacaccgttgctctgtgacttttgctcctcctgttgcctgagccccatctcaagccaaagatgagtcagtggttctgctaggaactcatggaatggatgggcatttgatgacccctgggggtcatcttggccctctgacctggtgctctctctccactgggccttgtgctggctgagtgcaagacaagccttaggggctgtgagagggaggctggggtgcctgggcggggctgggagtgggacctgagatccctgcccactctctccccttcattggctgcccaggccactggccccagttctcagtgtcccttgggtccaggctccttgggccctaagcatcaccagaagggagtaagcagggagagaagcaatattactccctcccctacaccagggacttgccccagggcagctacctatgggtctttgcttccccagccagcctctcctcactgtgacccacccccatgggcccccgtcccaggcagccagcaccatgggcaggccctgccatggacagaaaaagagtttttctcttgttcagcctgcacgtggcctgaggaaggagtagaggctgggttggctggagccgtcctactgggcaagatggcgccccacttggagggcggtggtctgttacagggtgtgcaggggcagagaaggaagggaccaggggactgggccagtatgtggaggatggggcctgcgtgttcaaagccaaggcccgccccttccttgtgctcaaatggccaaagctgttcacgtctgtgctcaaccatctgcttcaaattgaagtaaaagccccaaaatgtcaagaaaa

SEQ ID NO: 1806 - DNA, 3099 bp, Homo sapiens
  source 1..3099: mol_type = unassigned DNA
gcatcttgctgtgcgcaccgcccgcgcgccccgcgccgtcagcacccccagcaccgccagcgcccccggagtccactgtgcgccctgcgcccccgacgcgccccggggaaagttcctactcgtcaatttcacacgtaatttacaataaccaccaggattcctccgcgtcgcctaggaaacgaccgggcgaagcgactgccgcctcctccgagatcaaagccctgcagcagacccggaggctcctggcgaacgccagggagcggacgcgggtgcacaccatcagcgcagccttcgaggcgctcaggaagcaggtgccgtgctactcatatgggcagaagctgtccaaactggccatcctgaggatcgcctgtaactacatcctgtccctggcgcggctggctgaccttgactacagtgccgaccacagcaacctcagcttctccgagtgtgtgcagcgctgcacccgcaccctgcaggccgagggacgtgccaagaagcgcaagagcctcatcatcactcaggatacaacagcgcgagcagctggtttggaggcagcagggaaaaccgtgcaaaaggttctttgtgagagaggaaactcgcttatgaataacaggactggacgccgtaaaagttggcggctggaattcttgtttctcaggcgccgctgttttctcttgactttttatctctggtttttatttttttcccgttttcttttaatgttgtttcttcctcttctcacatcagttgtgacttttcttcctcctctgcgagcccgaaggccacctcattagtgctcctgacactgcggaacttttctttctcaaggctgttgtcactggggatggttgaaagtgactattttcctaagaaaacagctggaggggacatgggagcaagaaggtgcttgggagcgcatctcagtgttgaggctcaaaacaggcagcgccatggcagagtcattccgccgtcaccctgaataaaccccatgcacacagacgagaacaatgtctcctcagagggagggtctgggagaccggacaccatgcagagacccccatcagctcatcagagagcttcacggagatgttctgggaggacaatcacattcataaatacgccggtgcctcggctctgccgctgactgcagcatgacatgaagccttttttaagaactggctgctgccgccaaagccttctgggatatgtctgcctggaacctgggcacctcctgggagcagtcactgggtggcctgtcaggggctgtggggtcctggggcagggccggcaactggaagccagccctggggaggaaaggagagaagggcaaggctgggctgctttcctcacagcccctggacactgagggaggagctgagttgggcctggggctgccatgtgtcagacagtggtgatgtgatggggggacacaggtcagtggcagggtactgggagtttcccctttcctttctcagttctttgcacccattttccatgggctgcctccccagatccagaagccccagcagcccctcaccccagcagtggaaaaagcccgtcattgacacggctgtgggtggccggctttgcaaaagcctcacatttggggctttggagggctttttgcatttcatctttacacaggctcctgcacctcattcctcttgccctcctctcagctttcctcccacttccagttagagagatggcagctctggcaggaccaaatattgatgtttatcacagttttagggccatttgtctcaccatctgaagggctcagcgcaggcccacgggatcctctctccttgagtgacctctgggggcaggtatctggtttggatgctggagctggtccctactcttcccttgggggccgtgcggccgggtgctcaagtgttttaacctcaggaccctgattagttatcatgaagctaccccaccagctcctgggtctgttcatggattagtggcataaaggacgtaatattgttttgcaaaatctgctctccctcccatgtctcctgcccaagaagttggtcttcgtggggccaaaggcaaggaggacccgaggaaggaagaggaaccactgtccccagcccctggtatggcatggcgtcagcctagtgaccagaaattgcttttgaactctgaggcttccagaggacaagaggaagaggaggacagggctgccctgcccactgctcagccttgagccctgcacctggcacagtgcgaggcctcagacagggtgtcagcaggccctggctccccacatcccatccttaaacaggccatgccctttctacctgccccagcagaccagaaagcagtttccatgggaaacaacaaaccttccttgtgctcccaggataagtgtttctagagggtgaagtcgggagccattctctcctttaacatcttgccacctctgcccagaattcacagccaccggcgcctgtcttagctgccctggctgtcagccccaccagagcccctcctggctgctctgctgaaagctggtcagactgcctcactccatcccctacttagctcccctaaggcctagggggctccctacaggccaagggatgaggccagactcaatagaacacctgataggccccccaagtgacctggccctggccggtcactccctatgtcccaatttacaccccagcagcacagaactccttgctcaaaggggctatttttggcctctgtgctcatgccatcccttctgcctggaatgcccttctccactgtctgcctggctaactcctgctcattctggaaggctcagctcctcctgaaagccctccctgaccccaaccccagctccttcctcagggtgtcgtagcacagggatgcttttggtctaattcaggagagcatcatgtgatatgcttttaaagtaatgagttaaaatgttagacaatatgaaactctattatgtgatatattagatttcatgtcattacattgtattatattatatttttaggtggtatgctatgtgacataggatgcgatgtgatattacatcccatgacactatgttacacagtgttggattaaatgcctgtgtctctggctaga

SEQ ID NO: 1807 - DNA, 715 bp, Homo sapiens
  source 1..715: mol_type = unassigned DNA
gtcacggagaatctgtgccgctcagactccggtggaagctgcttgatgtagtccttgaagctctgtgagctgcccaggcattgctactccgactttccagatgaggaaacggaggctctgaggagtgaaggcacttcccaaagtcacaccgcttgtgccgtgctactcatatgggcagaagctgtccaaactggccatcctgaggatcgcctgtaactacatcctgtccctggcgcggctggctgaccttgactacagtgccgaccacagcaacctcagcttctccgagtgtgtgcagcgctgcacccgcaccctgcaggccgagggacgtgccaagaagcgcaaggaaagttcttctgcacggccttgactgactccgaggtttgcaaacatccactggcttcagtgaaggaggggtttgaccactggccctaccttgctcctgacctggggcctgtggggcagctgtctgcacagcacggctgaggcctgtgccagtcccctcctctctggtccctggggagcttggaggccagaagcccaggctttgcgcctgtgcccagaataacctctgcaaagtctgtcccttggagaagatgtgaaagcagatctgtcaaacgcaaggatgtccaggcttgagtgttaaagaaaacaccagtgcagcttatgatgcagcttgtacagcgtaattccacttttcgtaaaatactgtatg

SEQ ID NO: 1808 - DNA, 1288 bp, Homo sapiens
  source 1..1288: mol_type = unassigned DNA
tgtcccttggagaagatgtgaaagcagatctgtcaaacgcaaggatgtccaggcttgagtgttaaagaaaacaccagtgcagcttatgatgcagcttgtacagcgtaattccacttttcgtaaaatactgtatgagtgactggctgcaggcaagaccaaggccaccactgtgggccctccttccagtcaggcctgaggacaaggtgagctcgctgagtccagcctcgtggtcttctccaagatgccgccagatgcccagcctacagcctctcagggtcggatcggagcacgcctgcctccctctcccctccgccctcacccagccaatccgaggctgcttcgcactttgccctctgcctggtggggaggggagagctcagcccccgactcactcagaccccaaggcccactgtccagctgcagaaattcgttgccaaagattggacagagacaccgaaggaaatggggtggtgaaaccccacagcgaaaagccacaccgttgctctgtgacttttgctcctcctgttgcctgagccccatctcaagccaaagatgagtcagtggttctgctaggaactcatggaatggatgggcatttgatgacccctgggggtcatcttggccctctgacctggtgctctctctccactgggccttgtgctggctgagtgcaagacaagccttaggggctgtgagagggaggctggggtgcctgggcggggctgggagtgggacctgagatccctgcccactctctccccttcattggctgcccaggccactggccccagttctcagtgtcccttgggtccaggctccttgggccctaagcatcaccagaagggagtaagcagggagagaagcaatattactccctcccctacaccagggacttgccccagggcagctacctatgggtctttgcttccccagccagcctctcctcactgtgacccacccccatgggcccccgtcccaggcagccagcaccatgggcaggccctgccatggacagaaaaagagtttttctcttgttcagcctgcacgtggcctgaggaaggagtagaggctgggttggctggagccgtcctactgggcaagatggcgccccacttggagggcggtggtctgttacagggtgtgcaggggcagagaaggaagggaccaggggactgggccagtatgtggaggatggggcctgcgtgttcaaagccaaggcccgccccttccttgtgctcaaatggccaaagctgttcacgtctgtgctcaaccatctgcttcaaattga

SEQ ID NO: 1809 - DNA, 1458 bp, Homo sapiens
  source 1..1458: mol_type = unassigned DNA
ggaataagaggggtaaatggaatagctgcatagcaacttggctctcaagcatcttaaatgttatcccttgacttctggcttccatggtttctgatgagaaattggctgctaatcttactgaagatcccttatagtgaatctgaatggtgcctaccctaagctggtgcctttcagacctgcaggacggctgatctctccacctctgctactctctgtgattttcaacattcttctcagcctggccatgcatattgcaggcttcatcctggttcagaggcagccttggtattccgtggagatacacagtgcctgcacagtacaaaatgaaagcatctcagagttaaccatgtctccaactgctccagaaaaaatggaaagtaatagcaccttcacaagttttgagaacactacagtctggttcttgggaacaatcaactgtatcactgtggctcttgtgttctctaaaggaaaaccatttagacagccaacttatacaaactatatatttgtccttgtgctgataatacagcttggtgtatgtctattcattctatttgctgatataccagaattatatagacgtttggatctgctctgcactcccgtcctgtggagggcctccattgtcatcatgctcagcttgaatttcattgtgtcccttgtggccgaggaggctgttattgaaaatcgagccctgtggatgatgattaaaagatgtttcggctatcagtcaaaaagccagtatcggatatggcagagggacttggcaaatgaccctagttggcccccgctaaaccaaacctcccactctgacatgccggagtgtggcagaggagtgtcttacagcaatccagtatttgagagcaatgaagaacaactctgaaggacatgtgatatccaagttgatattacagagaaacaatgacaaaagggaccagtttcattgattttaagaaatgagactcttgtaacatcagctggagttttggggctacctatcaaatcatggtgacaaactaaagtctgtttgataaaatactgtctacagagaagaacattgacccagaagagtgctttcctcttggcttctgaaggtattagaggcattcagtgaaggcaagaatgggccaagaatttctatgggccaagagacaagcaggctaaaggggaaaaatatgtgatctttcctcttaggacaggacaatactttcctttttataaaaatgagttgaggggaagtagtactgtgtatactcacggagttgtaatttttgaatttttacttcatcgatggaaaaactaatgcgtgggaaacattacaccaatctttactgtctgggttccttttctctgtagtacttttcagatttgaggctttttcttctgtttctggccttacccaacatattgttaaggataagcttagcctatgctgcaataaaaaacaactctcagata

SEQ ID NO: 1810 - DNA, 3056 bp, Homo sapiens
  source 1..3056: mol_type = unassigned DNA
ctgggaccgtgagagccgtggtactgcagactggattcaacactgcaaagggagaccttgtgagatccattctctaccctaagccagtgaattttcagttgtacagggatgccatcaggttcctcctgtgccttgtaggaacagccaccattgggatgatctatactctgtgtgtctatgtgcttagtggggaacctccagaggaggtggtgaggaaagcccttgacgtcatcacaattgcggttcctccggctctacctgctgctctgaccacaggcattatctatgcccagaggaggctgaagaagagaggcatcttctgcattagcccccagaggatcaacgtatgtggacagttaaaccttgtctgctttgacaagacaggcaccttaacaagggacggcttggacctctggggagtcgtgtcctgtgataggaatggctttcaggaagttcacagctttgcctcaggccaggctttgccatggggcccactgtgtgcagcgatggccagctgccactctctgatccttcttgatgggaccatccagggagaccctctggacctcaaaatgtttgaagccaccacctgggaaatggctttttctggggacgatttccacatcaagggagtgccggcacatgccatggtagttaagccctgcagaacagccagccaggtcccagtggaaggaattgcaatcctgcatcagttcccattctcatcggcactgcaaagaatgacagtcattgtccaagagatgggaggtgaccgactggcattcatgaaaggtgcaccagagagggtggccagcttttgccaacctgagacagtacccactagttttgttagcgaacttcagatttacacgacacagggcttccgagtcatagcactggcctacaagaagctggaaaatgaccatcacgctactaccttgacgagggagacggtagaatcagacctgatatttctggggctgctgatcttggagaatcgattgaaggaagagacaaaacctgtcttggaagagctcatctcagcccggataaggactgtaatgatcacaggtgacaatcttcagactgcaataacagtggccagaaaatctggaatggtttctgaaagccagaaagtcattctcattgaggcaaatgaaaccaccgggtcctcatcagcatctatatcttggacgttagtagaagagaagaaacacattatgtatgggaatcaggacaattacattaacatcagggatgaagtctctgataaaggcagagaaggaagttaccattttgccctaactggaaaatcctttcatgttataagtcaacatttcagcagcctactgccaaagatattgatcaatgggaccatctttgcaagaatgtctcctgggcagaagtccagtctggtggaagaatttcagaaactggattactttgtaggtatgtgtggtgatggagccaatgactgtggggctctgaaaatggctcatgtgggcatctcattatcagagcaggaggcatctgtggcctcacctttcacttccaaaactccaaacattgagtgcgtacctcaccttatcaaggaaggacgtgcagctctcgttacctccttttgcatgtttaagtacatggctctgtacagcatgattcagagacaaacagcctttcaaattaccagtttctgttccaggatctggccattacaactcttattggtgtaacaatgaatctgaatggtgcctaccctaagctggtgcctttcagacctgcaggacggctgatctctccacctctgctactctctgtgattttcaacattcttctcagcctggccatgcatattgcaggcttcatcctggttcagaggcagccttggtattccgtggagatacacagtgcctgcacagtacaaaatgaaagcatctcagagttaaccatgtctccaactgctccagaaaaaatggaaagtaatagcaccttcacaagttttgagaacactacagtctggttcttgggaacaatcaactgtatcactgtggctcttgtgttctctaaaggaaaaccatttagacagccaacttatacaaactatatatttgtccttgtgctgataatacagcttggtgtatgtctattcattctatttgctgatataccagaattatatagacgtttggatctgctctgcactcccgtcctgtggagggcctccattgtcatcatgctcagcttgaatttcattgtgtcccttgtggccgaggaggctgttattgaaaatcgagccctgtggatgatgattaaaagatgtttcggctatcagtcaaaaagccagtatcggatatggcagagggacttggcaaatgaccctagttggcccccgctaaaccaaacctcccactctgacatgccggagtgtggcagaggagtgtcttacagcaatccagtatttgagagcaatgaagaacaactctgaaggacatgtgatatccaagttgatattacagagaaacaatgacaaaagggaccagtttcattgattttaagaaatgagactcttgtaacatcagctggagttttggggctacctatcaaatcatggtgacaaactaaagtctgtttgataaaatactgtctacagagaagaacattgacccagaagagtgctttcctcttggcttctgaaggtattagaggcattcagtgaaggcaagaatgggccaagaatttctatgggccaagagacaagcaggctaaaggggaaaaatatgtgatctttcctcttaggacaggacaatactttcctttttataaaaatgagttgaggggaagtagtactgtgtatactcacggagttgtaatttttgaatttttacttcatcgatggaaaaactaatgcgtgggaaacattacaccaatctttactgtctgggttccttttctctgtagtacttttcagatttgaggctttttcttctgtttctggccttacccaacatattgttaaggataagcttagcctatgctgcaataaaaaacaactctcagat

SEQ ID NO: 1811 - DNA, 3658 bp, Homo sapiens
  source 1..3658: mol_type = unassigned DNA
ggcgagttggagttcatcctggaagcgtctgcacgacaaggtcagggaggaggtgtggaataactttttcatgggacactttgagaagggccagcacgctctgctcaatgaaggagaagagaatgagatggagatatttggctatcggactcaaggctgccggaaaagtctctgccttgccggatccatcttctcatttggaatcctccccttggtgttttactggagaccagcatggcacgtatgggcacattgtgtcccatgttccttgcaagaagcagacactgtgttgctgaggacaacgatgaggagtatatcataaatagagccataagaaagccagacctaaaggtgagatgcatcaaagtgcagaaaataagatatgtttggaactacttagaaggacagttccagaaaattggttctttggaagactggcttagttctgccaagatacatcaaaaatttggatcaggcttgacaagagaagaacaggagattagcaatctgtaaaactccaccatctcgtcgagtcacataatagcattacggtctctgtatgtgggagaaaagctggagttcaagagctggaatcacgcgtcctggtgcctggagatttattaattttgacagggaacaaagtgctaatgccatgtgatgccgttctgattgaaggcagctgtgtggtggatgaaggcatgctgacaggagaaagtattccagtcaccaaaactccgttacccaagatggatagctctgtgccctggaaaacacagagtgaagcggattacaagcggcatgtcctcttctgtggaacagaggttatccaggccaaggcagcttgctctgggaccgtgagagccgtggtactgcagactggattcaacactgcaaagggagaccttgtgagatccattctctaccctaagccagtgaattttcagttgtacagggatgccatcaggttcctcctgtgccttgtaggaacagccaccattgggatgatctatactctgtgtgtctatgtgcttagtggggaacctccagaggaggtggtgaggaaagcccttgacgtcatcacaattgcggttcctccggctctacctgctgctctgaccacaggcattatctatgcccagaggaggctgaagaagagaggcatcttctgcattagcccccagaggatcaacgtatgtggacagttaaaccttgtctgctttgacaagacaggcaccttaacaagggacggcttggacctctggggagtcgtgtcctgtgataggaatggctttcaggaagttcacagctttgcctcaggccaggctttgccatggggcccactgtgtgcagcgatggccagctgccactctctgatccttcttgatgggaccatccagggagaccctctggacctcaaaatgtttgaagccaccacctgggaaatggctttttctggggacgatttccacatcaagggagtgccggcacatgccatggtagttaagccctgcagaacagccagccaggtcccagtggaaggaattgcaatcctgcatcagttcccattctcatcggcactgcaaagaatgacagtcattgtccaagagatgggaggtgaccgactggcattcatgaaaggtgcaccagagagggtggccagcttttgccaacctgagacagtacccactagttttgttagcgaacttcagatttacacgacacagggcttccgagtcatagcactggcctacaagaagctggaaaatgaccatcacgctactaccttgacgagggagacggtagaatcagacctgatatttctggggctgctgatcttggagaatcgattgaaggaagagacaaaacctgtcttggaagagctcatctcagcccggataaggactgtaatgatcacaggtgacaatcttcagactgcaataacagtggccagaaaatctggaatggtttctgaaagccagaaagtcattctcattgaggcaaatgaaaccaccgggtcctcatcagcatctatatcttggacgttagtagaagagaagaaacacattatgtatgggaatcaggacaattacattaacatcagggatgaagtctctgataaaggcagagaaggaagttaccattttgccctaactggaaaatcctttcatgttataagtcaacatttcagcagcctactgccaaagatattgatcaatgggaccatctttgcaagaatgtctcctgggcagaagtccagtctggtggaagaatttcagaaactggattactttgtaggtatgtgtggtgatggagccaatgactgtggggctctgaaaatggctcatgtgggcatctcattatcagagcaggaggcatctgtggcctcacctttcacttccaaaactccaaacattgagtgcgtacctcaccttatcaaggaaggacgtgcagctctcgttacctccttttgcatgtttaagtacatggctctgtacagcatgattcagtatgttggtgttctgctgctctactgggagacaaacagcctttcaaattaccagtttctgttccaggatctggccattacaactcttattggtgtaacaatgaatctgaatggtgcctaccctaagctggtgcctttcagacctgcaggacggctgatctctccacctctgctactctctgtgattttcaacattcttctcagcctggccatgcatattgcaggcttcatcctggttcagaggcagccttggtattccgtggagatacacagtgcctgcacagtacaaaatgaaagcatctcagagttaaccatgtctccaactgctccagaaaaaatggaaagtaatagcaccttcacaagttttgagaacactacagtctggttcttgggaacaatcaactgtatcactgtggctcttgtgttctctaaaggaaaaccatttagacagccaacttatacaaactatatatttgtccttgtgctgataatacagcttggtgtatgtctattcattctatttgctgatataccagaattatatagacgtttggatctgctctgcactcccgtcctgtggagggcctccattgtcatcatgctcagcttgaatttcattgtgtcccttgtggccgaggaggctgttattgaaaatcgagccctgtggatgatgattaaaagatgtttcggctatcagtcaaaaagccagtatcggatatggcagagggacttggcaaatgaccctagttggcccccgctaaaccaaacctcccactctgacatgccggagtgtggcagaggagtgtcttacagcaatccagtatttgagagcaatgaagaacaactctgaaggacatgtgatatccaagttgatattacagagaaacaatgacaaaagggaccagtttcattgattttaagaaatgagactcttgtaacatcagctggagttttggggctacctatcaaatcatggtgacaaactaaagtctgtttgataaaatactgtctacagagaagaacattgacccagaagagtgctttcctcttggcttctgaaggtattagaggcattcagtgaaggcaagaatgggccaagaatttctatgggccaagagacaagcaggctaaaggggaaaaatatgtgatctt

SEQ ID NO: 1812 - DNA, 4016 bp, Homo sapiens
  source 1..4016: mol_type = unassigned DNA
gggaggagttcagtttgccaagtattgtcatttgttgagagaaggtgtgtgctcaaggaggagttttaacctggaggatcattaactcttttagtcagctgaggagctgcggtggctcggcgagttggagttcatcctggaagcgtctgcacgacaaggtcagggaggaggtgtggaataactttttcatgggacactttgagaagggccagcacgctctgctcaatgaaggagaagagaatgagatggagatatttggctatcggactcaaggctgccggaaaagtctctgccttgccggatccatcttctcatttggaatcctccccttggtgttttactggagaccagcatggcacgtatgggcacattgtgtcccatgttccttgcaagaagcagacactgtgttgctgaggacaacggatgaattccaaatttactcttggaaaaaggtaatatggatctacctgtcagcattaaacagcgcatttggtctcactcctgaccaccctctcatgacagatgaggagtatatcataaatagagccataagaaagccagacctaaaggtgagatgcatcaaagtgcagaaaataagatatgtttggaactacttagaaggacagttccagaaaattggttctttggaagactggcttagttctgccaagatacatcaaaaatttggatcaggcttgacaagagaagaacaggagattaggaggttaatatgtgggcctaatactatcgatgttgaagttacaccaatttggaaactgctcatcaaggaggttctaaatccattttatatatttcaactcttcagtgtctgtttgtggtttagtgaagactataaggaatatgcttttgccatcataatcatgtccataatttccatatctttgacagtatatgatctcagagagcaatctgtaaaactccaccatctcgtcgagtcacataatagcattacggtctctgtatgtgggagaaaagctggagttcaagagctggaatcacgcgtcctggtgcctggagatttattaattttgacagggaacaaagtgctaatgccatgtgatgccgttctgattgaaggcagctgtgtggtggatgaaggcatgctgacaggagaaagtattccagtcaccaaaactccgttacccaagatggatagctctgtgccctggaaaacacagagtgaagcggattacaagcggcatgtcctcttctgtggaacagaggttatccaggccaaggcagcttgctctgggaccgtgagagccgtggtactgcagactggattcaacactgcaaagggagaccttgtgagatccattctctaccctaagccagtgaattttcagttgtacagggatgccatcaggttcctcctgtgccttgaacctccagaggaggtggtgaggaaagcccttgacgtcatcacaattgcggttcctccggctctacctgctgctctgaccacaggcattatctatgcccagaggaggctgaagaagagaggcatcttctgcattagcccccagaggatcaacgtatgtggacagttaaaccttgtctgctttgacaagacaggcaccttaacaagggacggcttggacctctggggagtcgtgtcctgtgataggaatggctttcaggaagttcacagctttgcctcaggccaggctttgccatggggcccactgtgtgcagcgatggccagctgccactctctgatccttcttgatgggaccatccagggagaccctctggacctcaaaatgtttgaagccaccacctgggaaatggctttttctggggacgatttccacatcaagggagtgccggcacatgccatggtagttaagccctgcagaacagccagccaggtcccagtggaaggaattgcaatcctgcatcagttcccattctcatcggcactgcaaagaatgacagtcattgtccaagagatgggaggtgaccgactggcattcatgaaaggtgcaccagagagggtggccagcttttgccaacctgagacagtacccactagttttgttagcgaacttcagatttacacgacacagggcttccgagtcatagcactggcctacaagaagctggaaaatgaccatcacgctactaccttgacgagggagacggtagaatcagacctgatatttctggggctgctgatcttggagaatcgattgaaggaagagacaaaacctgtcttggaagagctcatctcagcccggataaggactgtaatgatcacaggtgacaatcttcagactgcaataacagtggccagaaaatctggaatggtttctgaaagccagaaagtcattctcattgaggcaaatgaaaccaccgggtcctcatcagcatctatatcttggacgttagtagaagagaagaaacacattatgtatgggaatcaggacaattacattaacatcagggatgaagtctctgataaaggcagagaaggaagttaccattttgccctaactggaaaatcctttcatgttataagtcaacatttcagcagcctactgccaaagatattgatcaatgggaccatctttgcaagaatgtctcctgggcagaagtccagtctggtggaagaatttcagaaactggattactttgtaggtatgtgtggtgatggagccaatgactgtggggctctgaaaatggctcatgtgggcatctcattatcagagcaggaggcatctgtggcctcacctttcacttccaaaactccaaacattgagtgcgtacctcaccttatcaaggaaggacgtgcagctctcgttacctccttttgcatgtttaagtacatggctctgtacagcatgattcagtatgttggtgttctgctgctctactgggagacaaacagcctttcaaattaccagtttctgttccaggatctggccattacaactcttattggtgtaacaatgaatctgaatggtgcctaccctaagctggtgcctttcagacctgcaggacggctgatctctccacctctgctactctctgtgattttcaacattcttctcagcctggccatgcatattgcaggcttcatcctggttcagaggcagccttggtattccgtggagatacacagtgcctgcacagtacaaaatgaaagcatctcagagttaaccatgtctccaactgctccagaaaaaatggaaagtaatagcaccttcacaagttttgagaacactacagtctggttcttgggaacaatcaactgtatcactgtggctcttgtgttctctaaaggaaaaccatttagacagccaacttatacaaactatatatttgtccttgtgctgataatacagcttggtgtatgtctattcattctatttgctgatataccagaattatatagacgtttggatctgctctgcactcccgtcctgtggagggcctccattgtcatcatgctcagcttgaatttcattgtgtcccttgtggccgaggaggctgttattgaaaatcgagccctgtggatgatgattaaaagatgtttcggctatcagtcaaaaagccagtatcggatatggcagagggacttggcaaatgaccctagttggcccccgctaaaccaaacctcccactctgacatgccggagtgtggcagaggagtgtcttacagcaatccagtatttgagagcaatgaagaacaactctgaaggacatgtgatatccaagttgatattacagagaaacaatgacaaaagggaccagtttcattgattttaagaaatgagactcttgtaacatcagctggagttttggggctacctatcaaatcatggtgacaaactaaagtctgtttgataaaatactgtctacagagaagaacattgacccagaagagtgctttcctcttggcttctgaaggtattagaggcattcagtgaaggcaagaatgggccaagaatttctatgggccaagagacaagcaggctaaaggggaaaaatat

SEQ ID NO: 1813 - DNA, 4208 bp, Homo sapiens
  source 1..4208: mol_type = unassigned DNA
aggcaatgagttctttccctgtaagttgggcacaaaaagatcggcatgggagcagcctcctttgagacagctgctctgagagaatgcaataagcagggagcagccagcaattcctcctagcagagggcgactcgtgggaggagttcagtttgccaagtattgtcatttgttgagagaaggtgtgtgctcaaggaggagttttaacctggaggatcattaactcttttagtcagctgaggagctgcggtggctcggcgagttggagttcatcctggaagcgtctgcacgacaaggtcagggaggaggtgtggaataactttttcatgggacactttgagaagggccagcacgctctgctcaatgaaggagaagagaatgagatggagatatttggctatcggactcaaggctgccggaaaagtctctgccttgccggatccatcttctcatttggaatcctccccttggtgttttactggagaccagcatggcacgtatgggcacattgtgtcccatgttccttgcaagaagcagacactgtgttgctgaggacaacggatgaattccaaatttactcttggaaaaaggtaatatggatctacctgtcagcattaaacagcgcatttggtctcactcctgaccaccctctcatgacagatgaggagtatatcataaatagagccataagaaagccagacctaaaggtgagatgcatcaaagtgcagaaaataagatatgtttggaactacttagaaggacagttccagaaaattggttctttggaagactggcttagttctgccaagatacatcaaaaatttggatcaggcttgacaagagaagaacaggagattaggaggttaatatgtgggcctaatactatcgatgttgaagttacaccaatttggaaactgctcatcaaggaggttctaaatccattttatatatttcaactcttcagtgtctgtttgtggtttagtgaagactataaggaatatgcttttgccatcataatcatgtccataatttccatatctttgacagtatatgatctcagagagcaatctgtaaaactccaccatctcgtcgagtcacataatagcattacggtctctgtatgtgggagaaaagctggagttcaagagctggaatcacgcgtcctggtgcctggagatttattaattttgacagggaacaaagtgctaatgccatgtgatgccgttctgattgaaggcagctgtgtggtggatgaaggcatgctgacaggagaaagtattccagtcaccaaaactccgttacccaagatggatagctctgtgccctggaaaacacagagtgaagcggattacaagcggcatgtcctcttctgtggaacagaggttatccaggccaaggcagcttgctctgggaccgtgagagccgtggtactgcagactggattcaacactgcaaagggagaccttgtgagatccattctctaccctaagccagtgaattttcagttgtacagggatgccatcaggttcctcctgtgccttgtaggaacagccaccattgggatgatctatactctgtgtgtctatgtgcttagtggggaacctccagaggaggtggtgaggaaagcccttgacgtcatcacaattgcggttcctccggctctacctgctgctctgaccacaggcattatctatgcccagaggaggctgaagaagagaggcatcttctgcattagcccccagaggatcaacgtatgtggacagttaaaccttgtctgctttgacaagacaggcaccttaacaagggacggcttggacctctggggagtcgtgtcctgtgataggaatggctttcaggaagttcacagctttgcctcaggccaggctttgccatggggcccactgtgtgcagcgatggccagctgccactctctgatccttcttgatgggaccatccagggagaccctctggacctcaaaatgtttgaagccaccacctgggaaatggctttttctggggacgatttccacatcaagggagtgccggcacatgccatggtagttaagccctgcagaacagccagccaggtcccagtggaaggaattgcaatcctgcatcagttcccattctcatcggcactgcaaagaatgacagtcattgtccaagagatgggaggtgaccgactggcattcatgaaaggtgcaccagagagggtggccagcttttgccaacctgagacagtacccactagttttgttagcgaacttcagatttacacgacacagggcttccgagtcatagcactggcctacaagaagctggaaaatgaccatcacgctactaccttgacgagggagacggtagaatcagacctgatatttctggggctgctgatcttggagaatcgattgaaggaagagacaaaacctgtcttggaagagctcatctcagcccggataaggactgtaatgatcacaggtgacaatcttcagactgcaataacagtggccagaaaatctggaatggtttctgaaagccagaaagtcattctcattgaggcaaatgaaaccaccgggtcctcatcagcatctatatcttggacgttagtagaagagaagaaacacattatgtatgggaatcaggacaattacattaacatcagggatgaagtctctgataaaggcagagaaggaagttaccattttgccctaactggaaaatcctttcatgttataagtcaacatttcagcagcctactgccaaagatattgatcaatgggaccatctttgcaagaatgtctcctgggcagaagtccagtctggtggaagaatttcagaaactggattactttgtaggtatgtgtggtgatggagccaatgactgtggggctctgaaaatggctcatgtgggcatctcattatcagagcaggaggcatctgtggcctcacctttcacttccaaaactccaaacattgagtgcgtacctcaccttatcaaggaaggacgtgcagctctcgttacctccttttgcatgtttaagtacatggctctgtacagcatgattcagtatgttggtgttctgctgctctactgggagacaaacagcctttcaaattaccagtttctgttccaggatctggccattacaactcttattggtgtaacaatgaatctgaatggtgcctaccctaagctggtgcctttcagacctgcaggacggctgatctctccacctctgctactctctgtgattttcaacattcttctcagcctggccatgcatattgcaggcttcatcctggttcagaggcagccttggtattccgtggagatacacagtgcctgcacagtacaaaatgaaagcatctcagagttaaccatgtctccaactgctccagaaaaaatggaaagtaatagcaccttcacaagttttgagaacactacagtctggttcttgggaacaatcaactgtatcactgtggctcttgtgttctctaaaggaaaaccatttagacagccaacttatacaaactatatatttgtccttgtgctgataatacagcttggtgtatgtctattcattctatttgctgatataccagaattatatagacgtttggatctgctctgcactcccgtcctgtggagggcctccattgtcatcatgctcagcttgaatttcattgtgtcccttgtggccgaggaggctgttattgaaaatcgagccctgtggatgatgattaaaagatgtttcggctatcagtcaaaaagccagtatcggatatggcagagggacttggcaaatgaccctagttggcccccgctaaaccaaacctcccactctgacatgccggagtgtggcagaggagtgtcttacagcaatccagtatttgagagcaatgaagaacaactctgaaggacatgtgatatccaagttgatattacagagaaacaatgacaaaagggaccagtttcattgattttaagaaatgagactcttgtaacatcagctggagttttggggctacctatcaaatcatggtgacaaactaaagtctgtttgataaaatactgtctacagagaagaacattgacccagaagagtgctttcctcttggcttctgaaggtattagaggcattcagtgaaggcaagaatgggccaagaatttctatgggccaagagacaagcaggctaaaggggaaaaatat

SEQ ID NO: 1814 - DNA, 872 bp, Homo sapiens
  source 1..872: mol_type = unassigned DNA
tgcctgcacagtacaaaatgaaagcatctcagagttaaccatgtctccaactgctccagaaaaaatggaaagtaatagcaccttcacaagttttgagaacactacagtctggttcttgggaacaatcaactgtatcactgtggctcttgtgttctctaaaggaaaaccatttagacagccaacttatacaaactatatatttgtccttgtgctgataatacagcttggtgtatgtctattcattctatttgctgatataccagaattatatagacgtttggatctgctctgcactcccgtcctgtggagggcctccattgtcatcatgctcagcttgaatttcattgtgtcccttgtggccgagctctaagaagaactactgttttcacgtcaattaaggaggacaaaaaaaccttgctgcaggaaagtagaataactcatctggctaagtttccaagaggctgagacggttatatggatctttaacagccccgcagccagcagatggaggctgttattgaaaatcgagccctgtggatgatgattaaaagatgtttcggctatcagtcaaaaagccagtatcggatatggcagagggacttggcaaatgaccctagttggcccccgctaaaccaaacctcccactctgacatgccggagtgtggcagaggagtgtcttacagcaatccagtatttgagagcaatgaagaacaactctgaaggacatgtgatatccaagttgatattacagagaaacaatgacaaaagggaccagtttcattgattttaagaaatgagactcttgtaacatcagctggagttttggggctacctatcaaatcatggtgacaaactaaagtctgtttgataaa

SEQ ID NO: 1815 - DNA, 228 bp, Homo sapiens
  source 1..228: mol_type = unassigned DNA
tcatctacaattaatgtggttccctcttagttactttgtaggtatgtgtggtgatggagccaatgactgtgggggaaggacgtgcagctctcgttacctccttttgcatgtttaagtacatggctctgtacagcatgattcagtatgttggtgttctgctgctctactgggagacaaacagcctttcaaattaccagtttctgttccaggatctggccattacaactc

SEQ ID NO: 1816 - DNA, 565 bp, Homo sapiens
  source 1..565: mol_type = unassigned DNA
caatcttcagactgcaataacagtggccagaaaatctggaatggtttctgaaagccagaaagtcattctcattgaggcaaatgaaaccaccgggtcctcatcagcatctatatcttggacgttagtagaagagaagaaacacattatgtatgggaatcaggacaattacattaacatcagggatgaagtctctgataaaggcagagaaggaagttaccattttgccctaactggaaaatcctttcatgttataagtcaacatttcagcagcctactgccaaagatattgatcaatgggaccatctttgcaagaatgtctcctgggcagaagtccagtctggtggaagaatttcagaaactggagtaggttctttgccagtgcaggtggcatgaactgcatggaggcataacagtcagggggagtggaagagttactttgtaggtatgtgtggtgatggagccaatgactgtggggctctgaaaatggctcatgtgggcatctcattatcagagcaggaggcatctgtggcctcacctttcacttccaaaactccaaacattgagt

SEQ ID NO: 1817 - DNA, 3070 bp, Homo sapiens
  source 1..3070: mol_type = unassigned DNA
attaactcttttagtcagctgaggagctgcggtggctcggcgagttggagttcatcctggaagcgtctgcacgacaaggtcagggaggaggtgtggaataactttttcatgggacactttgagaagggccagcacgctctgctcaatgaaggagaagagaatgagatggagatatttggctatcggactcaaggctgccggaaaagtctctgccttgccggatccatcttctcatttggaatcctccccttggtgttttactggagaccagcatggcacgtatgggcacattgtgtcccatgttccttgcaagaagcagacactgtgttgctgaggacaacggatgaattccaaatttactcttggaaaaaggtaatatggatctacctgtcagcattaaacagcgcatttggtctcactcctgaccaccctctcatgacagatgaggagtatatcataaatagagccataagaaagccagacctaaaggtgagatgcatcaaagtgcagaaaataagatatgtttggaactacttagaaggacagttccagaaaattggttctttggaagactggcttagttctgccaagatacatcaaaaatttggatcaggcttgacaagagaagaacaggagattaggaggttaatatgtgggcctaatactatcgatgttgaagttacaccaatttggaaactgctcatcaaggaggttctaaatccattttatatatttcaactcttcagtgtctgtttgtggtttagtgaagactataaggaatatgcttttgccatcataatcatgtccataatttccatatctttgacagtatatgatctcagagagcaatctgtaaaactccaccatctcgtcgagtcacataatagcattacggtctctgtatgtgggagaaaagctggagttcaagagctggaatcacgcgtcctggtgcctggagatttattaattttgacagggaacaaagtgctaatgccatgtgatgccgttctgattgaaggcagctgtgtggtggatgaaggcatgctgacaggagaaagtattccagtcaccaaaactccgttacccaagatggatagctctgtgccctggaaaacacagagtgaagcggattacaagcggcatgtcctcttctgtggaacagaggttatccaggccaaggcagcttgctctgggaccgtgagagccgtggtactgcagactggattcaacactgcaaagggagaccttgtgagatccattctctaccctaagccagtgaattttcagttgtacagggatgccatcaggttcctcctgtgccttgtaggaacagccaccattgggatgatctatactctgtgtgtctatgtgcttagtggggaacctccagaggaggtggtgaggaaagcccttgacgtcatcacaattgcggttcctccggctctacctgctgctctgaccacaggcattatctatgcccagaggaggctgaagaagagaggcatcttctgcattagcccccagaggatcaacgtatgtggacagttaaaccttgtctgctttgacaagacaggcaccttaacaagggacggcttggacctctggggagtcgtgtcctgtgataggaatggctttcaggaagttcacagctttgcctcaggccaggctttgccatggggcccactgtgtgcagcgatggccagctgccactctctgatccttcttgatgggaccatccagggagaccctctggacctcaaaatgtttgaagccaccacctgggaaatggctttttctggggacgatttccacatcaagggagtgccggcacatgccatggtagttaagccctgcagaacagccagccaggtcccagtggaaggaattgcaatcctgcatcagttcccattctcatcggcactgcaaagaatgacagtcattgtccaagagatgggaggtgaccgactggcattcatgaaaggtgcaccagagagggtggccagcttttgccaacctgagacagtacccactagttttgttagcgaacttcagatttacacgacacagggcttccgagtcatagcactggcctacaagaagctggaaaatgaccatcacgctactaccttgacgagggagacggtagaatcagacctgatatttctggggctgctgatcttggagaatcgattgaaggaagagacaaaacctgtcttggaagagctcatctcagcccggataaggactgtaatgatcacaggtgacaatcttcagactgcaataacagtggccagaaaatctggaatggtttctgaaagccagaaagtcattctcattgaggcaaatgaaaccaccgggtcctcatcagcatctatatcttggacgttagtagaagagaagaaacacattatgtatgggaatcaggacaattacattaacatcagggatgaagtctctgataaaggcagagaaggaagttaccattttgccctaactggaaaatcctttcatgttataagtcaacatttcagcagcctactgccaaagatattgatcaatgggaccatctttgcaagaatgtctcctgggcagaagtccagtctggtggaagaatttcagaaactggagtaggttctttgccagtgcaggtggcatgaactgcatggaggcataacagtcagggggagtggaagaggtaccaggagtcactcagtttgacaagggcagtggtccgtacttcggctgcatgagataatcacttgggagctttggagaaaatagcagtaccaagggatctcaccattcagagatcctgattcagttgtttatatggggcttaaaaaatcagtattttttttcacttaagtcaattttgcattcaatgctgagaaccactggactagaacctaagggtcctgaaagagtgtggggagaaataagaatggaaaggtggcttgagctcagctcctggagggacagtgagaatttatttgtatatgccgtcatcacaatgatgatatagggatattcatatgacaagagattcatgcaacattaaaaatactaaaat

SEQ ID NO: 1818 - DNA, 2157 bp, Homo sapiens
  source 1..2157: mol_type = unassigned DNA
atgggacactttgagaagggccagcacgctctgctcaatgaaggagaagagaatgagatggagatatttggctatcggactcaaggctgccggaaaagtctctgccttgccggatccatcttctcatttggaatcctccccttggtgttttactggagaccagcatggcacgtatgggcacattgtgtcccatgttccttgcaagaagcagacactgtgttgctgaggacaacggatgaattccaaatttactcttggaaaaaggtaatatggatctacctgtcagcattaaacagcgcatttggtctcactcctgaccaccctctcatgacagatgaggagtatatcataaatagagccataagaaagccagacctaaaggtgagatgcatcaaagtgcagaaaataagatatgtttggaactacttagaaggacagttccagaaaattggttctttggaagactggcttagttctgccaagatacatcaaaaatttggatcaggcttgacaagagaagaacaggagattaggaggttaatatgtgggcctaatactatcgatgttgaagttacaccaatttggaaactgctcatcaaggaggttctaaatccattttatatatttcaactcttcagtgtctgtttgtggtttagtgaagactataaggaatatgcttttgccatcataatcatgtccataatttccatatctttgacagtatatgatctcagagagcaatctgtaaaactccaccatctcgtcgagtcacataatagcattacggtctctgtatgtgggagaaaagctggagttcaagagctggaatcacgcgtcctggtgcctggagatttattaattttgacagggaacaaagtgctaatgccatgtgatgccgttctgattgaaggcagctgtgtggtggatgaaggcatgctgacaggagaaagtattccagtcaccaaaactccgttacccaagatggatagctctgtgccctggaaaacacagagtgaagcggattacaagcggcatgtcctcttctgtggaacagaggttatccaggccaaggcagcttgctctgggaccgtgagagccgtggtactgcagactggattcaacactgcaaagggagaccttgtgagatccattctctaccctaagccagtgaattttcagttgtacagggatgccatcaggttcctcctgtgccttgtaggaacagccaccattgggatgatctatactctgtgtgtctatgtgcttagtggggaacctccagaggaggtggtgaggaaagcccttgacgtcatcacaattgcggttcctccggctctacctgctgctctgaccacaggcattatctatgcccagaggaggctgaagaagagaggcatcttctgcattagcccccagaggatcaacgtatgtggacagttaaaccttgtctgctttgacaagacaggcaccttaacaagggacggcttggacctctggggagtcgtgtcctgtgataggaatggctttcaggaagttcacagctttgcctcaggccaggctttgccatggggcccactgtgtgcagcgatggccagctgccactctctgatccttcttgatgggaccatccagggagaccctctggacctcaaaatgtttgaagccaccacctgggtaagcctctgctcttcagagaatctgagaagcttcttcaatgccagagcaacataggcaatatcagagctatctaattcttataaaaggtgaggtttccaatgtggagtacatttggtagtgaagggcaaaccaatctaaggctggtttcctcatctgtgcaatgaagctaataatagcatctacataatgagattgtgaggattaaatgagatgatgcagtaagaaaatccttggcactatgcctggcaaatattaaaggttcgatcatattaatataattgtacttattatgcagttatttcttgtctctctgtactgttctccgagcattgtctggtttcgaagattttccagaatatggggatcagaaaacattgctttctccagtgctcaggataactcatagattcacggggactataagtcttatttctattaatttcatattgattttatttccaagactagaaagaacaaaaa

SEQ ID NO: 1819 - DNA, 560 bp, Homo sapiens
  source 1..560: mol_type = unassigned DNA
agtgcgtcgggaacggactggagcaatccatcgcctctcacggggccccgccctcttgcttccgatttggaattcggaattagccttgcagacttctcttttctgtcctcatcgaaaagacagccagcttttgtaaccttgccttggggatgttagcaggagaaatgttggcaattcaaggctcttctggttttataagaaaaccagattttgctgggaggcctggagtagaagagagggtcttggagaagcaaacatgggaggagagacattcccagagatcaggaagaggagatatttggctatcggactcaaggctgccggaaaagtctctgccttgccggatccatcttctcatttggaatcctccccttggtgttttactggagaccagcatggcacgtatgggcacattgtgtcccatgttccttgcaagaagcagacactgtgttgctgaggacaacggatgaattccaaatttactcttggaaaaaggtaatatggatctacctgtcagcattaaacagcgcatttggtctcactcctgaccaccctctcat

SEQ ID NO: 1820 - DNA, 654 bp, Homo sapiens
  source 1..654: mol_type = unassigned DNA
agcgcccggggaggccatccgcaggtgggcgcggggcctggattccacagaggggcggagtccctcagtcaggcgctggctgcaatcacacccgagcgccagccccctccagcatccctgagtcccagaggagatcgccgaagcgctggaaaagccgttccgcccacgacttctggtgccgggtcggcggcgactgggggagcccagttccgagaccgtaccgcacccactgcggacctcctgggccctacatagttggacgtgataagtatgagcctgcagctgtttcagaacaaggtgataaaaagggcaaaaagggcaaaaaagacagggacatggatgaactgaagaaagaagtttctatggatgatcataaacttagccttgatgaacttcatcgtaaatatggaacagacttgagccggggattaacatctgctcgtgcagctgagatcctggcgcgagatggtcccaacgccctcactccccctcccactactcctgaatggatcaagttttgtcggcagctctttggggggttctcaatgttactgtggattggagcgattctttgtttcttggcttatagcatccaagctgctacagaagaggaacctcaaaacgataatctgtacctgggtgtggtgctatcag

SEQ ID NO: 1821 - DNA, 3654 bp, Homo sapiens
  source 1..3654: mol_type = unassigned DNA
ctggggcgcagagcagcggcgggaggaggcggacacgtggcaacagcggtagcagcccgggcggcggcagcaacagcggcggcggcatcggcccgagccgccggccgccctcccaccctcccgccccgcggcagccctagctccctccacttggctcccctggtcccgctcgctcggccgggagctgctctgtgcttttctctctgattctccagcgacaggacccggcgccgggcactgagcaccgccaccatggggaagggggttggacgtgataagtatgagcctgcagctgtttcagaacaaggtgataaaaagggcaaaaagggcaaaaaagacagggacatggatgaactgaagaaagaagtttctatggatgatcataaacttagccttgatgaacttcatcgtaaatatggaacagacttgagccggggattaacatctgctcgtgcagctgagatcctggcgcgagatggtcccaacgccctcactccccctcccactactcctgaatggatcaagttttgtcggcagctctttggggggttctcaatgttactgtggattggagcgattctttgtttcttggcttatagcatccaagctgctacagaagaggaacctcaaaacgataatctgtacctgggtgtggtgctatcagccgttgtaatcataactggttgcttctcctactatcaagaagctaaaagttcaaagatcatggaatccttcaaaaacatggtccctcagcaagcccttgtgattcgaaatggtgagaaaatgagcataaatgcggaggaagttgtggttggggatctggtggaagtaaaaggaggagaccgaattcctgctgacctcagaatcatatctgcaaatggctgcaaggtggataactcctcgctcactggtgaatcagaaccccagactaggtctccagatttcacaaatgaaaaccccctggagacgaggaacattgccttcttttcaaccaattgtgttgaaggcaccgcacgtggtattgttgtctacactggggatcgcactgtgatgggaagaattgccacacttgcttctgggctggaaggaggccagacccccattgctgcagaaattgaacattttatccacatcatcacgggtgtggctgtgttcctgggtgtgtctttcttcatcctttctctcatccttgagtacacctggcttgaggctgtcatcttcctcatcggtatcatcgtagccaatgtgccggaaggtttgctggccactgtcacggtctgtctgacacttactgccaaacgcatggcaaggaaaaactgcttagtgaagaacttagaagctgtggagaccttggggtccacgtccaccatctgctctgataaaactggaactctgactcagaaccggatgacagtggcccacatgtggtttgacaatcaaatccatgaagctgatacgacagagaatcagagtggtgtctcttttgacaagacttcagctacctggcttgctctgtccagaattgcaggtctttgtaacagggcagtgtttcaggctaaccaggaaaacctacctattcttaagcgggcagttgcaggagatgcctctgagtcagcactcttaaagtgcatagagctgtgctgtggttccgtgaaggagatgagagaaagatacgccaaaatcgtcgagatacccttcaactccaccaacaagtaccagttgtctattcataagaaccccaacacatcggagccccaacacctgttggtgatgaagggcgccccagaaaggatcctagaccgttgcagctctatcctcctccacggcaaggagcagcccctggatgaggagctgaaagacgcctttcagaacgcctatttggagctggggggcctcggagaacgagtcctaggtttctgccacctctttctgccagatgaacagtttcctgaagggttccagtttgacactgacgatgtgaatttccctatcgataatctgtgctttgttgggctcatctccatgattgaccctccacgggcggccgttcctgatgccgtgggcaaatgtcgaagtgctggaattaaggtcatcatggtcacaggagaccatccaatcacagctaaagctattgccaaaggtgtgggcatcatctcagaaggcaatgagaccgtggaagacattgctgcccgcctcaacatcccagtcagccaggtgaaccccagggatgccaaggcctgcgtagtacacggcagtgatctaaaggacatgacctccgagcagctggatgacattttgaagtaccacactgagatagtgtttgccaggacctcccctcagcagaagctcatcattgtggaaggctgccaaagacagggtgctatcgtggctgtgactggtgacggtgtgaatgactctccagctttgaagaaagcagacattggggttgctatggggattgctggctcagatgtgtccaagcaagctgctgacatgattcttctggatgacaactttgcctcaattgtgactggagtagaggaaggtcgtctgatctttgataacttgaagaaatccattgcttataccttaaccagtaacattcccgagatcaccccgttcctgatatttattattgcaaacattccactaccactggggactgtcaccatcctctgcattgacttgggcactgacatggttcctgccatctccctggcttatgagcaggctgagagtgacatcatgaagagacagcccagaaatcccaaaacagacaaacttgtgaatgagcggctgatcagcatggcctatgggcagattggaatgatccaggccctgggaggcttctttacttactttgtgattctggctgagaacggcttcctcccaattcacctgttgggcctccgagtggactgggatgaccgctggatcaacgatgtggaagacagctacgggcagcagtggacctatgagcagaggaaaatcgtggagttcacctgccacacagccttcttcgtcagtatcgtggtggtgcagtgggccgacttggtcatctgtaagaccaggaggaattcggtcttccagcaggggatgaagaacaagatcttgatatttggcctctttgaagagacagccctggctgctttcctttcctactgccctggaatgggtgttgctcttaggatgtatcccctcaaacctacctggtggttctgtgccttcccctactctcttctcatcttcgtatatgacgaagtcagaaaactcatcatcaggcgacgccctggcggctgggtggagaaggaaacctactattagccccccgtcctgcacgccgtggagcatcaggccacacactctgcatccgacacccaccccctctttgtgtacttcagtcttggagtttggaactctaccctggtaggaaagcaccgcagcatgtggggaagcaagacgtcctggaatgaagcatgtagctctatggggggaggggggagggctgcctgaaaaccatccatctgtggaaatgacagcggggaaggtttttatgtgcctttttgtttttgtaaaaaaggaacacccggaaagactgaaagaatacattttatatctggatttttacaaataaagatggctattataatggaa

SEQ ID NO: 1822 - DNA, 1728 bp, Homo sapiens
  source 1..1728: mol_type = unassigned DNA
agagcagcggcgggaggaggcggacacgtggcaacagcggtagcagcccgggcggcggcagcaacagcggcggcggcatcggcccgagccgccggccgccctcccaccctcccgccccgcggcagccctagctccctccacttggctcccctggtcccgctcgctcggccgggagctgctctgtgcttttctctctgattctccagcgacaggacccggcgccgggcactgagcaccgccaccatggggaagggggttggacgtgataagtatgagcctgcagctgtttcagaacaaggtgataaaaagggcaaaaagggcaaaaaagacagggacatggatgaactgaagaaagaagtttctatggatgatcataaacttagccttgatgaacttcatcgtaaatatggaacagacttgagccgggtatgttctagtttgaaagctgttgtacaaaatcctagttttccgtattatattttcccctgtattacatacaggtctaacctcaggggctctagtaagaaaatgacagacaccatctgcgtatctaccatgtgacatgcacagaatttgggcatttatatgctaccgtttcttttccctgaaactttttgaaagtagatgttattttcttttccctattttatagcagttgagagccagtaagtgggaacaccaggacttgcagttggcttcaaagccatgcttatgccttgaccttttgatgataaattttccctttatttttctacatttgttaaatagagttgaatctttcacctagttgaatcttcaacaattcccatttttgcacttttcccagctagcccattgcagtgtgttatggttatactatcatttgtttagttattctatcatttagttggaaattgttttgtacaaaaattaaagaaaccttttcataaaataggcgttatgtatccttgttatgtagaggattttgatattaaatgtgtaacaaatgttataaaagtaaatagtctagggatgtcttatttccagataatcactgaaatgtctgggaataacttgaatagcaagccaatatgtagcattttttcagtaaggcatcaagagacatgggtactgtggtattctgatatatattggtttttgtccacagttcctggttcataactcccatagcccttattacagtcgtttgttataatgttgggtgtgttagacctcagtggcaggcttcaagaaacaggatctctctcctgccctccttttcacctgtcgcaaggcaggactctaatcttgttccacttttctgattttccaggtagatagtgttggaattgaattggaggaaaccttggtggtggggagaaaccgccacacctttgctcacagaagtcatcttctgtgttgattgttggggtgtaagagtagagaagaggccgggtgcggtggctcatgcctgtaatctcagcactttgggaggctgagactggtggatcacctgaggtcaggagttcgacaccagcctgaccaacatggagaaaccccgtctctactaaaaatacaaaattagcctggcatggtggtgcatgcctgtaatcccagctactcgggaggctgaggcaggagaactgcttaaacctgggaggtggaggttgcagtgagccaaggttgtgccattgcactccagcctggacaacaagagtgaaactccatctcaaaaaaaaaaaaaaaaaa

SEQ ID NO: 1823 - DNA, 698 bp, Homo sapiens
  source 1..698: mol_type = unassigned DNA
caagagctgtaccgaaagaggcaccaacaaatgtggttgctccataatggagagaatgtcaagaatgttgactatctttagacctgcttcattaatagataagatagaaactaaagaacccacccagttggaagaagttattagtcaagtagtgctgcacacgtgaccacagaagttaaaaaggttggacgtgataagtatgagcctgcagctgtttcagaacaaggtgataaaaagggcaaaaagggcaaaaaagacagggacatggatgaactgaagaaagaagtttctatggatgatcataaacttagccttgatgaacttcatcgtaaatatggaacagacttgagccggggattaacatctgctcgtgcagctgagatcctggcgcgagatggtcccaacgccctcactccccctcccactactcctgaatggatcaagttttgtcggcagctctttggggggttctcaatgttactgtggattggagcgattctttgtttcttggcttatagcatccaagctgctacagaagaggaacctcaaaacgataatctgtacctgggtgtggtgctatcagccgttgtaatcataactggttgcttctcctactatcaagaagctaaaagttcaaagatcatggaatccttcaaaaacatggtccctcagcaagcccttgtgattcgaaatggtga

SEQ ID NO: 1824 - DNA, 584 bp, Homo sapiens
  source 1..584: mol_type = unassigned DNA
cgtgcagctgagatcctggcgcgagatggtcccaacgccctcactccccctcccactactcctgaatggatcaagttttgtcggcagctctttggggggttctcaatgttactgtggattggagcgattctttgtttcttggcttatagcatccaagctgctacagaagaggaacctcaaaacgataatctgtacctgggtgtggtgctatcagccgttgtaatcataactggttgcttctcctactatcaagaagctaaaagttcaaagatcatggaatccttcaaaaacatggtccctcaggtaccagacgctttgtccttccccagtggatgacttgacagccccaagcatgtcagcctgtgaattagtgtgaagttaaggttttccaagtattacatgactcatcagagagatggatgtcttctaccccacccaaaaccaacctattttccttctatccaaaaagtggtagcctttcttttgaatgtaaactctgaatacaggcacaccatgtaacagcaatatctcttaaactggcgagcaagcttttgtaacttgtgtaaataaaaaagtgaataata

SEQ ID NO: 1825 - DNA, 666 bp, Homo sapiens
  source 1..666: mol_type = unassigned DNA
ccgaattcctgctgacctcagaatcatatctgcaaatggctgcaaggtggataactcctcgctcactggtgaatcagaaccccagactaggtctccagatttcacaaatgaaaaccccctggagacgaggaacattgccttcttttcaaccaattgtgttgaaggcaccgcacgtggtattgttgtctacactggggatcgcactgtgatgggaagaattgccacacttgcttctgggctggaaggaggccagacccccattgctgcagaaattgaacattttatccacatcatcacgggtgtggctgtgttcctgggtgtgtctttcttcatcctttctctcatccttgagtacacctggcttgaggctgtcatcttcctcatcggtatcatcgtagccaatgtgccggaaggtttgctggccactgtcacggtaagaggcaggtgatggtcaccctgactcagatcagcttgcacgaatgttacactcttccgctatcctattctaaggtattgccaacttatgttttattctggatgtttgatatagttcttcttgagagccacatcacgtggtgaattttgacagtgagaaaacctcagcatttgtttatacgtaagataaccccaaagcatacattttgcttttaaattatcacgtggtcc

SEQ ID NO: 1826 - DNA, 579 bp, Homo sapiens
  source 1..579: mol_type = unassigned DNA
agacagcccagaaatcccaaaacagacaaacttgtgaatgagcggctgatcagcatggcctatgggcagattggaatgatccaggccctgggaggcttctttacttactttgtgattctggctgagaacggcttcctcccaattcacctgttgggcctccgagtggactgggatgaccgctggatcaacgatgtggaagacagctacgggcagcagtggacctatgagcagaggaaaatcgtggagttcacctgccacacagccttcttcgtcagtatcgtggtggtgcagtgggccgacttggtcatctgtaagaccaggaggaattcggtcttccagcaggggatgaagaacaagatcttgatatttggcctctttgaagagacagccctggctgctttcctttcctactgccctggaatgggtgttgctcttaggatgtatcccctcaagactctgacgcagtacagttaatctgtgcacaggaaagaagagctgtttgaagaggttattcggtaaatgcagagaatgtctttgtagtataaattattgctctatataaaactgcttgtaagtttt

SEQ ID NO: 1827 - DNA, 611 bp, Homo sapiens
  source 1..611: mol_type = unassigned DNA
acctatgagcagaggaaaatcgtggagttcacctgccacacagccttcttcgtcagtatcgtggtggtgcagtgggccgacttggtcatctgtaagaccaggaggaattcggtcttccagcaggggatgaagaacaagatcttgatatttggcctctttgaagagacagccctggctgctttcctttcctactgccctggaatgggtgttgctcttaggatgtatcccctcaagtaagttgatcctctggtagctccaaaaagtatgaaatagtatgtgtggcttttccccccattacttgtggtaatagttgttattttcagaattttgagtggtatgtacaaaaattcctatgggttggaaaactgtgaaagcttgacatgtcagtaaatcagactaacaaatcctgaggcttccatgatagcagctagtgtttaggatttggcccaagataagataaagccacacaggctctagctccatggaactgctcaacagcgaactgcattgagcactcaggtctgccacagctgtagtccagttgtctttagaggccaactgggggtatgctggagcgtaggcgcccaggctcaaatcttgatttgcttgct

SEQ ID NO: 1828 - DNA, 417 bp, Homo sapiens
  source 1..417: mol_type = unassigned DNA
aacgcacatacgctgctgcgatgaaggtcatgggcatttcctgatgcaaaagatttgaaacactctgagactttagcttttgacaaggggaccccagagaacgttaagccagtgtttctctgacagctctaagaagccctggtcttctgggaaaccctggagggagcaaggcaaaaggaaggctctgaacttcacacctgattttccaccagaacatttctgcccttttctgtgtgacaatcctttgaatagaaagttctacagccaaacatttgatttaggaagagcaggactctgacgcagtacagttaatctgtgcacaggaaagaagagctgtttgaagaggttattcggtaaatgcagagaatgtctttgtagtataaattattgctctatataaaactgcttgtaagtttt

SEQ ID NO: 1829 - DNA, 3572 bp, Homo sapiens
  source 1..3572: mol_type = unassigned DNA
gatatgtaataatgtctttgcaaagcaaagaatataaacagtataaaagtactagcatttagatgtattgtatcatttaatccttaaaaacatgaaatgaggttggcactattctttatctccacgctgtggaagaggaaattgaaatgtagaagttagtaacttgcctaaggatacactgctggttggacgtgataagtatgagcctgcagctgtttcagaacaaggtgataaaaagggcaaaaagggcaaaaaagacagggacatggatgaactgaagaaagaagtttctatggatgatcataaacttagccttgatgaacttcatcgtaaatatggaacagacttgagccggggattaacatctgctcgtgcagctgagatcctggcgcgagatggtcccaacgccctcactccccctcccactactcctgaatggatcaagttttgtcggcagctctttggggggttctcaatgttactgtggattggagcgattctttgtttcttggcttatagcatccaagctgctacagaagaggaacctcaaaacgataatctgtacctgggtgtggtgctatcagccgttgtaatcataactggttgcttctcctactatcaagaagctaaaagttcaaagatcatggaatccttcaaaaacatggtccctcagcaagcccttgtgattcgaaatggtgagaaaatgagcataaatgcggaggaagttgtggttggggatctggtggaagtaaaaggaggagaccgaattcctgctgacctcagaatcatatctgcaaatggctgcaaggtggataactcctcgctcactggtgaatcagaaccccagactaggtctccagatttcacaaatgaaaaccccctggagacgaggaacattgccttcttttcaaccaattgtgttgaaggcaccgcacgtggtattgttgtctacactggggatcgcactgtgatgggaagaattgccacacttgcttctgggctggaaggaggccagacccccattgctgcagaaattgaacattttatccacatcatcacgggtgtggctgtgttcctgggtgtgtctttcttcatcctttctctcatccttgagtacacctggcttgaggctgtcatcttcctcatcggtatcatcgtagccaatgtgccggaaggtttgctggccactgtcacggtctgtctgacacttactgccaaacgcatggcaaggaaaaactgcttagtgaagaacttagaagctgtggagaccttggggtccacgtccaccatctgctctgataaaactggaactctgactcagaaccggatgacagtggcccacatgtggtttgacaatcaaatccatgaagctgatacgacagagaatcagagtggtgtctcttttgacaagacttcagctacctggcttgctctgtccagaattgcaggtctttgtaacagggcagtgtttcaggctaaccaggaaaacctacctattcttaagcgggcagttgcaggagatgcctctgagtcagcactcttaaagtgcatagagctgtgctgtggttccgtgaaggagatgagagaaagatacgccaaaatcgtcgagatacccttcaactccaccaacaagtaccagttgtctattcataagaaccccaacacatcggagccccaacacctgttggtgatgaagggcgccccagaaaggatcctagaccgttgcagctctatcctcctccacggcaaggagcagcccctggatgaggagctgaaagacgcctttcagaacgcctatttggagctggggggcctcggagaacgagtcctaggtttctgccacctctttctgccagatgaacagtttcctgaagggttccagtttgacactgacgatgtgaatttccctatcgataatctgtgctttgttgggctcatctccatgattgaccctccacgggcggccgttcctgatgccgtgggcaaatgtcgaagtgctggaattaaggtcatcatggtcacaggagaccatccaatcacagctaaagctattgccaaaggtgtgggcatcatctcagaaggcaatgagaccgtggaagacattgctgcccgcctcaacatcccagtcagccaggtgaaccccagggatgccaaggcctgcgtagtacacggcagtgatctaaaggacatgacctccgagcagctggatgacattttgaagtaccacactgagatagtgtttgccaggacctcccctcagcagaagctcatcattgtggaaggctgccaaagacagggtgctatcgtggctgtgactggtgacggtgtgaatgactctccagctttgaagaaagcagacattggggttgctatggggattgctggctcagatgtgtccaagcaagctgctgacatgattcttctggatgacaactttgcctcaattgtgactggagtagaggaaggtcgtctgatctttgataacttgaagaaatccattgcttataccttaaccagtaacattcccgagatcaccccgttcctgatatttattattgcaaacattccactaccactggggactgtcaccatcctctgcattgacttgggcactgacatggttcctgccatctccctggcttatgagcaggctgagagtgacatcatgaagagacagcccagaaatcccaaaacagacaaacttgtgaatgagcggctgatcagcatggcctatgggcagattggaatgatccaggccctgggaggcttctttacttactttgtgattctggctgagaacggcttcctcccaattcacctgttgggcctccgagtggactgggatgaccgctggatcaacgatgtggaagacagctacgggcagcagtggacctatgagcagaggaaaatcgtggagttcacctgccacacagccttcttcgtcagtatcgtggtggtgcagtgggccgacttggtcatctgtaagaccaggaggaattcggtcttccagcaggggatgaagaacaagatcttgatatttggcctctttgaagagacagccctggctgctttcctttcctactgccctggaatgggtgttgctcttaggatgtatcccctcaaacctacctggtggttctgtgccttcccctactctcttctcatcttcgtatatgacgaagtcagaaaactcatcatcaggcgacgccctggcggctgggtggagaaggaaacctactattagccccccgtcctgcacgccgtggagcatcaggccacacactctgcatccgacacccaccccctctttgtgtacttcagtcttggagtttggaactctaccctggtaggaaagcaccgcagcatgtggggaagcaagacgtcctggaatgaagcatgtagctctatggggggaggggggagggctgcctgaaaaccatccatctgtggaaatgacagcggggaaggtttttatgtgcctttttgtttttgtaaaaaaggaacacccggaaagactgaaagaatacattttatatctggatttttacaaataaagatggctattataatgg

SEQ ID NO: 1830 - DNA, 3763 bp, Homo sapiens
  source 1..3763: mol_type = unassigned DNA
agcagcgggggcggccccgggactgagccggcatccctgagcctggctcccctccctgcgaccgccgtcacctccttctccttccttttccctccgccctccgtgccctgaggaaaggcgcgctcctccccttcccctggggcgctccgccggggcctcctcccgggcctccgttcccgccgcggccccggttccggcgggggcagcctccgggttcggggctccttctcctggggacgctggggcttagcttgctccgcgcagaggcggccgccctcccccaaagaaaaaactggctgcttctaagtgcgaagccggctgggcgggctggtgccagaaagggtgtgtcttcactgccctaagatggcctttaaggttggacgtgataagtatgagcctgcagctgtttcagaacaaggtgataaaaagggcaaaaagggcaaaaaagacagggacatggatgaactgaagaaagaagtttctatggatgatcataaacttagccttgatgaacttcatcgtaaatatggaacagacttgagccggggattaacatctgctcgtgcagctgagatcctggcgcgagatggtcccaacgccctcactccccctcccactactcctgaatggatcaagttttgtcggcagctctttggggggttctcaatgttactgtggattggagcgattctttgtttcttggcttatagcatccaagctgctacagaagaggaacctcaaaacgataatctgtacctgggtgtggtgctatcagccgttgtaatcataactggttgcttctcctactatcaagaagctaaaagttcaaagatcatggaatccttcaaaaacatggtccctcagcaagcccttgtgattcgaaatggtgagaaaatgagcataaatgcggaggaagttgtggttggggatctggtggaagtaaaaggaggagaccgaattcctgctgacctcagaatcatatctgcaaatggctgcaaggtggataactcctcgctcactggtgaatcagaaccccagactaggtctccagatttcacaaatgaaaaccccctggagacgaggaacattgccttcttttcaaccaattgtgttgaaggcaccgcacgtggtattgttgtctacactggggatcgcactgtgatgggaagaattgccacacttgcttctgggctggaaggaggccagacccccattgctgcagaaattgaacattttatccacatcatcacgggtgtggctgtgttcctgggtgtgtctttcttcatcctttctctcatccttgagtacacctggcttgaggctgtcatcttcctcatcggtatcatcgtagccaatgtgccggaaggtttgctggccactgtcacggtctgtctgacacttactgccaaacgcatggcaaggaaaaactgcttagtgaagaacttagaagctgtggagaccttggggtccacgtccaccatctgctctgataaaactggaactctgactcagaaccggatgacagtggcccacatgtggtttgacaatcaaatccatgaagctgatacgacagagaatcagagtggtgtctcttttgacaagacttcagctacctggcttgctctgtccagaattgcaggtctttgtaacagggcagtgtttcaggctaaccaggaaaacctacctattcttaagcgggcagttgcaggagatgcctctgagtcagcactcttaaagtgcatagagctgtgctgtggttccgtgaaggagatgagagaaagatacgccaaaatcgtcgagatacccttcaactccaccaacaagtaccagttgtctattcataagaaccccaacacatcggagccccaacacctgttggtgatgaagggcgccccagaaaggatcctagaccgttgcagctctatcctcctccacggcaaggagcagcccctggatgaggagctgaaagacgcctttcagaacgcctatttggagctggggggcctcggagaacgagtcctaggtttctgccacctctttctgccagatgaacagtttcctgaagggttccagtttgacactgacgatgtgaatttccctatcgataatctgtgctttgttgggctcatctccatgattgaccctccacgggcggccgttcctgatgccgtgggcaaatgtcgaagtgctggaattaaggtcatcatggtcacaggagaccatccaatcacagctaaagctattgccaaaggtgtgggcatcatctcagaaggcaatgagaccgtggaagacattgctgcccgcctcaacatcccagtcagccaggtgaaccccagggatgccaaggcctgcgtagtacacggcagtgatctaaaggacatgacctccgagcagctggatgacattttgaagtaccacactgagatagtgtttgccaggacctcccctcagcagaagctcatcattgtggaaggctgccaaagacagggtgctatcgtggctgtgactggtgacggtgtgaatgactctccagctttgaagaaagcagacattggggttgctatggggattgctggctcagatgtgtccaagcaagctgctgacatgattcttctggatgacaactttgcctcaattgtgactggagtagaggaaggtcgtctgatctttgataacttgaagaaatccattgcttataccttaaccagtaacattcccgagatcaccccgttcctgatatttattattgcaaacattccactaccactggggactgtcaccatcctctgcattgacttgggcactgacatggttcctgccatctccctggcttatgagcaggctgagagtgacatcatgaagagacagcccagaaatcccaaaacagacaaacttgtgaatgagcggctgatcagcatggcctatgggcagattggaatgatccaggccctgggaggcttctttacttactttgtgattctggctgagaacggcttcctcccaattcacctgttgggcctccgagtggactgggatgaccgctggatcaacgatgtggaagacagctacgggcagcagtggacctatgagcagaggaaaatcgtggagttcacctgccacacagccttcttcgtcagtatcgtggtggtgcagtgggccgacttggtcatctgtaagaccaggaggaattcggtcttccagcaggggatgaagaacaagatcttgatatttggcctctttgaagagacagccctggctgctttcctttcctactgccctggaatgggtgttgctcttaggatgtatcccctcaaacctacctggtggttctgtgccttcccctactctcttctcatcttcgtatatgacgaagtcagaaaactcatcatcaggcgacgccctggcggctgggtggagaaggaaacctactattagccccccgtcctgcacgccgtggagcatcaggccacacactctgcatccgacacccaccccctctttgtgtacttcagtcttggagtttggaactctaccctggtaggaaagcaccgcagcatgtggggaagcaagacgtcctggaatgaagcatgtagctctatggggggaggggggagggctgcctgaaaaccatccatctgtggaaatgacagcggggaaggtttttatgtgcctttttgtttttgtaaaaaaggaacacccggaaagactgaaagaatacattttatatctggatttttacaaataaagatggctattataatgg

SEQ ID NO: 1831 - DNA, 3114 bp, Homo sapiens
  source 1..3114: mol_type = unassigned DNA
ctctgtctgccagggtctccgactgtcccagacgggctggtgtgggcttgggatcctcctggtgacctctcccgctaaggtccctcagccactctgccccaagatgggccgtggggctggccgtgagtactcacctgccgccaccacggcagagaatgggggcggcaagaagaaacagaaggagaaggaactggatgagctgaagaaggaggtggcaatggatgaccacaagctgtccttggatgagctgggccgcaaataccaagtggacctgtccaagggcctcaccaaccagcgggctcaggacgttctggctcgagatgggcccaacgccctcacaccacctcccacaacccctgagtgggtcaagttctgccgtcagcttttcggggggttctccatcctgctgtggattggggctatcctctgcttcctggcctacggcatccaggctgccatggaggatgaaccatccaacgacaatctatatctgggtgtggtgctggcagctgtggtcattgtcactggctgcttctcctactaccaggaggccaagagctccaagatcatggattccttcaagaacatggtacctcagcaagcccttgtgatccgggagggagagaagatgcagatcaacgcagaggaagtggtggtgggagacctggtggaggtgaagggtggagaccgcgtccctgctgacctccggatcatctcttctcatggctgtaaggtggataactcatccttaacaggagagtcggagccccagacccgctcccccgagttcacccatgagaaccccctggagacccgcaatatctgtttcttctccaccaactgtgttgaaggcactgccaggggcattgtgattgccacaggagaccggacggtgatgggccgcatagctactctcgcctcaggcctggaggttgggcggacacccatagcaatggagattgaacacttcatccagctgatcacaggggtcgctgtattcctgggggtctccttcttcgtgctctccctcatcctgggctacagctggctggaggcagtcatcttcctcatcggcatcatagtggccaacgtgcctgaggggcttctggccactgtcactgtgtgcctgaccctgacagccaagcgcatggcacggaagaactgcctggtgaagaacctggaggcggtggagacgctgggctccacgtccaccatctgctcggacaagacgggcaccctcacccagaaccgcatgaccgtcgcccacatgtggttcgacaaccaaatccatgaggctgacaccaccgaagatcagtctggggccacttttgacaaacgatcccctacgtggacggccctgtctcgaattgctggtctctgcaaccgcgccgtcttcaaggcaggacaggagaacatctccgtgtctaagcgggacacagctggtgatgcctctgagtcagctctgctcaagtgcattgagctctcctgtggctcagtgaggaaaatgagagacagaaaccccaaggtggcagagattcctttcaactctaccaacaagtaccagctgtctatccacgagcgagaagacagcccccagagccacgtgctggtgatgaagggggccccagagcgcattctggaccggtgctccaccatcctggtgcagggcaaggagatcccgctcgacaaggagatgcaagatgcctttcaaaatgcctacatggagctggggggacttggggagcgtgtgctgggattctgtcaactgaatctgccatctggaaagtttcctcggggcttcaaattcgacacggatgagctgaactttcccacggagaagctttgctttgtggggctcatgtctatgattgaccctccccgggctgctgtgccagatgctgtgggcaagtgccgaagcgcaggcatcaaggtgatcatggtaaccggggatcaccctatcacagccaaggccattgccaaaggcgtgggcatcatatcagagggtaacgagactgtggaggacattgcagcccggctcaacattcccatgagtcaagtcaaccccagagaagccaaggcatgcgtggtgcacggctctgacctgaaggacatgacatcggagcagctcgatgagatcctcaagaaccacacagagatcgtctttgctcgaacgtctccccagcagaagctcatcattgtggagggatgtcagaggcagggagccattgtggccgtgacgggtgacggggtgaacgactcccctgcattgaagaaggctgacattggcattgccatgggcatctctggctctgacgtctctaagcaggcagccgacatgatcctgctggatgacaactttgcctccatcgtcacgggggtggaggagggccgcctgatctttgacaacttgaagaaatccatcgcctacaccctgaccagcaacatccccgagatcacccccttcctgctgttcatcattgccaacatccccctacctctgggcactgtgaccatcctttgcattgacctgggcacagatatggtccctgccatctccttggcctatgaggcagctgagagtgatatcatgaagcggcagccacgaaactcccagacggacaagctggtgaatgagaggctcatcagcatggcctacggacagatcgggatgatccaggcactgggtggcttcttcacctactttgtgatcctggcagagaacggtttcctgccatcacggctactgggaatccgcctcgactgggatgaccggaccatgaatgatctggaggacagctatggacaggagtggacctatgagcagcggaaggtggtggagttcacgtgccacacggcattctttgccagcatcgtggtggtgcagtgggctgacctcatcatctgcaagacccgccgcaactcagtcttccagcagggcatgaagtgagtgcccacccccatggcacctacccacccaggctctgggcacactcaccaacccacacaggccaagcttccaactcagccctggaccagagctgtaaggagggcatcagattttaatcttccatctgtatatccatagataggtttcatatagaagagagaagccat

SEQ ID NO: 1832 - DNA, 481 bp, Homo sapiens
  source 1..481: mol_type = unassigned DNA
gtctgccagggtctccgactgtcccagacgggctggtgtgggcttgggatcctcctggtgacctctcccgctaaggtccctcagccactctgccccaagatgggccgtggggctggccgtgagtactcacctgccgccaccacggcagagaatgggggcggcaagaagaaacagaaggagaaggaactggatgagctgaagaaggaggtggcaatggtgagggaactgctgggccatggaggaggggccccatgctgggagagctgtccctgcagcccattgcactcagagaaactccgtgtcccccatgctgctcaactcacccctgtgccctgcagtaccctcatatgcatcttagatacctcctccccaaagtaactcaccctcccttccccaggatgaccacaagctgtccttggatgagctgggccgcaaataccaagtggacctgtccaaggtgagtggaggggcttctagggaa

SEQ ID NO: 1833 - DNA, 5421 bp, Homo sapiens
  source 1..5421: mol_type = unassigned DNA
gtctccgactgtcccagacgggctggtgtgggcttgggatcctcctggtgacctctcccgctaaggtccctcagccactctgccccaagatgggccgtggggctggccgtgagtactcacctgccgccaccacggcagagaatgggggcggcaagaagaaacagaaggagaaggaactggatgagctgaagaaggaggtggcaatggatgaccacaagctgtccttggatgagctgggccgcaaataccaagtggacctgtccaagggcctcaccaaccagcgggctcaggacgttctggctcgagatgggcccaacgccctcacaccacctcccacaacccctgagtgggtcaagttctgccgtcagcttttcggggggttctccatcctgctgtggattggggctatcctctgcttcctggcctacggcatccaggctgccatggaggatgaaccatccaacgacaatctatatctgggtgtggtgctggcagctgtggtcattgtcactggctgcttctcctactaccaggaggccaagagctccaagatcatggattccttcaagaacatggtacctcagcaagcccttgtgatccgggagggagagaagatgcagatcaacgcagaggaagtggtggtgggagacctggtggaggtgaagggtggagaccgcgtccctgctgacctccggatcatctcttctcatggctgtaaggtggataactcatccttaacaggagagtcggagccccagacccgctcccccgagttcacccatgagaaccccctggagacccgcaatatctgtttcttctccaccaactgtgttgaaggcactgccaggggcattgtgattgccacaggagaccggacggtgatgggccgcatagctactctcgcctcaggcctggaggttgggcggacacccatagcaatggagattgaacacttcatccagctgatcacaggggtcgctgtattcctgggggtctccttcttcgtgctctccctcatcctgggctacagctggctggaggcagtcatcttcctcatcggcatcatagtggccaacgtgcctgaggggcttctggccactgtcactgtgtgcctgaccctgacagccaagcgcatggcacggaagaactgcctggtgaagaacctggaggcggtggagacgctgggctccacgtccaccatctgctcggacaagacgggcaccctcacccagaaccgcatgaccgtcgcccacatgtggttcgacaaccaaatccatgaggctgacaccaccgaagatcagtctggggccacttttgacaaacgatcccctacgtggacggccctgtctcgaattgctggtctctgcaaccgcgccgtcttcaaggcaggacaggagaacatctccgtgtctaagcgggacacagctggtgatgcctctgagtcagctctgctcaagtgcattgagctctcctgtggctcagtgaggaaaatgagagacagaaaccccaaggtggcagagattcctttcaactctaccaacaagtaccagctgtctatccacgagcgagaagacagcccccagagccacgtgctggtgatgaagggggccccagagcgcattctggaccggtgctccaccatcctggtgcagggcaaggagatcccgctcgacaaggagatgcaagatgcctttcaaaatgcctacatggagctggggggacttggggagcgtgtgctgggattctgtcaactgaatctgccatctggaaagtttcctcggggcttcaaattcgacacggatgagctgaactttcccacggagaagctttgctttgtggggctcatgtctatgattgaccctccccgggctgctgtgccagatgctgtgggcaagtgccgaagcgcaggcatcaaggtgatcatggtaaccggggatcaccctatcacagccaaggccattgccaaaggcgtgggcatcatatcagagggtaacgagactgtggaggacattgcagcccggctcaacattcccatgagtcaagtcaaccccagagaagccaaggcatgcgtggtgcacggctctgacctgaaggacatgacatcggagcagctcgatgagatcctcaagaaccacacagagatcgtctttgctcgaacgtctccccagcagaagctcatcattgtggagggatgtcagaggcagggagccattgtggccgtgacgggtgacggggtgaacgactcccctgcattgaagaaggctgacattggcattgccatgggcatctctggctctgacgtctctaagcaggcagccgacatgatcctgctggatgacaactttgcctccatcgtcacgggggtggaggagggccgcctgatctttgacaacttgaagaaatccatcgcctacaccctgaccagcaacatccccgagatcacccccttcctgctgttcatcattgccaacatccccctacctctgggcactgtgaccatcctttgcattgacctgggcacagatatggtccctgccatctccttggcctatgaggcagctgagagtgatatcatgaagcggcagccacgaaactcccagacggacaagctggtgaatgagaggctcatcagcatggcctacggacagatcgggatgatccaggcactgggtggcttcttcacctactttgtgatcctggcagagaacggtttcctgccatcacggctactgggaatccgcctcgactgggatgaccggaccatgaatgatctggaggacagctatggacaggagtggacctatgagcagcggaaggtggtggagttcacgtgccacacggcattctttgccagcatcgtggtggtgcagtgggctgacctcatcatctgcaagacccgccgcaactcagtcttccagcagggcatgaagaacaagatcctgatttttgggctcctggaggagacggcgttggctgcctttctctcttactgcccaggcatgggtgtagccctccgcatgtacccgctcaaagtcacctggtggttctgcgccttcccctacagcctcctcatcttcatctatgatgaggtccgaaagctcatcctgcggcggtatcctggtggctgggtggagaaggagacatactactgaccccattggaagaagaaccaggcatggaaagatggggagctctggaggtgttgtggggatggtgatggagagggatggaaataacgggtggcattgggtggcaacatttggggagagataatgaggcaactcagcaggctaagttgcggggtatataaattggggtgatgaccccatagacctaactgtgaacaatcagattagacactatgtgttagagtccccccgaccagatccttttccatcccactccactatgttgtctattttttctgaggaattaagggttaccccaccctgcccactcccatcccttcaaccccacttcctactgtaatagatcagcatccaaaagcaggaacccatctaaaccagaaggaagccctctcagatcaccccagcctcactccatttcccacttccacccccgttagcttcctgcaggactctatccctggcttccccttcagaccttgcaatcacaaaaggttcttctggtgagtgcaagagcctgagactggaaaaggtggacttgtctcccagtcgaggctggtaagggaccttcagggagagctgggcagacaggtgggagatggaggtagggctggctggaggaaggaaacaacaaaggaagtgaggtagtgccaatgacaggacatttgacatgagtctccagatagatgtcgtggactccagctctacgtcccacattttagaataccccaccagcagaacaaactcagatctcatcagggtagcagcagaggcaggaccagaaggcaatcaagagcttccagaaatgccacacttgtgtgccacagagttccccgctgacccttggttaggggtcctcttagtccacaaggtccggatgtcactcatgtacttaataacacttcaccttctgtaatactaagtcctcagagctccatgctgttctgaaagggatggccacaagttctttcccagcctcttccattccctttcttttcatgcccatcccgatgaacctgcatcattccccgacactgccaagccaaccctggaaaaggagttcgctggccattggctagaatcagggtggagaagttccctgaaccttcctgtctcccagggacatgtatgcttccagggacaagcttaggtcatgaacatggtcagaacctttggacaagaggaaaaatactaagagatttgctttttctgggtgcggtggctcatgcctgtaatcccagcactttgggaggccgaggcaggtggatcatgaggtcaggagttcgaggcgagcctggccaacatggtgaaaccctgtctctactaaaagtacaaaaaattagccagtcatggtggcacacgcctgtaatctcagctactcaggaggctgaggcaggagaattgcttgaacctgtgaggaagaggttgcagtgagctgagatcgtgccattacactccagcctgggcgaaagggtgagactccatctcaaaaaaaaaaaaaatgatttgcttttgacgtcttaggtggcagggctgttccctccaggcaaatgcccttcaaaccgacgatcattgtgcccacttaccctgggctggagagttggtttcaggttcctacaggagatagctttctttcccttactccctatctaacacttttgctctgcaggcagccttgcccattctctaagcctggcttagaaggcactgggaatgtcctgtagagagagacctagataggtcatgcaagtgagaaagacatctgaggaaaatggaagacctaaggcagacaggaaggaagcacaaaagacaagcattgggtcagacccataaaccacctcccaaaggctgtcatttcattgcactggaattttgctttatcagaagcaaggaagtaagggagtcattgccttgggcctgggaatctaagtgggagacaatattaatttggatccgattaattggagattactaactgtggacaaaagtttatctttgcacaatcaataaaaatggcatttttttagtaaattaagagcataaacaatattgctagaggtggcatgtttagtctaccaaaaacaatacttttcaggcactttagaaatatccttttagaagcagcgagtgcatgggctaattatcatcaatctttatgtatttgttaaagaaacatctacaggatctttattggtgaccttttgtaagacattagtttgaggtactacctatgtacttgaaaataataaagtggcatttctttatgaaaaaaaaa

SEQ ID NO: 1834 - DNA, 3338 bp, Homo sapiens
  source 1..3338: mol_type = unassigned DNA
ccgactgtcccagacgggctggtgtgggcttgggatcctcctggtgacctctcccgctaaggtccctcagccactctgccccaagatgggccgtggggctggccgtgagtactcacctgccgccaccacggcagagaatgggggcggcaagaagaaacagaaggagaaggaactggatgagctgaagaaggaggtggcaatggatgaccacaagctgtccttggatgagctgggccgcaaataccaagtggacctgtccaagggcctcaccaaccagcgggctcaggacgttctggctcgagatgggcccaacgccctcacaccacctcccacaacccctgagtgggtcaagttctgccgtcagcttttcggggggttctccatcctgctgtggattggggctatcctctgcttcctggcctacggcatccaggctgccatggaggatgaaccatccaacgacaatctatatctgggtgtggtgctggcagctgtggtcattgtcactggctgcttctcctactaccaggaggccaagagctccaagatcatggattccttcaagaacatggtacctcagcaagcccttgtgatccgggagggagagaagatgcagatcaacgcagaggaagtggtggtgggagacctggtggaggtgaagggtggagaccgcgtccctgctgacctccggatcatctcttctcatggctgtaaggtggataactcatccttaacaggagagtcggagccccagacccgctcccccgagttcacccatgagaaccccctggagacccgcaatatctgtttcttctccaccaactgtgttgaaggcactgccaggggcattgtgattgccacaggagaccggacggtgatgggccgcatagctactctcgcctcaggcctggaggttgggcggacacccatagcaatggagattgaacacttcatccagctgatcacaggggtcgctgtattcctgggggtctccttcttcgtgctctccctcatcctgggctacagctggctggaggcagtcatcttcctcatcggcatcatagtggccaacgtgcctgaggggcttctggccactgtcactgtgtgcctgaccctgacagccaagcgcatggcacggaagaactgcctggtgaagaacctggaggcggtggagacgctgggctccacgtccaccatctgctcggacaagacgggcaccctcacccagaaccgcatgaccgtcgcccacatgtggttcgacaaccaaatccatgaggctgacaccaccgaagatcagtctggggccacttttgacaaacgatcccctacgtggacggccctgtctcgaattgctggtctctgcaaccgcgccgtcttcaaggcaggacaggagaacatctccgtgtctaagcgggacacagctggtgatgcctctgagtcagctctgctcaagtgcattgagctctcctgtggctcagtgaggaaaatgagagacagaaaccccaaggtggcagagattcctttcaactctaccaacaagtaccagctgtctatccacgagcgagaagacagcccccagagccacgtgctggtgatgaagggggccccagagcgcattctggaccggtgctccaccatcctggtgcagggcaaggagatcccgctcgacaaggagatgcaagatgcctttcaaaatgcctacatggagctggggggacttggggagcgtgtgctgggattctgtcaactgaatctgccatctggaaagtttcctcggggcttcaaattcgacacggatgagctgaactttcccacggagaagctttgctttgtggggctcatgtctatgattgaccctccccgggctgctgtgccagatgctgtgggcaagtgccgaagcgcaggcatcaaggtgatcatggtaaccggggatcaccctatcacagccaaggccattgccaaaggcgtgggcatcatatcagagggtaacgagactgtggaggacattgcagcccggctcaacattcccatgagtcaagtcaaccccagagaagccaaggcatgcgtggtgcacggctctgacctgaaggacatgacatcggagcagctcgatgagatcctcaagaaccacacagagatcgtctttgctcgaacgtctccccagcagaagctcatcattgtggagggatgtcagaggcagggagccattgtggccgtgacgggtgacggggtgaacgactcccctgcattgaagaaggctgacattggcattgccatgggcatctctggctctgacgtctctaagcaggcagccgacatgatcctgctggatgacaactttgcctccatcgtcacgggggtggaggagggccgcctgatctttgacaacttgaagaaatccatcgcctacaccctgaccagcaacatccccgagatcacccccttcctgctgttcatcattgccaacatccccctacctctgggcactgtgaccatcctttgcattgacctgggcacagatatggtccctgccatctccttggcctatgaggcagctgagagtgatatcatgaagcggcagccacgaaactcccagacggacaagctggtgaatgagaggctcatcagcatggcctacggacagatcgggatgatccaggcactgggtggcttcttcacctactttgtgatcctggcagagaacggtttcctgccatcacggctactgggaatccgcctcgactgggatgaccggaccatgaatgatctggaggacagctatggacaggagtggacctatgagcagcggaaggtggtggagttcacgtgccacacggcattctttgccagcatcgtggtggtgcagtgggctgacctcatcatctgcaagacccgccgcaactcagtcttccagcagggcatgaagaacaagatcctgatttttgggctcctggaggagacggcgttggctgcctttctctcttactgcccaggcatgggtgtagccctccgcatgtacccgctcaacctcctcatcttcatctatgatgaggtccgaaagctcatcctgcggcggtatcctggtggctgggtggagaaggagacatactactgaccccattggaagaagaaccaggcatggaaagatggggagctctggaggtgttgtggggatggtgatggagagggatggaaataacgggtggcattgggtggcaacatttggggagagataatgaggcaactcagcaggctaagttgcggggtatataaattggggtgatgaccccatagacctaactgtgaacaatcagattagacactatgtgttagagtcc

SEQ ID NO: 1835 - DNA, 641 bp, Homo sapiens
  source 1..641: mol_type = unassigned DNA
gtgctggcagctgtggtcattgtcactggctgcttctcctactaccaggaggccaagagctccaagatcatggattccttcaagaacatggtacctcagcaagcccttgtgatccgggagggagagaagatgcagatcaacgcagaggaagtggtggtgggagacctggtggaggtgaagggtggagaccgcgtccctgctgacctccggatcatctcttctcatggctgtaaggtggataactcatccttaacaggagagtcggagccccagacccgctcccccgagttcacccatgagaaccccctggagacccgcaatatctgtttcttctccaccaactgtgttgaaggtgagaagccaggctgccccctgtaggaaagagtctgaatcctgaatccatagtcaggatgaagggctctggtagtacttacctggcaaaagctctgccattggtggggcaattgaggggtcagggggccctgaatattatggaaacaccctccacagagcagggtattgactgagggcagcctgactccatgggaaatgtatctcccttccccagggagatctctgttctgtccaccccaagactgagtggatttcaaagctttcaggtattgggttaagaacccctt

SEQ ID NO: 1836 - DNA, 4413 bp, Homo sapiens
  source 1..4413: mol_type = unassigned DNA
tccagctgatcacaggggtcgctgtattcctgggggtctccttcttcgtgctctccctcatcctgggctacagctggctggaggcagtcatcttcctcatcggcatcatagtggccaacgtgcctgaggggcttctggccactgtcactgtgtgcctgaccctgacagccaagcgcatggcacggaagaactgcctggtgaagaacctggaggcggtggagacgctgggctccacgtccaccatctgctcggacaagacgggcaccctcacccagaaccgcatgaccgtcgcccacatgtggttcgacaaccaaatccatgaggctgacaccaccgaagatcagtctggggccacttttgacaaacgatcccctacgtggacggccctgtctcgaattgctggtctctgcaaccgcgccgtcttcaaggcaggacaggagaacatctccgtgtctaagcgggacacagctggtgatgcctctgagtcagctctgctcaagtgcattgagctctcctgtggctcagtgaggaaaatgagagacagaaaccccaaggtggcagagattcctttcaactctaccaacaagtaccagctgtctatccacgagcgagaagacagcccccagagccacgtgctggtgatgaagggggccccagagcgcattctggaccggtgctccaccatcctggtgcagggcaaggagatcccgctcgacaaggagatgcaagatgcctttcaaaatgcctacatggagctggggggacttggggagcgtgtgctgggattctgtcaactgaatctgccatctggaaagtttcctcggggcttcaaattcgacacggatgagctgaactttcccacggagaagctttgctttgtggggctcatgtctatgattgaccctccccgggctgctgtgccagatgctgtgggcaagtgccgaagcgcaggcatcaaggtgatcatggtaaccggggatcaccctatcacagccaaggccattgccaaaggcgtgggcatcatatcagagggtaacgagactgtggaggacattgcagcccggctcaacattcccatgagtcaagtcaaccccagagaagccaaggcatgcgtggtgcacggctctgacctgaaggacatgacatcggagcagctcgatgagatcctcaagaaccacacagagatcgtctttgctcgaacgtctccccagcagaagctcatcattgtggagggatgtcagaggcagggagccattgtggccgtgacgggtgacggggtgaacgactcccctgcattgaagaaggctgacattggcattgccatgggcatctctggctctgacgtctctaagcaggcagccgacatgatcctgctggatgacaactttgcctccatcgtcacgggggtggaggagggccgcctgatctttgacaacttgaagaaatccatcgcctacaccctgaccagcaacatccccgagatcacccccttcctgctgttcatcattgccaacatccccctacctctgggcactgtgaccatcctttgcattgacctgggcacagatatggtccctgccatctccttggcctatgaggcagctgagagtgatatcatgaagcggcagccacgaaactcccagacggacaagctggtgaatgagaggctcatcagcatggcctacggacagatcgagaacggtttcctgccatcacggctactgggaatccgcctcgactgggatgaccggaccatgaatgatctggaggacagctatggacaggagtggacctatgagcagcggaaggtggtggagttcacgtgccacacggcattctttgccagcatcgtggtggtgcagtgggctgacctcatcatctgcaagacccgccgcaactcagtcttccagcagggcatgaagaacaagatcctgatttttgggctcctggaggagacggcgttggctgcctttctctcttactgcccaggcatgggtgtagccctccgcatgtacccgctcaaagtcacctggtggttctgcgccttcccctacagcctcctcatcttcatctatgatgaggtccgaaagctcatcctgcggcggtatcctggtggctgggtggagaaggagacatactactgaccccattggaagaagaaccaggcatggaaagatggggagctctggaggtgttgtggggatggtgatggagagggatggaaataacgggtggcattgggtggcaacatttggggagagataatgaggcaactcagcaggctaagttgcggggtatataaattggggtgatgaccccatagacctaactgtgaacaatcagattagacactatgtgttagagtccccccgaccagatccttttccatcccactccactatgttgtctattttttctgaggaattaagggttaccccaccctgcccactcccatcccttcaaccccacttcctactgtaatagatcagcatccaaaagcaggaacccatctaaaccagaaggaagccctctcagatcaccccagcctcactccatttcccacttccacccccgttagcttcctgcaggactctatccctggcttccccttcagaccttgcaatcacaaaaggttcttctggtgagtgcaagagcctgagactggaaaaggtggacttgtctcccagtcgaggctggtaagggaccttcagggagagctgggcagacaggtgggagatggaggtagggctggctggaggaaggaaacaacaaaggaagtgaggtagtgccaatgacaggacatttgacatgagtctccagatagatgtcgtggactccagctctacgtcccacattttagaataccccaccagcagaacaaactcagatctcatcagggtagcagcagaggcaggaccagaaggcaatcaagagcttccagaaatgccacacttgtgtgccacagagttccccgctgacccttggttaggggtcctcttagtccacaaggtccggatgtcactcatgtacttaataacacttcaccttctgtaatactaagtcctcagagctccatgctgttctgaaagggatggccacaagttctttcccagcctcttccattccctttcttttcatgcccatcccgatgaacctgcatcattccccgacactgccaagccaaccctggaaaaggagttcgctggccattggctagaatcagggtggagaagttccctgaaccttcctgtctcccagggacatgtatgcttccagggacaagcttaggtcatgaacatggtcagaacctttggacaagaggaaaaatactaagagatttgctttttctgggtgcggtggctcatgcctgtaatcccagcactttgggaggccgaggcaggtggatcatgaggtcaggagttcgaggcgagcctggccaacatggtgaaaccctgtctctactaaaagtacaaaaaattagccagtcatggtggcacacgcctgtaatctcagctactcaggaggctgaggcaggagaattgcttgaacctgtgaggaagaggttgcagtgagctgagatcgtgccattacactccagcctgggcgaaagggtgagactccatctcaaaaaaaaaaaaaatgatttgcttttgacgtcttaggtggcagggctgttccctccaggcaaatgcccttcaaaccgacgatcattgtgcccacttaccctgggctggagagttggtttcaggttcctacaggagatagctttctttcccttactccctatctaacacttttgctctgcaggcagccttgcccattctctaagcctggcttagaaggcactgggaatgtcctgtagagagagacctagataggtcatgcaagtgagaaagacatctgaggaaaatggaagacctaaggcagacaggaaggaagcacaaaagacaagcattgggtcagacccataaaccacctcccaaaggctgtcatttcattgcactggaattttgctttatcagaagcaaggaagtaagggagtcattgccttgggcctgggaatctaagtgggagacaatattaatttggatccgattaattggagattactaactgtggacaaaagtttatctttgcacaatcaataaaaatggcatttttttagtaaattaagagcataaacaatattgctagaggtggcatgtttagtctaccaaaaacaatacttttcaggcactttagaaatatccttttagaagcagcgagtgcatgggctaattatcatcaatctttatgtatttgttaaagaaacatctacaggatctttattggtgaccttttgtaagacattagtttgaggtactacctatgtacttgaaaataataaagtggcatttctttatgaaaaaaaaa

SEQ ID NO: 1837 - DNA, 444 bp, Homo sapiens
  source 1..444: mol_type = unassigned DNA
gaccggaccatgaatgatctggaggacagctatggacaggagtggacctatgagcagcggaaggtggtggagttcacgtgccacacggcattctttgccagcatcgtggtggtgcagtgggctgacctcatcatctgcaagacccgccgcaactcagtcttccagcagggcatgaagaacaagatcctgatttttgggctcctggaggagacggcgttggctgcctttctctcttactgcccaggcatgggtgtagccctccgcatgtacccgctcaaagtcacctggtggttctgcgccttcccctacagcctcctcatcttcatctatgatgaggtccgaaagctcatcctgcggcggtatcctggtggtaagcccctccacattccccccagcaaagtgcaagccccaccaccagctcctccctccaggaccacacgcaga

SEQ ID NO: 1838 - DNA, 634 bp, Homo sapiens
  source 1..634: mol_type = unassigned DNA
gctcatcctgcggcggtatcctggtgaatggacagctgctcccttagactctcgttcgtcacctgaagaggccctgtgggcgtttgcattttcaccctcgacctattctgccccagcctccaatgtgctaaatacaagtctcccctaaaggctgggtggagaaggagacatactactgaccccattggaagaagaaccaggcatggaaagatggggagctctggaggtgttgtggggatggtgatggagagggatggaaataacgggtggcattgggtggcaacatttggggagagataatgaggcaactcagcaggctaagttgcggggtatataaattggggtgatgaccccatagacctaactgtgaacaatcagattagacactatgtgttagagtccccccgaccagatccttttccatcccactccactatgttgtctattttttctgaggaattaagggttaccccaccctgcccactcccatcccttcaaccccacttcctactgtaatagatcagcatccaaaagcaggaacccatctaaaccagaaggaagccctctcagatcaccccagcctcactccatttcccacttccacccccgttagcttcctgcaggactctatccc

SEQ ID NO: 1839 - DNA, 3818 bp, Homo sapiens
  source 1..3818: mol_type = unassigned DNA
gaccaacggacggacggacggacgcgcgcacctaccgaggcgcgggcgctgcagaggctcccagcccaagcctgagcctgagcccgccccgaggtccccgccccgcccgcctggctctctcgccgcggagccgccaagatgggggacaagaaagatgacaaggactcacccaagaagaacaagggcaaggagcgccgggacctggatgacctcaagaaggaggtggctatgacagagcacaagatgtcagtggaagaggtctgccggaaatacaacacagactgtgtgcagggtttgacccacagcaaagcccaggagatcctggcccgggatgggcctaacgcactcacgccaccgcctaccaccccagagtgggtcaagttttgccggcagctcttcgggggcttctccatcctgctgtggatcggggctatcctctgcttcctggcctacggtatccaggcgggcaccgaggacgacccctctggtgacaacctgtacctgggcatcgtgctggcggccgtggtgatcatcactggctgcttctcctactaccaggaggccaagagctccaagatcatggagtccttcaagaacatggtgccccagcaagccctggtgatccgggaaggtgagaagatgcaggtgaacgctgaggaggtggtggtcggggacctggtggagatcaagggtggagaccgagtgccagctgacctgcggatcatctcagcccacggctgcaaggtggacaactcctccctgactggcgaatccgagccccagactcgctctcccgactgcactcacgacaaccccttggagactcggaacatcaccttcttttccaccaactgtgtggaaggcacggctcggggcgtggtggtggccacgggcgaccgcactgtcatgggccgtatcgccaccctggcatcagggctggaggtgggcaagacgcccatcgccatcgagattgagcacttcatccagctcatcaccggcgtggctgtcttcctgggtgtctccttcttcatcctctccctcattctcggatacacctggcttgaggctgtcatcttcctcatcggcatcatcgtggccaatgtcccagagggtctgctggccactgtcactgtgtgtctgacgctgaccgccaagcgcatggcccggaagaactgcctggtgaagaacctggaggctgtagaaaccctgggctccacgtccaccatctgctcagataagacagggaccctcactcagaaccgcatgacagtcgcccacatgtggtttgacaaccagatccacgaggctgacaccactgaggaccagtcagggacctcatttgacaagagttcgcacacctgggtggccctgtctcacatcgctgggctctgcaatcgcgctgtcttcaagggtggtcaggacaacatccctgtgctcaagagggatgtggctggggatgcgtctgagtctgccctgctcaagtgcatcgagctgtcctctggctccgtgaagctgatgcgtgaacgcaacaagaaagtggctgagattcccttcaattccaccaacaaataccagctctccatccatgagaccgaggaccccaacgacaaccgatacctgctggtgatgaagggtgcccccgagcgcatcctggaccgctgctccaccatcctgctacagggcaaggagcagcctctggacgaggaaatgaaggaggccttccagaatgcctaccttgagctcggtggcctgggcgagcgcgtgcttggtttctgccattattacctgcccgaggagcagttccccaagggctttgccttcgactgtgatgacgtgaacttcaccacggacaacctctgctttgtgggcctcatgtccatgatcgacccaccccgggcagccgtccctgacgcggtgggcaagtgtcgcagcgcaggcatcaaggtcatcatggtcaccggcgatcaccccatcacggccaaggccattgccaagggtgtgggcatcatctctgagggcaacgagactgtggaggacatcgccgcccggctcaacattcccgtcagccaggttaacccccgggatgccaaggcctgcgtgatccacggcaccgacctcaaggacttcacctccgagcaaatcgacgagatcctgcagaatcacaccgagatcgtcttcgcccgcacatccccccagcagaagctcatcattgtggagggctgtcagagacagggtgcaattgtggctgtgaccggggatggtgtgaacgactcccccgctctgaagaaggccgacattggggtggccatgggcatcgctggctctgacgtctccaagcaggcagctgacatgatcctgctggacgacaactttgcctccatcgtcacaggggtggaggagggccgcctgatcttcgacaacctaaagaagtccattgcctacaccctgaccagcaatatcccggagatcacgcccttcctgctgttcatcatggccaacatcccgctgcccctgggcaccatcaccatcctctgcatcgatctgggcactgacatggtccctgccatctcactggcgtacgaggctgccgaaagcgacatcatgaagagacagcccaggaacccgcggacggacaaattggtcaatgagagactcatcagcatggcctacgggcagattggaatgatccaggctctcggtggcttcttctcttactttgtgatcctggcagaaaatggcttcttgcccggcaacctggtgggcatccggctgaactgggatgaccgcaccgtcaatgacctggaagacagttacgggcagcagtggacatacgagcagaggaaggtggtggagttcacctgccacacggccttctttgtgagcatcgttgtcgtccagtgggccgatctgatcatctgcaagacccggaggaactcggtcttccagcagggcatgaagaacaagatcctgatcttcgggctgtttgaggagacggccctggctgccttcctgtcctactgccccggcatggacgtggccctgcgcatgtaccctctcaagcccagctggtggttctgtgccttcccctacagtttcctcatcttcgtctacgacgaaatccgcaaactcatcctgcgcaggaacccagggggtgagggagctcggcaaggcagccgaggggggcggggggcagcagggtctcaggcagctggtcccaggctcccctcgccctgctggatggctctgccacctggttcccactcttctctctcttcccatctctccgggcacccactctgtcttctcacgggtctctgtctgtgtggtttccttgtctctctccctctctgtccctctctctgctgggcggctcgccttgcctgtctctctccatctcttactctgtctctttctttccttctttgtctctccaggttgggtggagaaggaaacctactactgacctcagccccaccacatcgcccatctcttccccgtcccccaggcccaggaccgcccctgtcagtccccccaattttgtattctggggggaggagccctctcttcctgtggccccaccttggcccccaccccctccactatctcctgccgcccccactctggctggcttctctcccctgccccaaacctctctcctctctcttttctgtgtcagtttctctccctctcctcacccctctatccattcctcccgccccagccacctccctgggctcttttttactccccttcagccccccggctgatgccatctctggttctggacaattatcaaatatatcagtggggagagagaa

SEQ ID NO: 1840 - DNA, 3597 bp, Homo sapiens
  source 1..3597: mol_type = unassigned DNA
tcccgcggacgcgggcatatgaggaggcggaggcggcggccgccgcagcctctgtgcggtgggaccaacggacggacggacggacgcgcgcacctaccgaggcgcgggcgctgcagaggctcccagcccaagcctgagcctgagcccgccccgaggtccccgccccgcccgcctggctctctcgccgcggagccgccaagatgggggacaagaaagatgacaaggactcacccaagaagaacaagggcaaggagcgccgggacctggatgacctcaagaaggaggtggctatgacagagcacaagatgtcagtggaagaggtctgccggaaatacaacacagactgtgtgcagggtttgacccacagcaaagcccaggagatcctggcccgggatgggcctaacgcactcacgccaccgcctaccaccccagagtgggtcaagttttgccggcagctcttcgggggcttctccatcctgctgtggatcggggctatcctctgcttcctggcctacggtatccaggcgggcaccgaggacgacccctctggtgacaacctgtacctgggcatcgtgctggcggccgtggtgatcatcactggctgcttctcctactaccaggaggccaagagctccaagatcatggagtccttcaagaacatggtgccccagcaagccctggtgatccgggaaggtgagaagatgcaggtgaacgctgaggaggtggtggtcggggacctggtggagatcaagggtggagaccgagtgccagctgacctgcggatcatctcagcccacggctgcaaggtggacaactcctccctgactggcgaatccgagccccagactcgctctcccgactgcactcacgacaaccccttggagactcggaacatcaccttcttttccaccaactgtgtggaaggcacggctcggggcgtggtggtggccacgggcgaccgcactgtcatgggccgtatcgccaccctggcatcagggctggaggtgggcaagacgcccatcgccatcgagattgagcacttcatccagctcatcaccggcgtggctgtcttcctgggtgtctccttcttcatcctctccctcattctcggatacacctggcttgaggctgtcatcttcctcatcggcatcatcgtggccaatgtcccagagggtctgctggccactgtcactgtgtgtctgacgctgaccgccaagcgcatggcccggaagaactgcctggtgaagaacctggaggctgtagaaaccctgggctccacgtccaccatctgctcagataagacagggaccctcactcagaaccgcatgacagtcgcccacatgtggtttgacaaccagatccacgaggctgacaccactgaggaccagtcagggacctcatttgacaagagttcgcacacctgggtggccctgtctcacatcgctgggctctgcaatcgcgctgtcttcaagggtggtcaggacaacatccctgtgctcaagagggatgtggctggggatgcgtctgagtctgccctgctcaagtgcatcgagctgtcctctggctccgtgaagctgatgcgtgaacgcaacaagaaagtggctgagattcccttcaattccaccaacaaataccagctctccatccatgagaccgaggaccccaacgacaaccgatacctgctggtgatgaagggtgcccccgagcgcatcctggaccgctgctccaccatcctgctacagggcaaggagcagcctctggacgaggaaatgaaggaggccttccagaatgcctaccttgagctcggtggcctgggcgagcgcgtgcttggtttctgccattattacctgcccgaggagcagttccccaagggctttgccttcgactgtgatgacgtgaacttcaccacggacaacctctgctttgtgggcctcatgtccatgatcgacccaccccgggcagccgtccctgacgcggtgggcaagtgtcgcagcgcaggcatcaaggtcatcatggtcaccggcgatcaccccatcacggccaaggccattgccaagggtgtgggcatcatctctgagggcaacgagactgtggaggacatcgccgcccggctcaacattcccgtcagccaggttaacccccgggatgccaaggcctgcgtgatccacggcaccgacctcaaggacttcacctccgagcaaatcgacgagatcctgcagaatcacaccgagatcgtcttcgcccgcacatccccccagcagaagctcatcattgtggagggctgtcagagacagggtgcaattgtggctgtgaccggggatggtgtgaacgactcccccgctctgaagaaggccgacattggggtggccatgggcatcgctggctctgacgtctccaagcaggcagctgacatgatcctgctggacgacaactttgcctccatcgtcacaggggtggaggagggccgcctgatcttcgacaacctaaagaagtccattgcctacaccctgaccagcaatatcccggagatcacgcccttcctgctgttcatcatggccaacatcccgctgcccctgggcaccatcaccatcctctgcatcgatctgggcactgacatggtccctgccatctcactggcgtacgaggctgccgaaagcgacatcatgaagagacagcccaggaacccgcggacggacaaattggtcaatgagagactcatcagcatggcctacgggcagattggaatgatccaggctctcggtggcttcttctcttactttgtgatcctggcagaaaatggcttcttgcccggcaacctggtgggcatccggctgaactgggatgaccgcaccgtcaatgacctggaagacagttacgggcagcagtggacatacgagcagaggaaggtggtggagttcacctgccacacggccttctttgtgagcatcgttgtcgtccagtgggccgatctgatcatctgcaagacccggaggaactcggtcttccagcagggcatgaagaacaagatcctgatcttcgggctgtttgaggagacggccctggctgccttcctgtcctactgccccggcatggacgtggccctgcgcatgtaccctctcaagcccagctggtggttctgtgccttcccctacagtttcctcatcttcgtctacgacgaaatccgcaaactcatcctgcgcaggaacccagggggttgggtggagaaggaaacctactactgacctcagccccaccacatcgcccatctcttccccgtcccccaggcccaggaccgcccctgtcagtccccccaattttgtattctggggggaggagccctctcttcctgtggccccaccttggcccccaccccctccactatctcctgccgcccccactctggctggcttctctcccctgccccaaacctctctcctctctcttttctgtgtcagtttctctccctctcctcacccctctatccattcctcccgccccagccacctccctgggctcttttttactccccttcagccccccggctgatgccatctctggttctggacaattatcaaatatatcagtggggagagagaa

SEQ ID NO: 1841 - DNA, 3458 bp, Homo sapiens
  source 1..3458: mol_type = unassigned DNA
aagatgggggtaggtgctgagccggctgggcgccgcttccgtgtgacattgtggggccggtgacattgggacaagaaagatgacaaggactcacccaagaagaacaagggcaaggagcgccgggacctggatgacctcaagaaggaggtggctatgacagagcacaagatgtcagtggaagaggtctgccggaaatacaacacagactgtgtgcagggtttgacccacagcaaagcccaggagatcctggcccgggatgggcctaacgcactcacgccaccgcctaccaccccagagtgggtcaagttttgccggcagctcttcgggggcttctccatcctgctgtggatcggggctatcctctgcttcctggcctacggtatccaggcgggcaccgaggacgacccctctggtgacaacctgtacctgggcatcgtgctggcggccgtggtgatcatcactggctgcttctcctactaccaggaggccaagagctccaagatcatggagtccttcaagaacatggtgccccagcaagccctggtgatccgggaaggtgagaagatgcaggtgaacgctgaggaggtggtggtcggggacctggtggagatcaagggtggagaccgagtgccagctgacctgcggatcatctcagcccacggctgcaaggtggacaactcctccctgactggcgaatccgagccccagactcgctctcccgactgcactcacgacaaccccttggagactcggaacatcaccttcttttccaccaactgtgtggaaggcacggctcggggcgtggtggtggccacgggcgaccgcactgtcatgggccgtatcgccaccctggcatcagggctggaggtgggcaagacgcccatcgccatcgagattgagcacttcatccagctcatcaccggcgtggctgtcttcctgggtgtctccttcttcatcctctccctcattctcggatacacctggcttgaggctgtcatcttcctcatcggcatcatcgtggccaatgtcccagagggtctgctggccactgtcactgtgtgtctgacgctgaccgccaagcgcatggcccggaagaactgcctggtgaagaacctggaggctgtagaaaccctgggctccacgtccaccatctgctcagataagacagggaccctcactcagaaccgcatgacagtcgcccacatgtggtttgacaaccagatccacgaggctgacaccactgaggaccagtcagggacctcatttgacaagagttcgcacacctgggtggccctgtctcacatcgctgggctctgcaatcgcgctgtcttcaagggtggtcaggacaacatccctgtgctcaagagggatgtggctggggatgcgtctgagtctgccctgctcaagtgcatcgagctgtcctctggctccgtgaagctgatgcgtgaacgcaacaagaaagtggctgagattcccttcaattccaccaacaaataccagctctccatccatgagaccgaggaccccaacgacaaccgatacctgctggtgatgaagggtgcccccgagcgcatcctggaccgctgctccaccatcctgctacagggcaaggagcagcctctggacgaggaaatgaaggaggccttccagaatgcctaccttgagctcggtggcctgggcgagcgcgtgcttggtttctgccattattacctgcccgaggagcagttccccaagggctttgccttcgactgtgatgacgtgaacttcaccacggacaacctctgctttgtgggcctcatgtccatgatcgacccaccccgggcagccgtccctgacgcggtgggcaagtgtcgcagcgcaggcatcaaggtcatcatggtcaccggcgatcaccccatcacggccaaggccattgccaagggtgtgggcatcatctctgagggcaacgagactgtggaggacatcgccgcccggctcaacattcccgtcagccaggttaacccccgggatgccaaggcctgcgtgatccacggcaccgacctcaaggacttcacctccgagcaaatcgacgagatcctgcagaatcacaccgagatcgtcttcgcccgcacatccccccagcagaagctcatcattgtggagggctgtcagagacagggtgcaattgtggctgtgaccggggatggtgtgaacgactcccccgctctgaagaaggccgacattggggtggccatgggcatcgctggctctgacgtctccaagcaggcagctgacatgatcctgctggacgacaactttgcctccatcgtcacaggggtggaggagggccgcctgatcttcgacaacctaaagaagtccattgcctacaccctgaccagcaatatcccggagatcacgcccttcctgctgttcatcatggccaacatcccgctgcccctgggcaccatcaccatcctctgcatcgatctgggcactgacatggtccctgccatctcactggcgtacgaggctgccgaaagcgacatcatgaagagacagcccaggaacccgcggacggacaaattggtcaatgagagactcatcagcatggcctacgggcagattggaatgatccaggctctcggtggcttcttctcttactttgtgatcctggcagaaaatggcttcttgcccggcaacctggtgggcatccggctgaactgggatgaccgcaccgtcaatgacctggaagacagttacgggcagcagtggacatacgagcagaggaaggtggtggagttcacctgccacacggccttctttgtgagcatcgttgtcgtccagtgggccgatctgatcatctgcaagacccggaggaactcggtcttccagcagggcatgaagaacaagatcctgatcttcgggctgtttgaggagacggccctggctgccttcctgtcctactgccccggcatggacgtggccctgcgcatgtaccctctcaagcccagctggtggttctgtgccttcccctacagtttcctcatcttcgtctacgacgaaatccgcaaactcatcctgcgcaggaacccagggggttgggtggagaaggaaacctactactgacctcagccccaccacatcgcccatctcttccccgtcccccaggcccaggaccgcccctgtcagtccccccaattttgtattctggggggaggagccctctcttcctgtggccccaccttggcccccaccccctccactatctcctgccgcccccactctggctggcttctctcccctgccccaaacctctctcctctctcttttctgtgtcagtttctctccctctcctcacccctctatccattcctcccgccccagccacctccctgggctcttttttactccccttcagccccccggctgatgccatctctggttctggacaattatcaaatatatcagtggggagagag

SEQ ID NO: 1842 - DNA, 3618 bp, Homo sapiens
  source 1..3618: mol_type = unassigned DNA
atatgaggaggcggaggcggcggccgccgcagcctctgtgcggtgggaccaacggacggacggacggacgcgcgcacctaccgaggcgcgggcgctgcagaggctcccagcccaagcctgagcctgagcccgccccgaggtccccgccccgcccgcctggctctctcgccgcggagccgccaagatggggtctggtggctctgacagctatcgtatcgccacctcgcaggacaagaaagatgacaaggactcacccaagaagaacaagggcaaggagcgccgggacctggatgacctcaagaaggaggtggctatgacagagcacaagatgtcagtggaagaggtctgccggaaatacaacacagactgtgtgcagggtttgacccacagcaaagcccaggagatcctggcccgggatgggcctaacgcactcacgccaccgcctaccaccccagagtgggtcaagttttgccggcagctcttcgggggcttctccatcctgctgtggatcggggctatcctctgcttcctggcctacggtatccaggcgggcaccgaggacgacccctctggtgacaacctgtacctgggcatcgtgctggcggccgtggtgatcatcactggctgcttctcctactaccaggaggccaagagctccaagatcatggagtccttcaagaacatggtgccccagcaagccctggtgatccgggaaggtgagaagatgcaggtgaacgctgaggaggtggtggtcggggacctggtggagatcaagggtggagaccgagtgccagctgacctgcggatcatctcagcccacggctgcaaggtggacaactcctccctgactggcgaatccgagccccagactcgctctcccgactgcactcacgacaaccccttggagactcggaacatcaccttcttttccaccaactgtgtggaaggcacggctcggggcgtggtggtggccacgggcgaccgcactgtcatgggccgtatcgccaccctggcatcagggctggaggtgggcaagacgcccatcgccatcgagattgagcacttcatccagctcatcaccggcgtggctgtcttcctgggtgtctccttcttcatcctctccctcattctcggatacacctggcttgaggctgtcatcttcctcatcggcatcatcgtggccaatgtcccagagggtctgctggccactgtcactgtgtgtctgacgctgaccgccaagcgcatggcccggaagaactgcctggtgaagaacctggaggctgtagaaaccctgggctccacgtccaccatctgctcagataagacagggaccctcactcagaaccgcatgacagtcgcccacatgtggtttgacaaccagatccacgaggctgacaccactgaggaccagtcagggacctcatttgacaagagttcgcacacctgggtggccctgtctcacatcgctgggctctgcaatcgcgctgtcttcaagggtggtcaggacaacatccctgtgctcaagagggatgtggctggggatgcgtctgagtctgccctgctcaagtgcatcgagctgtcctctggctccgtgaagctgatgcgtgaacgcaacaagaaagtggctgagattcccttcaattccaccaacaaataccagctctccatccatgagaccgaggaccccaacgacaaccgatacctgctggtgatgaagggtgcccccgagcgcatcctggaccgctgctccaccatcctgctacagggcaaggagcagcctctggacgaggaaatgaaggaggccttccagaatgcctaccttgagctcggtggcctgggcgagcgcgtgcttggtttctgccattattacctgcccgaggagcagttccccaagggctttgccttcgactgtgatgacgtgaacttcaccacggacaacctctgctttgtgggcctcatgtccatgatcgacccaccccgggcagccgtccctgacgcggtgggcaagtgtcgcagcgcaggcatcaaggtcatcatggtcaccggcgatcaccccatcacggccaaggccattgccaagggtgtgggcatcatctctgagggcaacgagactgtggaggacatcgccgcccggctcaacattcccgtcagccaggttaacccccgggatgccaaggcctgcgtgatccacggcaccgacctcaaggacttcacctccgagcaaatcgacgagatcctgcagaatcacaccgagatcgtcttcgcccgcacatccccccagcagaagctcatcattgtggagggctgtcagagacagggtgcaattgtggctgtgaccggggatggtgtgaacgactcccccgctctgaagaaggccgacattggggtggccatgggcatcgctggctctgacgtctccaagcaggcagctgacatgatcctgctggacgacaactttgcctccatcgtcacaggggtggaggagggccgcctgatcttcgacaacctaaagaagtccattgcctacaccctgaccagcaatatcccggagatcacgcccttcctgctgttcatcatggccaacatcccgctgcccctgggcaccatcaccatcctctgcatcgatctgggcactgacatggtccctgccatctcactggcgtacgaggctgccgaaagcgacatcatgaagagacagcccaggaacccgcggacggacaaattggtcaatgagagactcatcagcatggcctacgggcagattggaatgatccaggctctcggtggcttcttctcttactttgtgatcctggcagaaaatggcttcttgcccggcaacctggtgggcatccggctgaactgggatgaccgcaccgtcaatgacctggaagacagttacgggcagcagtggacatacgagcagaggaaggtggtggagttcacctgccacacggccttctttgtgagcatcgttgtcgtccagtgggccgatctgatcatctgcaagacccggaggaactcggtcttccagcagggcatgaagaacaagatcctgatcttcgggctgtttgaggagacggccctggctgccttcctgtcctactgccccggcatggacgtggccctgcgcatgtaccctctcaagcccagctggtggttctgtgccttcccctacagtttcctcatcttcgtctacgacgaaatccgcaaactcatcctgcgcaggaacccagggggttgggtggagaaggaaacctactactgacctcagccccaccacatcgcccatctcttccccgtcccccaggcccaggaccgcccctgtcagtccccccaattttgtattctggggggaggagccctctcttcctgtggccccaccttggcccccaccccctccactatctcctgccgcccccactctggctggcttctctcccctgccccaaacctctctcctctctcttttctgtgtcagtttctctccctctcctcacccctctatccattcctcccgccccagccacctccctgggctcttttttactccccttcagccccccggctgatgccatctctggttctggacaattatcaaatatatcagtggggagagag

SEQ ID NO: 1843 - DNA, 3427 bp, Homo sapiens
  source 1..3427: mol_type = unassigned DNA
gtgtgtgtgtgcagcccctcatgtaggggagcaggcatgggaggctgggaggaggagaggaacaggagagccacggacaagaaagatgacaaggactcacccaagaagaacaagggcaaggagcgccgggacctggatgacctcaagaaggaggtggctatgacagagcacaagatgtcagtggaagaggtctgccggaaatacaacacagactgtgtgcagggtttgacccacagcaaagcccaggagatcctggcccgggatgggcctaacgcactcacgccaccgcctaccaccccagagtgggtcaagttttgccggcagctcttcgggggcttctccatcctgctgtggatcggggctatcctctgcttcctggcctacggtatccaggcgggcaccgaggacgacccctctggtgacaacctgtacctgggcatcgtgctggcggccgtggtgatcatcactggctgcttctcctactaccaggaggccaagagctccaagatcatggagtccttcaagaacatggtgccccagcaagccctggtgatccgggaaggtgagaagatgcaggtgaacgctgaggaggtggtggtcggggacctggtggagatcaagggtggagaccgagtgccagctgacctgcggatcatctcagcccacggctgcaaggtggacaactcctccctgactggcgaatccgagccccagactcgctctcccgactgcactcacgacaaccccttggagactcggaacatcaccttcttttccaccaactgtgtggaaggcacggctcggggcgtggtggtggccacgggcgaccgcactgtcatgggccgtatcgccaccctggcatcagggctggaggtgggcaagacgcccatcgccatcgagattgagcacttcatccagctcatcaccggcgtggctgtcttcctgggtgtctccttcttcatcctctccctcattctcggatacacctggcttgaggctgtcatcttcctcatcggcatcatcgtggccaatgtcccagagggtctgctggccactgtcactgtgtgtctgacgctgaccgccaagcgcatggcccggaagaactgcctggtgaagaacctggaggctgtagaaaccctgggctccacgtccaccatctgctcagataagacagggaccctcactcagaaccgcatgacagtcgcccacatgtggtttgacaaccagatccacgaggctgacaccactgaggaccagtcagggacctcatttgacaagagttcgcacacctgggtggccctgtctcacatcgctgggctctgcaatcgcgctgtcttcaagggtggtcaggacaacatccctgtgctcaagagggatgtggctggggatgcgtctgagtctgccctgctcaagtgcatcgagctgtcctctggctccgtgaagctgatgcgtgaacgcaacaagaaagtggctgagattcccttcaattccaccaacaaataccagctctccatccatgagaccgaggaccccaacgacaaccgatacctgctggtgatgaagggtgcccccgagcgcatcctggaccgctgctccaccatcctgctacagggcaaggagcagcctctggacgaggaaatgaaggaggccttccagaatgcctaccttgagctcggtggcctgggcgagcgcgtgcttggtttctgccattattacctgcccgaggagcagttccccaagggctttgccttcgactgtgatgacgtgaacttcaccacggacaacctctgctttgtgggcctcatgtccatgatcgacccaccccgggcagccgtccctgacgcggtgggcaagtgtcgcagcgcaggcatcaaggtcatcatggtcaccggcgatcaccccatcacggccaaggccattgccaagggtgtgggcatcatctctgagggcaacgagactgtggaggacatcgccgcccggctcaacattcccgtcagccaggttaacccccgggatgccaaggcctgcgtgatccacggcaccgacctcaaggacttcacctccgagcaaatcgacgagatcctgcagaatcacaccgagatcgtcttcgcccgcacatccccccagcagaagctcatcattgtggagggctgtcagagacagggtgcaattgtggctgtgaccggggatggtgtgaacgactcccccgctctgaagaaggccgacattggggtggccatgggcatcgctggctctgacgtctccaagcaggcagctgacatgatcctgctggacgacaactttgcctccatcgtcacaggggtggaggagggccgcctgatcttcgacaacctaaagaagtccattgcctacaccctgaccagcaatatcccggagatcacgcccttcctgctgttcatcatggccaacatcccgctgcccctgggcaccatcaccatcctctgcatcgatctgggcactgacatggtccctgccatctcactggcgtacgaggctgccgaaagcgacatcatgaagagacagcccaggaacccgcggacggacaaattggtcaatgagagactcatcagcatggcctacgggcagattggaatgatccaggctctcggtggcttcttctcttactttgtgatcctggcagaaaatggcttcttgcccggcaacctggtgggcatccggctgaactgggatgaccgcaccgtcaatgacctggaagacagttacgggcagcagtggacatacgagcagaggaaggtggtggagttcacctgccacacggccttctttgtgagcatcgttgtcgtccagtgggccgatctgatcatctgcaagacccggaggaactcggtcttccagcagggcatgaagaacaagatcctgatcttcgggctgtttgaggagacggccctggctgccttcctgtcctactgccccggcatggacgtggccctgcgcatgtaccctctcaagcccagctggtggttctgtgccttcccctacagtttcctcatcttcgtctacgacgaaatccgcaaactcatcctgcgcaggaacccagggggttgggtggagaaggaaacctactactgacctcagccccaccacatcgcccatctcttccccgtcccccaggcccaggaccgcccctgtcagtccccccaattttgtattctggggggaggagccctctcttcctgtggccccaccttggcccccaccccctccactatctcctgccgcccccactctggctggcttctctcccctgccccaaacctctctcctctctcttttctgtgtcagtttctctccctctcctcacccctctatccattcctcccgccccagccacctccctgggctcttttttactccccttcagccccccggctgatgccatctctgg

SEQ ID NO: 1844 - DNA, 970 bp, Homo sapiens
  source 1..970: mol_type = unassigned DNA
cggaacatcaccttcttttccaccaactgtgtggaaggcacggctcggggcgtggtggtggccacgggcgaccgcactgtcatgggccgtatcgccaccctggcatcagggctggaggtgggcaagacgcccatcgccatcgagattgagcacttcatccagctcatcaccggcgtggctgtcttcctgggtgtctccttcttcatcctctccctcattctcggatacacctggcttgaggctgtcatcttcctcatcggcatcatcgtggccaatgtcccagagggtctgctggccactgtcactgtaaggccaggctcctgggtctgggtggggagggcctgggggtctgggctcctgggtctgagggaggaggggctgggatcctggacccctgagtctgagggaggaggggctagaggcctggacccgtgtgtctgggggaggaggggctgggatctggacccctgggtccggagaaggggctgggggcctggatcacagtattcttgtgaaagacaacttgggcctgactcagagggcctcattaacaaagcaaacaatcaaagaaagaaacaaacaaaaatcttgagaaacactggcaagccgtaaagagccaacaatcctattgcaaaattaagaagtgcacgctcatgatgaaaagttgaagagtacatcaagttaaaaaataaaataatgaggctgggtgcactggctcacgctgtaatcccagcactttggggggccaaggcgggcagatcagctgaggtcaggagttcaagactagcctggccaacatggtgaaaccctgtctctactgaaaatacaaaattagtggggcgtggtggcacatgcctgtaatcccagctactcaggaggctgaggcaggagaatcgcttgaacctgggaggcggaggttgcagtgagccaagatcacgccattgcactccagcctgggtgacaagagtga

SEQ ID NO: 1845 - DNA, 889 bp, Homo sapiens
  source 1..889: mol_type = unassigned DNA
gagaagactggagaaagaatagagggctgagaccagaggtgaagcgggagggacaagaaagatgacaaggactcacccaagaagaacaagggcaaggagcgccgggacctggatgacctcaagaaggaggtggctatgacagagcacaagatgtcagtggaagaggtctgccggaaatacaacacagactgtgtgcagggtttgacccacagcaaagcccaggagatcctggcccgggatgggcctaacgcactcacgccaccgcctaccaccccagagtgggtcaagttttgccggcagctcttcgggggcttctccatcctgctgtggatcggggctatcctctgcttcctggcctacggtatccaggcgggcaccgaggacgacccctctggtgacaacctgtacctgggcatcgtgctggcggccgtggtgatcatcactggctgcttctcctactaccaggaggccaagagctccaagatcatggagtccttcaagaacatggtgccccagcaagccctggtgatccgggaaggtgagaagatgcaggtgaacgctgaggaggtggtggtcggggacctggtggagatcaagggtggagaccgagtgccagctgacctgcggatcatctcagcccacggctgcaaggtggacaactcctccctgactggcgaatccgagccccagactcgctctcccgactgcactcacgacaaccccttggagactcggaacatcaccttcttttccaccaactgtgtggaaggcacggctcggggcgtggtggtggccacgggcgaccgcactgtcatgggccgtatcgccaccctggcatcagggctggaggtgggcaagacgcccatcgccatcgagattgagcacttca

SEQ ID NO: 1846 - DNA, 603 bp, Homo sapiens
  source 1..603: mol_type = unassigned DNA
gtgtgtgtgtgtgtgtgtgtgcaggctccgcagtgtcgcagcctggggctgcagtgtgtgtgtgtgcagcccctcatgtaggggagcaggcatgggaggctgggaggaggagaggaacaggagagccacggtggggagactgagtgcacagctgagggtgtgcgtgtgcaactgtgtagtggggagcgtgcatgcctggctgtgtccttgcctctgtgtccgtgtgtccttgtctgtctgtgagtctctccagcagatgccgcctccctccctggctgaccacctgacccttgctgcagccctggattcctccctgacaagaaagatgacaaggactcacccaagaagaacaagggcaaggagcgccgggacctggatgacctcaagaaggaggtggctatgacagagcacaagatgtcagtggaagaggtctgccggaaatacaacacagactgtgtgcagggtttgacccacagcaaagcccaggagatcctggcccgggatgggcctaacgcactcacgccaccgcctaccaccccagagtgggtcaagttttgccggcagctcttcgggggcttctccatcctgctgtggatcggggct

SEQ ID NO: 1847 - DNA, 255 bp, Homo sapiens
  source 1..255: mol_type = unassigned DNA
gaaagatgacaaggactcacccaagaagaacaagggcaaggagcgccgggacctggatgacctcaagaaggaggtggctatgacagagcacaagatgtcagtggaagaggtctgccggaaatacaacacagactgtgtgcaggtgtggccaggctgtgggctgggaccctgggaactagggaggaggagctgggggctaggacccctgggtctgagggaggaggggctgtggctggtgtcttaagttctgggggt

SEQ ID NO: 1848 - DNA, 169 bp, Homo sapiens
  source 1..169: mol_type = unassigned DNA
tgtgtgcggagatccgcgaggttgtgggccagccctcagcatctccgcctgaccttgtgcggttgcatgtgcacagttgcatgacaagaaagatgacaaggactcacccaagaagaacaagggcaaggagcgccgggacctggatgacctcaagaaggaggtggctatg

SEQ ID NO: 1849 - DNA, 100 bp, Homo sapiens
  source 1..100: mol_type = unassigned DNA
aaaggggtagtcagtgatggctgtcaggacaagaaagatgacaaggactcacccaagaagaacaagggcaaggagcgccgggacctggatgacctcaaga

SEQ ID NO: 1850 - DNA, 100 bp, Homo sapiens
  source 1..100: mol_type = unassigned DNA
ataaaggctgatgggcccagggatggaggacaagaaagatgacaaggactcacccaagaagaacaagggcaaggagcgccgggacctggatgacctcaag

SEQ ID NO: 1851 - DNA, 100 bp, Homo sapiens
  source 1..100: mol_type = unassigned DNA
cacatggaagatcccagagagaggcagagacagagatagaggaaggacaagaaagatgacaaggactcacccaagaagaacaagggcaaggagcgccggg

SEQ ID NO: 1852 - DNA, 718 bp, Homo sapiens
  source 1..718: mol_type = unassigned DNA
atcatgaccatcaccaccaacaccactggcaccaccactgcagtcattcagggagtcctgaacagaggccgattggtgttcctgcttgggaggatctgtgggaatcggcaggagaatgagtcagggaaatagtgcttagctgacattttgaaatggaagaagctggaatatatgaatttttgtaaagaaaaaaaaatgcagcctgtgagtctctcttgattgaaaattaaagggttaataatgcatcacacttcaagttaagatccttctattctacgtaatattttatggctgcctggctggcatcttcatcggaaccatccaagtgatgctgctcaccatcagtgaatttaagcccacatatcaggaccgagtggccccgccaggattaacacagattcctcagatccagaagactgaaatttcctttcgtcctaatgatcccaagagctatgaggcatatgtactgaacatagttaggttcctggaaaagtacaaagattcagcccagagggatgacatgatttttgaagattgtggcgatgtgcccagtgaaccgaaagaacgaggagactttaatcatgaacgaggagagcgaaaggtctgcagattcaagcttgaatggctgggaaattgctctggattaaatgatgaaacttatggctacaaagagggcaaaccgtgcattattataaagctcaaccgagttctaggcttc

SEQ ID NO: 1853 - DNA, 1883 bp, Homo sapiens
  source 1..1883: mol_type = unassigned DNA
aattcctcggctcctggcgggagtgccggtggcgccccgcagtccgcttgtccgtccttccctctctgactctcctaccccgggcctgtctctgcagaggtcaggggaggcgggggcccagcacacgtccccagtggcagcgggagcggcagctacgggttcgcggagcccccgaccccccaagggctagaggagcgctcggcggaccaaagaaagcccgcgagcggctgcgcgcccaccaataggtgcggggctcggagccgcgcagcctgcgccgtccctccctccgcccccgccccgccgccgccgccgccgccgcctccccctcctcctgctcctgccttggctcctccgccgcgcgtctcgcactccgagagccgcagcggcagcggcgcgtcctgcctgcagagagccaggccggagaagccgagcggcgcagaggacgccagggcgcgcgccgcagccacccaccctccggaccgcggcagctgctgacccgccatcgccatggcccgcgggaaagccaaggaggagggcagctggaagaaattcatctggaactcagagaagaaggagtttctgggcaggaccggtggcagttggtttaagatccttctattctacgtaatattttatggctgcctggctggcatcttcatcggaaccatccaagtgatgctgctcaccatcagtgaatttaagcccacatatcaggaccgagtggccccgccaggattaacacagattcctcagatccagaagactgaaatttcctttcgtcctaatgatcccaagagctatgaggcatatgtactgaacatagttaggttcctggaaaagtacaaagattcagcccagagggatgacatgatttttgaagattgtggcgatgtgcccagtgaaccgaaagaacgaggagactttaatcatgaacgaggagagcgaaaggtctgcagattcaagcttgaatggctgggaaattgctctggattaaatgatgaaacttatggctacaaagagggcaaaccgtgcattattataaagctcaaccgagttctaggcttcaaacctaagcctcccaagaatgagtccttggagacttacccagtgatgaagtataacccaaatgtccttcccgttcagtgcactggcaagcgagatgaagataaggataaagttggaaatgtggagtattttggactgggcaactcccctggttttcctctgcagtattatccgtactatggcaaactcctgcagcccaaatacctgcagcccctgctggccgtacagttcaccaatcttaccatggacactgaaattcgcatagagtgtaaggcgtacggtgagaacattgggtacagtgagaaagaccgttttcagggacgttttgatgtaaaaattgaagttaagagctgatcacaagcacaaatctttcccactagccatttaataagttaaaaaaagatacaaaaacaaaaacctactagtcttgaacaaactgtcatacgtatgggacctacacttaatctatatgctttacactagctttctgcatttaataggttagaatgtaaattaaagtgtagcaatagcaacaaaatatttattctactgtaaatgacaaaagaaaaagaaaaattgagccttgggacgtgcccatttttactgtaaattatgattccgtaactgacttgtagtaagcagtgtttctggcccctaagtattgctgccttgtgtattttatttagtgtacagtactacaggtgcatactctggtcatttttcaagccatgttttattgtatctgttttctactttatgtgagcaaggtttgctgtccaaggtgtaaatattcaacgggaataaaactggcatggtaa

SEQ ID NO: 1854 - DNA, 2608 bp, Homo sapiens
  source 1..2608: mol_type = unassigned DNA
gcccacaaggggcacagccgggcagtcaggaaccggggctgccggctgggctggcctgcaaagaagagggaagggccggaactgcaaccgcagtggcggggagtgcgagggggcggcagaggtcaggggaggcgggggcccagcacacgtccccagtggcagcgggagcggcagctacgggttcgcggagcccccgaccccccaagggctagaggagcgctcggcggaccaaagaaagcccgcgagcggctgcgcgcccaccaataggtgcggggctcggagccgcgcagcctgcgccgtccctccctccgcccccgccccgccgccgccgccgccgccgcctccccctcctcctgctcctgccttggctcctccgccgcgcgtctcgcactccgagagccgcagcggcagcggcgcgtcctgcctgcagagagccaggccggagaagccgagcggcgcagaggacgccagggcgcgcgccgcagccacccaccctccggaccgcggcagctgctgacccgccatcgccatggcccgcgggaaagccaaggaggagggcagctggaagaaattcatctggaactcagagaagaaggagtttctgggcaggaccggtggcagttggtttaagatccttctattctacgtaatattttatggctgcctggctggcatcttcatcggaaccatccaagtgatgctgctcaccatcagtgaatttaagcccacatatcaggaccgagtggccccgccaggattaacacagattcctcagatccagaagactgaaatttcctttcgtcctaatgatcccaagagctatgaggcatatgtactgaacatagttaggttcctggaaaagtacaaagattcagcccagagggatgacatgatttttgaagattgtggcgatgtgcccagtgaaccgaaagaacgaggagactttaatcatgaacgaggagagcgaaaggtctgcagattcaagcttgaatggctgggaaattgctctggattaaatgatgaaacttatggctacaaagagggcaaaccgtgcattattataaagctcaaccgagttctaggcttcaaacctaagcctcccaagaatgagtccttggagacttacccagtgatgaagtataacccaaatgtccttcccgttcagtgcactggcaagcgagatgaagataaggataaagttggaaatgtggagtattttggactgggcaactcccctggttttcctctgcagtattatccgtactatggcaaactcctgcagcccaaatacctgcagcccctgctggccgtacagttcaccaatcttaccatggacactgaaattcgcatagagtgtaaggcgtacggtgagaacattgggtacagtgagaaagaccgttttcagggacgttttgatgtaaaaattgaagttaagagctgatcacaagcacaaatctttcccactagccatttaataagttaaaaaaagatacaaaaacaaaaacctactagtcttgaacaaactgtcatacgtatgggacctacacttaatctatatgctttacactagctttctgcatttaataggttagaatgtaaattaaagtgtagcaatagcaacaaaatatttattctactgtaaatgacaaaagaaaaagaaaaattgagccttgggacgtgcccatttttactgtaaattatgattccgtaactgacttgtagtaagcagtgtttctggcccctaagtattgctgccttgtgtattttatttagtgtacagtactacaggtgcatactctggtcatttttcaagccatgttttattgtatctgttttctactttatgtgagcaaggtttgctgtccaaggtgtaaatattcaacgggaataaaactggcatggtaattttttttttttttttttttttgttttttggctctttcaaaggtaatggcccatcgatgagcatttttaacatactccatagtcttttcctgtggtgttaggtctttatttttatttttttcctgggggctggggtgggggtttgtcatgggggaactgccctttaaattttaagtgacactacagaaaaacacaaaaaggtgatgggttgtgttatgcttgtattgaatgctgtcttgacatctcttgccttgtcctccggtatgttctaaagctgtgtctgagatctggatctgcccatcactttggctagtgacagggctaattaatttgctttatacattttcttttactttccttttttcctttctggaggcatcacatgctggtgctgtgtctttatgaatgttttaaccattttcatggtggaagaattttatatttatgcagttgtacaattttatttttttctgcaagaaaaagtgtaatgtatgaaataaaccaaagtcacttgtttgaaaataaatctttattttgaactttataaaaagcaatgcagtaccccatagactggtgttaaatgttgtctacagtgcaaaatccatgttctaacatatgtaataattgccaggagtacagtgctcttgttgatcttgtattcagtcaggttaaaacaacggacaataaaagaatgaacacattc

SEQ ID NO: 1855 - DNA, 580 bp, Homo sapiens
  source 1..580: mol_type = unassigned DNA
agatgcaacatggacacagaattctggggaacctacaacgtgtgggagttcagccagactccagatgagtataaggcttgatgattcgccccaagactgagaaccttgatgtcattgtcaatgtcagtgacactgaaagctgggaccagcatgttcagaagctcaacaagttcttggagccttacaacgactctatccaagcccaaaagaatgatgtctgccgccctggacgctattacgaacagccagataatggagtcctcaactaccccaaacgtgcctgccaattcaaccggacccagctgggcaactgctccggcattggggactccacccactatggttacagcactgggcagccctgtgtcttcatcaagatgaaccgggtcatcaacttctatgcaggagcaaaccagagcatgaatgttacctgtgctgggaagcgagatgaagatgctgagaatctcggcaacttcgtcatgttccccgccaacggcaacatcgacctcatgtacttcccctactatggcaaaaagttccacgtgaactacacacagcccctggtggctgtgaagttcct

SEQ ID NO: 1856 - DNA, 3153 bp, Homo sapiens
  source 1..3153: mol_type = unassigned DNA
ccacctctctctgcctttttgtaccccgctttttttctgcgttctgctcggtttttgtagccgtctgtttttgcaccccatttcgttttgtttctagacggtttggtggggggtgaagctgcattcataccccttcctcttgttattctcccctgctctgacagcaccccttttcatcgcagttggggggcctaggatcggtgcatcttccgccgcgctgccagcaccccgcagcgcgtggtcgtgcaccccggaatctgcagcagctgcatatctgaggggggtctcctttgcccgcgccgccttcgctccccgtgcttttgggtgtgtggagggcttcagcgcgcggcgcccccgcttctccgcaaccccccgccccgcgcccggactcgccccgcgccaccaagatggtcatccagaaagagaagaagagctgcgggcaggtggttgaggagtggaaggagttcgtgtggaacccgaggacgcaccagtttatgggccgcaccgggaccagctgggcctttatcctcctcttctacctcgttttttatgggttcctcaccgccatgttcaccctcaccatgtgggtgatgctgcagactgtctccgaccatacccccaagtaccaggaccgactggccacaccgggcttgatgattcgccccaagactgagaaccttgatgtcattgtcaatgtcagtgacactgaaagctgggaccagcatgttcagaagctcaacaagttcttggagccttacaacgactctatccaagcccaaaagaatgatgtctgccgccctggacgctattacgaacagccagataatggagtcctcaactaccccaaacgtgcctgccaattcaaccggacccagctgggcaactgctccggcattggggactccacccactatggttacagcactgggcagccctgtgtcttcatcaagatgaaccgggtcatcaacttctatgcaggagcaaaccagagcatgaatgttacctgtgctgggaagcgagatgaagatgctgagaatctcggcaacttcgtcatgttccccgccaacggcaacatcgacctcatgtacttcccctactatggcaaaaagttccacgtgaactacacacagcccctggtggctgtgaagttcctgaatgtgacccccaacgtggaggtgaatgtagaatgtcgcatcaacgccgccaacatcgccacagacgatgagcgagacaagttcgccggccgcgtggccttcaaactccgcatcaacaaaacctgaggccccttcctcccaccccatctctctcctgtggatgctcctggaatgtccctgaccctgcctgatccctccctcacccaccccaaaggtatttttgataacagagctatgacttgtctgagcctcacatccttttccttgacttctcaacccagcctgaagtccattgcggttccgtcactcgcctttcccaccaacttctcccaacctcagatcagtcagacagggagctgggctaagatggccacggaggagttaggagcctttctagttctggtttagctgtgagagctatccactctcctgcctgcatatcccctgagagttataggaagtgcccactgacccacccacccacctacaccccccgccacacacacacacaaacgtgcacacgcgtctcatttgacccctttgcttccagagatgaatgtggcactccctccttccattcctaagctctggccaccgtcccttgatctctcatactttctccctgtctacacagtcgccatcttggtgactttgaatttatctggctcctgggcaggtcttctcctcctctccatccctattccctcctctgaaatgcacccctttgtaattgaggacaaggtggttctgtggccttttccctctttgctggcacgttctgcttctcaccctctggtgactctgtgagctgggaaatgagggactggaagtgaggcctgtgttgacccttcctgaaaatcctctagcagcccccgacttcagcagtttctttctttgtttttttgagatggagtttcgctcttgttgcccaggctggagtgcaatggtgcaatctcagctcactgcaacttccgcatcccaggttcaagcgattctcccgcctcaggttcccgagtagctgggactacaggcatgtgccaccatgcccggctaatttctttctttctttttttttttttttgcattttttagtagagatgggggtttctccttgttggtcaggctggtctcgaactcccgacctcaggtgatccacctgcctcggcctcccaaagtgttgggattacaggcgtgagccaccgcgcccggccttcagtttcttcctaggccgttctgtcacccaaatagctgctacccagaggggcggggttgacctaggctgaatatccactttgtttttatggatggctcccttcccccattcgccttcccagaatatccttcaagttccacttcccagggagctctgggggaggggcggccattctggctccgtccccagtggccaccttggaaacatcggctggctttgggactattccacctccttcccctgagcccagatctgcccccaccatcctttctctggcttcttttagcaagttatcaactaatcactaactccttccttttcctctgcatgccagcctgaaaattccaaatctagcctctgaatgtcttggctccatctcttcagacccctttgcctttaaaaaaaaaacaaaaacaaaaacaaaaaaacccataatgcccacagaatgtcaaatgaggggcctcctgcctcctgctctgaatattctgtagctgtagaggcattttaaccctttgtcctccagcatcccttcacttcctcatcctctctaacctcctttttctttttttaatgctgcagcctccacactccacccacaggtggacccttccctttttctctagctggatctgtgtttcttcccttcgggcccccatgttttcctgcacccgccctaccatggtctctctctgcagttatttaatgcctgtgtcagatctactgtaaaaagaggattaagtaaaataaaatgagagcaattatatatataaatatatatcatacaca

SEQ ID NO: 1857 - DNA, 557 bp, Homo sapiens
  source 1..557: mol_type = unassigned DNA
acgaacagccagataatggagtcctcaactaccccaaacgtgcctgccaattcaaccggacccagctgggcaactgctccggcattggggactccacccactatggttacagcactgggcagccctgtgtcttcatcaagatgaaccgggtcatcaacttctatgcaggagcaaaccagagcatgaatgttacctgtgctgggaagaggccccatcaccatagaaacaaggggaaactgattcctgaggatgggcgagatgaagatgctgagaatctcggcaacttcgtcatgttccccgccaacggcaacatcgacctcatgtacttcccctactatggcaaaaagttccacgtgaactacacacagcccctggtggctgtgaagttcctgaatgtgacccccaacgtggaggtgaatgtagaatgtcgcatcaacgccgccaacatcgccacagacgatgagcgagacaagttcgccggccgcgtggccttcaaactccgcatcaacaaaacctgaggccccttcctcccaccccatctctctcctgtggatgct

SEQ ID NO: 1858 - DNA, 734 bp, Homo sapiens
  source 1..734: mol_type = unassigned DNA
gtcacagagcccagagagcgtcctgtaggaacgtcacagagcccagagaacgcctggggacggtcggggaggcagttcggggaggggacgattaagttccctcagagaggaagccgcgggccgactggagtcgttttcgtgctctccgcacccgcccgccgcgggtagcatcttctcagcgccccggcgcccaggaacgcccaggaaacccagtcctcctcctaagcaacctgcggcgcggggacgcccgccttttgctattattataaacgtttgatcttgctcttctacctagttttttatgggttcctggctgcactcttctcattcacgatgtgggttatgcttcagactctcaacgatgaggttccaaaataccgtgaccagattcctagcccaggactcatggtttttccaaaaccagtgaccgcattggaatatacattcagtaggtctgatccaacttcgtatgcagggtacattgaagaccttaagaagtttctaaaaccatatactttagaagaacagaagaacctcacagtctgtcctgatggagcactttttgaacagaagggtccagtttatgttgcatgtcagtttcctatttcattacttcaagcatgcagtggtatgaatgatcctgattttggctattctcaaggaaacccttgtattcttgtgaaaatgaacagaataattggattaaagcctgaaggagtgccaaggatagattg

SEQ ID NO: 1859 - DNA, 1811 bp, Homo sapiens
  source 1..1811: mol_type = unassigned DNA
ccaagcggccgcccggcgcggcgcggcgcagtcggctcgagtactccccgtaacgaggaggtgttctcggccgtcccacccttcactgccgtctccgggctgcgccgccggagccgggacgcgcctccgcagccctcgccgcctccatccccgcggccgcagctcctctcgccgtccgcgcgcacaccatgacgaagaacgagaagaagtccctcaaccagagcctggccgagtggaagctcttcatctacaacccgaccaccggagaattcctggggcgcaccgccaagagctggggtttgatcttgctcttctacctagttttttatgggttcctggctgcactcttctcattcacgatgtgggttatgcttcagactctcaacgatgaggttccaaaataccgtgaccagattcctagcccaggactcatggtttttccaaaaccagtgaccgcattggaatatacattcagtaggtctgatccaacttcgtatgcagggtacattgaagaccttaagaagtttctaaaaccatatactttagaagaacagaagaacctcacagtctgtcctgatggagcactttttgaacagaagggtccagtttatgttgcatgtcagtttcctatttcattacttcaagcatgcagtggtatgaatgatcctgattttggctattctcaaggaaacccttgtattcttgtgaaaatgaacagaataattggattaaagcctgaaggagtgccaaggatagattgtgtttcaaagaatgaagatataccaaatgtagcagtttatcctcataatggaatgatagacttaaaatatttcccatattatgggaaaaaactgcatgttgggtatctacagccattggttgctgttcaggtcagctttgctcctaacaacactgggaaagaagtaacagttgagtgcaagattgatggatcagccaacctaaaaagtcaggatgatcgtgacaagtttttgggacgagttatgttcaaaatcacagcacgtgcatagtatgagtaggatatctccacagagtaaatgttgtgttgtctgtcttcattttgtaacagctggaccttccattctagaattatgagaccaccttggagaaaggtgtgtggtacatgacattgggttacatcataacgtgcttccagatcatagtgttcagtgtcctctgaagtaactgcctgttgcctctgctgccctttgaaccagtgtacagtcgccagatagggaccggtgaacacctgattccaaacatgtaggatgggggtcttgtcctctttttatgtggtttaattgccaagtgtctaaagcttaatatgccgtgctatgtaaatattttatggatataacaactgtcatattttgatgtcaacagagttttagggataaaatggtacccggccaacatcaagtgactttatagctgcaagaaatgtggtatgtggagaagttctgtatgtgaggaaggaaaaaaagaaaataaaagtgtgtttgaaaaatattatcttgggttctttgtaaaatttattttttacatgctgaattagcctcgatctttttgattaagagcacaaacttttttttgtaaaacatgtaaaaaaaaaaactgggattaatttttagtgttggaactgcctcttattttaggctgtagataaaatagcatttttaggttagccagtgtgactatgcacctaattttttatgagattaaattcataagacttaatttgtacaatagtttgtgaaatatcttgttactgcttttatttagcagactgtgga

SEQ ID NO: 1860 - DNA, 1951 bp, Homo sapiens
  source 1..1951: mol_type = unassigned DNA
aagcggccgcccggcgcggcgcggcgcagtcggctcgagtactccccgtaacgaggaggtgttctcggccgtcccacccttcactgccgtctccgggctgcgccgccggagccgggacgcgcctccgcagccctcgccgcctccatccccgcggccgcagctcctctcgccgtccgcgcgcacaccatgacgaagaacgagaagaagtccctcaaccagagcctggccgagtggaagctcttcatctacaacccgaccaccggagaattcctggggcgcaccgccaagagctggggatcgcagtatgtggtagggaagtgatgctgtctgaaggtgacatcctgttctcctctcttctgtcctctccatccttattttggccacctggtttgatcttgctcttctacctagttttttatgggttcctggctgcactcttctcattcacgatgtgggttatgcttcagactctcaacgatgaggttccaaaataccgtgaccagattcctagcccaggactcatggtttttccaaaaccagtgaccgcattggaatatacattcagtaggtctgatccaacttcgtatgcagggtacattgaagaccttaagaagtttctaaaaccatatactttagaagaacagaagaacctcacagtctgtcctgatggagcactttttgaacagaagggtccagtttatgttgcatgtcagtttcctatttcattacttcaagcatgcagtggtatgaatgatcctgattttggctattctcaaggaaacccttgtattcttgtgaaaatgaacagaataattggattaaagcctgaaggagtgccaaggatagattgtgtttcaaagacaaataatgtaaaagatggaatgaagatataccaaatgtagcagtttatcctcataatggaatgatagacttaaaatatttcccatattatgggaaaaaactgcatgttgggtatctacagccattggttgctgttcaggtcagctttgctcctaacaacactgggaaagaagtaacagttgagtgcaagattgatggatcagccaacctaaaaagtcaggatgatcgtgacaagtttttgggacgagttatgttcaaaatcacagcacgtgcatagtatgagtaggatatctccacagagtaaatgttgtgttgtctgtcttcattttgtaacagctggaccttccattctagaattatgagaccaccttggagaaaggtgtgtggtacatgacattgggttacatcataacgtgcttccagatcatagtgttcagtgtcctctgaagtaactgcctgttgcctctgctgccctttgaaccagtgtacagtcgccagatagggaccggtgaacacctgattccaaacatgtaggatgggggtcttgtcctctttttatgtggtttaattgccaagtgtctaaagcttaatatgccgtgctatgtaaatattttatggatataacaactgtcatattttgatgtcaacagagttttagggataaaatggtacccggccaacatcaagtgactttatagctgcaagaaatgtggtatgtggagaagttctgtatgtgaggaaggaaaaaaagaaaataaaagtgtgtttgaaaaatattatcttgggttctttgtaaaatttattttttacatgctgaattagcctcgatctttttgattaagagcacaaacttttttttgtaaaacatgtaaaaaaaaaaactgggattaatttttagtgttggaactgcctcttattttaggctgtagataaaatagcatttttaggttagccagtgtgactatgcacctaattttttatgagattaaattcataagacttaatttgtacaatagtttgtgaaatatcttgttactgcttttatttagcagactgtggactgtaataaagtatataaattgtgaaatat

SEQ ID NO: 1861 - DNA, 1708 bp, Homo sapiens
  source 1..1708: mol_type = unassigned DNA
cgaagaacgagaagaagtccctcaaccagagcctggccgagtggaagctcttcatctacaacccgaccaccggagaattcctggggcgcaccgccaagagctggggatcgcagtatgtggtagggaagtgatgctgtctgaaggtgacatcctgttctcctctcttctgtcctctccatccttattttggccacctggtttgatcttgctcttctacctagttttttatgggttcctggctgcactcttctcattcacgatgtgggttatgcttcagactctcaacgatgaggttccaaaataccgtgaccagattcctagcccaggactcatggtttttccaaaaccagtgaccgcattggaatatacattcagtaggtctgatccaacttcgtatgcagggtacattgaagaccttaagaagtttctaaaaccatatactttagaagaacagaagaacctcacagtctgtcctgatggagcactttttgaacagaagggtccagtttatgttgcatgtcagtttcctatttcattacttcaagcatgcagtggtatgaatgatcctgattttggctattctcaaggaaacccttgtattcttgtgaaaatgaacagaataattggattaaagcctgaaggagtgccaaggatagattgtgtttcaaagaatgaagatataccaaatgtagcagtttatcctcataatggaatgatagacttaaaatatttcccatattatgggaaaaaactgcatgttgggtatctacagccattggttgctgttcaggtcagctttgctcctaacaacactgggaaagaagtaacagttgagtgcaagattgatggatcagccaacctaaaaagtcaggatgatcgtgacaagtttttgggacgagttatgttcaaaatcacagcacgtgcatagtatgagtaggatatctccacagagtaaatgttgtgttgtctgtcttcattttgtaacagctggaccttccattctagaattatgagaccaccttggagaaaggtgtgtggtacatgacattgggttacatcataacgtgcttccagatcatagtgttcagtgtcctctgaagtaactgcctgttgcctctgctgccctttgaaccagtgtacagtcgccagatagggaccggtgaacacctgattccaaacatgtaggatgggggtcttgtcctctttttatgtggtttaattgccaagtgtctaaagcttaatatgccgtgctatgtaaatattttatggatataacaactgtcatattttgatgtcaacagagttttagggataaaatggtacccggccaacatcaagtgactttatagctgcaagaaatgtggtatgtggagaagttctgtatgtgaggaaggaaaaaaagaaaataaaagtgtgtttgaaaaatattatcttgggttctttgtaaaatttattttttacatgctgaattagcctcgatctttttgattaagagcacaaacttttttttgtaaaacatgtaaaaaaaaaaactgggattaatttttagtgttggaactgcctcttattttaggctgtagataaaatagcatttttaggttagccagtgtgactatgcacctaattttttatgagattaaattcataagacttaatttgtacaatagtttgtgaaatatcttgttactgcttttatttagcagactgt

SEQ ID NO: 1862 - DNA, 837 bp, Homo sapiens
  source 1..837: mol_type = unassigned DNA
cttcatctacaacccgaccaccggagaattcctggggcgcaccgccaagagctggggtttgatcttgctcttctacctagttttttatgggttcctggctgcactcttctcattcacgatgtgggttatgcttcagactctcaacgatgaggttccaaaataccgtgaccagattcctagcccaggttgggtatctacagccattggttgctgttcaggtcagctttgctcctaacaacactgggaaagaagtaacagttgagtgcaagattgatggatcagccaacctaaaaagtcaggatgatcgtgacaagtttttgggacgagttatgttcaaaatcacagcacgtgcatagtatgagtaggatatctccacagagtaaatgttgtgttgtctgtcttcattttgtaacagctggaccttccattctagaattatgagaccaccttggagaaaggtgtgtggtacatgacattgggttacatcataacgtgcttccagatcatagtgttcagtgtcctctgaagtaactgcctgttgcctctgctgccctttgaaccagtgtacagtcgccagatagggaccggtgaacacctgattccaaacatgtaggatgggggtcttgtcctctttttatgtggtttaattgccaagtgtctaaagcttaatatgccgtgctatgtaaatattttatggatataacaactgtcatattttgatgtcaacagagttttagggataaaatggtacccggccaacatcaagtgactttatagctgcaagaaatgtggtatgtggagaagttctgtatgtgaggaaggaaaaaaagaaaataa

SEQ ID NO: 1863 - DNA, 418 bp, Homo sapiens
  source 1..418: mol_type = unassigned DNA
cttgaatttggacagtgaaaaggcccttaaaaaggatcgcagtatgtggtagggaagtgatgctgtctgaaggtgacatcctgttctcctctcttctgtcctctccatccttattttggccacctggtttgatcttgctcttctacctagttttttatgggttcctggctgcactcttctcattcacgatgtgggttatgcttcagactctcaacgatgaggttccaaaataccgtgaccagattcctagcccaggactcatggtttttccaaaaccagtgaccgcattggaatatacattcagtaggtctgatccaacttcgtatgcagggtacattgaagaccttaagaagtttctaaaaccatatactttagaagaacagaagaacctcacagtctgtcctgatggagcactttt

SEQ ID NO: 1864 - DNA, 569 bp, Homo sapiens
  source 1..569: mol_type = unassigned DNA
gtgaccagattcctagcccaggactcatggtttttccaaaaccagtgaccgcattggaatatacattcagtaggtctgatccaacttcgtatgcagggtacattgaagaccttaagaagtttctaaaaccatatactttagaagaacagaagaacctcacagtctgtcctgatggagcactttttgaacagaagggtccagtttatgttgcatgtcagtttcctatttcattacttcaagcatgcagtggtatgaatgatcctgattttggctattctcaaggaaacccttgtattcttgtgaaaatgaacagaataattggattaaagcctgaaggagtgccaaggatagattgtgtttcaaagaatgaagatataccaaatgtagcagtttatcctcataatggaatgatagacttaaaatatttcccatattatgggaaaaaactgcatgtaagtattgagaagttcttatgtggtgattactcttttgggaagctggagcatgtgttgacgtaccacttgtctggggtaggtagacgccagccctgtttaatttgtgcgtcatct

SEQ ID NO: 1865 - DNA, 421 bp, Homo sapiens
  source 1..421: mol_type = unassigned DNA
ataattggattaaagcctgaaggagtgccaaggatagattgtgtttcaaagttagttggcgtgctagtcatcagtgctatctgagatttaatgaaatatggtgcattttccttaagacaaataatgtaaaagatggaatgaagatataccaaatgtagcagtttatcctcataatggaatgatagacttaaaatatttcccatattatgggaaaaaactgcatgttgggtatctacagccattggttgctgttcaggtcagctttgctcctaacaacactgggaaagaagtaacagttgagtgcaagattgatggatcagccaacctaaaaagtcaggatgatcgtgacaagtttttgggacgagttatgttcaaaatcacagcacgtgcatagtatgagtaggatatctccacagagtaa

SEQ ID NO: 1866 - DNA, 657 bp, Homo sapiens
  source 1..657: mol_type = unassigned DNA; mol_type = unassigned DNA
attctaggttggcaccttgtggtggctgttgctttccagtctggaagcacagcattttattcatttcaggaaaacatcggtcctaaacctgctggtgcattcctgctgttagtagaatgaagatataccaaatgtagcagtttatcctcataatggaatgatagacttaaaatatttcccatattatgggaaaaaactgcatgttgggtatctacagccattggttgctgttcaggtcagctttgctcctaacaacactgggaaagaagtaacagttgagtgcaagattgatggatcagccaacctaaaaagtcaggatgatcgtgacaagtttttgggacgagttatgttcaaaatcacagcacgtgcatagtatgagtaggatatctccacagagtaaatgttgtgttgtctgtcttcattttgtaacagctggaccttccattctagaattatgagaccaccttggagaaaggtgtgtggtacatgacattgggttacatcataacgtgcttccagatcatagtgttcagtgtcctctgaagtaactgcctgttgcctctgctgccctttgaaccagtgtacagtcgccagatagggaccggtgaacacctgattccaaacatgtaggatgggggtcttgtcctctttttatgt

SEQ ID NO: 1867 - DNA, 229 bp, Homo sapiens
  source 1..229: mol_type = unassigned DNA; mol_type = unassigned DNA
aagaggatttcttttgttttcaacttcagaatgaagatataccaaatgtagcagtttatcctcataatggaatgatagacttaaaatatttcccatattatgggaaaaaactgcatgttgggtatctacagccattggttgctgttcaggtcagctttgctcctaacaacactgggaaagaagtaacagttgagtgcaagattgatggatcagccaacctaaaaagtca

SEQ ID NO: 1868 - DNA, 4675 bp, Homo sapiens
  source 1..4675: mol_type = unassigned DNA; mol_type = unassigned DNA
ggtcccagcacggacatggcctcgcgcggcgcccgcccgggcccgagtcccccgcgccccgctttgtagccccccggcggagaggcggcctcgacggtgcggacggcgcagacggccgggcgggcggcatggaggcggcgcatctgctcccggccgccgacgtgctgcgccacttctcggtgacagccgagggcggcctgagcccggcgcaggtgaccggcgcgcgggagcgctacggccccaacgagctcccgagtgaggaagggaagtccctgtgggagctggtgctggaacagtttgaggacctcctggtgcgcatcctgctgctggctgcccttgtctcctttgtcctggcctggttcgaggagggcgaggagaccacgaccgccttcgtggagcccctggtcatcatgctgatcctcgtggccaacgccattgtgggcgtgtggcaggaacgcaacgccgagagtgccatcgaggccctgaaggagtatgagcctgagatgggcaaggtgatccgctcggaccgcaagggcgtgcagaggatccgtgcccgggacatcgtcccaggggacattgtagaagtggcagtgggggacaaagtgcctgctgacctccgcctcatcgagatcaagtccaccacgctgcgagtggaccagtccatcctgacgggtgaatctgtgtccgtgaccaagcacacagaggccatcccagaccccagagctgtgaaccaggacaagaagaacatgctgttttctggcaccaatatcacatcgggcaaagcggtgggtgtggccgtggccaccggcctgcacacggagctgggcaagatccggagccagatggcggcagtcgagcccgagcggacgccgctgcagcgcaagctggacgagtttggacggcagctgtcccacgccatctctgtgatctgcgtggccgtgtgggtcatcaacatcggccacttcgccgacccggcccacggtggctcctggctgcgtggcgctgtctactacttcaagatcgccgtggccctggcggtggcggccatccccgagggcctcccggctgtcatcactacatgcctggcactgggcacgcggcgcatggcacgcaagaacgccatcgtgcgaagcctgccgtccgtggagaccctgggctgcacctcagtcatctgctccgacaagacgggcacgctcaccaccaatcagatgtctgtctgccggatgttcgtggtagccgaggccgatgcgggctcctgccttttgcacgagttcaccatctcgggtaccacgtatacccccgagggcgaagtgcggcagggggatcagcctgtgcgctgcggccagttcgacgggctggtggagctggcgaccatctgcgccctgtgcaacgactcggctctggactacaacgaggccaagggtgtgtatgagaaggtgggagaggccacggagacagctctgacttgcctggtggagaagatgaacgtgttcgacaccgacctgcaggctctgtcccgggtggagcgagctggcgcctgtaacacggtcatcaagcagctgatgcggaaggagttcaccctggagttctcccgagaccggaaatccatgtccgtgtactgcacgcccacccgccctcaccctactggccagggcagcaagatgtttgtgaagggggctcctgagagtgtgatcgagcgctgtagctcagtccgcgtggggagccgcacagcacccctgacccccacctccagggagcagatcctggcaaagatccgggattggggctcaggctcagacacgctgcgctgcctggcactggccacccgggacgcgcccccaaggaaggaggacatggagctggacgactgcagcaagtttgtgcagtacgagacggacctgaccttcgtgggctgcgtaggcatgctggacccgccgcgacctgaggtggctgcctgcatcacacgctgctaccaggcgggcatccgcgtggtcatgatcacgggggataacaaaggcactgccgtggccatctgccgcaggcttggcatctttggggacacggaagacgtggcgggcaaggcctacacgggccgcgagtttgatgacctcagccccgagcagcagcgccaggcctgccgcaccgcccgctgcttcgcccgcgtggagcccgcacacaagtcccgcatcgtggagaacctgcagtcctttaacgagatcactgctatgactggcgatggagtgaacgacgcaccagccctgaagaaagcagagatcggcatcgccatgggctcaggcacggccgtggccaagtcggcggcagagatggtgctgtcagatgacaactttgcctccatcgtggctgcggtggaggagggccgggccatctacagcaacatgaagcaattcatccgctacctcatctcctccaatgttggcgaggtcgtctgcatcttcctcacggcaattctgggcctgcccgaagccctgatccctgtgcagctgctctgggtgaacctggtgacagacggcctacctgccacggctctgggcttcaacccgccagacctggacatcatggagaagctgccccggagcccccgagaagccctcatcagtggctggctcttcttccgatacctggctatcggagtgtacgtaggcctggccacagtggctgccgccacctggtggtttgtgtatgacgccgagggacctcacatcaacttctaccagctgaggaacttcctgaagtgctccgaagacaacccgctctttgccggcatcgactgtgaggtgttcgagtcacgcttccccaccaccatggccttgtccgtgctcgtgaccattgaaatgtgcaatgccctcaacagcgtctcggagaaccagtcgctgctgcggatgccgccctggatgaacccctggctgctggtggctgtggccatgtccatggccctgcacttcctcatcctgctcgtgccgcccctgcctctcattttccaggtgaccccactgagcgggcgccagtgggtggtggtgctccagatatctctgcctgtcatcctgctggatgaggccctcaagtacctgtcccggaaccacatgcacgaagaaatgagccagaagtgagcgctgggaacagagtggagtctccggtgtgtacctcagactgatggtgcccatgtgttcgcctccgccccccacccttgccaccacactcgcccacttgcccaccgggtcccgccggataaatgacaggcccgaggtcagaatggccatccccgggccccgtcctggggtctctgtccccacttccttctggcctgggaggtctgtaattcctgtctcctggactctcctgggaagttccctgctctgcagctctggcccaggagctgcaggctgggagggggcagccaagaagccggagctggcagcatacccagagatccggggcccccccacccccaaatcacgagtgcagctggagcttgctcccccttgttcggaagctggacgttcacttggtgactggtgcctctgcactgacggaggactctgggggtccttcttaccggctctgacctctctcttcgtgcctggtctgggactgggtcagccctgggggatcagaaggggccatctgggcccagctgtgtacagcgagggtgggcagccccctccactccactctgcttccacaaagtcggctcccgagagctcgaggctgcttctgtttatatgtgcagggcccgggcgggtgaagggtcagagagacggacacaaggagccggcaggagggcggagcgaggatgtcctttcccgggagacaagtcgggaaagcctggctggactgcctcagccccgcgcgcctcctggactcagggttccccgtcctgagctcgggagatgttcagagtcacactgccgcccggtctgccacgcagaggtccaacttgccacccgcgtccctggtacctgagaccaccgacatcctcaggttcctgaccgtggcgcccttctacccagcccagtgtgcggccgccgcgctgtctgcacagctgggggcctctgagcctggtgggcttcctggactcttggcctcactccttgccccctccccacgacacccatgagccgaaaggatgtcactaaggatggctgattccccaagggcacccgctctccctccctccctgctggaggaacacgtcatatcagatgagaggaagatggcctctgatggacagaatttttctcttaactcagcttttgctactttggcaaaaactagcgaggggtagcagaaacctgcaccaaggattgtccctatgtcttggccactcctagagcgtgtgcagactgatgattttatatgtaaatcaagactcacatccctttcctagtcccccacatccaaagcccctcagcctgccttgcagaccaatgggctccatgttctgtagccccctcccctacgcctcacccctcctccctctcacaggttctgggcggccagtgagagaaacgcagtgggggaggcagggagtctggtgcctgcagagattctctgcttctttcctggggggaggtggggaggtcttagcaggagcgggccctgtacccacctgctgacctgctgtttggtagagaaataaaggttgtgtgactggggg

SEQ ID NO: 1869 - DNA, 4182 bp, Homo sapiens
  source 1..4182: mol_type = unassigned DNA; mol_type = unassigned DNA
ggtcccagcacggacatggcctcgcgcggcgcccgcccgggcccgagtcccccgcgccccgctttgtagccccccggcggagaggcggcctcgacggtgcggacggcgcagacggccgggcgggcggcatggaggcggcgcatctgctcccggccgccgacgtgctgcgccacttctcggtgacagccgagggcggcctgagcccggcgcaggtgaccggcgcgcgggagcgctacggccccaacgagctcccgagtgaggaagggaagtccctgtgggagctggtgctggaacagtttgaggacctcctggtgcgcatcctgctgctggctgcccttgtctcctttgtcctggcctggttcgaggagggcgaggagaccacgaccgccttcgtggagcccctggtcatcatgctgatcctcgtggccaacgccattgtgggcgtgtggcaggaacgcaacgccgagagtgccatcgaggccctgaaggagtatgagcctgagatgggcaaggtgatccgctcggaccgcaagggcgtgcagaggatccgtgcccgggacatcgtcccaggggacattgtagaagtggcagtgggggacaaagtgcctgctgacctccgcctcatcgagatcaagtccaccacgctgcgagtggaccagtccatcctgacgggtgaatctgtgtccgtgaccaagcacacagaggccatcccagaccccagagctgtgaaccaggacaagaagaacatgctgttttctggcaccaatatcacatcgggcaaagcggtgggtgtggccgtggccaccggcctgcacacggagctgggcaagatccggagccagatggcggcagtcgagcccgagcggacgccgctgcagcgcaagctggacgagtttggacggcagctgtcccacgccatctctgtgatctgcgtggccgtgtgggtcatcaacatcggccacttcgccgacccggcccacggtggctcctggctgcgtggcgctgtctactacttcaagatcgccgtggccctggcggtggcggccatccccgagggcctcccggctgtcatcactacatgcctggcactgggcacgcggcgcatggcacgcaagaacgccatcgtgcgaagcctgccgtccgtggagaccctgggctgcacctcagtcatctgctccgacaagacgggcacgctcaccaccaatcagatgtctgtctgccggatgttcgtggtagccgaggccgatgcgggctcctgccttttgcacgagttcaccatctcgggtaccacgtatacccccgagggcgaagtgcggcagggggatcagcctgtgcgctgcggccagttcgacgggctggtggagctggcgaccatctgcgccctgtgcaacgactcggctctggactacaacgaggccaagggtgtgtatgagaaggtgggagaggccacggagacagctctgacttgcctggtggagaagatgaacgtgttcgacaccgacctgcaggctctgtcccgggtggagcgagctggcgcctgtaacacggtcatcaagcagctgatgcggaaggagttcaccctggagttctcccgagaccggaaatccatgtccgtgtactgcacgcccacccgccctcaccctactggccagggcagcaagatgtttgtgaagggggctcctgagagtgtgatcgagcgctgtagctcagtccgcgtggggagccgcacagcacccctgacccccacctccagggagcagatcctggcaaagatccgggattggggctcaggctcagacacgctgcgctgcctggcactggccacccgggacgcgcccccaaggaaggaggacatggagctggacgactgcagcaagtttgtgcagtacgagacggacctgaccttcgtgggctgcgtaggcatgctggacccgccgcgacctgaggtggctgcctgcatcacacgctgctaccaggcgggcatccgcgtggtcatgatcacgggggataacaaaggcactgccgtggccatctgccgcaggcttggcatctttggggacacggaagacgtggcgggcaaggcctacacgggccgcgagtttgatgacctcagccccgagcagcagcgccaggcctgccgcaccgcccgctgcttcgcccgcgtggagcccgcacacaagtcccgcatcgtggagaacctgcagtcctttaacgagatcactgctatgactggcgatggagtgaacgacgcaccagccctgaagaaagcagagatcggcatcgccatgggctcaggcacggccgtggccaagtcggcggcagagatggtgctgtcagatgacaactttgcctccatcgtggctgcggtggaggagggccgggccatctacagcaacatgaagcaattcatccgctacctcatctcctccaatgttggcgaggtcgtctgcatcttcctcacggcaattctgggcctgcccgaagccctgatccctgtgcagctgctctgggtgaacctggtgacagacggcctacctgccacggctctgggcttcaacccgccagacctggacatcatggagaagctgccccggagcccccgagaagccctcatcagtggctggctcttcttccgatacctggctatcggagtgtacgtaggcctggccacagtggctgccgccacctggtggtttgtgtatgacgccgagggacctcacatcaacttctaccagctgaggaacttcctgaagtgctccgaagacaacccgctctttgccggcatcgactgtgaggtgttcgagtcacgcttccccaccaccatggccttgtccgtgctcgtgaccattgaaatgtgcaatgccctcaacagcgtctcggagaaccagtcgctgctgcggatgccgccctggatgaacccctggctgctggtggctgtggccatgtccatggccctgcacttcctcatcctgctcgtgccgcccctgcctctcattttccaggtgaccccactgagcgggcgccagtgggtggtggtgctccagatatctctgcctgtcatcctgctggatgaggccctcaagtacctgtcccggaaccacatgcacgcctgtctttatccaggccttctcaggacagtctcgcaggcctggagtaggcagccgctgaccacctcttggaccccagaccacaccgggttggcctctttgaagaaatgagccagaagtgagcgctgggaacagagtggagtctccgggcccgggcgggtgaagggtcagagagacggacacaaggagccggcaggagggcggagcgaggatgtcctttcccgggagacaagtcgggaaagcctggctggactgcctcagccccgcgcgcctcctggactcagggttccccgtcctgagctcgggagatgttcagagtcacactgccgcccggtctgccacgcagaggtccaacttgccacccgcgtccctggtacctgagaccaccgacatcctcaggttcctgaccgtggcgcccttctacccagcccagtgtgcggccgccgcgctgtctgcacagctgggggcctctgagcctggtgggcttcctggactcttggcctcactccttgccccctccccacgacacccatgagccgaaaggatgtcactaaggatggctgattccccaagggcacccgctctccctccctccctgctggaggaacacgtcatatcagatgagaggaagatggcctctgatggacagaatttttctcttaactcagcttttgctactttggcaaaaactagcgaggggtagcagaaacctgcaccaaggattgtccctatgtcttggccactcctagagcgtgtgcagactgatgattttatatgtaaatcaagactcacatccctttcctagtcccccacatccaaagcccctcagcctgccttgcagaccaatgggctccatgttctgtagccccctcccctacgcctcacccctcctccctctcacaggttctgggcggccagtgagagaaacgcagtgggggaggcagggagtctggtgcctgcagagattctctgcttctttcctggggggaggtggggaggtcttagcaggagcgggccctgtacccacctgctgacctgctgtttggtagagaaataaaggttgtgtgactggggg

SEQ ID NO: 1870 - DNA, 776 bp, Homo sapiens
  source 1..776: mol_type = unassigned DNA; mol_type = unassigned DNA
ccgcctctgctcctgggctgcagtggacgctgtgggtgtggagcgcagagcctctctgtctgcacatcggggaggcgttctcggatcaccaagtggagggtgtgaaggggctctggtggctgggtcccaaggtgtccgcagggtcttgcactgcaggggacctgggctcactgggccagcaacgggagcacctcttgggccacactgcctcactgtcttcacctgccaccccctacatggccagggcactgtgtgctcttctgggcctcagcctctgacccctctgcacccagcctgtctttatccaggccttctcaggacagtctcgcaggcctggagtaggcagccgctgaccacctcttggaccccagaccacaccggaagaaatgagccagaagtgagcgctgggaacagagtggagtctccggtgtgtacctcagactgatggtgcccatgtgttcgcctccgccccccacccttgccaccacactcgcccacttgcccaccgggtcccgccggataaatgacaggcccgaggtcagaatggccatccccgggccccgtcctggggtctctgtccccacttccttctggcctgggaggtctgtaattcctgtctcctggactctcctgggaagttccctgctctgcagctctggcccaggagctgcaggctgggagggggcagccaagaagccggagctggcagcatacccagagatccggggcccccccacccccaaatcacgagtgcagctggagcttgctcccccttg

SEQ ID NO: 1871 - DNA, 989 bp, Homo sapiens
  source 1..989: mol_type = unassigned DNA; mol_type = unassigned DNA
ccagctgtaaatggaatcttaataacagtgaacagggcctgcgtagccttcatcttctataccgcaaaggtgaattccactcccgcatggttttgttggttgattttcacatgcatttccctattcagtgatctccaggctcccgctagcctccccaggctaatgccagctgttctccttctgagccgctgcactcctgctccagaacgtctgcctttcccacgctgtgcccttgcttctccctggcacggtgcagctctccccaccgccgccccgaccccgcacccctcccgggatccccagcccaccccacggcagtgttttgtgtgctggttgtgcccaggcgtgggccaagggcaggatgaggcttccctcctcccacccaccagcccctcgcctgacctgccgctctctctgacctgccacggtgcccccagaggaacttcctgaagtgctccgaagacaacccgctctttgccggcatcgactgtgaggtgttcgagtcacgcttccccaccaccatggccttgtccgtgctcgtgaccattgaaatgtgcaatgccctcaacagcgtctcggagaaccagtcgctgctgcggatgccgccctggatgaacccctggctgctggtggctgtggccatgtccatggccctgcacttcctcatcctgctcgtgccgcccctgcctctcattttccaggtgaccccactgagcgggcgccagtgggtggtggtgctccagatatctctgcctgtcatcctgctggatgaggccctcaagtacctgtcccggaaccacatgcacgaagaaatgagccagaagtgagcgctgggaacagagtggagtctccggtgtgtacctcagactgatggtgcccatgtgttcgcctccgccccccacccttgccaccacactcgcccacttgcccaccgggtcccgccggataaatgacaggcccgaggtcagaatggccatccccgggccccg

SEQ ID NO: 1872 - DNA, 604 bp, Homo sapiens
  source 1..604: mol_type = unassigned DNA; mol_type = unassigned DNA
gagtcacgcttccccaccaccatggccttgtccgtgctcgtgaccattgaaatgtgcaatgccctcaacagcgtctcggagaaccagtcgctgctgcggatgccgccctggatgaacccctggctgctggtggctgtggccatgtccatggccctgcacttcctcatcctgctcgtgccgcccctgcctctcattttccaggtgaccccactgagcgggcgccagtgggtggtggtgctccagatatctctgcctgtcatcctgctggatgaggccctcaagtacctgtcccggaaccacatgcacgcctgtctttatccaggccttctcaggacagtctcgcaggcctggagtaggcagccgctgaccacctcttggaccccagaccacaccggggccagggacacagcatcgtctcgctgtcagagctgctcagagagggaggaagcagggaagaaatgagccagaagtgagcgctgggaacagagtggagtctccggtgtgtacctcagactgatggtgcccatgtgttcgcctccgccccccacccttgccaccacactcgcccacttgcccaccgggtcccgccggataaatgacaggc

SEQ ID NO: 1873 - DNA, 3290 bp, Homo sapiens
  source 1..3290: mol_type = unassigned DNA; mol_type = unassigned DNA
atggaggcggcgcatctgctcccggccgccgacgtgctgcgccacttctcggtgacagccgagggcggcctgagcccggcgcaggtgaccggcgcgcgggagcgctacggccccaacgagctcccgagtgaggaagggaagtccctgtgggagctggtgctggaacagtttgaggacctcctggtgcgcatcctgctgctggctgcccttgtctcctttgtcctggcctggttcgaggagggcgaggagaccacgaccgccttcgtggagcccctggtcatcatgctgatcctcgtggccaacgccattgtgggcgtgtggcaggaacgcaacgccgagagtgccatcgaggccctgaaggagtatgagcctgagatgggcaaggtgatccgctcggaccgcaagggcgtgcagaggatccgtgcccgggacatcgtcccaggggacattgtagaagtggcagtgggggacaaagtgcctgctgacctccgcctcatcgagatcaagtccaccacgctgcgagtggaccagtccatcctgacgggtgaatctgtgtccgtgaccaagcacacagaggccatcccagaccccagagctgtgaaccaggacaagaagaacatgctgttttctggcaccaatatcacatcgggcaaagcggtgggtgtggccgtggccaccggcctgcacacggagctgggcaagatccggagccagatggcggcagtcgagcccgagcggacgccgctgcagcgcaagctggacgagtttggacggcagctgtcccacgccatctctgtgatctgcgtggccgtgtgggtcatcaacatcggccacttcgccgacccggcccacggtggctcctggctgcgtggcgctgtctactacttcaagatcgccgtggccctggcggtggcggccatccccgagggcctcccggctgtcatcactacatgcctggcactgggcacgcggcgcatggcacgcaagaacgccatcgtgcgaagcctgccgtccgtggagaccctgggctgcacctcagtcatctgctccgacaagacgggcacgctcaccaccaatcagatgtctgtctgccggatgttcgtggtagccgaggccgatgcgggctcctgccttttgcacgagttcaccatctcgggtaccacgtatacccccgagggcgaagtgcggcagggggatcagcctgtgcgctgcggccagttcgacgggctggtggagctggcgaccatctgcgccctgtgcaacgactcggctctggactacaacgaggccaagggtgtgtatgagaaggtgggagaggccacggagacagctctgacttgcctggtggagaagatgaacgtgttcgacaccgacctgcaggctctgtcccgggtggagcgagctggcgcctgtaacacggtcatcaagcagctgatgcggaaggagttcaccctggagttctcccgagaccggaaatccatgtccgtgtactgcacgcccacccgccctcaccctactggccagggcagcaagatgtttgtgaagggggctcctgagagtgtgatcgagcgctgtagctcagtccgcgtggggagccgcacagcacccctgacccccacctccagggagcagatcctggcaaagatccgggattggggctcaggctcagacacgctgcgctgcctggcactggccacccgggacgcgcccccaaggaaggaggacatggagctggacgactgcagcaagtttgtgcagtacgagacggacctgaccttcgtgggctgcgtaggcatgctggacccgccgcgacctgaggtggctgcctgcatcacacgctgctaccaggcgggcatccgcgtggtcatgatcacgggggataacaaaggcactgccgtggccatctgccgcaggcttggcatctttggggacacggaagacgtggcgggcaaggcctacacgggccgcgagtttgatgacctcagccccgagcagcagcgccaggcctgccgcaccgcccgctgcttcgcccgcgtggagcccgcacacaagtcccgcatcgtggagaacctgcagtcctttaacgagatcactgctatgactggcgatggagtgaacgacgcaccagccctgaagaaagcagagatcggcatcgccatgggctcaggcacggccgtggccaagtcggcggcagagatggtgctgtcagatgacaactttgcctccatcgtggctgcggtggaggagggccgggccatctacagcaacatgaagcaattcatccgctacctcatctcctccaatgttggcgaggtcgtctgcatcttcctcacggcaattctgggcctgcccgaagccctgatccctgtgcagctgctctgggtgaacctggtgacagacggcctacctgccacggctctgggcttcaacccgccagacctggacatcatggagaagctgccccggagcccccgagaagccctcatcagtggctggctcttcttccgatacctggctatcggagtgtacgtaggcctggccacagtggctgccgccacctggtggtttgtgtatgacgccgagggacctcacatcaacttctaccagctgaggaacttcctgaagtgctccgaagacaacccgctctttgccggcatcgactgtgaggtgttcgagtcacgcttccccaccaccatggccttgtccgtgctcgtgaccattgaaatgtgcaatgccctcaacagcgtctcggagaaccagtcgctgctgcggatgccgccctggatgaacccctggctgctggtggctgtggccatgtccatggccctgcacttcctcatcctgctcgtgccgcccctgcctctcattttccaggtgaccccactgagcgggcgccagtgggtggtggtgctccagatatctctgcctgtcatcctgctggatgaggccctcaagtacctgtcccggaaccacatgcacgcctgtctttatccaggccttctcaggacagtctcgcaggcctggagtaggcagccgctgaccacctcttggaccccagaccacaccgggttggcctctttgggccagggacacagcatcgtctcgctgtcagagctgctcagagagggaggaagcagggaagaaatgagccagaagtgagcgctgggaacagagtggagtctccggtgtgtacctcagactgatggtgcccatgtgttcgcctccgccccccacccttgccaccacactcgcccacttgcccaccgggtcccgccggataaatgacaggc

SEQ ID NO: 1874 - DNA, 3274 bp, Homo sapiens
  source 1..3274: mol_type = unassigned DNA; mol_type = unassigned DNA
ccggcggagaggcggcctcgacggtgcggacggcgcagacggccgggcgggcggcatggaggcggcgcatctgctcccggccgccgacgtgctgcgccacttctcggtgacagccgagggcggcctgagcccggcgcaggtgaccggcgcgcgggagcgctacggccccaacgagctcccgagtgaggaagggaagtccctgtgggagctggtgctggaacagtttgaggacctcctggtgcgcatcctgctgctggctgcccttgtctcctttgtcctggcctggttcgaggagggcgaggagaccacgaccgccttcgtggagcccctggtcatcatgctgatcctcgtggccaacgccattgtgggcgtgtggcaggaacgcaacgccgagagtgccatcgaggccctgaaggagtatgagcctgagatgggcaaggtgatccgctcggaccgcaagggcgtgcagaggatccgtgcccgggacatcgtcccaggggacattgtagaagtggcagtgggggacaaagtgcctgctgacctccgcctcatcgagatcaagtccaccacgctgcgagtggaccagtccatcctgacgggtgaatctgtgtccgtgaccaagcacacagaggccatcccagaccccagagctgtgaaccaggacaagaagaacatgctgttttctggcaccaatatcacatcgggcaaagcggtgggtgtggccgtggccaccggcctgcacacggagctgggcaagatccggagccagatggcggcagtcgagcccgagcggacgccgctgcagcgcaagctggacgagtttggacggcagctgtcccacgccatctctgtgatctgcgtggccgtgtgggtcatcaacatcggccacttcgccgacccggcccacggtggctcctggctgcgtggcgctgtctactacttcaagatcgccgtggccctggcggtggcggccatccccgagggcctcccggctgtcatcactacatgcctggcactgggcacgcggcgcatggcacgcaagaacgccatcgtgcgaagcctgccgtccgtggagaccctgggctgcacctcagtcatctgctccgacaagacgggcacgctcaccaccaatcagatgtctgtctgccggatgttcgtggtagccgaggccgatgcgggctcctgccttttgcacgagttcaccatctcgggtaccacgtatacccccgagggcgaagtgcggcagggggatcagcctgtgcgctgcggccagttcgacgggctggtggagctggcgaccatctgcgccctgtgcaacgactcggctctggactacaacgaggccaagggtgtgtatgagaaggtgggagaggccacggagacagctctgacttgcctggtggagaagatgaacgtgttcgacaccgacctgcaggctctgtcccgggtggagcgagctggcgcctgtaacacggtcatcaagcagctgatgcggaaggagttcaccctggagttctcccgagaccggaaatccatgtccgtgtactgcacgcccacccgccctcaccctactggccagggcagcaagatgtttgtgaagggggctcctgagagtgtgatcgagcgctgtagctcagtccgcgtggggagccgcacagcacccctgacccccacctccagggagcagatcctggcaaagatccgggattggggctcaggctcagacacgctgcgctgcctggcactggccacccgggacgcgcccccaaggaaggaggacatggagctggacgactgcagcaagtttgtgcagtacgagacggacctgaccttcgtgggctgcgtaggcatgctggacccgccgcgacctgaggtggctgcctgcatcacacgctgctaccaggcgggcatccgcgtggtcatgatcacgggggataacaaaggcactgccgtggccatctgccgcaggcttggcatctttggggacacggaagacgtggcgggcaaggcctacacgggccgcgagtttgatgacctcagccccgagcagcagcgccaggcctgccgcaccgcccgctgcttcgcccgcgtggagcccgcacacaagtcccgcatcgtggagaacctgcagtcctttaacgagatcactgctatgactggcgatggagtgaacgacgcaccagccctgaagaaagcagagatcggcatcgccatgggctcaggcacggccgtggccaagtcggcggcagagatggtgctgtcagatgacaactttgcctccatcgtggctgcggtggaggagggccgggccatctacagcaacatgaagcaattcatccgctacctcatctcctccaatgttggcgaggtcgtctgcatcttcctcacggcaattctgggcctgcccgaagccctgatccctgtgcagctgctctgggtgaacctggtgacagacggcctacctgccacggctctgggcttcaacccgccagacctggacatcatggagaagctgccccggagcccccgagaagccctcatcagtggctggctcttcttccgatacctggctatcggagtgtacgtaggcctggccacagtggctgccgccacctggtggtttgtgtatgacgccgagggacctcacatcaacttctaccagctgaggaacttcctgaagtgctccgaagacaacccgctctttgccggcatcgactgtgaggtgttcgagtcacgcttccccaccaccatggccttgtccgtgctcgtgaccattgaaatgtgcaatgccctcaacagcgtctcggagaaccagtcgctgctgcggatgccgccctggatgaacccctggctgctggtggctgtggccatgtccatggccctgcacttcctcatcctgctcgtgccgcccctgcctctcattttccaggtgaccccactgagcgggcgccagtgggtggtggtgctccagatatctctgcctgtcatcctgctggatgaggccctcaagtacctgtcccggaaccacatgcacgcctgtctttatccaggccttctcaggacagtctcgcaggcctggagtaggcagccgctgaccacctcttggaccccagaccacaccggaagaaatgagccagaagtgagcgctgggaacagagtggagtctccggtgtgtacctcagactgatggtgcccatgtgttcgcctccgccccccacccttgccaccacactcgcccacttgcccaccgggtcccgccggataaatgacaggc

SEQ ID NO: 1875 - DNA, 3197 bp, Homo sapiens
  source 1..3197: mol_type = unassigned DNA; mol_type = unassigned DNA
ccagcacggacatggcctcgcgcggcgcccgcccgggcccgagtcccccgcgccccgctttgtagccccccggcggagaggcggcctcgacggtgcggacggcgcagacggccgggcgggcggcatggaggcggcgcatctgctcccggccgccgacgtgctgcgccacttctcggtgacagccgagggcggcctgagcccggcgcaggtgaccggcgcgcgggagcgctacggccccaacgagctcccgagtgaggaagggaagtccctgtgggagctggtgctggaacagtttgaggacctcctggtgcgcatcctgctgctggctgcccttgtctcctttgtcctggcctggttcgaggagggcgaggagaccacgaccgccttcgtggagcccctggtcatcatgctgatcctcgtggccaacgccattgtgggcgtgtggcaggaacgcaacgccgagagtgccatcgaggccctgaaggagtatgagcctgagatgggcaaggtgatccgctcggaccgcaagggcgtgcagaggatccgtgcccgggacatcgtcccaggggacattgtagaagtggcagtgggggacaaagtgcctgctgacctccgcctcatcgagatcaagtccaccacgctgcgagtggaccagtccatcctgacgggtgaatctgtgtccgtgaccaagcacacagaggccatcccagaccccagagctgtgaaccaggacaagaagaacatgctgttttctggcaccaatatcacatcgggcaaagcggtgggtgtggccgtggccaccggcctgcacacggagctgggcaagatccggagccagatggcggcagtcgagcccgagcggacgccgctgcagcgcaagctggacgagtttggacggcagctgtcccacgccatctctgtgatctgcgtggccgtgtgggtcatcaacatcggccacttcgccgacccggcccacggtggctcctggctgcgtggcgctgtctactacttcaagatcgccgtggccctggcggtggcggccatccccgagggcctcccggctgtcatcactacatgcctggcactgggcacgcggcgcatggcacgcaagaacgccatcgtgcgaagcctgccgtccgtggagaccctgggctgcacctcagtcatctgctccgacaagacgggcacgctcaccaccaatcagatgtctgtctgccggatgttcgtggtagccgaggccgatgcgggctcctgccttttgcacgagttcaccatctcgggtaccacgtatacccccgagggcgaagtgcggcagggggatcagcctgtgcgctgcggccagttcgacgggctggtggagctggcgaccatctgcgccctgtgcaacgactcggctctggactacaacgaggccaagggtgtgtatgagaaggtgggagaggccacggagacagctctgacttgcctggtggagaagatgaacgtgttcgacaccgacctgcaggctctgtcccgggtggagcgagctggcgcctgtaacacggtcatcaagcagctgatgcggaaggagttcaccctggagttctcccgagaccggaaatccatgtccgtgtactgcacgcccacccgccctcaccctactggccagggcagcaagatgtttgtgaagggggctcctgagagtgtgatcgagcgctgtagctcagtccgcgtggggagccgcacagcacccctgacccccacctccagggagcagatcctggcaaagatccgggattggggctcaggctcagacacgctgcgctgcctggcactggccacccgggacgcgcccccaaggaaggaggacatggagctggacgactgcagcaagtttgtgcagtacgagacggacctgaccttcgtgggctgcgtaggcatgctggacccgccgcgacctgaggtggctgcctgcatcacacgctgctaccaggcgggcatccgcgtggtcatgatcacgggggataacaaaggcactgccgtggccatctgccgcaggcttggcatctttggggacacggaagacgtggcgggcaaggcctacacgggccgcgagtttgatgacctcagccccgagcagcagcgccaggcctgccgcaccgcccgctgcttcgcccgcgtggagcccgcacacaagtcccgcatcgtggagaacctgcagtcctttaacgagatcactgctatgactggcgatggagtgaacgacgcaccagccctgaagaaagcagagatcggcatcgccatgggctcaggcacggccgtggccaagtcggcggcagagatggtgctgtcagatgacaactttgcctccatcgtggctgcggtggaggagggccgggccatctacagcaacatgaagcaattcatccgctacctcatctcctccaatgttggcgaggtcgtctgcatcttcctcacggcaattctgggcctgcccgaagccctgatccctgtgcagctgctctgggtgaacctggtgacagacggcctacctgccacggctctgggcttcaacccgccagacctggacatcatggagaagctgccccggagcccccgagaagccctcatcagtggctggctcttcttccgatacctggctatcggagtgtacgtaggcctggccacagtggctgccgccacctggtggtttgtgtatgacgccgagggacctcacatcaacttctaccagctgaggaacttcctgaagtgctccgaagacaacccgctctttgccggcatcgactgtgaggtgttcgagtcacgcttccccaccaccatggccttgtccgtgctcgtgaccattgaaatgtgcaatgccctcaacagcgtctcggagaaccagtcgctgctgcggatgccgccctggatgaacccctggctgctggtggctgtggccatgtccatggccctgcacttcctcatcctgctcgtgccgcccctgcctctcattttccaggtgaccccactgagcgggcgccagtgggtggtggtgctccagatatctctgcctgtcatcctgctggatgaggccctcaagtacctgtcccggaaccacatgcacgaaatgagccagaagtgagcgctgggaacagagtggagtctccggtgtgtacctcagactgatggtgcccatgtgttcgcctccgccccccacc

SEQ ID NO: 1876 - DNA, 429 bp, Homo sapiens
  source 1..429: mol_type = unassigned DNA; mol_type = unassigned DNA
gagtcacgcttccccaccaccatggccttgtccgtgctcgtgaccattgaaatgtgcaatgccctcaacagcgtctcggagaaccagtcgctgctgcggatgccgccctggatgaacccctggctgctggtggctgtggccatgtccatggccctgcacttcctcatcctgctcgtgccgcccctgcctctcattttccaggtgaccccactgagcgggcgccagtgggtggtggtgctccagatatctctgcctgtcatcctgctggatgaggccctcaagtacctgtcccggaaccacatgcacgggccagggacacagcatcgtctcgctgtcagagctgctcagagagggaggaagcagggaagaaatgagccagaagtgagcgctgggaacagagtggagtctccggtgtgtacctcagactga

SEQ ID NO: 1877 - DNA, 868 bp, Homo sapiens
  source 1..868: mol_type = unassigned DNA; mol_type = unassigned DNA
tcctgaagtgctccgaagacaacccgctctttgccggcatcgactgtgaggtgttcgagtcacgcttccccaccaccatggccttgtccgtgctcgtgaccattgaaatgtgcaatgccctcaacagcgtctcggagaaccagtcgctgctgcggatgccgccctggatgaacccctggctgctggtggctgtggccatgtccatggccctgcacttcctcatcctgctcgtgccgcccctgcctctcattttccaggtgaccccactgagcgggcgccagtgggtggtggtgctccagatatctctgcctgtcatcctgctggatgaggccctcaagtacctgtcccggaaccacatgcacggtgagtgggaggccccgtcccgcctccagcctgcctccccgcccgcctctgctcctgggctgcagtggacgctgtgggtgtggagcgcagagcctctctgtctgcacatcggggaggcgttctcggatcaccaagtggagggtgtgaaggggctctggtggctgggtcccaaggtgtccgcagggtcttgcactgcaggggacctgggctcactgggccagcaacgggagcacctcttgggccacactgcctcactgtcttcacctgccaccccctacatggccagggcactgtgtgctcttctgggcctcagcctctgacccctctgcacccagcctgtctttatccaggccttctcaggacagtctcgcaggcctggagtaggcagccgctgaccacctcttggaccccagaccacaccgggttggcctctttggtatcaccttgtgggtgggtcaaggggagggttgtttctgagctcacagctctgggtctgccttaaccc

SEQ ID NO: 1878 - DNA, 1159 bp, Homo sapiens
  source 1..1159: mol_type = unassigned DNA; mol_type = unassigned DNA
ccgtgtgcgaatgtgtatttgtgtgcacatggcctgagtgcctgagtgagaggtgtgtgtaatgtgtatattttgcatgtgtgctctggtgcattttgagcgtgagtacaagcagaaggatttgtgccggcgtgtgactgtgcacacactcgtattcacatgtgaggatgcctgtggggaatggtgagcgtgtgtgttgctggacatggatggattctgcatctctgcacctcagggcagatatgtaggtgtttgcttgtgtttgccggatggtgtggcatgtgctaggtttttgcacatgtctgattcttgggcatgccctcttcgtgtgcgtgtgtgtgtgtgtgtgtgtgtgtgtgtgtgtgtacttggcctctgctaggcctaaagagcaggtatgtccaggatccagagctgggactggggaaggcaggactggccaggcccgaggcagagctgtgtacacacacccttcacatcacagctggcggagggaggaggggctgctgtggagacagtgggtgggtgagctcccagccttgggtctgagcaggagctggagcctgcatctgccgggggctaggcctaccggggctagagctcatgactctgttccagcatcttcctcacggcaattctgggcctgcccgaagccctgatccctgtgcagctgctctgggtgaacctggtgacagacggcctacctgccacggctctgggcttcaacccgccagacctggacatcatggagaagctgccccggagcccccgagaagccctcatcagtggctggctcttcttccgatacctggctatcggagtgtacgtaggcctggccacagtggctgccgccacctggtggtttgtgtatgacgccgagggacctcacatcaacttctaccagctgaggaacttcctgaagtgctccgaagacaacccgctctttgccggcatcgactgtgaggtgttcgagtcacgcttccccaccaccatggccttgtccgtgctcgtgaccattgaaatgtgcaatgccctcaacagcgtctcggagaaccagtcgctgctgcggatgccgccctggatgaacccctggctgctggtggctgtggccatgtccatggccctgcacttcctcatcctgctcgtgccgcccctgcct

SEQ ID NO: 1879 - DNA, 428 bp, Homo sapiens
  source 1..428: mol_type = unassigned DNA; mol_type = unassigned DNA
cctggacatcatggagaagctgccccggagcccccgagaagccctcatcagtggctggctcttcttccgatacctggctatcggagtgtacgtaggcctggccacagtggctgccgccacctggtggtttgtgtatgacgccgagggacctcacatcaacttctaccagctggtgagcaagggctggccagggagcctgttgaacttacagctcgagttgttggagttccaggggagatgggtctagagccgcatgggtggcctgcagtgtccttccccactcgctatacacgaataaacatccccacctggggagccgagctcagagcccacgggaaacccagagacaccagcacggacccccaagccaaaggcgcctccccatcccagtcagttagcggggaccaagaggcctcactgccagatgt

SEQ ID NO: 1880 - DNA, 894 bp, Homo sapiens
  source 1..894: mol_type = unassigned DNA; mol_type = unassigned DNA
gtccaggacattgggacaaaccggagccggacacatctggcagagcagacggtccctgcctcagcctggaccctgcgttctatttccctcctggtgggcacggacggccaggccggtttggccctcggtcgggcagggggcctgcaggaccccaccctggggtcgactggccgcccggggaggagggaggcgaccccgcccgcctaagcacgcccctgcgctccccagatgttcgtggtagccgaggccgatgcgggctcctgccttttgcacgagttcaccatctcgggtaccacgtatacccccgagggcgaagtgcggcagggggatcagcctgtgcgctgcggccagttcgacgggctggtggagctggcgaccatctgcgccctgtgcaacgactcggctctggactacaacgaggccaagggtgtgtatgagaaggtgggagaggccacggagacagctctgacttgcctggtggagaagatgaacgtgttcgacaccgacctgcaggctctgtcccgggtggagcgagctggcgcctgtaacacggtcatcaagcagctgatgcggaaggagttcaccctggagttctcccgagaccggaaatccatgtccgtgtactgcacgcccacccgccctcaccctactggccagggcagcaagatgtttgtgaagggggctcctgagagtgtgatcgagcgctgtagctcagtccgcgtggggagccgcacagcacccctgacccccacctccagggagcagatcctggcaaagatccgggattggggctcaggctcagacacgctgcgctgcctggcactggccacccgggacgcgcccccaaggaaggaggacatggagctggacgactgcagcaagtttgtgcagtac

SEQ ID NO: 1881 - DNA, 230 bp, Homo sapiens
  source 1..230: mol_type = unassigned DNA; mol_type = unassigned DNA
cagccgagggcggcctgagcccggcgcaggtgaccggcgcgcgggagcgctacggccccaacgagctcccgagtgaggaagggaagtccctgtgggagctggtgctggaacagtttgaggacctcctggtgcgcatcctgctgctggctgcccttgtctcctttgtaagtagggccctgccagccatcctgtggtagtcggtagccctggagggagagccaggctgggca

SEQ ID NO: 1882 - DNA, 4826 bp, Homo sapiens
  source 1..4826: mol_type = unassigned DNA; mol_type = unassigned DNA
atcctggcgcgggccggggccgccgccgccactgccgtcgggtaaggtcccagcacggacatggcctcgcgcggcgcccgcccgggcccgagtcccccgcgccccgctttgtagccccccggcggagaggcggcctcgacggtgcggacggcgcagacggccgggcgggcggcatggaggcggcgcatctgctcccggccgccgacgtgctgcgccacttctcggtgacagccgagggcggcctgagcccggcgcaggtgaccggcgcgcgggagcgctacggccccaacgagctcccgagtgaggaagggaagtccctgtgggagctggtgctggaacagtttgaggacctcctggtgcgcatcctgctgctggctgcccttgtctcctttgtcctggcctggttcgaggagggcgaggagaccacgaccgccttcgtggagcccctggtcatcatgctgatcctcgtggccaacgccattgtgggcgtgtggcaggaacgcaacgccgagagtgccatcgaggccctgaaggagtatgagcctgagatgggcaaggtgatccgctcggaccgcaagggcgtgcagaggatccgtgcccgggacatcgtcccaggggacattgtagaagtggcagtgggggacaaagtgcctgctgacctccgcctcatcgagatcaagtccaccacgctgcgagtggaccagtccatcctgacgggtgaatctgtgtccgtgaccaagcacacagaggccatcccagaccccagagctgtgaaccaggacaagaagaacatgctgttttctggcaccaatatcacatcgggcaaagcggtgggtgtggccgtggccaccggcctgcacacggagctgggcaagatccggagccagatggcggcagtcgagcccgagcggacgccgctgcagcgcaagctggacgagtttggacggcagctgtcccacgccatctctgtgatctgcgtggccgtgtgggtcatcaacatcggccacttcgccgacccggcccacggtggctcctggctgcgtggcgctgtctactacttcaagatcgccgtggccctggcggtggcggccatccccgagggcctcccggctgtcatcactacatgcctggcactgggcacgcggcgcatggcacgcaagaacgccatcgtgcgaagcctgccgtccgtggagaccctgggctgcacctcagtcatctgctccgacaagacgggcacgctcaccaccaatcagatgtctgtctgccggatgttcgtggtagccgaggccgatgcgggctcctgccttttgcacgagttcaccatctcgggtaccacgtatacccccgagggcgaagtgcggcagggggatcagcctgtgcgctgcggccagttcgacgggctggtggagctggcgaccatctgcgccctgtgcaacgactcggctctggactacaacgaggccaagggtgtgtatgagaaggtgggagaggccacggagacagctctgacttgcctggtggagaagatgaacgtgttcgacaccgacctgcaggctctgtcccgggtggagcgagctggcgcctgtaacacggtcatcaagcagctgatgcggaaggagttcaccctggagttctcccgagaccggaaatccatgtccgtgtactgcacgcccacccgccctcaccctactggccagggcagcaagatgtttgtgaagggggctcctgagagtgtgatcgagcgctgtagctcagtccgcgtggggagccgcacagcacccctgacccccacctccagggagcagatcctggcaaagatccgggattggggctcaggctcagacacgctgcgctgcctggcactggccacccgggacgcgcccccaaggaaggaggacatggagctggacgactgcagcaagtttgtgcagtacgagacggacctgaccttcgtgggctgcgtaggcatgctggacccgccgcgacctgaggtggctgcctgcatcacacgctgctaccaggcgggcatccgcgtggtcatgatcacgggggataacaaaggcactgccgtggccatctgccgcaggcttggcatctttggggacacggaagacgtggcgggcaaggcctacacgggccgcgagtttgatgacctcagccccgagcagcagcgccaggcctgccgcaccgcccgctgcttcgcccgcgtggagcccgcacacaagtcccgcatcgtggagaacctgcagtcctttaacgagatcactgctatgactggcgatggagtgaacgacgcaccagccctgaagaaagcagagatcggcatcgccatgggctcaggcacggccgtggccaagtcggcggcagagatggtgctgtcagatgacaactttgcctccatcgtggctgcggtggaggagggccgggccatctacagcaacatgaagcaattcatccgctacctcatctcctccaatgttggcgaggtcgtctgcatcttcctcacggcaattctgggcctgcccgaagccctgatccctgtgcagctgctctgggtgaacctggtgacagacggcctacctgccacggctctgggcttcaacccgccagacctggacatcatggagaagctgccccggagcccccgagaagccctcatcagtggctggctcttcttccgatacctggctatcggagtgtacgtaggcctggccacagtggctgccgccacctggtggtttgtgtatgacgccgagggacctcacatcaacttctaccagctgaggaacttcctgaagtgctccgaagacaacccgctctttgccggcatcgactgtgaggtgttcgagtcacgcttccccaccaccatggccttgtccgtgctcgtgaccattgaaatgtgcaatgccctcaacagcgtctcggagaaccagtcgctgctgcggatgccgccctggatgaacccctggctgctggtggctgtggccatgtccatggccctgcacttcctcatcctgctcgtgccgcccctgcctctcattttccaggtgaccccactgagcgggcgccagtgggtggtggtgctccagatatctctgcctgtcatcctgctggatgaggccctcaagtacctgtcccggaaccacatgcacgcctgtctttatccaggccttctcaggacagtctcgcaggcctggagtaggcagccgctgaccacctcttggaccccagaccacaccgggttggcctctttgaagaaatgagccagaagtgagcgctgggaacagagtggagtctccggtgtgtacctcagactgatggtgcccatgtgttcgcctccgccccccacccttgccaccacactcgcccacttgcccaccgggtcccgccggataaatgacaggcccgaggtcagaatggccatccccgggccccgtcctggggtctctgtccccacttccttctggcctgggaggtctgtaattcctgtctcctggactctcctgggaagttccctgctctgcagctctggcccaggagctgcaggctgggagggggcagccaagaagccggagctggcagcatacccagagatccggggcccccccacccccaaatcacgagtgcagctggagcttgctcccccttgttcggaagctggacgttcacttggtgactggtgcctctgcactgacggaggactctgggggtccttcttaccggctctgacctctctcttcgtgcctggtctgggactgggtcagccctgggggatcagaaggggccatctgggcccagctgtgtacagcgagggtgggcagccccctccactccactctgcttccacaaagtcggctcccgagagctcgaggctgcttctgtttatatgtgcagggcccgggcgggtgaagggtcagagagacggacacaaggagccggcaggagggcggagcgaggatgtcctttcccgggagacaagtcgggaaagcctggctggactgcctcagccccgcgcgcctcctggactcagggttccccgtcctgagctcgggagatgttcagagtcacactgccgcccggtctgccacgcagaggtccaacttgccacccgcgtccctggtacctgagaccaccgacatcctcaggttcctgaccgtggcgcccttctacccagcccagtgtgcggccgccgcgctgtctgcacagctgggggcctctgagcctggtgggcttcctggactcttggcctcactccttgccccctccccacgacacccatgagccgaaaggatgtcactaaggatggctgattccccaagggcacccgctctccctccctccctgctggaggaacacgtcatatcagatgagaggaagatggcctctgatggacagaatttttctcttaactcagcttttgctactttggcaaaaactagcgaggggtagcagaaacctgcaccaaggattgtccctatgtcttggccactcctagagcgtgtgcagactgatgattttatatgtaaatcaagactcacatccctttcctagtcccccacatccaaagcccctcagcctgccttgcagaccaatgggctccatgttctgtagccccctcccctacgcctcacccctcctccctctcacaggttctgggcggccagtgagagaaacgcagtgggggaggcagggagtctggtgcctgcagagattctctgcttctttcctggggggaggtggggaggtcttagcaggagcgggccctgtacccacctgctgacctgctgtttggtagagaaataaaggttgtgtgactgggggaacgg

SEQ ID NO: 1883 - DNA, 8593 bp, Homo sapiens
  source 1..8593: mol_type = unassigned DNA; mol_type = unassigned DNA
agccatcacccggcagcctcttgtccagcgctgacccttgggcccagcccgagcaaggaccgcagcaaacatgggtgacatgaccaacagcgacttttactccaaaaaccaaagaaatgagtcgagccatgggggcgagttcgggtgcacaatggaggagctccgctccctcatggagctgcggggcactgaggctgtggtcaagatcaaggagacttatggggacaccgaagccatctgccggcgcctcaaaacctcacctgttgaaggtttgccgggcaccgctccagacctggaaaagagaaagcaaatttttgggcaaaactttatacctccaaagaagccaaaaaccttcctgcagctcgtgtgggaggcgctgcaggacgtgacgctcatcatcctggagattgccgccatcatctccctggggctgtccttctaccacccgcccggcgagggcaacgaaggatgtgcgacggcccagggtggggcagaggatgaaggagaggcagaggcaggttggatcgagggggccgccattctcctctcagttatctgtgtggtcctggtcacggccttcaatgactggagcaaagagaaacagttccggggcctgcagagccgcatcgagcaggaacagaaatttaccgtggtccgggctggccaggtggtccagatccctgtggctgagatcgtggttggggacatagcccaggtcaaatatggtgacctcctccctgccgacggcctcttcatccagggcaatgacctcaagattgatgaaagctccctaactggagagtctgaccaggtgcgcaagtccgtggacaaggaccccatgctgctgtcaggaacccacgtgatggagggctcaggacggatgttggtgactgctgtgggtgtgaactctcagactggcatcatctttaccctcctgggggctggtggtgaagaggaagagaagaaagacaaaaaaggtgtgaagaagggggatggccttcagctaccagcagcagacggtgcggcagcttcaaatgctgcagatagtgcgaatgccagcctagtcaatggtaaaatgcaggatggcaatgtggacgccagccagagcaaagccaaacaacaggacggggcagccgccatggagatgcagcccctcaagagtgccgagggcggcgacgctgacgacaggaagaaggccagcatgcacaagaaggagaagtccgtgctgcagggcaagctcaccaagctggctgtgcagatcgggaaggcgggcttggtgatgtcagccatcacggtgatcatcctggtgctctacttcactgtggacaccttcgtggtcaacaagaagccgtggctgcctgagtgcacgcccgtctacgtgcagtactttgtcaagttcttcatcattggcgtgacggtgctggtggtcgccgtgcccgaggggctccctctggccgtcaccatctcgttggcctattcggtgaagaaaatgatgaaggacaacaacctggtacgccacctggatgcctgtgagaccatgggcaatgccacagccatctgctcagacaagacaggcacgctgaccaccaatcgcatgacagtggtacaggcctatgtcggcgacgtccactataaagagatccccgaccccagctccatcaacaccaagaccatggagctgctgatcaatgccatcgccatcaacagcgcctacaccaccaagattctgcccccagagaaggagggcgccctgcctcggcaggtgggcaacaagacggagtgcggcctgctgggcttcgtgctggacctgaagcaggactacgagcccgtgcgcagccagatgccagaggagaagttgtacaaagtgtacaccttcaactccgtgcgcaagtccatgagcactgtcatcaagctgcccgacgagagcttccgcatgtacagcaagggggcttctgagatcgtgctcaagaagtgctgcaaaatcctcaatggggcgggagagcctcgtgtcttccggccccgcgaccgggacgagatggtaaagaaggtgattgagcccatggcttgcgatgggctccgcactatctgcgtggcctaccgcgacttccccagcagcccggagccggactgggacaatgagaatgacatcctcaacgaactcacctgcatctgcgtggtgggcatcgaggacccggtgcggccagaggtcccagaagccatccgcaagtgccagcgggcaggcatcacggtccgcatggtcactggcgacaatatcaacacggctcgggccatcgccatcaagtgtggcatcatccatcctggggaggactttctgtgcctcgagggcaaggagttcaacaggaggatccgcaacgagaagggggagattgagcaggagcgaattgacaagatctggccaaagctgcgggtgctggctcgctcctccccaacggacaagcataccctggttaaaggcatcatcgacagcacacacactgagcagcggcaggtggtggccgtgacgggggacgggaccaacgacgggcctgcactcaagaaggccgacgtgggcttcgccatgggcatcgcaggcactgacgtggccaaggaggcctcagacatcatcctgacagacgacaatttcagcagcatcgtcaaggcagtgatgtggggccgcaacgtctatgacagcatctccaaattcttgcagttccagctcaccgtcaacgtggtggccgtgattgtggccttcacaggcgcctgcatcacgcaggactcccctctgaaggccgtgcagatgctctgggtgaacctcatcatggacacgtttgcctcgctggcactggccactgagccgcccacggagaccctgctgctgaggaagccgtacggccgcaacaagccgctcatctccaggaccatgatgaagaacatcctgggccatgctgtctaccagcttgccctcatcttcaccctgctctttgttggcgagaagatgttccagatcgacagcgggaggaacgcgcccctgcattcgccaccctcagaacattacaccatcatcttcaacaccttcgtcatgatgcagctcttcaacgagatcaacgcccgcaagatccacggcgagcgcaatgtctttgacggcatcttccggaaccccatcttctgcaccatcgtgctgggcacctttgccatccagatagtgatcgtgcagtttggagggaagccattcagctgctctccactgcagctggaccagtggatgtggtgcatattcattgggttaggagagctcgtttggggccaggtcatcgccaccatcccgaccagcagactcaagttcctcaaggaggcaggcaggctcacacagaaggaggagatcccggaggaggagctcaacgaggacgtggaggagatcgaccacgcggagcgggagctgcggcggggccagatcctgtggttccgaggcctgaatcggatccagacacagatccgcgtcgtgaaggcgttccgtagctctctctatgaaggtttagaaaagcctgaatctcgaacctccatccataacttcatggctcatcctgaattccggatcgaagattcccagccccacatccccctcattgatgacaccgacctggaagaagatgccgcgctcaagcagaactcgagcccgccgtcatccctcaacaagaacaacagcgccatcgacagtgggatcaacctgacgaccgacacaagcaaatcagctacctcttcaagtccagggagccccatccacagcctggagacgtcgctttagctgaggaccctctcgcctgcccgcccgccctcatggaccccgctgccacccgctttccgggcacccatccatccaggcacccaactcacccaagcagcaacgagcaacaatcggaaaccaaatactggagagaaaaccaacgtttccacccacagaccctttctctggctgcgatgctgtttgaactctttttcacttcaaggcaaggggcgggatctccactgggggcttacgggagtgagcggttttcccaaaacaagcccttcctggctcccacccagacatggaccagccatgcacccgcccagccaccacgtcccccgcatgaatgtactgtacactttcaatcctccccttgtttggtttttgggggttggggaggggtttttgtttgtttgtttgttttcttaggcgggaactgcaaacagactcttttctgagactatttatccaatccactggtctgtgagtttttgaaatgcttgcacagcatggtctcagttgtatagattaatttaataactttttgaaattgcagagcttaactcgcctagtagatttgcaccaatggaaccgaagaacttcatagacactcacaaggttatatccatttctttgtatctatatcaacgtatacttttccgagactgtatacgtccatatagataggtagatatatatatatatatataaatatatatacatggatatataaagtttctttgccggcatgttgccttgtttccgcttaaattgctctattttaacttatttatgtcctaaaagaagaatgtaatttgtttacaaacctgtagataacgtctttggctatttgtatggtttaagaacactggtggctgagatgctataaaaacagctcggcccaacagacacttcccctgggttgcatcctggatgttttatgatagccatgctctgatttttgcctgctatttccgttcaataatgtcactaccgtgagaggctcaggcagaagccaaatgctaccgagttgccatcctgaggggtttaacaacatgctccgtagacgaagggagaggaggagagaaggcttcctgggtttgcaacactaacggccatccggcccaaggatgccaggatctgcaaagcactgctcgaagacttttctctcaatgaaactcgcttgagtttactaagagcatttcaaaaataggttctctttggcactgtctgtacagagattgaggtagtgttgaaatattataaatggtattgtgttgatttttttttttatttagtaacttacaggtttgtttccttattaatggcagcatctgagctgttggcatattggatgaggatcagtatggcttgctgcttttatttttatttttgaagaagaatagcctttttctctgcactatttagatccgaatgaaccttatgatgtgtatattgagatgtactcagtgtgattttaaaccaaattgtcttcctgtagtcacaatatatactgtagccttttaacagcaagtcttgctttcccaaacagaaagccattctgaaaccctacagtatcacaggtgagaaaaggtggttattttttccccaagacaacagcactagtaatcccacttaataagagcttatttaattggatgtcagcctcttaactgctaagcactttgtgggtctcagcgtttttcataaaagaacttttgtatttaatacaaagtttgctttgagacttttcagcatatgatcttttttccataaacttgtacagtgcaaaagacattttgaataccatgatcgatgatgtcccatgcttcgaggaaaaccaaacactttccgcctctcttgcaaaatccattcctcatgctgaccctcctcacgatggctgtgtcagcccagccccttcccttctccaggcccagagaactcttccacaaacaagatgagagccactcgggaaaagagccatagtcaactgggagggcctacatctggatggcggtggaaaaacttgagggtttggggttcaaagtcagcccatcccacctggcaaaatcctcctggaaggaggaccttcaagagcgcatcacctgaatgtcgtgaagaagtatctctgaatgtatccaggagaggaactgcataaccaaaggggtgaccagccctcagatgtgcttattggattccagtacaaacgccaccaaagccagcccactgctctcctacaaggaaggaaagatctgcacgtgtaaaacatggggcagccttggaacatggtgttttttggagtttcctttctcacagttttccatctccccacttctttgatcagtcatgtgtccgtgacctcgttccatgacatcaggatagctgtgtttgcacaccatgctccatgttcattcggagccaggaggggttctcagtggagcctggcttagggaacagggagcgatggaagaatgccaacattagcgttggtcttctcttgtcaggaatgaaggatgcttgcacacatgcaccccctcactctcacacttgcacacatacacacacacacacacgaaatggttggtttgtcaaaactcactgtagtacataaagcttgcactctgcgtcctatatctagcagcatggggtacgtttggcagttcactccattagggggtaaataatttatgaccattcatctgtttttatgaatttttttatctagacaataatgtaaataaagaactcaccatctctgttcatttaatactatgcaatggttatgctttcaatcgctggctcttctgactcgtgcagtgtggttctgaaatgtttgtggtttaaaaaaaaaagcaaaaaacaacatcaaacagaacatagtaaatatatctgtaatgtatacttttttctactttgggactgcatcatccacatagcttcttttctgtcctctagacaagggctccaggagtaagtggcagatttggttctgagagctaagctcaccaacttgtctccccctcaacagatgagggaagggcagggagcccgttcagtgactcctggcgctgcagaatcactcatctttggaggtgagcagagagagctctgaggagtttccttcttgcaactcaggcggagctttctttaactcaggagcagcctccattgctcccgccaacccctcaccatggccccttgtccccttgtcccaaccatagcatagagatgacaagagagaggcagtcctatttctgagactggaccaattaaaatgactgcactggctcaaaggactctgaacctgtcttgtcctgggtcctccagttgttggaagccactcttttccccaaccatgctgaaatgccacctttaccacacactgatgtcttacatagacttagatctatttctggaacttctcttctcttcgcttacttgggtgtctcatctggcaccagccatacaattttaactattgtcaatttctaatgtcttattatgtggtgggatgagtcccttcactcttcttttacaaaatttcctagttattctctcacatctattcttccacataaactttaaattgtgcccagtcctccaccccctgtcccattcccacccccaaattctgggctctgtcattccctgtgccatcatcttccccccattgtaattactgtccactcagggctgtgaaatagactatgttctgtaaagagggacaaaaagggcatcctgatcttgagagaagcctgctgttcctcccatcatttcacctgccccctaagcccaggagttgtcatgagaggtcaccaggcccccactcaatctcagcttgggaaccaaagtcacccaccttggttgtgttggggtggacccgccatctgtccctggtccagacgagaaagaggagtctctcctaggcctggagctgggaaagaatgtgtggcccagttgtctgcacttctaattctcatcatggagaaacctttattcctatctccctttcctgaactggttttttgttgtttttgtttcattttgttttggggggatagtttcttgctctttaatttggagtctccagtacctttgggatgcaggcagttcttgcctgggccttctcggaaccctcactcccctagcccactcttgcgctacctgcaggaggctgccaacctggtgcattctgacaagcctcccacccaaatctctctcctgccattgtgtccaaaatcccaccattagaggctcttgtagggaagagcgtttcttgaaggcttttaggccttccagagccaggagggaagtcagacaatagcaggaagtccccaggccttttcaaagttccaaaccaagctctcctgattttaatgtagagatcataccaacccaggtgggggaggagggtccccagccccaggcagcagccatcaccccctccactgaaaacaatattggaggctgctttgggactgcccttctcagccccctaagtctgttttgtaatgcctgtggtgctctccctcctggacctttcctctcgggggtcaccacactttgctaactcttgtgtgcacatattttataatagagtagcgagggaatggtgccgcctccagcttccgtaagctgcccgggctctggggggctctgggacaatcggggctgggaagtgactgtgctcttattgtacactctttatttctctgtatctttggcttgtgctctttgtaattaatgggatttgtctgccttttcaacactatactgagcaataacaataaatgcacacgtggaaatgca

SEQ ID NO: 1884 - DNA, 8900 bp, Homo sapiens
  source 1..8900: mol_type = unassigned DNA; mol_type = unassigned DNA
ggcgagatgctctcctagaaccggcgccggcgcctccgccccccgccccccacccgctcgggcaggatggtacagtctgcagaggggcccgggcacgctggctgggctcagccgcggcaccagctgccgcaccgcgattacggggctgcccgccgggaaaccgtgcaggattggtggtgattttcatagccaagagccaccacccctgaccatgtagatgccagttccagggagcagcatgggccccactgaatggagactcctgggtctacagccctgagcccctccggcccctggacctcgtcccacaccggaggacacctcttggagctcaccaccactgtcaccagcccgcctcggccacccccaccccccgggacccggagtcggccgcctggtgccacagctgaccagtgagggtgtgctgaggacagccacaagcagccatcacccggcagcctcttgtccagcgctgacccttgggcccagcccgagcaaggaccgcagcaaacatgggtgacatgaccaacagcgacttttactccaaaaaccaaagaaatgagtcgagccatgggggcgagttcgggtgcacaatggaggagctccgctccctcatggagctgcggggcactgaggctgtggtcaagatcaaggagacttatggggacaccgaagccatctgccggcgcctcaaaacctcacctgttgaaggtttgccgggcaccgctccagacctggaaaagagaaagcaaatttttgggcaaaactttatacctccaaagaagccaaaaaccttcctgcagctcgtgtgggaggcgctgcaggacgtgacgctcatcatcctggagattgccgccatcatctccctggggctgtccttctaccacccgcccggcgagggcaacgaaggatgtgcgacggcccagggtggggcagaggatgaaggagaggcagaggcaggttggatcgagggggccgccattctcctctcagttatctgtgtggtcctggtcacggccttcaatgactggagcaaagagaaacagttccggggcctgcagagccgcatcgagcaggaacagaaatttaccgtggtccgggctggccaggtggtccagatccctgtggctgagatcgtggttggggacatagcccaggtcaaatatggtgacctcctccctgccgacggcctcttcatccagggcaatgacctcaagattgatgaaagctccctaactggagagtctgaccaggtgcgcaagtccgtggacaaggaccccatgctgctgtcaggaacccacgtgatggagggctcaggacggatgttggtgactgctgtgggtgtgaactctcagactggcatcatctttaccctcctgggggctggtggtgaagaggaagagaagaaagacaaaaaagccaaacaacaggacggggcagccgccatggagatgcagcccctcaagagtgccgagggcggcgacgctgacgacaggaagaaggccagcatgcacaagaaggagaagtccgtgctgcagggcaagctcaccaagctggctgtgcagatcgggaaggcgggcttggtgatgtcagccatcacggtgatcatcctggtgctctacttcactgtggacaccttcgtggtcaacaagaagccgtggctgcctgagtgcacgcccgtctacgtgcagtactttgtcaagttcttcatcattggcgtgacggtgctggtggtcgccgtgcccgaggggctccctctggccgtcaccatctcgttggcctattcggtgaagaaaatgatgaaggacaacaacctggtacgccacctggatgcctgtgagaccatgggcaatgccacagccatctgctcagacaagacaggcacgctgaccaccaatcgcatgacagtggtacaggcctatgtcggcgacgtccactataaagagatccccgaccccagctccatcaacaccaagaccatggagctgctgatcaatgccatcgccatcaacagcgcctacaccaccaagattctgcccccagagaaggagggcgccctgcctcggcaggtgggcaacaagacggagtgcggcctgctgggcttcgtgctggacctgaagcaggactacgagcccgtgcgcagccagatgccagaggagaagttgtacaaagtgtacaccttcaactccgtgcgcaagtccatgagcactgtcatcaagctgcccgacgagagcttccgcatgtacagcaagggggcttctgagatcgtgctcaagaagtgctgcaaaatcctcaatggggcgggagagcctcgtgtcttccggccccgcgaccgggacgagatggtaaagaaggtgattgagcccatggcttgcgatgggctccgcactatctgcgtggcctaccgcgacttccccagcagcccggagccggactgggacaatgagaatgacatcctcaacgaactcacctgcatctgcgtggtgggcatcgaggacccggtgcggccagaggtcccagaagccatccgcaagtgccagcgggcaggcatcacggtccgcatggtcactggcgacaatatcaacacggctcgggccatcgccatcaagtgtggcatcatccatcctggggaggactttctgtgcctcgagggcaaggagttcaacaggaggatccgcaacgagaagggggagattgagcaggagcgaattgacaagatctggccaaagctgcgggtgctggctcgctcctccccaacggacaagcataccctggttaaaggcatcatcgacagcacacacactgagcagcggcaggtggtggccgtgacgggggacgggaccaacgacgggcctgcactcaagaaggccgacgtgggcttcgccatgggcatcgcaggcactgacgtggccaaggaggcctcagacatcatcctgacagacgacaatttcagcagcatcgtcaaggcagtgatgtggggccgcaacgtctatgacagcatctccaaattcttgcagttccagctcaccgtcaacgtggtggccgtgattgtggccttcacaggcgcctgcatcacgcaggactcccctctgaaggccgtgcagatgctctgggtgaacctcatcatggacacgtttgcctcgctggcactggccactgagccgcccacggagaccctgctgctgaggaagccgtacggccgcaacaagccgctcatctccaggaccatgatgaagaacatcctgggccatgctgtctaccagcttgccctcatcttcaccctgctctttgttggcgagaagatgttccagatcgacagcgggaggaacgcgcccctgcattcgccaccctcagaacattacaccatcatcttcaacaccttcgtcatgatgcagctcttcaacgagatcaacgcccgcaagatccacggcgagcgcaatgtctttgacggcatcttccggaaccccatcttctgcaccatcgtgctgggcacctttgccatccagatagtgatcgtgcagtttggagggaagccattcagctgctctccactgcagctggaccagtggatgtggtgcatattcattgggttaggagagctcgtttggggccaggtcatcgccaccatcccgaccagcagactcaagttcctcaaggaggcaggcaggctcacacagaaggaggagatcccggaggaggagctcaacgaggacgtggaggagatcgaccacgcggagcgggagctgcggcggggccagatcctgtggttccgaggcctgaatcggatccagacacagatccgcgtcgtgaaggcgttccgtagctctctctatgaaggtttagaaaagcctgaatctcgaacctccatccataacttcatggctcatcctgaattccggatcgaagattcccagccccacatccccctcattgatgacaccgacctggaagaagatgccgcgctcaagcagaactcgagcccgccgtcatccctcaacaagaacaacagcgccatcgacagtgggatcaacctgacgaccgacacaagcaaatcagctacctcttcaagtccagggagccccatccacagcctggagacgtcgctttagctgaggaccctctcgcctgcccgcccgccctcatggaccccgctgccacccgctttccgggcacccatccatccaggcacccaactcacccaagcagcaacgagcaacaatcggaaaccaaatactggagagaaaaccaacgtttccacccacagaccctttctctggctgcgatgctgtttgaactctttttcacttcaaggcaaggggcgggatctccactgggggcttacgggagtgagcggttttcccaaaacaagcccttcctggctcccacccagacatggaccagccatgcacccgcccagccaccacgtcccccgcatgaatgtactgtacactttcaatcctccccttgtttggtttttgggggttggggaggggtttttgtttgtttgtttgttttcttaggcgggaactgcaaacagactcttttctgagactatttatccaatccactggtctgtgagtttttgaaatgcttgcacagcatggtctcagttgtatagattaatttaataactttttgaaattgcagagcttaactcgcctagtagatttgcaccaatggaaccgaagaacttcatagacactcacaaggttatatccatttctttgtatctatatcaacgtatacttttccgagactgtatacgtccatatagataggtagatatatatatatatatataaatatatatacatggatatataaagtttctttgccggcatgttgccttgtttccgcttaaattgctctattttaacttatttatgtcctaaaagaagaatgtaatttgtttacaaacctgtagataacgtctttggctatttgtatggtttaagaacactggtggctgagatgctataaaaacagctcggcccaacagacacttcccctgggttgcatcctggatgttttatgatagccatgctctgatttttgcctgctatttccgttcaataatgtcactaccgtgagaggctcaggcagaagccaaatgctaccgagttgccatcctgaggggtttaacaacatgctccgtagacgaagggagaggaggagagaaggcttcctgggtttgcaacactaacggccatccggcccaaggatgccaggatctgcaaagcactgctcgaagacttttctctcaatgaaactcgcttgagtttactaagagcatttcaaaaataggttctctttggcactgtctgtacagagattgaggtagtgttgaaatattataaatggtattgtgttgatttttttttttatttagtaacttacaggtttgtttccttattaatggcagcatctgagctgttggcatattggatgaggatcagtatggcttgctgcttttatttttatttttgaagaagaatagcctttttctctgcactatttagatccgaatgaaccttatgatgtgtatattgagatgtactcagtgtgattttaaaccaaattgtcttcctgtagtcacaatatatactgtagccttttaacagcaagtcttgctttcccaaacagaaagccattctgaaaccctacagtatcacaggtgagaaaaggtggttattttttccccaagacaacagcactagtaatcccacttaataagagcttatttaattggatgtcagcctcttaactgctaagcactttgtgggtctcagcgtttttcataaaagaacttttgtatttaatacaaagtttgctttgagacttttcagcatatgatcttttttccataaacttgtacagtgcaaaagacattttgaataccatgatcgatgatgtcccatgcttcgaggaaaaccaaacactttccgcctctcttgcaaaatccattcctcatgctgaccctcctcacgatggctgtgtcagcccagccccttcccttctccaggcccagagaactcttccacaaacaagatgagagccactcgggaaaagagccatagtcaactgggagggcctacatctggatggcggtggaaaaacttgagggtttggggttcaaagtcagcccatcccacctggcaaaatcctcctggaaggaggaccttcaagagcgcatcacctgaatgtcgtgaagaagtatctctgaatgtatccaggagaggaactgcataaccaaaggggtgaccagccctcagatgtgcttattggattccagtacaaacgccaccaaagccagcccactgctctcctacaaggaaggaaagatctgcacgtgtaaaacatggggcagccttggaacatggtgttttttggagtttcctttctcacagttttccatctccccacttctttgatcagtcatgtgtccgtgacctcgttccatgacatcaggatagctgtgtttgcacaccatgctccatgttcattcggagccaggaggggttctcagtggagcctggcttagggaacagggagcgatggaagaatgccaacattagcgttggtcttctcttgtcaggaatgaaggatgcttgcacacatgcaccccctcactctcacacttgcacacatacacacacacacacacgaaatggttggtttgtcaaaactcactgtagtacataaagcttgcactctgcgtcctatatctagcagcatggggtacgtttggcagttcactccattagggggtaaataatttatgaccattcatctgtttttatgaatttttttatctagacaataatgtaaataaagaactcaccatctctgttcatttaatactatgcaatggttatgctttcaatcgctggctcttctgactcgtgcagtgtggttctgaaatgtttgtggtttaaaaaaaaaagcaaaaaacaacatcaaacagaacatagtaaatatatctgtaatgtatacttttttctactttgggactgcatcatccacatagcttcttttctgtcctctagacaagggctccaggagtaagtggcagatttggttctgagagctaagctcaccaacttgtctccccctcaacagatgagggaagggcagggagcccgttcagtgactcctggcgctgcagaatcactcatctttggaggtgagcagagagagctctgaggagtttccttcttgcaactcaggcggagctttctttaactcaggagcagcctccattgctcccgccaacccctcaccatggccccttgtccccttgtcccaaccatagcatagagatgacaagagagaggcagtcctatttctgagactggaccaattaaaatgactgcactggctcaaaggactctgaacctgtcttgtcctgggtcctccagttgttggaagccactcttttccccaaccatgctgaaatgccacctttaccacacactgatgtcttacatagacttagatctatttctggaacttctcttctcttcgcttacttgggtgtctcatctggcaccagccatacaattttaactattgtcaatttctaatgtcttattatgtggtgggatgagtcccttcactcttcttttacaaaatttcctagttattctctcacatctattcttccacataaactttaaattgtgcccagtcctccaccccctgtcccattcccacccccaaattctgggctctgtcattccctgtgccatcatcttccccccattgtaattactgtccactcagggctgtgaaatagactatgttctgtaaagagggacaaaaagggcatcctgatcttgagagaagcctgctgttcctcccatcatttcacctgccccctaagcccaggagttgtcatgagaggtcaccaggcccccactcaatctcagcttgggaaccaaagtcacccaccttggttgtgttggggtggacccgccatctgtccctggtccagacgagaaagaggagtctctcctaggcctggagctgggaaagaatgtgtggcccagttgtctgcacttctaattctcatcatggagaaacctttattcctatctccctttcctgaactggttttttgttgtttttgtttcattttgttttggggggatagtttcttgctctttaatttggagtctccagtacctttgggatgcaggcagttcttgcctgggccttctcggaaccctcactcccctagcccactcttgcgctacctgcaggaggctgccaacctggtgcattctgacaagcctcccacccaaatctctctcctgccattgtgtccaaaatcccaccattagaggctcttgtagggaagagcgtttcttgaaggcttttaggccttccagagccaggagggaagtcagacaatagcaggaagtccccaggccttttcaaagttccaaaccaagctctcctgattttaatgtagagatcataccaacccaggtgggggaggagggtccccagccccaggcagcagccatcaccccctccactgaaaacaatattggaggctgctttgggactgcccttctcagccccctaagtctgttttgtaatgcctgtggtgctctccctcctggacctttcctctcgggggtcaccacactttgctaactcttgtgtgcacatattttataatagagtagcgagggaatggtgccgcctccagcttccgtaagctgcccgggctctggggggctctgggacaatcggggctgggaagtgactgtgctcttattgtacactctttatttctctgtatctttggcttgtgctctttgtaattaatgggatttgtctgccttttcaacactatactgagcaataacaataaatgcacacgtggaaatgca

SEQ ID NO: 1885 - DNA, 9101 bp, Homo sapiens
  source 1..9101: mol_type = unassigned DNA; mol_type = unassigned DNA
agctgaacttcgtcacccagtccctagagccagcaagacatgggccccagtttccagaccctgacacctctcatttaaccagaagacgtggaggggagccaccacccctgaccatgtagatgccagttccagggagcagcatgggccccactgaatggagactcctgggtctacagccctgagcccctccggcccctggacctcgtcccacaccggaggacacctcttggagctcaccaccactgtcaccagcccgcctcggccacccccaccccccgggacccggagtcggccgcctggtgccacagctgaccagtgagggtgtgctgaggacagccacaagcagccatcacccggcagcctcttgtccagcgctgacccttgggcccagcccgagcaaggaccgcagcaaacatgggtgacatgaccaacagcgacttttactccaaaaaccaaagaaatgagtcgagccatgggggcgagttcgggtgcacaatggaggagctccgctccctcatggagctgcggggcactgaggctgtggtcaagatcaaggagacttatggggacaccgaagccatctgccggcgcctcaaaacctcacctgttgaaggtttgccgggcaccgctccagacctggaaaagagaaagcaaatttttgggcaaaactttatacctccaaagaagccaaaaaccttcctgcagctcgtgtgggaggcgctgcaggacgtgacgctcatcatcctggagattgccgccatcatctccctggggctgtccttctaccacccgcccggcgagggcaacgaaggatgtgcgacggcccagggtggggcagaggatgaaggagaggcagaggcaggttggatcgagggggccgccattctcctctcagttatctgtgtggtcctggtcacggccttcaatgactggagcaaagagaaacagttccggggcctgcagagccgcatcgagcaggaacagaaatttaccgtggtccgggctggccaggtggtccagatccctgtggctgagatcgtggttggggacatagcccaggtcaaatatggtgacctcctccctgccgacggcctcttcatccagggcaatgacctcaagattgatgaaagctccctaactggagagtctgaccaggtgcgcaagtccgtggacaaggaccccatgctgctgtcaggaacccacgtgatggagggctcaggacggatgttggtgactgctgtgggtgtgaactctcagactggcatcatctttaccctcctgggggctggtggtgaagaggaagagaagaaagacaaaaaagccaaacaacaggacggggcagccgccatggagatgcagcccctcaagagtgccgagggcggcgacgctgacgacaggaagaaggccagcatgcacaagaaggagaagtccgtgctgcagggcaagctcaccaagctggctgtgcagatcgggaaggcgggcttggtgatgtcagccatcacggtgatcatcctggtgctctacttcactgtggacaccttcgtggtcaacaagaagccgtggctgcctgagtgcacgcccgtctacgtgcagtactttgtcaagttcttcatcattggcgtgacggtgctggtggtcgccgtgcccgaggggctccctctggccgtcaccatctcgttggcctattcggtgaagaaaatgatgaaggacaacaacctggtacgccacctggatgcctgtgagaccatgggcaatgccacagccatctgctcagacaagacaggcacgctgaccaccaatcgcatgacagtggtacaggcctatgtcggcgacgtccactataaagagatccccgaccccagctccatcaacaccaagaccatggagctgctgatcaatgccatcgccatcaacagcgcctacaccaccaagattctgcccccagagaaggagggcgccctgcctcggcaggtgggcaacaagacggagtgcggcctgctgggcttcgtgctggacctgaagcaggactacgagcccgtgcgcagccagatgccagaggagaagttgtacaaagtgtacaccttcaactccgtgcgcaagtccatgagcactgtcatcaagctgcccgacgagagcttccgcatgtacagcaagggggcttctgagatcgtgctcaagaagtgctgcaaaatcctcaatggggcgggagagcctcgtgtcttccggccccgcgaccgggacgagatggtaaagaaggtgattgagcccatggcttgcgatgggctccgcactatctgcgtggcctaccgcgacttccccagcagcccggagccggactgggacaatgagaatgacatcctcaacgaactcacctgcatctgcgtggtgggcatcgaggacccggtgcggccagaggtcccagaagccatccgcaagtgccagcgggcaggcatcacggtccgcatggtcactggcgacaatatcaacacggctcgggccatcgccatcaagtgtggcatcatccatcctggggaggactttctgtgcctcgagggcaaggagttcaacaggaggatccgcaacgagaagggggagattgagcaggagcgaattgacaagatctggccaaagctgcgggtgctggctcgctcctccccaacggacaagcataccctggttaaaggcatcatcgacagcacacacactgagcagcggcaggtggtggccgtgacgggggacgggaccaacgacgggcctgcactcaagaaggccgacgtgggcttcgccatgggcatcgcaggcactgacgtggccaaggaggcctcagacatcatcctgacagacgacaatttcagcagcatcgtcaaggcagtgatgtggggccgcaacgtctatgacagcatctccaaattcttgcagttccagctcaccgtcaacgtggtggccgtgattgtggccttcacaggcgcctgcatcacgcaggactcccctctgaaggccgtgcagatgctctgggtgaacctcatcatggacacgtttgcctcgctggcactggccactgagccgcccacggagaccctgctgctgaggaagccgtacggccgcaacaagccgctcatctccaggaccatgatgaagaacatcctgggccatgctgtctaccagcttgccctcatcttcaccctgctctttgttggcgagaagatgttccagatcgacagcgggaggaacgcgcccctgcattcgccaccctcagaacattacaccatcatcttcaacaccttcgtcatgatgcagctcttcaacgagatcaacgcccgcaagatccacggcgagcgcaatgtctttgacggcatcttccggaaccccatcttctgcaccatcgtgctgggcacctttgccatccagatagtgatcgtgcagtttggagggaagccattcagctgctctccactgcagctggaccagtggatgtggtgcatattcattgggttaggagagctcgtttggggccaggtcatcgccaccatcccgaccagcagactcaagttcctcaaggaggcaggcaggctcacacagaaggaggagatcccggaggaggagctcaacgaggacgtggaggagatcgaccacgcggagcgggagctgcggcggggccagatcctgtggttccgaggcctgaatcggatccagacacagattgaagtagtcaatactttcaagagcggggcctcctttcagggggccctgcggagacagtcctcggtcaccagccagagccaggatgtagccaatctctctagccctagtcgcgtgtcgttgtccaatgctctttcctctccgaccagccttcctcctgctgcagccgggcagggctagagaaccctggacacagagttcagcaagagagagtgaaattaaaagaggttgtgagtctttaaccttgagcctgaaatgaatgtgaatcaatcccagactcttggcttccttgaagccggatccgcgtcgtgaaggcgttccgtagctctctctatgaaggtttagaaaagcctgaatctcgaacctccatccataacttcatggctcatcctgaattccggatcgaagattcccagccccacatccccctcattgatgacaccgacctggaagaagatgccgcgctcaagcagaactcgagcccgccgtcatccctcaacaagaacaacagcgccatcgacagtgggatcaacctgacgaccgacacaagcaaatcagctacctcttcaagtccagggagccccatccacagcctggagacgtcgctttagctgaggaccctctcgcctgcccgcccgccctcatggaccccgctgccacccgctttccgggcacccatccatccaggcacccaactcacccaagcagcaacgagcaacaatcggaaaccaaatactggagagaaaaccaacgtttccacccacagaccctttctctggctgcgatgctgtttgaactctttttcacttcaaggcaaggggcgggatctccactgggggcttacgggagtgagcggttttcccaaaacaagcccttcctggctcccacccagacatggaccagccatgcacccgcccagccaccacgtcccccgcatgaatgtactgtacactttcaatcctccccttgtttggtttttgggggttggggaggggtttttgtttgtttgtttgttttcttaggcgggaactgcaaacagactcttttctgagactatttatccaatccactggtctgtgagtttttgaaatgcttgcacagcatggtctcagttgtatagattaatttaataactttttgaaattgcagagcttaactcgcctagtagatttgcaccaatggaaccgaagaacttcatagacactcacaaggttatatccatttctttgtatctatatcaacgtatacttttccgagactgtatacgtccatatagataggtagatatatatatatatatataaatatatatacatggatatataaagtttctttgccggcatgttgccttgtttccgcttaaattgctctattttaacttatttatgtcctaaaagaagaatgtaatttgtttacaaacctgtagataacgtctttggctatttgtatggtttaagaacactggtggctgagatgctataaaaacagctcggcccaacagacacttcccctgggttgcatcctggatgttttatgatagccatgctctgatttttgcctgctatttccgttcaataatgtcactaccgtgagaggctcaggcagaagccaaatgctaccgagttgccatcctgaggggtttaacaacatgctccgtagacgaagggagaggaggagagaaggcttcctgggtttgcaacactaacggccatccggcccaaggatgccaggatctgcaaagcactgctcgaagacttttctctcaatgaaactcgcttgagtttactaagagcatttcaaaaataggttctctttggcactgtctgtacagagattgaggtagtgttgaaatattataaatggtattgtgttgatttttttttttatttagtaacttacaggtttgtttccttattaatggcagcatctgagctgttggcatattggatgaggatcagtatggcttgctgcttttatttttatttttgaagaagaatagcctttttctctgcactatttagatccgaatgaaccttatgatgtgtatattgagatgtactcagtgtgattttaaaccaaattgtcttcctgtagtcacaatatatactgtagccttttaacagcaagtcttgctttcccaaacagaaagccattctgaaaccctacagtatcacaggtgagaaaaggtggttattttttccccaagacaacagcactagtaatcccacttaataagagcttatttaattggatgtcagcctcttaactgctaagcactttgtgggtctcagcgtttttcataaaagaacttttgtatttaatacaaagtttgctttgagacttttcagcatatgatcttttttccataaacttgtacagtgcaaaagacattttgaataccatgatcgatgatgtcccatgcttcgaggaaaaccaaacactttccgcctctcttgcaaaatccattcctcatgctgaccctcctcacgatggctgtgtcagcccagccccttcccttctccaggcccagagaactcttccacaaacaagatgagagccactcgggaaaagagccatagtcaactgggagggcctacatctggatggcggtggaaaaacttgagggtttggggttcaaagtcagcccatcccacctggcaaaatcctcctggaaggaggaccttcaagagcgcatcacctgaatgtcgtgaagaagtatctctgaatgtatccaggagaggaactgcataaccaaaggggtgaccagccctcagatgtgcttattggattccagtacaaacgccaccaaagccagcccactgctctcctacaaggaaggaaagatctgcacgtgtaaaacatggggcagccttggaacatggtgttttttggagtttcctttctcacagttttccatctccccacttctttgatcagtcatgtgtccgtgacctcgttccatgacatcaggatagctgtgtttgcacaccatgctccatgttcattcggagccaggaggggttctcagtggagcctggcttagggaacagggagcgatggaagaatgccaacattagcgttggtcttctcttgtcaggaatgaaggatgcttgcacacatgcaccccctcactctcacacttgcacacatacacacacacacacacgaaatggttggtttgtcaaaactcactgtagtacataaagcttgcactctgcgtcctatatctagcagcatggggtacgtttggcagttcactccattagggggtaaataatttatgaccattcatctgtttttatgaatttttttatctagacaataatgtaaataaagaactcaccatctctgttcatttaatactatgcaatggttatgctttcaatcgctggctcttctgactcgtgcagtgtggttctgaaatgtttgtggtttaaaaaaaaaagcaaaaaacaacatcaaacagaacatagtaaatatatctgtaatgtatacttttttctactttgggactgcatcatccacatagcttcttttctgtcctctagacaagggctccaggagtaagtggcagatttggttctgagagctaagctcaccaacttgtctccccctcaacagatgagggaagggcagggagcccgttcagtgactcctggcgctgcagaatcactcatctttggaggtgagcagagagagctctgaggagtttccttcttgcaactcaggcggagctttctttaactcaggagcagcctccattgctcccgccaacccctcaccatggccccttgtccccttgtcccaaccatagcatagagatgacaagagagaggcagtcctatttctgagactggaccaattaaaatgactgcactggctcaaaggactctgaacctgtcttgtcctgggtcctccagttgttggaagccactcttttccccaaccatgctgaaatgccacctttaccacacactgatgtcttacatagacttagatctatttctggaacttctcttctcttcgcttacttgggtgtctcatctggcaccagccatacaattttaactattgtcaatttctaatgtcttattatgtggtgggatgagtcccttcactcttcttttacaaaatttcctagttattctctcacatctattcttccacataaactttaaattgtgcccagtcctccaccccctgtcccattcccacccccaaattctgggctctgtcattccctgtgccatcatcttccccccattgtaattactgtccactcagggctgtgaaatagactatgttctgtaaagagggacaaaaagggcatcctgatcttgagagaagcctgctgttcctcccatcatttcacctgccccctaagcccaggagttgtcatgagaggtcaccaggcccccactcaatctcagcttgggaaccaaagtcacccaccttggttgtgttggggtggacccgccatctgtccctggtccagacgagaaagaggagtctctcctaggcctggagctgggaaagaatgtgtggcccagttgtctgcacttctaattctcatcatggagaaacctttattcctatctccctttcctgaactggttttttgttgtttttgtttcattttgttttggggggatagtttcttgctctttaatttggagtctccagtacctttgggatgcaggcagttcttgcctgggccttctcggaaccctcactcccctagcccactcttgcgctacctgcaggaggctgccaacctggtgcattctgacaagcctcccacccaaatctctctcctgccattgtgtccaaaatcccaccattagaggctcttgtagggaagagcgtttcttgaaggcttttaggccttccagagccaggagggaagtcagacaatagcaggaagtccccaggccttttcaaagttccaaaccaagctctcctgattttaatgtagagatcataccaacccaggtgggggaggagggtccccagccccaggcagcagccatcaccccctccactgaaaacaatattggaggctgctttgggactgcccttctcagccccctaagtctgttttgtaatgcctgtggtgctctccctcctggacctttcctctcgggggtcaccacactttgctaactcttgtgtgcacatattttataatagagtagcgagggaatggtgccgcctccagcttccgtaagctgcccgggctctggggggctctgggacaatcggggctgggaagtgactgtgctcttattgtacactctttatttctctgtatctttggcttgtgctctttgtaattaatgggatttgtctgccttttcaacactatactgagcaataacaataaatgcacacgtggaaatgca

SEQ ID NO: 1886 - DNA, 8964 bp, Homo sapiens
  source 1..8964: mol_type = unassigned DNA; mol_type = unassigned DNA
gggcagccgcggcagaggagccgcagccgcagcggggccgggccgggccgggcgcgcaccagcggcagcggcggcggcagcggcggcggcagcatctcgctctcggagccggcgcaggtttccctgtacttagagcgtggactgtgaacccccaagcagacgagctgaacttcgtcacccagtccctagagccagcaagacatgggccccagtttccagaccctgacacctctcatttaaccagaagacgtggaggggagccaccacccctgaccatgtagatgccagttccagggagcagcatgggccccactgaatggagactcctgggtctacagccctgagcccctccggcccctggacctcgtcccacaccggaggacacctcttggagctcaccaccactgtcaccagcccgcctcggccacccccaccccccgggacccggagtcggccgcctggtgccacagctgaccagtgagggtgtgctgaggacagccacaagcagccatcacccggcagcctcttgtccagcgctgacccttgggcccagcccgagcaaggaccgcagcaaacatgggtgacatgaccaacagcgacttttactccaaaaaccaaagaaatgagtcgagccatgggggcgagttcgggtgcacaatggaggagctccgctccctcatggagctgcggggcactgaggctgtggtcaagatcaaggagacttatggggacaccgaagccatctgccggcgcctcaaaacctcacctgttgaaggtttgccgggcaccgctccagacctggaaaagagaaagcaaatttttgggcaaaactttatacctccaaagaagccaaaaaccttcctgcagctcgtgtgggaggcgctgcaggacgtgacgctcatcatcctggagattgccgccatcatctccctggggctgtccttctaccacccgcccggcgagggcaacgaaggatgtgcgacggcccagggtggggcagaggatgaaggagaggcagaggcaggttggatcgagggggccgccattctcctctcagttatctgtgtggtcctggtcacggccttcaatgactggagcaaagagaaacagttccggggcctgcagagccgcatcgagcaggaacagaaatttaccgtggtccgggctggccaggtggtccagatccctgtggctgagatcgtggttggggacatagcccaggtcaaatatggtgacctcctccctgccgacggcctcttcatccagggcaatgacctcaagattgatgaaagctccctaactggagagtctgaccaggtgcgcaagtccgtggacaaggaccccatgctgctgtcaggaacccacgtgatggagggctcaggacggatgttggtgactgctgtgggtgtgaactctcagactggcatcatctttaccctcctgggggctggtggtgaagaggaagagaagaaagacaaaaaagccaaacaacaggacggggcagccgccatggagatgcagcccctcaagagtgccgagggcggcgacgctgacgacaggaagaaggccagcatgcacaagaaggagaagtccgtgctgcagggcaagctcaccaagctggctgtgcagatcgggaaggcgggcttggtgatgtcagccatcacggtgatcatcctggtgctctacttcactgtggacaccttcgtggtcaacaagaagccgtggctgcctgagtgcacgcccgtctacgtgcagtactttgtcaagttcttcatcattggcgtgacggtgctggtggtcgccgtgcccgaggggctccctctggccgtcaccatctcgttggcctattcggtgaagaaaatgatgaaggacaacaacctggtacgccacctggatgcctgtgagaccatgggcaatgccacagccatctgctcagacaagacaggcacgctgaccaccaatcgcatgacagtggtacaggcctatgtcggcgacgtccactataaagagatccccgaccccagctccatcaacaccaagaccatggagctgctgatcaatgccatcgccatcaacagcgcctacaccaccaagattctgcccccagagaaggagggcgccctgcctcggcaggtgggcaacaagacggagtgcggcctgctgggcttcgtgctggacctgaagcaggactacgagcccgtgcgcagccagatgccagaggagaagttgtacaaagtgtacaccttcaactccgtgcgcaagtccatgagcactgtcatcaagctgcccgacgagagcttccgcatgtacagcaagggggcttctgagatcgtgctcaagaagtgctgcaaaatcctcaatggggcgggagagcctcgtgtcttccggccccgcgaccgggacgagatggtaaagaaggtgattgagcccatggcttgcgatgggctccgcactatctgcgtggcctaccgcgacttccccagcagcccggagccggactgggacaatgagaatgacatcctcaacgaactcacctgcatctgcgtggtgggcatcgaggacccggtgcggccagaggtcccagaagccatccgcaagtgccagcgggcaggcatcacggtccgcatggtcactggcgacaatatcaacacggctcgggccatcgccatcaagtgtggcatcatccatcctggggaggactttctgtgcctcgagggcaaggagttcaacaggaggatccgcaacgagaagggggagattgagcaggagcgaattgacaagatctggccaaagctgcgggtgctggctcgctcctccccaacggacaagcataccctggttaaaggcatcatcgacagcacacacactgagcagcggcaggtggtggccgtgacgggggacgggaccaacgacgggcctgcactcaagaaggccgacgtgggcttcgccatgggcatcgcaggcactgacgtggccaaggaggcctcagacatcatcctgacagacgacaatttcagcagcatcgtcaaggcagtgatgtggggccgcaacgtctatgacagcatctccaaattcttgcagttccagctcaccgtcaacgtggtggccgtgattgtggccttcacaggcgcctgcatcacgcaggactcccctctgaaggccgtgcagatgctctgggtgaacctcatcatggacacgtttgcctcgctggcactggccactgagccgcccacggagaccctgctgctgaggaagccgtacggccgcaacaagccgctcatctccaggaccatgatgaagaacatcctgggccatgctgtctaccagcttgccctcatcttcaccctgctctttgttggcgagaagatgttccagatcgacagcgggaggaacgcgcccctgcattcgccaccctcagaacattacaccatcatcttcaacaccttcgtcatgatgcagctcttcaacgagatcaacgcccgcaagatccacggcgagcgcaatgtctttgacggcatcttccggaaccccatcttctgcaccatcgtgctgggcacctttgccatccagatagtgatcgtgcagtttggagggaagccattcagctgctctccactgcagctggaccagtggatgtggtgcatattcattgggttaggagagctcgtttggggccaggtcatcgccaccatcccgaccagcagactcaagttcctcaaggaggcaggcaggctcacacagaaggaggagatcccggaggaggagctcaacgaggacgtggaggagatcgaccacgcggagcgggagctgcggcggggccagatcctgtggttccgaggcctgaatcggatccagacacagatccgcgtcgtgaaggcgttccgtagctctctctatgaaggtttagaaaagcctgaatctcgaacctccatccataacttcatggctcatcctgaattccggatcgaagattcccagccccacatccccctcattgatgacaccgacctggaagaagatgccgcgctcaagcagaactcgagcccgccgtcatccctcaacaagaacaacagcgccatcgacagtgggatcaacctgacgaccgacacaagcaaatcagctacctcttcaagtccagggagccccatccacagcctggagacgtcgctttagctgaggaccctctcgcctgcccgcccgccctcatggaccccgctgccacccgctttccgggcacccatccatccaggcacccaactcacccaagcagcaacgagcaacaatcggaaaccaaatactggagagaaaaccaacgtttccacccacagaccctttctctggctgcgatgctgtttgaactctttttcacttcaaggcaaggggcgggatctccactgggggcttacgggagtgagcggttttcccaaaacaagcccttcctggctcccacccagacatggaccagccatgcacccgcccagccaccacgtcccccgcatgaatgtactgtacactttcaatcctccccttgtttggtttttgggggttggggaggggtttttgtttgtttgtttgttttcttaggcgggaactgcaaacagactcttttctgagactatttatccaatccactggtctgtgagtttttgaaatgcttgcacagcatggtctcagttgtatagattaatttaataactttttgaaattgcagagcttaactcgcctagtagatttgcaccaatggaaccgaagaacttcatagacactcacaaggttatatccatttctttgtatctatatcaacgtatacttttccgagactgtatacgtccatatagataggtagatatatatatatatatataaatatatatacatggatatataaagtttctttgccggcatgttgccttgtttccgcttaaattgctctattttaacttatttatgtcctaaaagaagaatgtaatttgtttacaaacctgtagataacgtctttggctatttgtatggtttaagaacactggtggctgagatgctataaaaacagctcggcccaacagacacttcccctgggttgcatcctggatgttttatgatagccatgctctgatttttgcctgctatttccgttcaataatgtcactaccgtgagaggctcaggcagaagccaaatgctaccgagttgccatcctgaggggtttaacaacatgctccgtagacgaagggagaggaggagagaaggcttcctgggtttgcaacactaacggccatccggcccaaggatgccaggatctgcaaagcactgctcgaagacttttctctcaatgaaactcgcttgagtttactaagagcatttcaaaaataggttctctttggcactgtctgtacagagattgaggtagtgttgaaatattataaatggtattgtgttgatttttttttttatttagtaacttacaggtttgtttccttattaatggcagcatctgagctgttggcatattggatgaggatcagtatggcttgctgcttttatttttatttttgaagaagaatagcctttttctctgcactatttagatccgaatgaaccttatgatgtgtatattgagatgtactcagtgtgattttaaaccaaattgtcttcctgtagtcacaatatatactgtagccttttaacagcaagtcttgctttcccaaacagaaagccattctgaaaccctacagtatcacaggtgagaaaaggtggttattttttccccaagacaacagcactagtaatcccacttaataagagcttatttaattggatgtcagcctcttaactgctaagcactttgtgggtctcagcgtttttcataaaagaacttttgtatttaatacaaagtttgctttgagacttttcagcatatgatcttttttccataaacttgtacagtgcaaaagacattttgaataccatgatcgatgatgtcccatgcttcgaggaaaaccaaacactttccgcctctcttgcaaaatccattcctcatgctgaccctcctcacgatggctgtgtcagcccagccccttcccttctccaggcccagagaactcttccacaaacaagatgagagccactcgggaaaagagccatagtcaactgggagggcctacatctggatggcggtggaaaaacttgagggtttggggttcaaagtcagcccatcccacctggcaaaatcctcctggaaggaggaccttcaagagcgcatcacctgaatgtcgtgaagaagtatctctgaatgtatccaggagaggaactgcataaccaaaggggtgaccagccctcagatgtgcttattggattccagtacaaacgccaccaaagccagcccactgctctcctacaaggaaggaaagatctgcacgtgtaaaacatggggcagccttggaacatggtgttttttggagtttcctttctcacagttttccatctccccacttctttgatcagtcatgtgtccgtgacctcgttccatgacatcaggatagctgtgtttgcacaccatgctccatgttcattcggagccaggaggggttctcagtggagcctggcttagggaacagggagcgatggaagaatgccaacattagcgttggtcttctcttgtcaggaatgaaggatgcttgcacacatgcaccccctcactctcacacttgcacacatacacacacacacacacgaaatggttggtttgtcaaaactcactgtagtacataaagcttgcactctgcgtcctatatctagcagcatggggtacgtttggcagttcactccattagggggtaaataatttatgaccattcatctgtttttatgaatttttttatctagacaataatgtaaataaagaactcaccatctctgttcatttaatactatgcaatggttatgctttcaatcgctggctcttctgactcgtgcagtgtggttctgaaatgtttgtggtttaaaaaaaaaagcaaaaaacaacatcaaacagaacatagtaaatatatctgtaatgtatacttttttctactttgggactgcatcatccacatagcttcttttctgtcctctagacaagggctccaggagtaagtggcagatttggttctgagagctaagctcaccaacttgtctccccctcaacagatgagggaagggcagggagcccgttcagtgactcctggcgctgcagaatcactcatctttggaggtgagcagagagagctctgaggagtttccttcttgcaactcaggcggagctttctttaactcaggagcagcctccattgctcccgccaacccctcaccatggccccttgtccccttgtcccaaccatagcatagagatgacaagagagaggcagtcctatttctgagactggaccaattaaaatgactgcactggctcaaaggactctgaacctgtcttgtcctgggtcctccagttgttggaagccactcttttccccaaccatgctgaaatgccacctttaccacacactgatgtcttacatagacttagatctatttctggaacttctcttctcttcgcttacttgggtgtctcatctggcaccagccatacaattttaactattgtcaatttctaatgtcttattatgtggtgggatgagtcccttcactcttcttttacaaaatttcctagttattctctcacatctattcttccacataaactttaaattgtgcccagtcctccaccccctgtcccattcccacccccaaattctgggctctgtcattccctgtgccatcatcttccccccattgtaattactgtccactcagggctgtgaaatagactatgttctgtaaagagggacaaaaagggcatcctgatcttgagagaagcctgctgttcctcccatcatttcacctgccccctaagcccaggagttgtcatgagaggtcaccaggcccccactcaatctcagcttgggaaccaaagtcacccaccttggttgtgttggggtggacccgccatctgtccctggtccagacgagaaagaggagtctctcctaggcctggagctgggaaagaatgtgtggcccagttgtctgcacttctaattctcatcatggagaaacctttattcctatctccctttcctgaactggttttttgttgtttttgtttcattttgttttggggggatagtttcttgctctttaatttggagtctccagtacctttgggatgcaggcagttcttgcctgggccttctcggaaccctcactcccctagcccactcttgcgctacctgcaggaggctgccaacctggtgcattctgacaagcctcccacccaaatctctctcctgccattgtgtccaaaatcccaccattagaggctcttgtagggaagagcgtttcttgaaggcttttaggccttccagagccaggagggaagtcagacaatagcaggaagtccccaggccttttcaaagttccaaaccaagctctcctgattttaatgtagagatcataccaacccaggtgggggaggagggtccccagccccaggcagcagccatcaccccctccactgaaaacaatattggaggctgctttgggactgcccttctcagccccctaagtctgttttgtaatgcctgtggtgctctccctcctggacctttcctctcgggggtcaccacactttgctaactcttgtgtgcacatattttataatagagtagcgagggaatggtgccgcctccagcttccgtaagctgcccgggctctggggggctctgggacaatcggggctgggaagtgactgtgctcttattgtacactctttatttctctgtatctttggcttgtgctctttgtaattaatgggatttgtctgccttttcaacactatactgagcaataacaataaatgcacacgtggaaatgca

SEQ ID NO: 1887 - DNA, 4016 bp, Homo sapiens
  source 1..4016: mol_type = unassigned DNA; mol_type = unassigned DNA
gccgccatcatctccctggggctgtccttctaccacccgcccggcgagggcaacgaaggatgtgcgacggcccagggtggggcagaggatgaaggagaggcagaggcaggttggatcgagggggccgccattctcctctcagttatctgtgtggtcctggtcacggccttcaatgactggagcaaagagaaacagttccggggcctgcagagccgcatcgagcaggaacagaaatttaccgtggtccgggctggccaggtggtccagatccctgtggctgagatcgtggttggggacatagcccaggtcaaatatggtgacctcctccctgccgacggcctcttcatccagggcaatgacctcaagattgatgaaagctccctaactggagagtctgaccaggtgcgcaagtccgtggacaaggaccccatgctgctgtcaggaacccacgtgatggagggctcaggacggatgttggtgactgctgtgggtgtgaactctcagactggcatcatctttaccctcctgggggctggtggtgaagaggaagagaagaaagacaaaaaaggtaaaatgcaggatggcaatgtggacgccagccagagcaaagccaaacaacaggacggggcagccgccatggagatgcagcccctcaagagtgccgagggcggcgacgctgacgacaggaagaaggccagcatgcacaagaaggagaagtccgtgctgcagggcaagctcaccaagctggctgtgcagatcgggaaggcgggcttggtgatgtcagccatcacggtgatcatcctggtgctctacttcactgtggacaccttcgtggtcaacaagaagccgtggctgcctgagtgcacgcccgtctacgtgcagtactttgtcaagttcttcatcattggcgtgacggtgctggtggtcgccgtgcccgaggggctccctctggccgtcaccatctcgttggcctattcggtgaagaaaatgatgaaggacaacaacctggtacgccacctggatgcctgtgagaccatgggcaatgccacagccatctgctcagacaagacaggcacgctgaccaccaatcgcatgacagtggtacaggcctatgtcggcgacgtccactataaagagatccccgaccccagctccatcaacaccaagaccatggagctgctgatcaatgccatcgccatcaacagcgcctacaccaccaagattctgcccccagagaaggagggcgccctgcctcggcaggtgggcaacaagacggagtgcggcctgctgggcttcgtgctggacctgaagcaggactacgagcccgtgcgcagccagatgccagaggagaagttgtacaaagtgtacaccttcaactccgtgcgcaagtccatgagcactgtcatcaagctgcccgacgagagcttccgcatgtacagcaagggggcttctgagatcgtgctcaagaagtgctgcaaaatcctcaatggggcgggagagcctcgtgtcttccggccccgcgaccgggacgagatggtaaagaaggtgattgagcccatggcttgcgatgggctccgcactatctgcgtggcctaccgcgacttccccagcagcccggagccggactgggacaatgagaatgacatcctcaacgaactcacctgcatctgcgtggtgggcatcgaggacccggtgcggccagaggtcccagaagccatccgcaagtgccagcgggcaggcatcacggtccgcatggtcactggcgacaatatcaacacggctcgggccatcgccatcaagtgtggcatcatccatcctggggaggactttctgtgcctcgagggcaaggagttcaacaggaggatccgcaacgagaagggggagattgagcaggagcgaattgacaagatctggccaaagctgcgggtgctggctcgctcctccccaacggacaagcataccctggttaaaggcatcatcgacagcacacacactgagcagcggcaggtggtggccgtgacgggggacgggaccaacgacgggcctgcactcaagaaggccgacgtgggcttcgccatgggcatcgcaggcactgacgtggccaaggaggcctcagacatcatcctgacagacgacaatttcagcagcatcgtcaaggcagtgatgtggggccgcaacgtctatgacagcatctccaaattcttgcagttccagctcaccgtcaacgtggtggccgtgattgtggccttcacaggcgcctgcatcacgcaggactcccctctgaaggccgtgcagatgctctgggtgaacctcatcatggacacgtttgcctcgctggcactggccactgagccgcccacggagaccctgctgctgaggaagccgtacggccgcaacaagccgctcatctccaggaccatgatgaagaacatcctgggccatgctgtctaccagcttgccctcatcttcaccctgctctttgttggcgagaagatgttccagatcgacagcgggaggaacgcgcccctgcattcgccaccctcagaacattacaccatcatcttcaacaccttcgtcatgatgcagctcttcaacgagatcaacgcccgcaagatccacggcgagcgcaatgtctttgacggcatcttccggaaccccatcttctgcaccatcgtgctgggcacctttgccatccagatagtgatcgtgcagtttggagggaagccattcagctgctctccactgcagctggaccagtggatgtggtgcatattcattgggttaggagagctcgtttggggccaggtcatcgccaccatcccgaccagcagactcaagttcctcaaggaggcaggcaggctcacacagaaggaggagatcccggaggaggagctcaacgaggacgtggaggagatcgaccacgcggagcgggagctgcggcggggccagatcctgtggttccgaggcctgaatcggatccagacacagatccgcgtcgtgaaggcgttccgtagctctctctatgaaggtttagaaaagcctgaatctcgaacctccatccataacttcatggctcatcctgaattccggatcgaagattcccagccccacatccccctcattgatgacaccgacctggaagaagatgccgcgctcaagcagaactcgagcccgccgtcatccctcaacaagaacaacagcgccatcgacagtgggatcaacctgacgaccgacacaagcaaatcagctacctcttcaagtccagggagccccatccacagcctggagacgtcgctttagctgaggaccctctcgcctgcccgcccgccctcatggaccccgctgccacccgctttccgggcacccatccatccaggcacccaactcacccaagcagcaacgagcaacaatcggaaaccaaatactggagagaaaaccaacgtttccacccacagaccctttctctggctgcgatgctgtttgaactctttttcacttcaaggcaaggggcgggatctccactgggggcttacgggagtgagcggttttcccaaaacaagcccttcctggctcccacccagacatggaccagccatgcacccgcccagccaccacgtcccccgcatgaatgtactgtacactttcaatcctccccttgtttggtttttgggggttggggaggggtttttgtttgtttgtttgttttcttaggcgggaactgcaaacagactcttttctgagactatttatccaatccactggtctgtgagtttttgaaatgcttgcacagcatggtctcagttgtatagattaatttaataactttttgaaattgcagagcttaactcgcctagtagatttgcaccaatggaaccgaagaacttcatagacactcacaaggttatatccatttctttgtatctatatcaacgtatacttttccgagactgtatacgtccatatagataggtagatatatatatatatatataaatatatatacatggatatataaa

SEQ ID NO: 1888 - DNA, 907 bp, Homo sapiens
  source 1..907: mol_type = unassigned DNA; mol_type = unassigned DNA
attgaagtagtcaatactttcaagagcggggcctcctttcagggggccctgcggagacagtcctcggtcaccagccagagccaggatgtagccaatctctctagccctagtcgcgtgtcgttgtccaatgctctttcctctccgaccagccttcctcctgctgcagccgggcagggctagagaaccctggacacagagttcagcaagagagagtgaaattaaaagagatccgcgtcgtgaaggcgttccgtagctctctctatgaaggtttagaaaagcctgaatctcgaacctccatccataacttcatggctcatcctgaattccggatcgaagattcccagccccacatccccctcattgatgacaccgacctggaagaagatgccgcgctcaagcagaactcgagcccgccgtcatccctcaacaagaacaacagcgccatcgacagtgggatcaacctgacgaccgacacaagcaaatcagctacctcttcaagtccagggagccccatccacagcctggagacgtcgctttagctgaggaccctctcgcctgcccgcccgccctcatggaccccgctgccacccgctttccgggcacccatccatccaggcacccaactcacccaagcagcaacgagcaacaatcggaaaccaaatactggagagaaaaccaacgtttccacccacagaccctttctctggctgcgatgctgtttgaactctttttcacttcaaggcaaggggcgggatctccactgggggcttacgggagtgagcggttttcccaaaacaagcccttcctggctcccacccagacatggaccagccatgcacccgcccagccaccacgtcccccgcatgaatgtactgtacactttcaatcctccccttgtttggttttt

SEQ ID NO: 1889 - DNA, 496 bp, Homo sapiens
  source 1..496: mol_type = unassigned DNA; mol_type = unassigned DNA
agccaggtccaagccacattctggacgccgtaccttgctagacagataaggcacctcctgctcccacttcccctgcagattcctggttctgacgactcctagggcaaggagtttgcactgttagggggagaaatgaagacaacaaaaagggaagaaagctggacttctcattagcgttttgatccgcgtcgtgaaggcgttccgtagctctctctatgaaggtttagaaaagcctgaatctcgaacctccatccataacttcatggctcatcctgaattccggatcgaagattcccagccccacatccccctcattgatgacaccgacctggaagaagatgccgcgctcaagcagaactcgagcccgccgtcatccctcaacaagaacaacagcgccatcgacagtgggatcaacctgacgaccgacacaagcaaatcagctacctcttcaagtccagggagccccatccacagcctggagacgtcgctttagctg

SEQ ID NO: 1890 - DNA, 1739 bp, Homo sapiens
  source 1..1739: mol_type = unassigned DNA; mol_type = unassigned DNA
agtctgcagaggggcccgggcacgctggctgggctcagccgcggcaccagctgccgcaccgcgattacggggctgcccgccgggaaaccgtgcaggattggtggtgattttcatagccaagagccaccacccctgaccatgtagatgccagttccagggagcagcatgggccccactgaatggagactcctgggtctacagccctgagcccctccggcccctggacctcgtcccacaccggaggacacctcttggagctcaccaccactgtcaccagcccgcctcggccacccccaccccccgggacccggagtcggccgcctggtgccacagctgaccagtgagggtgtgctgaggacagccacaagcagccatcacccggcagcctcttgtccagcgctgacccttgggcccagcccgagcaaggaccgcagcaaacatgggtgacatgaccaacagcgacttttactccaaaaaccaaagaaatgagtcgagccatgggggcgagttcgggtgcacaatggaggagctccgctccctcatggagctgcggggcactgaggctgtggtcaagatcaaggagacttatggggacaccgaagccatctgccggcgcctcaaaacctcacctgttgaaggtttgccgggcaccgctccagacctggaaaagagaaagcaaatttttgggcaaaactttatacctccaaagaagccaaaaaccttcctgcagctcgtgtgggaggcgctgcaggacgtgacgctcatcatcctggagattgccgccatcatctccctggggctgtccttctaccacccgcccggcgagggcaacgaaggatgtgcgacggcccagggtggggcagaggatgaaggagaggcagaggcaggttggatcgagggggccgccattctcctctcagttatctgtgtggtcctggtcacggccttcaatgactggagcaaagagaaacagttccggggcctgcagagccgcatcgagcaggaacagaaatttaccgtggtccgggctggccaggtggtccagatccctgtggctgagatcgtggttggggacatagcccaggtcaaatatggtgacctcctccctgccgacggcctcttcatccagggcaatgacctcaagattgatgaaagctccctaactggagagtctgaccaggtgcgcaagtccgtggacaaggaccccatgctgctgtcaggaacccacgtgatggagggctcaggacggatgttggtgactgctgtgggtgtgaactctcagactggcatcatctttaccctcctgggggctggtggtgaagaggaagagaagaaagacaaaaaaggtaagcctaatccccttgcagaccaggagaggagctcttaaggccacattttttttttgtttatttgttcactcaacaaaatagttattgagtgccttctacgtccgcaccctgtgctgacagccacctcctgcatccttaaggcctgcatgggccaggtaggctctgtctgttccatctccaggtcttgtcccagtctctgtcttgtccaatcatgtcatggaggcccctccttcccctccgggccaggccaaggatgctgaccatgttgttgagtctccagcctcaagtggtggaaacagccagcatcaattggtcccatcatcactccagtattgagtagaaatccccacccattggaagcatattccttccaatattgtcaactccact

SEQ ID NO: 1891 - DNA, 3465 bp, Homo sapiens
  source 1..3465: mol_type = unassigned DNA; mol_type = unassigned DNA
atgggtgacatgaccaacagcgacttttactccaaaaaccaaagaaatgagtcgagccatgggggcgagttcgggtgcacaatggaggagctccgctccctcatggagctgcggggcactgaggctgtggtcaagatcaaggagacttatggggacaccgaagccatctgccggcgcctcaaaacctcacctgttgaaggtttgccgggcaccgctccagacctggaaaagagaaagcaaatttttgggcaaaactttatacctccaaagaagccaaaaaccttcctgcagctcgtgtgggaggcgctgcaggacgtgacgctcatcatcctggagattgccgccatcatctccctggggctgtccttctaccacccgcccggcgagggcaacgaaggatgtgcgacggcccagggtggggcagaggatgaaggagaggcagaggcaggttggatcgagggggccgccattctcctctcagttatctgtgtggtcctggtcacggccttcaatgactggagcaaagagaaacagttccggggcctgcagagccgcatcgagcaggaacagaaatttaccgtggtccgggctggccaggtggtccagatccctgtggctgagatcgtggttggggacatagcccaggtcaaatatggtgacctcctccctgccgacggcctcttcatccagggcaatgacctcaagattgatgaaagctccctaactggagagtctgaccaggtgcgcaagtccgtggacaaggaccccatgctgctgtcaggaacccacgtgatggagggctcaggacggatgttggtgactgctgtgggtgtgaactctcagactggcatcatctttaccctcctgggggctggtggtgaagaggaagagaagaaagacaaaaaagccaaacaacaggacggggcagccgccatggagatgcagcccctcaagagtgccgagggcggcgacgctgacgacaggaagaaggccagcatgcacaagaaggagaagtccgtgctgcagggcaagctcaccaagctggctgtgcagatcgggaaggcgggcttggtgatgtcagccatcacggtgatcatcctggtgctctacttcactgtggacaccttcgtggtcaacaagaagccgtggctgcctgagtgcacgcccgtctacgtgcagtactttgtcaagttcttcatcattggcgtgacggtgctggtggtcgccgtgcccgaggggctccctctggccgtcaccatctcgttggcctattcggtgaagaaaatgatgaaggacaacaacctggtacgccacctggatgcctgtgagaccatgggcaatgccacagccatctgctcagacaagacaggcacgctgaccaccaatcgcatgacagtggtacaggcctatgtcggcgacgtccactataaagagatccccgaccccagctccatcaacaccaagaccatggagctgctgatcaatgccatcgccatcaacagcgcctacaccaccaagattctgcccccagagaaggagggcgccctgcctcggcaggtgggcaacaagacggagtgcggcctgctgggcttcgtgctggacctgaagcaggactacgagcccgtgcgcagccagatgccagaggagaagttgtacaaagtgtacaccttcaactccgtgcgcaagtccatgagcactgtcatcaagctgcccgacgagagcttccgcatgtacagcaagggggcttctgagatcgtgctcaagaagtgctgcaaaatcctcaatggggcgggagagcctcgtgtcttccggccccgcgaccgggacgagatggtaaagaaggtgattgagcccatggcttgcgatgggctccgcactatctgcgtggcctaccgcgacttccccagcagcccggagccggactgggacaatgagaatgacatcctcaacgaactcacctgcatctgcgtggtgggcatcgaggacccggtgcggccagaggtcccagaagccatccgcaagtgccagcgggcaggcatcacggtccgcatggtcactggcgacaatatcaacacggctcgggccatcgccatcaagtgtggcatcatccatcctggggaggactttctgtgcctcgagggcaaggagttcaacaggaggatccgcaacgagaagggggagattgagcaggagcgaattgacaagatctggccaaagctgcgggtgctggctcgctcctccccaacggacaagcataccctggttaaaggcatcatcgacagcacacacactgagcagcggcaggtggtggccgtgacgggggacgggaccaacgacgggcctgcactcaagaaggccgacgtgggcttcgccatgggcatcgcaggcactgacgtggccaaggaggcctcagacatcatcctgacagacgacaatttcagcagcatcgtcaaggcagtgatgtggggccgcaacgtctatgacagcatctccaaattcttgcagttccagctcaccgtcaacgtggtggccgtgattgtggccttcacaggcgcctgcatcacgcaggactcccctctgaaggccgtgcagatgctctgggtgaacctcatcatggacacgtttgcctcgctggcactggccactgagccgcccacggagaccctgctgctgaggaagccgtacggccgcaacaagccgctcatctccaggaccatgatgaagaacatcctgggccatgctgtctaccagcttgccctcatcttcaccctgctctttgttggcgagaagatgttccagatcgacagcgggaggaacgcgcccctgcattcgccaccctcagaacattacaccatcatcttcaacaccttcgtcatgatgcagctcttcaacgagatcaacgcccgcaagatccacggcgagcgcaatgtctttgacggcatcttccggaaccccatcttctgcaccatcgtgctgggcacctttgccatccagatagtgatcgtgcagtttggagggaagccattcagctgctctccactgcagctggaccagtggatgtggtgcatattcattgggttaggagagctcgtttggggccaggtcatcgccaccatcccgaccagcagactcaagttcctcaaggaggcaggcaggctcacacagaaggaggagatcccggaggaggagctcaacgaggacgtggaggagatcgaccacgcggagcgggagctgcggcggggccagatcctgtggttccgaggcctgaatcggatccagacacagattgaagtagtcaatactttcaagagcggggcctcctttcagggggccctgcggagacagtcctcggtcaccagccagagccaggatgtagccaatctctctagccctagtcgcgtgtcgttgtccaatgctctttcctctccgaccagccttcctcctgctgcagccgggcagggctag

SEQ ID NO: 1892 - DNA, 8962 bp, Homo sapiens
  source 1..8962: mol_type = unassigned DNA; mol_type = unassigned DNA
agtctgcagaggggcccgggcacgctggctgggctcagccgcggcaccagctgccgcaccgcgattacggggctgcccgccgggaaaccgtgcaggattggtggtgattttcatagccaagagccaccacccctgaccatgtagatgccagttccagggagcagcatgggccccactgaatggagactcctgggtctacagccctgagcccctccggcccctggacctcgtcccacaccggaggacacctcttggagctcaccaccactgtcaccagcccgcctcggccacccccaccccccgggacccggagtcggccgcctggtgccacagctgaccagtgagggtgtgctgaggacagccacaagcagccatcacccggcagcctcttgtccagcgctgacccttgggcccagcccgagcaaggaccgcagcaaacatgggtgacatgaccaacagcgacttttactccaaaaaccaaagaaatgagtcgagccatgggggcgagttcgggtgcacaatggaggagctccgctccctcatggagctgcggggcactgaggctgtggtcaagatcaaggagacttatggggacaccgaagccatctgccggcgcctcaaaacctcacctgttgaaggtttgccgggcaccgctccagacctggaaaagagaaagcaaatttttgggcaaaactttatacctccaaagaagccaaaaaccttcctgcagctcgtgtgggaggcgctgcaggacgtgacgctcatcatcctggagattgccgccatcatctccctggggctgtccttctaccacccgcccggcgagggcaacgaaggatgtgcgacggcccagggtggggcagaggatgaaggagaggcagaggcaggttggatcgagggggccgccattctcctctcagttatctgtgtggtcctggtcacggccttcaatgactggagcaaagagaaacagttccggggcctgcagagccgcatcgagcaggaacagaaatttaccgtggtccgggctggccaggtggtccagatccctgtggctgagatcgtggttggggacatagcccaggtcaaatatggtgacctcctccctgccgacggcctcttcatccagggcaatgacctcaagattgatgaaagctccctaactggagagtctgaccaggtgcgcaagtccgtggacaaggaccccatgctgctgtcaggaacccacgtgatggagggctcaggacggatgttggtgactgctgtgggtgtgaactctcagactggcatcatctttaccctcctgggggctggtggtgaagaggaagagaagaaagacaaaaaaggtgtgaagaagggggatggccttcagctaccagcagcagacggtgcggcagcttcaaatgctgcagatagtgcgaatgccagcctagtcaatggtaaaatgcaggatggcaatgtggacgccagccagagcaaagccaaacaacaggacggggcagccgccatggagatgcagcccctcaagagtgccgagggcggcgacgctgacgacaggaagaaggccagcatgcacaagaaggagaagtccgtgctgcagggcaagctcaccaagctggctgtgcagatcgggaaggcgggcttggtgatgtcagccatcacggtgatcatcctggtgctctacttcactgtggacaccttcgtggtcaacaagaagccgtggctgcctgagtgcacgcccgtctacgtgcagtactttgtcaagttcttcatcattggcgtgacggtgctggtggtcgccgtgcccgaggggctccctctggccgtcaccatctcgttggcctattcggtgaagaaaatgatgaaggacaacaacctggtacgccacctggatgcctgtgagaccatgggcaatgccacagccatctgctcagacaagacaggcacgctgaccaccaatcgcatgacagtggtacaggcctatgtcggcgacgtccactataaagagatccccgaccccagctccatcaacaccaagaccatggagctgctgatcaatgccatcgccatcaacagcgcctacaccaccaagattctgcccccagagaaggagggcgccctgcctcggcaggtgggcaacaagacggagtgcggcctgctgggcttcgtgctggacctgaagcaggactacgagcccgtgcgcagccagatgccagaggagaagttgtacaaagtgtacaccttcaactccgtgcgcaagtccatgagcactgtcatcaagctgcccgacgagagcttccgcatgtacagcaagggggcttctgagatcgtgctcaagaagtgctgcaaaatcctcaatggggcgggagagcctcgtgtcttccggccccgcgaccgggacgagatggtaaagaaggtgattgagcccatggcttgcgatgggctccgcactatctgcgtggcctaccgcgacttccccagcagcccggagccggactgggacaatgagaatgacatcctcaacgaactcacctgcatctgcgtggtgggcatcgaggacccggtgcggccagaggtcccagaagccatccgcaagtgccagcgggcaggcatcacggtccgcatggtcactggcgacaatatcaacacggctcgggccatcgccatcaagtgtggcatcatccatcctggggaggactttctgtgcctcgagggcaaggagttcaacaggaggatccgcaacgagaagggggagattgagcaggagcgaattgacaagatctggccaaagctgcgggtgctggctcgctcctccccaacggacaagcataccctggttaaaggcatcatcgacagcacacacactgagcagcggcaggtggtggccgtgacgggggacgggaccaacgacgggcctgcactcaagaaggccgacgtgggcttcgccatgggcatcgcaggcactgacgtggccaaggaggcctcagacatcatcctgacagacgacaatttcagcagcatcgtcaaggcagtgatgtggggccgcaacgtctatgacagcatctccaaattcttgcagttccagctcaccgtcaacgtggtggccgtgattgtggccttcacaggcgcctgcatcacgcaggactcccctctgaaggccgtgcagatgctctgggtgaacctcatcatggacacgtttgcctcgctggcactggccactgagccgcccacggagaccctgctgctgaggaagccgtacggccgcaacaagccgctcatctccaggaccatgatgaagaacatcctgggccatgctgtctaccagcttgccctcatcttcaccctgctctttgttggcgagaagatgttccagatcgacagcgggaggaacgcgcccctgcattcgccaccctcagaacattacaccatcatcttcaacaccttcgtcatgatgcagctcttcaacgagatcaacgcccgcaagatccacggcgagcgcaatgtctttgacggcatcttccggaaccccatcttctgcaccatcgtgctgggcacctttgccatccagatagtgatcgtgcagtttggagggaagccattcagctgctctccactgcagctggaccagtggatgtggtgcatattcattgggttaggagagctcgtttggggccaggtcatcgccaccatcccgaccagcagactcaagttcctcaaggaggcaggcaggctcacacagaaggaggagatcccggaggaggagctcaacgaggacgtggaggagatcgaccacgcggagcgggagctgcggcggggccagatcctgtggttccgaggcctgaatcggatccagacacagatccgcgtcgtgaaggcgttccgtagctctctctatgaaggtttagaaaagcctgaatctcgaacctccatccataacttcatggctcatcctgaattccggatcgaagattcccagccccacatccccctcattgatgacaccgacctggaagaagatgccgcgctcaagcagaactcgagcccgccgtcatccctcaacaagaacaacagcgccatcgacagtgggatcaacctgacgaccgacacaagcaaatcagctacctcttcaagtccagggagccccatccacagcctggagacgtcgctttagctgaggaccctctcgcctgcccgcccgccctcatggaccccgctgccacccgctttccgggcacccatccatccaggcacccaactcacccaagcagcaacgagcaacaatcggaaaccaaatactggagagaaaaccaacgtttccacccacagaccctttctctggctgcgatgctgtttgaactctttttcacttcaaggcaaggggcgggatctccactgggggcttacgggagtgagcggttttcccaaaacaagcccttcctggctcccacccagacatggaccagccatgcacccgcccagccaccacgtcccccgcatgaatgtactgtacactttcaatcctccccttgtttggtttttgggggttggggaggggtttttgtttgtttgtttgttttcttaggcgggaactgcaaacagactcttttctgagactatttatccaatccactggtctgtgagtttttgaaatgcttgcacagcatggtctcagttgtatagattaatttaataactttttgaaattgcagagcttaactcgcctagtagatttgcaccaatggaaccgaagaacttcatagacactcacaaggttatatccatttctttgtatctatatcaacgtatacttttccgagactgtatacgtccatatagataggtagatatatatatatatatataaatatatatacatggatatataaagtttctttgccggcatgttgccttgtttccgcttaaattgctctattttaacttatttatgtcctaaaagaagaatgtaatttgtttacaaacctgtagataacgtctttggctatttgtatggtttaagaacactggtggctgagatgctataaaaacagctcggcccaacagacacttcccctgggttgcatcctggatgttttatgatagccatgctctgatttttgcctgctatttccgttcaataatgtcactaccgtgagaggctcaggcagaagccaaatgctaccgagttgccatcctgaggggtttaacaacatgctccgtagacgaagggagaggaggagagaaggcttcctgggtttgcaacactaacggccatccggcccaaggatgccaggatctgcaaagcactgctcgaagacttttctctcaatgaaactcgcttgagtttactaagagcatttcaaaaataggttctctttggcactgtctgtacagagattgaggtagtgttgaaatattataaatggtattgtgttgatttttttttttatttagtaacttacaggtttgtttccttattaatggcagcatctgagctgttggcatattggatgaggatcagtatggcttgctgcttttatttttatttttgaagaagaatagcctttttctctgcactatttagatccgaatgaaccttatgatgtgtatattgagatgtactcagtgtgattttaaaccaaattgtcttcctgtagtcacaatatatactgtagccttttaacagcaagtcttgctttcccaaacagaaagccattctgaaaccctacagtatcacaggtgagaaaaggtggttattttttccccaagacaacagcactagtaatcccacttaataagagcttatttaattggatgtcagcctcttaactgctaagcactttgtgggtctcagcgtttttcataaaagaacttttgtatttaatacaaagtttgctttgagacttttcagcatatgatcttttttccataaacttgtacagtgcaaaagacattttgaataccatgatcgatgatgtcccatgcttcgaggaaaaccaaacactttccgcctctcttgcaaaatccattcctcatgctgaccctcctcacgatggctgtgtcagcccagccccttcccttctccaggcccagagaactcttccacaaacaagatgagagccactcgggaaaagagccatagtcaactgggagggcctacatctggatggcggtggaaaaacttgagggtttggggttcaaagtcagcccatcccacctggcaaaatcctcctggaaggaggaccttcaagagcgcatcacctgaatgtcgtgaagaagtatctctgaatgtatccaggagaggaactgcataaccaaaggggtgaccagccctcagatgtgcttattggattccagtacaaacgccaccaaagccagcccactgctctcctacaaggaaggaaagatctgcacgtgtaaaacatggggcagccttggaacatggtgttttttggagtttcctttctcacagttttccatctccccacttctttgatcagtcatgtgtccgtgacctcgttccatgacatcaggatagctgtgtttgcacaccatgctccatgttcattcggagccaggaggggttctcagtggagcctggcttagggaacagggagcgatggaagaatgccaacattagcgttggtcttctcttgtcaggaatgaaggatgcttgcacacatgcaccccctcactctcacacttgcacacatacacacacacacacacgaaatggttggtttgtcaaaactcactgtagtacataaagcttgcactctgcgtcctatatctagcagcatggggtacgtttggcagttcactccattagggggtaaataatttatgaccattcatctgtttttatgaatttttttatctagacaataatgtaaataaagaactcaccatctctgttcatttaatactatgcaatggttatgctttcaatcgctggctcttctgactcgtgcagtgtggttctgaaatgtttgtggtttaaaaaaaaaagcaaaaaacaacatcaaacagaacatagtaaatatatctgtaatgtatacttttttctactttgggactgcatcatccacatagcttcttttctgtcctctagacaagggctccaggagtaagtggcagatttggttctgagagctaagctcaccaacttgtctccccctcaacagatgagggaagggcagggagcccgttcagtgactcctggcgctgcagaatcactcatctttggaggtgagcagagagagctctgaggagtttccttcttgcaactcaggcggagctttctttaactcaggagcagcctccattgctcccgccaacccctcaccatggccccttgtccccttgtcccaaccatagcatagagatgacaagagagaggcagtcctatttctgagactggaccaattaaaatgactgcactggctcaaaggactctgaacctgtcttgtcctgggtcctccagttgttggaagccactcttttccccaaccatgctgaaatgccacctttaccacacactgatgtcttacatagacttagatctatttctggaacttctcttctcttcgcttacttgggtgtctcatctggcaccagccatacaattttaactattgtcaatttctaatgtcttattatgtggtgggatgagtcccttcactcttcttttacaaaatttcctagttattctctcacatctattcttccacataaactttaaattgtgcccagtcctccaccccctgtcccattcccacccccaaattctgggctctgtcattccctgtgccatcatcttccccccattgtaattactgtccactcagggctgtgaaatagactatgttctgtaaagagggacaaaaagggcatcctgatcttgagagaagcctgctgttcctcccatcatttcacctgccccctaagcccaggagttgtcatgagaggtcaccaggcccccactcaatctcagcttgggaaccaaagtcacccaccttggttgtgttggggtggacccgccatctgtccctggtccagacgagaaagaggagtctctcctaggcctggagctgggaaagaatgtgtggcccagttgtctgcacttctaattctcatcatggagaaacctttattcctatctccctttcctgaactggttttttgttgtttttgtttcattttgttttggggggatagtttcttgctctttaatttggagtctccagtacctttgggatgcaggcagttcttgcctgggccttctcggaaccctcactcccctagcccactcttgcgctacctgcaggaggctgccaacctggtgcattctgacaagcctcccacccaaatctctctcctgccattgtgtccaaaatcccaccattagaggctcttgtagggaagagcgtttcttgaaggcttttaggccttccagagccaggagggaagtcagacaatagcaggaagtccccaggccttttcaaagttccaaaccaagctctcctgattttaatgtagagatcataccaacccaggtgggggaggagggtccccagccccaggcagcagccatcaccccctccactgaaaacaatattggaggctgctttgggactgcccttctcagccccctaagtctgttttgtaatgcctgtggtgctctccctcctggacctttcctctcgggggtcaccacactttgctaactcttgtgtgcacatattttataatagagtagcgagggaatggtgccgcctccagcttccgtaagctgcccgggctctggggggctctgggacaatcggggctgggaagtgactgtgctcttattgtacactctttatttctctgtatctttggcttgtgctctttgtaattaatgggatttgtctgccttttcaacactatactgagcaataacaataaatgcacacgtggaaatgca

SEQ ID NO: 1893 - DNA, 4280 bp, Homo sapiens
  source 1..4280: mol_type = unassigned DNA; mol_type = unassigned DNA
ccgccgccggtgcagagcgtggggagcactcggccgcagccctcgcccgccgcagagggtcgcgtcccgcgccgccggccaggccgccccgtgcccaggcctttccatccttggagcggatcgttgcccgcctgacgcccgcccgcagcgacagcgcccgccggagccgaggccgcggcggcggccgtgcccatgcccgggtgtccacgcttagcagctttctcaccgccgccaaaccttgcctgggcactgggaccgtgggtggccgcctgtccctagctgtggctgagccaagattgcacttgtgagaaggcctgacaggcagcatgggcgacatggccaatagttccatcgagttccaccccaagccccagcagcagcgggatgtcccccaggctggaggctttgggtgcacgctggcggagctgcgcaccctcatggagctgcgaggggccgaggcgctgcagaagatcgaggaggcctacggggatgtcagcgggctctgccggaggctgaagacctcacccacagagggcctggcggacaacaccaatgacctggagaagcgcaggcagatctacgggcagaacttcatccccccaaagcaacccaagaccttcctgcagctggtgtgggaggccctgcaggacgtgaccctcatcatcctggaggtggctgccatcgtctctctgggcctctcgttctatgcgccgccaggagaggagagtgaagcctgtgggaatgtgtcgggaggcgcagaagatgagggcgaggccgaagctggctggatcgagggggctgccatcctgctgtccgtcatctgtgtggtgctggtcacggccttcaatgactggagcaaggagaagcagttccgaggcctgcagagccgaattgagcaggagcagaagttcacggtcatccggaacgggcagctcctccaggtccccgtggctgcgctggtggtgggggacattgcccaggtcaagtacggcgacctgctgccagccgacggcgtgctcatccaggccaatgacctcaagatcgacgagagctccctgacgggcgagtctgaccacgtgcgcaagtcagctgacaaagatcccatgctgctctcaggcactcatgtcatggaaggttctggaagaatggtggtgaccgccgttggcgtgaattcccagacaggcatcatcttcacgctgcttggagctggcggagaggaggaagagaagaaagataagaaaggcaagcagcaggatggggccatggagagtagccagaccaaagctaagaagcaggatggtgcagtggccatggagatgcagcccctgaagagcgcggagggtggggagatggaggagcgggagaagaagaaagccaacgcacccaaaaaggagaagtctgtccttcaggggaagctcacaaagctagccgtgcagatcgggaaagcagggctggtgatgtctgccatcaccgtcatcatcctggtcctctactttgtgattgagacgtttgtcgtggaaggccggacatggctggcagagtgcacgccggtctatgtacaatacttcgtgaagttcttcatcattggtgtcactgtgctggtcgtggctgtcccagagggcctgcctcttgctgtcaccatctccttagcttactctgtcaagaaaatgatgaaagacaacaacctggtgcgccacctggatgcctgcgagaccatgggcaacgccacagccatctgctccgacaagacgggcacgctcaccaccaaccgtatgaccgtggtccagtcctacctaggagacacccactacaaagagattccggcccccagcgccctgacccctaagatcctcgacctcctggtccatgccatctccatcaacagtgcctataccaccaaaatactacctcctgagaaggaaggcgccctcccacgccaggtgggcaataagacggagtgcgccctgctgggcttcgtcttggacctgaagcgggacttccagcccgtgcgcgagcagatcccggaagacaagctttacaaagtgtacaccttcaactcggtccgcaagtccatgagcacagtcatccgcatgcccgacggtggcttccgcctcttcagcaagggggcctcagagatcctcttgaaaaagtgcaccaacatcttgaacagcaatggcgaactccggggctttcggcctcgggaccgggacgacatggtgaggaagatcatcgagccgatggcttgcgatggcctccgcaccatctgcatcgcctaccgggacttctctgcaggccaggagcccgactgggacaacgagaatgaggtcgtgggtgacctcacctgcatagctgtcgtgggcattgaggaccctgtgcggcccgaggtccctgaagctatccgaaaatgccagcgtgctggcatcacagtccgcatggtgactggggacaacatcaacacggcccgggccatcgcagccaaatgcggcatcatccagcccggggaggacttcctgtgcctagaagggaaggagttcaaccggcggatccgcaatgagaaaggcgagatagaacaggagcggctggacaaggtgtggcccaagctgagggtgctggcccggtcgtctcccaccgacaagcacacactggtcaaagggattatcgacagcaccactggtgagcagcggcaggtggtggctgtgacaggggatggcaccaacgatgggccggccctcaagaaggcggacgtgggcttcgccatgggcatcgcagggaccgacgtggccaaggaggcctccgacatcatcctgaccgatgacaacttcaccagcatcgtcaaggcagtcatgtggggccgtaacgtctatgacagcatctccaagttcctgcagtttcaactgacggtcaatgtggtggctgtgatcgtggccttcacaggtgcctgcattactcaggactctcctctcaaagccgtgcagatgttgtgggtgaacttgatcatggacacatttgcctctctggccctggcgacggagccacccacagagtcgctgctgctgcggaagccgtacggccgcgacaagcccctcatctcccgcaccatgatgaagaacattctgggccacgccgtgtaccagctcgccatcatcttcaccctgctgtttgtcggggagctcttcttcgacatcgacagcgggaggaatgcgcccctgcactcgccaccctcagagcactacaccatcatcttcaacacgttcgtcatgatgcagctctttaacgagatcaacgcccgcaagatccacggcgagaggaacgtgttcgacggcatcttcagcaaccccatcttctgcaccatcgttttgggcactttcgggattcagattgtcatcgtccagtttggcgggaagcccttcagctgctccccactatccacagaacagtggctctggtgcctgtttgttggtgttggggagctggtctggggacaggtcattgccaccatccccaccagccagctcaagtgcctgaaggaagccgggcacgggcccgggaaggacgagatgaccgacgaggagctggccgaaggcgaggaagagatcgaccatgccgagcgggagctccgcaggggccagatcctctggttccggggcctgaaccggattcagacgcagatccgggtggtgaaagcgttccgtagctcgctctatgaaggcctggagaaaccagaatccaagacctccattcacaacttcatggccacgcccgagtttctgatcaatgactacacccacaacatcccgctcattgacgacacggacgtggacgagaacgaggagcgcctccgggcccccccgcccccgtcccccaaccagaacaacaacgccatagacagcggcatctacctgaccacgcatgtcaccaagtcagctacctcttcagtgttttcctccagtcccgggagcccgctccacagcgtggagacgtccctctaacaagaacttgtctcagcacatgcgcacacgcacactcggactcacacgaagtcacacgcacacatgcacgcacacacacatatggggacctgcacacctgcaaaacgagggaacaactaaggtggctgaagacctttctggcagggcatttgcaaggacccaaatccattcaacaagggtgcagcctgccacaggctcctcatccggactgaggaagacgaggacagggaggaggaaaaggaggaagaggaggacaaaaagggggaggagaaggttcttcgtccaaaggag

SEQ ID NO: 1894 - DNA, 6742 bp, Homo sapiens
  source 1..6742: mol_type = unassigned DNA; mol_type = unassigned DNA
ccgccgccggtgcagagcgtggggagcactcggccgcagccctcgcccgccgcagagggtcgcgtcccgcgccgccggccaggccgccccgtgcccaggcctttccatccttggagcggatcgttgcccgcctgacgcccgcccgcagcgacagcgcccgccggagccgaggccgcggcggcggccgtgcccatgcccgggtgtccacgcttagcagctttctcaccgccgccaaaccttgcctgggcactgggaccgtgggtggccgcctgtccctagctgtggctgagccaagattgcacttgtgagaaggcctgacaggcagcatgggcgacatggccaatagttccatcgagttccaccccaagccccagcagcagcgggatgtcccccaggctggaggctttgggtgcacgctggcggagctgcgcaccctcatggagctgcgaggggccgaggcgctgcagaagatcgaggaggcctacggggatgtcagcgggctctgccggaggctgaagacctcacccacagagggcctggcggacaacaccaatgacctggagaagcgcaggcagatctacgggcagaacttcatccccccaaagcaacccaagaccttcctgcagctggtgtgggaggccctgcaggacgtgaccctcatcatcctggaggtggctgccatcgtctctctgggcctctcgttctatgcgccgccaggagaggagagtgaagcctgtgggaatgtgtcgggaggcgcagaagatgagggcgaggccgaagctggctggatcgagggggctgccatcctgctgtccgtcatctgtgtggtgctggtcacggccttcaatgactggagcaaggagaagcagttccgaggcctgcagagccgaattgagcaggagcagaagttcacggtcatccggaacgggcagctcctccaggtccccgtggctgcgctggtggtgggggacattgcccaggtcaagtacggcgacctgctgccagccgacggcgtgctcatccaggccaatgacctcaagatcgacgagagctccctgacgggcgagtctgaccacgtgcgcaagtcagctgacaaagatcccatgctgctctcaggcactcatgtcatggaaggttctggaagaatggtggtgaccgccgttggcgtgaattcccagacaggcatcatcttcacgctgcttggagctggcggagaggaggaagagaagaaagataagaaagctaagaagcaggatggtgcagtggccatggagatgcagcccctgaagagcgcggagggtggggagatggaggagcgggagaagaagaaagccaacgcacccaaaaaggagaagtctgtccttcaggggaagctcacaaagctagccgtgcagatcgggaaagcagggctggtgatgtctgccatcaccgtcatcatcctggtcctctactttgtgattgagacgtttgtcgtggaaggccggacatggctggcagagtgcacgccggtctatgtacaatacttcgtgaagttcttcatcattggtgtcactgtgctggtcgtggctgtcccagagggcctgcctcttgctgtcaccatctccttagcttactctgtcaagaaaatgatgaaagacaacaacctggtgcgccacctggatgcctgcgagaccatgggcaacgccacagccatctgctccgacaagacgggcacgctcaccaccaaccgtatgaccgtggtccagtcctacctaggagacacccactacaaagagattccggcccccagcgccctgacccctaagatcctcgacctcctggtccatgccatctccatcaacagtgcctataccaccaaaatactacctcctgagaaggaaggcgccctcccacgccaggtgggcaataagacggagtgcgccctgctgggcttcgtcttggacctgaagcgggacttccagcccgtgcgcgagcagatcccggaagacaagctttacaaagtgtacaccttcaactcggtccgcaagtccatgagcacagtcatccgcatgcccgacggtggcttccgcctcttcagcaagggggcctcagagatcctcttgaaaaagtgcaccaacatcttgaacagcaatggcgaactccggggctttcggcctcgggaccgggacgacatggtgaggaagatcatcgagccgatggcttgcgatggcctccgcaccatctgcatcgcctaccgggacttctctgcaggccaggagcccgactgggacaacgagaatgaggtcgtgggtgacctcacctgcatagctgtcgtgggcattgaggaccctgtgcggcccgaggtccctgaagctatccgaaaatgccagcgtgctggcatcacagtccgcatggtgactggggacaacatcaacacggcccgggccatcgcagccaaatgcggcatcatccagcccggggaggacttcctgtgcctagaagggaaggagttcaaccggcggatccgcaatgagaaaggcgagatagaacaggagcggctggacaaggtgtggcccaagctgagggtgctggcccggtcgtctcccaccgacaagcacacactggtcaaagggattatcgacagcaccactggtgagcagcggcaggtggtggctgtgacaggggatggcaccaacgatgggccggccctcaagaaggcggacgtgggcttcgccatgggcatcgcagggaccgacgtggccaaggaggcctccgacatcatcctgaccgatgacaacttcaccagcatcgtcaaggcagtcatgtggggccgtaacgtctatgacagcatctccaagttcctgcagtttcaactgacggtcaatgtggtggctgtgatcgtggccttcacaggtgcctgcattactcaggactctcctctcaaagccgtgcagatgttgtgggtgaacttgatcatggacacatttgcctctctggccctggcgacggagccacccacagagtcgctgctgctgcggaagccgtacggccgcgacaagcccctcatctcccgcaccatgatgaagaacattctgggccacgccgtgtaccagctcgccatcatcttcaccctgctgtttgtcggggagctcttcttcgacatcgacagcgggaggaatgcgcccctgcactcgccaccctcagagcactacaccatcatcttcaacacgttcgtcatgatgcagctctttaacgagatcaacgcccgcaagatccacggcgagaggaacgtgttcgacggcatcttcagcaaccccatcttctgcaccatcgttttgggcactttcgggattcagattgtcatcgtccagtttggcgggaagcccttcagctgctccccactatccacagaacagtggctctggtgcctgtttgttggtgttggggagctggtctggggacaggtcattgccaccatccccaccagccagctcaagtgcctgaaggaagccgggcacgggcccgggaaggacgagatgaccgacgaggagctggccgaaggcgaggaagagatcgaccatgccgagcgggagctccgcaggggccagatcctctggttccggggcctgaaccggattcagacgcagatggaggtagtgagtaccttcaagagaagcggttcagttcagggtgctgtgcgccggcggtcttcggtcctcagccagcttcatgacgtaaccaatctttctacccctactcacgcaattctctctgctgccaatcctaccagtgctgctgggaatccgggtggtgaaagcgttccgtagctcgctctatgaaggcctggagaaaccagaatccaagacctccattcacaacttcatggccacgcccgagtttctgatcaatgactacacccacaacatcccgctcattgacgacacggacgtggacgagaacgaggagcgcctccgggcccccccgcccccgtcccccaaccagaacaacaacgccatagacagcggcatctacctgaccacgcatgtcaccaagtcagctacctcttcagtgttttcctccagtcccgggagcccgctccacagcgtggagacgtccctctaacaagaacttgtctcagcacatgcgcacacgcacactcggactcacacgaagtcacacgcacacatgcacgcacacacacatatggggacctgcacacctgcaaaacgagggaacaactaaggtggctgaagacctttctggcagggcatttgcaaggacccaaatccattcaacaagggtgcagcctgccacaggctcctcatccggactgaggaagacgaggacagggaggaggaaaaggaggaagaggaggacaaaaagggggaggagaaggttcttcgtccaaaggaggaaggagaagaagtagaaagtgcgaagagctgagttccccacctttttttctattgatgcttcttttttaacaaactacagttttaccgtgtgtttgccatttgagctgtgtggtgggcagggggctggtttgggtttatggggagcttttgttgcacccatgcaggggcaatcagatcagcatcttcatgcaaaaaaaaaaaaaaagttgagtgctctgcaggcctgtgaagggtgccacctgagggagccgcctgcaagcggccctgcagccacaaagcaacccgccctctgcaaaaactaggcacatccgcagtgcgcatgtgtgtgcgtgcatgcacatatgtgtatgtgtgtggatctgtacacacacacgtatatatggccagatgcgtatttcaataaggaactatttactggcatgatatttgcattcctcttatcaggcattttcatttggaaatttcattattgaatgtagcaaggttgtagttgtttttttttttttttcagggaactagactgcaagaatatctttctggtcaacccatttttgtccctcatcaccccgcccccacctttcgctcctgccctctgcccggccctactgagattcccaaggagaaggccgagagggggcgctccaggtctggagcaggtataattggagcatttgcactgagacccctgccagagaggagaaaaccctttcaagggaaattttaatctaaaaggaaaaaaccaaaatattgatgagaaggagtcctccagttagtgaaaggggagtttcgttttcagctttctttggttcctactccaattccacatccttcatcctggccatgcccccaccttcaagagcatgaagcactcttggagttgtgggtcctgcccagagtccagagagcagcctcagctgagcacaggtccgagggggcgggggcagggccaagagttcaaaagaagccaatggagggagagggagcgtcagaagcccggaggagctggtggtgggagaatgacggcagggacgcagccacagttcagaccctgtcccctcagcacctggatggactcccactgtttgctttggcaaatgccgaggagtcctcggtagaccaccttgatgtctgctgtgacatcagaggtgccaccaccaaagcactcttcccaccctagtctttgtgtccagcggccaagcttaagccatgaagtcatggatttgtggctcagcaccaggtcctgaggggagcgtatcctggcagtgtgggcacctggtggccaagcctcagtttcccccaaatgagcaaaggggataaagaggggcccgacttttgccaccctcctgaggaagcccctaggtccacacagtgatgccatgggggacccttgccttccacacttgcaggtgtcacgttttgcagggaggtgtttgggccttgggctcagccactgggagacagttgggacctgagggacagaggatcggaatggaaaccaccaacgtgcactggcaccctcagaaggcttgtctcacctccaccggcatccacacaaaaccaaacaggagcaggcgtcatccccactattcccatgaatgccatgtcacccctgagcagaagcagtcaaatcttgggcaaaagaatttcggttagaaaagaaaatcccactttaaaatgccagctgcagataactcaaagccatcccttttttctaaagggcacattgagaatgtcacccatttgtaaactgttccctgatgtccttgtttaaacgataataagaaaaagggcaactccatttgttgagggtctttgtgttcttcaatgagaaatcaaatttgagacgttgaaattggagctgcgtgctgctgcactcaccggcttcttctcactctctgtcgtagacacaccgataggaccaatggccaatagatattaaaagcaaaccctcactgctgctgtataaagttgcctaatgtaaatgtctattgtttagtccctaggtcacctttgtgctgtgctgtggagttcagaaacggggtaccatgacctggaatcttttgctcttgtttttgcagtcttcaaggctgggggccctgtctcattgggaagcccctctttataaagcattatattacttggaatggcttggtcaactgtgttcagttcataaatatgttttacatttttatctgcctgttataaagatgaacaaaaaaacttaatgagaaagatcacagatacgtaataatttaaagtctgtagttgaatttcctaacttaaagaatagaccaaaatttctgtgtataaaaaaaaatgaaaggctccttacatcctggtctgggtaa

SEQ ID NO: 1895 - DNA, 4064 bp, Homo sapiens
  source 1..4064: mol_type = unassigned DNA; mol_type = unassigned DNA
cagccaacagtcgctctaaatgggccttactctaactgatggatcctgtctgccctatagcctgttgcattcatgaagacagtgagggttagcagagcaccccgaccccaccctgtcctccaggatggagactccacctcccaggactccaagttcctcccctgtgggccaggcccccattcactcattcctccaggcccccggccacatgcgggactgaccacgcggtagacttcctgccgactccataccacgtgtctcaaagagcttagggcccagtgtccacgcttagcagctttctcaccgccgccaaaccttgcctgggcactgggaccgtgggtggccgcctgtccctagctgtggctgagccaagattgcacttgtgagaaggcctgacaggcagcatgggcgacatggccaatagttccatcgagttccaccccaagccccagcagcagcgggatgtcccccaggctggaggctttgggtgcacgctggcggagctgcgcaccctcatggagctgcgaggggccgaggcgctgcagaagatcgaggaggcctacggggatgtcagcgggctctgccggaggctgaagacctcacccacagagggcctggcggacaacaccaatgacctggagaagcgcaggcagatctacgggcagaacttcatccccccaaagcaacccaagaccttcctgcagctggtgtgggaggccctgcaggacgtgaccctcatcatcctggaggtggctgccatcgtctctctgggcctctcgttctatgcgccgccaggagaggagagtgaagcctgtgggaatgtgtcgggaggcgcagaagatgagggcgaggccgaagctggctggatcgagggggctgccatcctgctgtccgtcatctgtgtggtgctggtcacggccttcaatgactggagcaaggagaagcagttccgaggcctgcagagccgaattgagcaggagcagaagttcacggtcatccggaacgggcagctcctccaggtccccgtggctgcgctggtggtgggggacattgcccaggtcaagtacggcgacctgctgccagccgacggcgtgctcatccaggccaatgacctcaagatcgacgagagctccctgacgggcgagtctgaccacgtgcgcaagtcagctgacaaagatcccatgctgctctcaggcactcatgtcatggaaggttctggaagaatggtggtgaccgccgttggcgtgaattcccagacaggcatcatcttcacgctgcttggagctggcggagaggaggaagagaagaaagataagaaagctaagaagcaggatggtgcagtggccatggagatgcagcccctgaagagcgcggagggtggggagatggaggagcgggagaagaagaaagccaacgcacccaaaaaggagaagtctgtccttcaggggaagctcacaaagctagccgtgcagatcgggaaagcagggctggtgatgtctgccatcaccgtcatcatcctggtcctctactttgtgattgagacgtttgtcgtggaaggccggacatggctggcagagtgcacgccggtctatgtacaatacttcgtgaagttcttcatcattggtgtcactgtgctggtcgtggctgtcccagagggcctgcctcttgctgtcaccatctccttagcttactctgtcaagaaaatgatgaaagacaacaacctggtgcgccacctggatgcctgcgagaccatgggcaacgccacagccatctgctccgacaagacgggcacgctcaccaccaaccgtatgaccgtggtccagtcctacctaggagacacccactacaaagagattccggcccccagcgccctgacccctaagatcctcgacctcctggtccatgccatctccatcaacagtgcctataccaccaaaatactacctcctgagaaggaaggcgccctcccacgccaggtgggcaataagacggagtgcgccctgctgggcttcgtcttggacctgaagcgggacttccagcccgtgcgcgagcagatcccggaagacaagctttacaaagtgtacaccttcaactcggtccgcaagtccatgagcacagtcatccgcatgcccgacggtggcttccgcctcttcagcaagggggcctcagagatcctcttgaaaaagtgcaccaacatcttgaacagcaatggcgaactccggggctttcggcctcgggaccgggacgacatggtgaggaagatcatcgagccgatggcttgcgatggcctccgcaccatctgcatcgcctaccgggacttctctgcaggccaggagcccgactgggacaacgagaatgaggtcgtgggtgacctcacctgcatagctgtcgtgggcattgaggaccctgtgcggcccgaggtccctgaagctatccgaaaatgccagcgtgctggcatcacagtccgcatggtgactggggacaacatcaacacggcccgggccatcgcagccaaatgcggcatcatccagcccggggaggacttcctgtgcctagaagggaaggagttcaaccggcggatccgcaatgagaaaggcgagatagaacaggagcggctggacaaggtgtggcccaagctgagggtgctggcccggtcgtctcccaccgacaagcacacactggtcaaagggattatcgacagcaccactggtgagcagcggcaggtggtggctgtgacaggggatggcaccaacgatgggccggccctcaagaaggcggacgtgggcttcgccatgggcatcgcagggaccgacgtggccaaggaggcctccgacatcatcctgaccgatgacaacttcaccagcatcgtcaaggcagtcatgtggggccgtaacgtctatgacagcatctccaagttcctgcagtttcaactgacggtcaatgtggtggctgtgatcgtggccttcacaggtgcctgcattactcaggactctcctctcaaagccgtgcagatgttgtgggtgaacttgatcatggacacatttgcctctctggccctggcgacggagccacccacagagtcgctgctgctgcggaagccgtacggccgcgacaagcccctcatctcccgcaccatgatgaagaacattctgggccacgccgtgtaccagctcgccatcatcttcaccctgctgtttgtcggggagctcttcttcgacatcgacagcgggaggaatgcgcccctgcactcgccaccctcagagcactacaccatcatcttcaacacgttcgtcatgatgcagctctttaacgagatcaacgcccgcaagatccacggcgagaggaacgtgttcgacggcatcttcagcaaccccatcttctgcaccatcgttttgggcactttcgggattcagattgtcatcgtccagtttggcgggaagcccttcagctgctccccactatccacagaacagtggctctggtgcctgtttgttggtgttggggagctggtctggggacaggtcattgccaccatccccaccagccagctcaagtgcctgaaggaagccgggcacgggcccgggaaggacgagatgaccgacgaggagctggccgaaggcgaggaagagatcgaccatgccgagcgggagctccgcaggggccagatcctctggttccggggcctgaaccggattcagacgcagatggaggtagtgagtaccttcaagagaagcggttcagttcagggtgctgtgcgccggcggtcttcggtcctcagccagcttcatgacgtaaccaatctttctacccctactcacgcaattctctctgctgccaatcctaccagtgctgctgggagtgagtcttgacttcccttttctctcataaatggcatctctggggaagaataagcctccccagctcggccttctctcttttgcagtcttgcattccgctcaccgtggcttttctgttctttctttaccgccctgtccagtccttcccgcccagacggtgtctctcgaaagccatattcttttatgaaacgtattcaacccatggca

SEQ ID NO: 1896 - DNA, 4234 bp, Homo sapiens
  source 1..4234: mol_type = unassigned DNA; mol_type = unassigned DNA
gtgtccacgcttagcagctttctcaccgccgccaaaccttgcctgggcactgggaccgtgggtggccgcctgtccctagctgtggctgagccaagattgcacttgtgagaaggcctgacaggcagcatgggcgacatggccaatagttccatcgagttccaccccaagccccagcagcagcgggatgtcccccaggctggaggctttgggtgcacgctggcggagctgcgcaccctcatggagctgcgaggggccgaggcgctgcagaagatcgaggaggcctacggggatgtcagcgggctctgccggaggctgaagacctcacccacagagggcctggcggacaacaccaatgacctggagaagcgcaggcagatctacgggcagaacttcatccccccaaagcaacccaagaccttcctgcagctggtgtgggaggccctgcaggacgtgaccctcatcatcctggaggtggctgccatcgtctctctgggcctctcgttctatgcgccgccaggagaggagagtgaagcctgtgggaatgtgtcgggaggcgcagaagatgagggcgaggccgaagctggctggatcgagggggctgccatcctgctgtccgtcatctgtgtggtgctggtcacggccttcaatgactggagcaaggagaagcagttccgaggcctgcagagccgaattgagcaggagcagaagttcacggtcatccggaacgggcagctcctccaggtccccgtggctgcgctggtggtgggggacattgcccaggtcaagtacggcgacctgctgccagccgacggcgtgctcatccaggccaatgacctcaagatcgacgagagctccctgacgggcgagtctgaccacgtgcgcaagtcagctgacaaagatcccatgctgctctcaggcactcatgtcatggaaggttctggaagaatggtggtgaccgccgttggcgtgaattcccagacaggcatcatcttcacgctgcttggagctggcggagaggaggaagagaagaaagataagaaaggcaagcagcaggatggggccatggagagtagccagaccaaagctaagaagcaggatggtgcagtggccatggagatgcagcccctgaagagcgcggagggtggggagatggaggagcgggagaagaagaaagccaacgcacccaaaaaggagaagtctgtccttcaggggaagctcacaaagctagccgtgcagatcgggaaagcagggctggtgatgtctgccatcaccgtcatcatcctggtcctctactttgtgattgagacgtttgtcgtggaaggccggacatggctggcagagtgcacgccggtctatgtacaatacttcgtgaagttcttcatcattggtgtcactgtgctggtcgtggctgtcccagagggcctgcctcttgctgtcaccatctccttagcttactctgtcaagaaaatgatgaaagacaacaacctggtgcgccacctggatgcctgcgagaccatgggcaacgccacagccatctgctccgacaagacgggcacgctcaccaccaaccgtatgaccgtggtccagtcctacctaggagacacccactacaaagagattccggcccccagcgccctgacccctaagatcctcgacctcctggtccatgccatctccatcaacagtgcctataccaccaaaatactacctcctgagaaggaaggcgccctcccacgccaggtgggcaataagacggagtgcgccctgctgggcttcgtcttggacctgaagcgggacttccagcccgtgcgcgagcagatcccggaagacaagctttacaaagtgtacaccttcaactcggtccgcaagtccatgagcacagtcatccgcatgcccgacggtggcttccgcctcttcagcaagggggcctcagagatcctcttgaaaaagtgcaccaacatcttgaacagcaatggcgaactccggggctttcggcctcgggaccgggacgacatggtgaggaagatcatcgagccgatggcttgcgatggcctccgcaccatctgcatcgcctaccgggacttctctgcaggccaggagcccgactgggacaacgagaatgaggtcgtgggtgacctcacctgcatagctgtcgtgggcattgaggaccctgtgcggcccgaggtccctgaagctatccgaaaatgccagcgtgctggcatcacagtccgcatggtgactggggacaacatcaacacggcccgggccatcgcagccaaatgcggcatcatccagcccggggaggacttcctgtgcctagaagggaaggagttcaaccggcggatccgcaatgagaaaggcgagatagaacaggagcggctggacaaggtgtggcccaagctgagggtgctggcccggtcgtctcccaccgacaagcacacactggtcaaagggattatcgacagcaccactggtgagcagcggcaggtggtggctgtgacaggggatggcaccaacgatgggccggccctcaagaaggcggacgtgggcttcgccatgggcatcgcagggaccgacgtggccaaggaggcctccgacatcatcctgaccgatgacaacttcaccagcatcgtcaaggcagtcatgtggggccgtaacgtctatgacagcatctccaagttcctgcagtttcaactgacggtcaatgtggtggctgtgatcgtggccttcacaggtgcctgcattactcaggactctcctctcaaagccgtgcagatgttgtgggtgaacttgatcatggacacatttgcctctctggccctggcgacggagccacccacagagtcgctgctgctgcggaagccgtacggccgcgacaagcccctcatctcccgcaccatgatgaagaacattctgggccacgccgtgtaccagctcgccatcatcttcaccctgctgtttgtcggggagctcttcttcgacatcgacagcgggaggaatgcgcccctgcactcgccaccctcagagcactacaccatcatcttcaacacgttcgtcatgatgcagctctttaacgagatcaacgcccgcaagatccacggcgagaggaacgtgttcgacggcatcttcagcaaccccatcttctgcaccatcgttttgggcactttcgggattcagattgtcatcgtccagtttggcgggaagcccttcagctgctccccactatccacagaacagtggctctggtgcctgtttgttggtgttggggagctggtctggggacaggtcattgccaccatccccaccagccagctcaagtgcctgaaggaagccgggcacgggcccgggaaggacgagatgaccgacgaggagctggccgaaggcgaggaagagatcgaccatgccgagcgggagctccgcaggggccagatcctctggttccggggcctgaaccggattcagacgcagatggaggtagtgagtaccttcaagagaagcggttcagttcagggtgctgtgcgccggcggtcttcggtcctcagccagcttcatgacgtaaccaatctttctacccctactcacgcaattctctctgctgccaatcctaccagtgctgctgggaatccgggtggtgaaagcgttccgtagctcgctctatgaaggcctggagaaaccagaatccaagacctccattcacaacttcatggccacgcccgagtttctgatcaatgactacacccacaacatcccgctcattgacgacacggacgtggacgagaacgaggagcgcctccgggcccccccgcccccgtcccccaaccagaacaacaacgccatagacagcggcatctacctgaccacgcatgtcaccaagtcagctacctcttcagtgttttcctccagtcccgggagcccgctccacagcgtggagacgtccctctaacaagaacttgtctcagcacatgcgcacacgcacactcggactcacacgaagtcacacgcacacatgcacgcacacacacatatggggacctgcacacctgcaaaacgagggaacaactaaggtggctgaagacctttctggcagggcatttgcaaggacccaaatccattcaacaagggtgcagcctgccacaggctcctcatccggactgaggaagacgaggacagggaggaggaaaaggaggaagaggaggacaaaaagggggaggagaaggttcttcgtccaaaggag

SEQ ID NO: 1897 - DNA, 899 bp, Homo sapiens
  source 1..899: mol_type = unassigned DNA; mol_type = unassigned DNA
cggcaggtggtggctgtgacaggggatggcaccaacgatgggccggccctcaagaaggcggacgtgggcttcgccatgggcatcgcagggaccgacgtggccaaggaggcctccgacatcatcctgaccgatgacaacttcaccagcatcgtcaaggcagtcatgtggggccgtaacgtctatgacagcatctccaagttcctgcagtttcaactgacggtcaatgtggtggctgtgatcgtggccttcacaggtgcctgcattactcagttctggaagtttcctatgaatggaatcagacagtacgtggccttgtgtgtctggcttctgtgaggctgatttttaacgaacaactcagaggagctgagaaggaaggtccagttcagagtttctgcctcctcctgcccctgaggtgcaggagacaaggagagcagccctcactctgttgccccaaatggcagaccccatcgtcgggctgttttgtggtctggggtttttcacctcctgcgagggatttggagcacacctgctgccaggactctcctctcaaagccgtgcagatgttgtgggtgaacttgatcatggacacatttgcctctctggccctggcgacggagccacccacagagtcgctgctgctgcggaagccgtacggccgcgacaagcccctcatctcccgcaccatgatgaagaacattctgggccacgccgtgtaccagctcgccatcatcttcaccctgctgtttgtcggggagctcttcttcgacatcgacagcgggaggaatgcgcccctgcactcgccaccctcagagcactacaccatcatcttcaacacgttcgtcatgatgcagctctttaacgagatcaacgcccgcaagatccacggcgagaggaacgtg

SEQ ID NO: 1898 - DNA, 634 bp, Homo sapiens
  source 1..634: mol_type = unassigned DNA; mol_type = unassigned DNA
gctgtgcgccggcggtcttcggtcctcagccagcttcatgacatccgggtggtgaaagcgttccgtagctcgctctatgaaggcctggagaaaccagaatccaagacctccattcacaacttcatggccacgcccgagtttctgatcaatgactacacccacaacatcccgctcattgacgacacggacgtggacgagaacgaggagcgcctccgggcccccccgcccccgtcccccaaccagaacaacaacgccatagacagcggcatctacctgaccacgcatgtcaccaagtcagctacctcttcagtgttttcctccagtcccgggagcccgctccacagcgtggagacgtccctctaacaagaacttgtctcagcacatgcgcacacgcacactcggactcacacgaagtcacacgcacacatgcacgcacacacacatatggggacctgcacacctgcaaaacgagggaacaactaaggtggctgaagacctttctggcagggcatttgcaaggacccaaatccattcaacaagggtgcagcctgccacaggctcctcatccggactgaggaagacgaggacagggaggaggaaaaggaggaagaggaggacaaaaagggggaggaga

SEQ ID NO: 1899 - DNA, 6420 bp, Homo sapiens
  source 1..6420: mol_type = unassigned DNA; mol_type = unassigned DNA
gtgtccacgcttagcagctttctcaccgccgccaaaccttgcctgggcactgggaccgtgggtggccgcctgtccctagctgtggctgagccaagattgcacttgtgagaaggcctgacaggcagcatgggcgacatggccaatagttccatcgagttccaccccaagccccagcagcagcgggatgtcccccaggctggaggctttgggtgcacgctggcggagctgcgcaccctcatggagctgcgaggggccgaggcgctgcagaagatcgaggaggcctacggggatgtcagcgggctctgccggaggctgaagacctcacccacagagggcctggcggacaacaccaatgacctggagaagcgcaggcagatctacgggcagaacttcatccccccaaagcaacccaagaccttcctgcagctggtgtgggaggccctgcaggacgtgaccctcatcatcctggaggtggctgccatcgtctctctgggcctctcgttctatgcgccgccaggagaggagagtgaagcctgtgggaatgtgtcgggaggcgcagaagatgagggcgaggccgaagctggctggatcgagggggctgccatcctgctgtccgtcatctgtgtggtgctggtcacggccttcaatgactggagcaaggagaagcagttccgaggcctgcagagccgaattgagcaggagcagaagttcacggtcatccggaacgggcagctcctccaggtccccgtggctgcgctggtggtgggggacattgcccaggtcaagtacggcgacctgctgccagccgacggcgtgctcatccaggccaatgacctcaagatcgacgagagctccctgacgggcgagtctgaccacgtgcgcaagtcagctgacaaagatcccatgctgctctcaggcactcatgtcatggaaggttctggaagaatggtggtgaccgccgttggcgtgaattcccagacaggcatcatcttcacgctgcttggagctggcggagaggaggaagagaagaaagataagaaaggcaagcagcaggatggggccatggagagtagccagaccaaagctaagaagcaggatggtgcagtggccatggagatgcagcccctgaagagcgcggagggtggggagatggaggagcgggagaagaagaaagccaacgcacccaaaaaggagaagtctgtccttcaggggaagctcacaaagctagccgtgcagatcgggaaagcagggctggtgatgtctgccatcaccgtcatcatcctggtcctctactttgtgattgagacgtttgtcgtggaaggccggacatggctggcagagtgcacgccggtctatgtacaatacttcgtgaagttcttcatcattggtgtcactgtgctggtcgtggctgtcccagagggcctgcctcttgctgtcaccatctccttagcttactctgtcaagaaaatgatgaaagacaacaacctggtgcgccacctggatgcctgcgagaccatgggcaacgccacagccatctgctccgacaagacgggcacgctcaccaccaaccgtatgaccgtggtccagtcctacctaggagacacccactacaaagagattccggcccccagcgccctgacccctaagatcctcgacctcctggtccatgccatctccatcaacagtgcctataccaccaaaatactacctcctgagaaggaaggcgccctcccacgccaggtgggcaataagacggagtgcgccctgctgggcttcgtcttggacctgaagcgggacttccagcccgtgcgcgagcagatcccggaagacaagctttacaaagtgtacaccttcaactcggtccgcaagtccatgagcacagtcatccgcatgcccgacggtggcttccgcctcttcagcaagggggcctcagagatcctcttgaaaaagtgcaccaacatcttgaacagcaatggcgaactccggggctttcggcctcgggaccgggacgacatggtgaggaagatcatcgagccgatggcttgcgatggcctccgcaccatctgcatcgcctaccgggacttctctgcaggccaggagcccgactgggacaacgagaatgaggtcgtgggtgacctcacctgcatagctgtcgtgggcattgaggaccctgtgcggcccgaggtccctgaagctatccgaaaatgccagcgtgctggcatcacagtccgcatggtgactggggacaacatcaacacggcccgggccatcgcagccaaatgcggcatcatccagcccggggaggacttcctgtgcctagaagggaaggagttcaaccggcggatccgcaatgagaaaggcgagatagaacaggagcggctggacaaggtgtggcccaagctgagggtgctggcccggtcgtctcccaccgacaagcacacactggtcaaagggattatcgacagcaccactggtgagcagcggcaggtggtggctgtgacaggggatggcaccaacgatgggccggccctcaagaaggcggacgtgggcttcgccatgggcatcgcagggaccgacgtggccaaggaggcctccgacatcatcctgaccgatgacaacttcaccagcatcgtcaaggcagtcatgtggggccgtaacgtctatgacagcatctccaagttcctgcagtttcaactgacggtcaatgtggtggctgtgatcgtggccttcacaggtgcctgcattactcaggactctcctctcaaagccgtgcagatgttgtgggtgaacttgatcatggacacatttgcctctctggccctggcgacggagccacccacagagtcgctgctgctgcggaagccgtacggccgcgacaagcccctcatctcccgcaccatgatgaagaacattctgggccacgccgtgtaccagctcgccatcatcttcaccctgctgtttgtcggggagctcttcttcgacatcgacagcgggaggaatgcgcccctgcactcgccaccctcagagcactacaccatcatcttcaacacgttcgtcatgatgcagctctttaacgagatcaacgcccgcaagatccacggcgagaggaacgtgttcgacggcatcttcagcaaccccatcttctgcaccatcgttttgggcactttcgggattcagattgtcatcgtccagtttggcgggaagcccttcagctgctccccactatccacagaacagtggctctggtgcctgtttgttggtgttggggagctggtctggggacaggtcattgccaccatccccaccagccagctcaagtgcctgaaggaagccgggcacgggcccgggaaggacgagatgaccgacgaggagctggccgaaggcgaggaagagatcgaccatgccgagcgggagctccgcaggggccagatcctctggttccggggcctgaaccggattcagacgcagatccgggtggtgaaagcgttccgtagctcgctctatgaaggcctggagaaaccagaatccaagacctccattcacaacttcatggccacgcccgagtttctgatcaatgactacacccacaacatcccgctcattgacgacacggacgtggacgagaacgaggagcgcctccgggcccccccgcccccgtcccccaaccagaacaacaacgccatagacagcggcatctacctgaccacgcatgtcaccaagtcagctacctcttcagtgttttcctccagtcccgggagcccgctccacagcgtggagacgtccctctaacaagaacttgtctcagcacatgcgcacacgcacactcggactcacacgaagtcacacgcacacatgcacgcacacacacatatggggacctgcacacctgcaaaacgagggaacaactaaggtggctgaagacctttctggcagggcatttgcaaggacccaaatccattcaacaagggtgcagcctgccacaggctcctcatccggactgaggaagacgaggacagggaggaggaaaaggaggaagaggaggacaaaaagggggaggagaaggttcttcgtccaaaggaggaaggagaagaagtagaaagtgcgaagagctgagttccccacctttttttctattgatgcttcttttttaacaaactacagttttaccgtgtgtttgccatttgagctgtgtggtgggcagggggctggtttgggtttatggggagcttttgttgcacccatgcaggggcaatcagatcagcatcttcatgcaaaaaaaaaaaaaaagttgagtgctctgcaggcctgtgaagggtgccacctgagggagccgcctgcaagcggccctgcagccacaaagcaacccgccctctgcaaaaactaggcacatccgcagtgcgcatgtgtgtgcgtgcatgcacatatgtgtatgtgtgtggatctgtacacacacacgtatatatggccagatgcgtatttcaataaggaactatttactggcatgatatttgcattcctcttatcaggcattttcatttggaaatttcattattgaatgtagcaaggttgtagttgtttttttttttttttcagggaactagactgcaagaatatctttctggtcaacccatttttgtccctcatcaccccgcccccacctttcgctcctgccctctgcccggccctactgagattcccaaggagaaggccgagagggggcgctccaggtctggagcaggtataattggagcatttgcactgagacccctgccagagaggagaaaaccctttcaagggaaattttaatctaaaaggaaaaaaccaaaatattgatgagaaggagtcctccagttagtgaaaggggagtttcgttttcagctttctttggttcctactccaattccacatccttcatcctggccatgcccccaccttcaagagcatgaagcactcttggagttgtgggtcctgcccagagtccagagagcagcctcagctgagcacaggtccgagggggcgggggcagggccaagagttcaaaagaagccaatggagggagagggagcgtcagaagcccggaggagctggtggtgggagaatgacggcagggacgcagccacagttcagaccctgtcccctcagcacctggatggactcccactgtttgctttggcaaatgccgaggagtcctcggtagaccaccttgatgtctgctgtgacatcagaggtgccaccaccaaagcactcttcccaccctagtctttgtgtccagcggccaagcttaagccatgaagtcatggatttgtggctcagcaccaggtcctgaggggagcgtatcctggcagtgtgggcacctggtggccaagcctcagtttcccccaaatgagcaaaggggataaagaggggcccgacttttgccaccctcctgaggaagcccctaggtccacacagtgatgccatgggggacccttgccttccacacttgcaggtgtcacgttttgcagggaggtgtttgggccttgggctcagccactgggagacagttgggacctgagggacagaggatcggaatggaaaccaccaacgtgcactggcaccctcagaaggcttgtctcacctccaccggcatccacacaaaaccaaacaggagcaggcgtcatccccactattcccatgaatgccatgtcacccctgagcagaagcagtcaaatcttgggcaaaagaatttcggttagaaaagaaaatcccactttaaaatgccagctgcagataactcaaagccatcccttttttctaaagggcacattgagaatgtcacccatttgtaaactgttccctgatgtccttgtttaaacgataataagaaaaagggcaactccatttgttgagggtctttgtgttcttcaatgagaaatcaaatttgagacgttgaaattggagctgcgtgctgctgcactcaccggcttcttctcactctctgtcgtagacacaccgataggaccaatggccaatagatattaaaagcaaaccctcactgctgctgtataaagttgcctaatgtaaatgtctattgtttagtccctaggtcacctttgtgctgtgctgtggagttcagaaacggggtaccatgacctggaatcttttgctcttgtttttgcagtcttcaaggctgggggccctgtctcattgggaagcccctctttataaagcattatattacttggaatggcttggtcaactgtgttcagttcataaatatgttttacatttttatctgcctgttataaagatgaacaaaaaaacttaatgagaaagatcacagatacgtaataatttaaagtctgtagttgaatttcctaacttaaagaatagaccaaaatttctgtgtataaaaaaaaatgaaaggctccttacatcctg

SEQ ID NO: 1900 - DNA, 3376 bp, Homo sapiens
  source 1..3376: mol_type = unassigned DNA; mol_type = unassigned DNA
gggtccggcccaggaggcttgggcgcgcgcagccatcccgggcctcgccggggacctagggacgcaggcaacgcctgcgcccgctcaccatggtcgagggacgcgtctccgagttcctgaagaaactcggcttctcgggcgggggccgccagtaccaggcgctggagaaggacgaagaggaagccttgattgatgaacagagtgagctgaaagccatcgagaaagagaagaaggtgacagccctgccccccaaggaagcgtgcaaatgccagaaagaggatttggccagagcgttttgtgtggacttacacactgggctgtcggagttctcggtgacgcagcgccggctggcccatggctggaatgagtttgttgctgacaacagcgaacctgtgtggaagaaatacctggatcagtttaagaaccccctgatcctgctgctgctgggctctgccctggtgagtgtcctcaccaaggagtatgaggacgccgtcagcatcgccacggcagtgcttgtcgtggtcactgtcgccttcatccaggagtacaggtcggagaaatctctggaagagctgaccaagctggttcctccagaatgtaactgcctaagagaaggaaaactccagcacctgcttgctcgagaactggttcctggtgatgtcgtatctctctcgatcggagaccggatccctgcagacatccgactcactgaggtcacggacctcttggtggatgaatccagtttcaccggggaagccgagccatgtagtaaaacagacagccccttgacaggcggtggggacctcaccaccctcagcaacatcgtcttcatggggaccctggtgcagtatgggaggggccagggggtcgtgattggaacaggggaaagctctcagttcggagaagtgtttaagatgatgcaggctgaagagacacctaaaactcctttgcagaaaagcatggacaggctaggaaagcaactgacactcttctcctttggcataatcggtctcatcatgctcattggctggtcgcaagggaaacaactcctgagtatgttcacgatcggggtcagcctggctgtggcggccattccagagggtctgcccatcgtcgtcatggtgacgctggtcctgggagtgctgcggatggccaagaagcgggtcatcgtgaagaagttacccatcgtggagactttaggttgctgcagcgttctctgttctgacaagacggggactctgactgccaatgaaatgacagtgacccagcttgtaacgtcagatgggcttcgtgccgaggtcagcggagttgggtatgacggtcaagggactgtgtgtcttctaccatccaaggaagtcattaaggaattttccaatgtctcagtgggaaagttagtggaggcgggctgtgttgccaacaatgcggtcatcagaaagaacgccgtgatggggcagcccaccgagggtgcattgatggccctggcgatgaagatggacttaagtgatattaaaaattcatatataagaaaaaaagagattccattcagttcagagcagaagtggatggcggtgaaatgcagtctgaagactgaggatcaggaagacatttacttcatgaaaggggccttggaagaggtgatccgctactgcaccatgtacaacaacgggggcatccccctgccgctgacgccccagcagaggtcattctgcctgcaggaagagaagaggatggggtcgctcggtttgcgggtgctggccctggcttctgggcccgagctggggcggctgacgtttctcggtcttgtgggcatcattgaccccccgagagttggcgtgaaggaagcagtccaggttctctccgagtctggtgtgtctgtgaagatgataacgggggatgccctggagacggccttggccataggaagaaacatcggcctgtgcaacgggaagctgcaagccatgtccggggaggaggtggacagcgtggagaagggcgagctggccgaccgcgtggggaaggtgtccgtgttcttcaggaccagcccaaagcacaagctcaaaatcatcaaggctctgcaggagtcaggggcgatcgtggccatgactggggatggggtgaacgacgcagtggccctgaagtctgcagacattgggatcgccatggggcagacagggacggacgtcagcaaagaggccgccaacatgatcctggtggatgatgacttctcagccatcatgaatgcagtggaggaaggcaagggtattttttacaacatcaaaaactttgtccgattccagctgagcacgagcatctccgccctgagtctcatcactctgtccaccgtgttcaacctgcccagccccctcaacgccatgcagatcctatggatcaacatcatcatggatgggccaccggcgcagagcttgggggtagagcccgttgacaaagacgccttcaggcagccaccacggagtgtgcgggacaccatcctcagcagagccctcatcctgaagatcctcatgtccgcggccatcatcatcagcgggaccctctttatcttctggaaggagatgcctgaagacagagcaagcactccccgcaccacgacgatgacgttcacttgttttgtgtttttcgatctcttcaacgccttgacctgccgctctcagaccaagctgatatttgagatcggctttctcaggaaccacatgttcctctactccgtcctggggtccatcctggggcagctggcggtcatttacatccccccgctgcagagggtcttccagacggagaacctgggagcgcttgatttgctgtttttaactggattggcctcatccgtcttcattttgtcagagctcctcaaactatgtgaaaaatactgttgcagccccaagagagtccagatgcaccctgaagatgtgtagtggaccgcactccgcggcaccttccctaatcatctcgatctggttgtgactgtggcccctgccgtgtctcctcgtcaggggagacttttaggaggccgcagccttccatcaccggatcagtttttcctcttaggaaagctgcaggaacctcgtgggctccagggacccaggcccacatccatccagcgttcccgctggctgtgggacagacagggaggggcctgtacagaaacaccacactgtttattaaatcacaatgatttttattaaccatgtctaactacgtatctgtgccacagcttgcagtgaggcaggccactcgtggcagatacaaggggctcctgagaggcagtgggtaggatggtcacactctgcccattgccctcctggaggccccatttcctcatcataaaatgagggacttttaaataaagtgctatgccggg

SEQ ID NO: 1901 - DNA, 3472 bp, Homo sapiens
  source 1..3472: mol_type = unassigned DNA; mol_type = unassigned DNA
gggtccggcccaggaggcttgggcgcgcgcagccatcccgggcctcgccggggacctagggacgcaggcaacgcctgcgcccgctcaccatggtcgagggacgcgtctccgagttcctgaagaaactcggcttctcgggcgggggccgccagtaccaggcgctggagaaggacgaagaggaagccttgattgatgaacagagtgagctgaaagccatcgagaaagagaagaaggtgacagccctgccccccaaggaagcgtgcaaatgccagaaagaggatttggccagagcgttttgtgtggacttacacactgggctgtcggagttctcggtgacgcagcgccggctggcccatggctggaatgagtttgttgctgacaacagcgaacctgtgtggaagaaatacctggatcagtttaagaaccccctgatcctgctgctgctgggctctgccctggtgagtgtcctcaccaaggagtatgaggacgccgtcagcatcgccacggcagtgcttgtcgtggtcactgtcgccttcatccaggagtacaggtcggagaaatctctggaagagctgaccaagctggttcctccagaatgtaactgcctaagagaaggaaaactccagcacctgcttgctcgagaactggttcctggtgatgtcgtatctctctcgatcggagaccggatccctgcagacatccgactcactgaggtcacggacctcttggtggatgaatccagtttcaccggggaagccgagccatgtagtaaaacagacagccccttgacaggcggtggggacctcaccaccctcagcaacatcgtcttcatggggaccctggtgcagtatgggaggggccagggggtcgtgattggaacaggggaaagctctcagttcggagaagtgtttaagatgatgcaggctgaagagacacctaaaactcctttgcagaaaagcatggacaggctaggaaagcaactgacactcttctcctttggcataatcggtctcatcatgctcattggctggtcgcaagggaaacaactcctgagtatgttcacgatcggggtcagcctggctgtggcggccattccagagggtctgcccatcgtcgtcatggtgacgctggtcctgggagtgctgcggatggccaagaagcgggtcatcgtgaagaagttacccatcgtggagactttaggttgctgcagcgttctctgttctgacaagacggggactctgactgccaatgaaatgacagtgacccagcttgtaacgtcagatgggcttcgtgccgaggtcagcggagttgggtatgacggtcaagggactgtgtgtcttctaccatccaaggaagtcattaaggaattttccaatgtctcagtgggaaagttagtggaggcgggctgtgttgccaacaatgcggtcatcagaaagaacgccgtgatggggcagcccaccgagggtgcattgatggccctggcgatgaagatggacttaagtgatattaaaaattcatatataagaaaaaaagagattccattcagttcagagcagaagtggatggcggtgaaatgcagtctgaagactgaggatcaggaagacatttacttcatgaaaggggccttggaagaggtgatccgctactgcaccatgtacaacaacgggggcatccccctgccgctgacgccccagcagaggtcattctgcctgcaggaagagaagaggatggggtcgctcggtttgcgggtgctggccctggcttctgggcccgagctggggcggctgacgtttctcggtcttgtgggcatcattgaccccccgagagttggcgtgaaggaagcagtccaggttctctccgagtctggtgtgtctgtgaagatgataacgggggatgccctggagacggccttggccataggaagaaacatcggcctgtgcaacgggaagctgcaagccatgtccggggaggaggtggacagcgtggagaagggcgagctggccgaccgcgtggggaaggtgtccgtgttcttcaggaccagcccaaagcacaagctcaaaatcatcaaggctctgcaggagtcaggggcgatcgtggccatgactggggatggggtgaacgacgcagtggccctgaagtctgcagacattgggatcgccatggggcagacagggacggacgtcagcaaagaggccgccaacatgatcctggtggatgatgacttctcagccatcatgaatgcagtggaggaaggcaagggtattttttacaacatcaaaaactttgtccgattccagctgagcacgagcatctccgccctgagtctcatcactctgtccaccgtgttcaacctgcccagccccctcaacgccatgcagatcctatggatcaacatcatcatggatgggccaccggcgcagaggagttcccagaaaactgaagtgtgttgcactgcagtgagactgggagtagaaggcagaggagaaagtacctgggccggcagagctggcttgggggtagagcccgttgacaaagacgccttcaggcagccaccacggagtgtgcgggacaccatcctcagcagagccctcatcctgaagatcctcatgtccgcggccatcatcatcagcgggaccctctttatcttctggaaggagatgcctgaagacagagcaagcactccccgcaccacgacgatgacgttcacttgttttgtgtttttcgatctcttcaacgccttgacctgccgctctcagaccaagctgatatttgagatcggctttctcaggaaccacatgttcctctactccgtcctggggtccatcctggggcagctggcggtcatttacatccccccgctgcagagggtcttccagacggagaacctgggagcgcttgatttgctgtttttaactggattggcctcatccgtcttcattttgtcagagctcctcaaactatgtgaaaaatactgttgcagccccaagagagtccagatgcaccctgaagatgtgtagtggaccgcactccgcggcaccttccctaatcatctcgatctggttgtgactgtggcccctgccgtgtctcctcgtcaggggagacttttaggaggccgcagccttccatcaccggatcagtttttcctcttaggaaagctgcaggaacctcgtgggctccagggacccaggcccacatccatccagcgttcccgctggctgtgggacagacagggaggggcctgtacagaaacaccacactgtttattaaatcacaatgatttttattaaccatgtctaactacgtatctgtgccacagcttgcagtgaggcaggccactcgtggcagatacaaggggctcctgagaggcagtgggtaggatggtcacactctgcccattgccctcctggaggccccatttcctcatcataaaatgagggacttttaaataaagtgctatgccgggggataatta

SEQ ID NO: 1902 - DNA, 3600 bp, Homo sapiens
  source 1..3600: mol_type = unassigned DNA; mol_type = unassigned DNA
gaatcaacagaatttgtctttttgtgactggtttatttcacttaacttcatcctcaaggttcaacttaaaggtgtatccatgttgtagcacgtgtcagcattttctttcgttctcaggctaaatagtatttcattgtgtgtgtacaccatgtttcatgcattcattcatcccttgaaagattggtgggttgtttcctcctttttgcttttgtgaacagtgctacgaacatggttgtacaaacatctcttggagccccactagcagttcctttgggtatataccccaaagtggaattgctggatctggtagctccctttttaattttttgaggaatcgccacacagtttccataacagctgcaccattttacattcccaagaccttttttttttttttttttttaagaagaaaagatgtgtttctgcatttctggaagtctatgctgcatttccatttgttgaaatttaagaccagagtcgtcttttctgctgtaattataatggtcactggcttgtgccttttcctcctctctctgccccatctgcacggggtctttgaacaagtcccagcaccttggtggacaagcctgtgtccctggcccatcatggaagccgctgcctttcagagtgggagtctgtaccctgttgcctcattccttgctgcgcccatgagtgagcttgtgcctgacctctccttccaggtggacttacacactgggctgtcggagttctcggtgacgcagcgccggctggcccatggctggaatgagtttgttgctgacaacagcgaacctgtgtggaagaaatacctggatcagtttaagaaccccctgatcctgctgctgctgggctctgccctggtgagtgtcctcaccaaggagtatgaggacgccgtcagcatcgccacggcagtgcttgtcgtggtcactgtcgccttcatccaggagtacaggtcggagaaatctctggaagagctgaccaagctggttcctccagaatgtaactgcctaagagaaggaaaactccagcacctgcttgctcgagaactggttcctggtgatgtcgtatctctctcgatcggagaccggatccctgcagacatccgactcactgaggtcacggacctcttggtggatgaatccagtttcaccggggaagccgagccatgtagtaaaacagacagccccttgacaggcggtggggacctcaccaccctcagcaacatcgtcttcatggggaccctggtgcagtatgggaggggccagggggtcgtgattggaacaggggaaagctctcagttcggagaagtgtttaagatgatgcaggctgaagagacacctaaaactcctttgcagaaaagcatggacaggctaggaaagcaactgacactcttctcctttggcataatcggtctcatcatgctcattggctggtcgcaagggaaacaactcctgagtatgttcacgatcggggtcagcctggctgtggcggccattccagagggtctgcccatcgtcgtcatggtgacgctggtcctgggagtgctgcggatggccaagaagcgggtcatcgtgaagaagttacccatcgtggagactttaggttgctgcagcgttctctgttctgacaagacggggactctgactgccaatgaaatgacagtgacccagcttgtaacgtcagatgggcttcgtgccgaggtcagcggagttgggtatgacggtcaagggactgtgtgtcttctaccatccaaggaagtcattaaggaattttccaatgtctcagtgggaaagttagtggaggcgggctgtgttgccaacaatgcggtcatcagaaagaacgccgtgatggggcagcccaccgagggtgcattgatggccctggcgatgaagatggacttaagtgatattaaaaattcatatataagaaaaaaagagattccattcagttcagagcagaagtggatggcggtgaaatgcagtctgaagactgaggatcaggaagacatttacttcatgaaaggggccttggaagaggtgatccgctactgcaccatgtacaacaacgggggcatccccctgccgctgacgccccagcagaggtcattctgcctgcaggaagagaagaggatggggtcgctcggtttgcgggtgctggccctggcttctgggcccgagctggggcggctgacgtttctcggtcttgtgggcatcattgaccccccgagagttggcgtgaaggaagcagtccaggttctctccgagtctggtgtgtctgtgaagatgataacgggggatgccctggagacggccttggccataggaagaaacatcggcctgtgcaacgggaagctgcaagccatgtccggggaggaggtggacagcgtggagaagggcgagctggccgaccgcgtggggaaggtgtccgtgttcttcaggaccagcccaaagcacaagctcaaaatcatcaaggctctgcaggagtcaggggcgatcgtggccatgactggggatggggtgaacgacgcagtggccctgaagtctgcagacattgggatcgccatggggcagacagggacggacgtcagcaaagaggccgccaacatgatcctggtggatgatgacttctcagccatcatgaatgcagtggaggaaggcaagggtattttttacaacatcaaaaactttgtccgattccagctgagcacgagcatctccgccctgagtctcatcactctgtccaccgtgttcaacctgcccagccccctcaacgccatgcagatcctatggatcaacatcatcatggatgggccaccggcgcagagcttgggggtagagcccgttgacaaagacgccttcaggcagccaccacggagtgtgcgggacaccatcctcagcagagccctcatcctgaagatcctcatgtccgcggccatcatcatcagcgggaccctctttatcttctggaaggagatgcctgaagacagagcaagcactccccgcaccacgacgatgacgttcacttgttttgtgtttttcgatctcttcaacgccttgacctgccgctctcagaccaagctgatatttgagatcggctttctcaggaaccacatgttcctctactccgtcctggggtccatcctggggcagctggcggtcatttacatccccccgctgcagagggtcttccagacggagaacctgggagcgcttgatttgctgtttttaactggattggcctcatccgtcttcattttgtcagagctcctcaaactatgtgaaaaatactgttgcagccccaagagagtccagatgcaccctgaagatgtgtagtggaccgcactccgcggcaccttccctaatcatctcgatctggttgtgactgtggcccctgccgtgtctcctcgtcaggggagacttttaggaggccgcagccttccatcaccggatcagtttttcctcttaggaaagctgcaggaacctcgtgggctccagggacccaggcccacatccatccagcgttcccgctggctgtgggacagacagggaggggcctgtacagaaacaccacactgtttattaaatcacaatgatttttatt

SEQ ID NO: 1903 - DNA, 355 bp, Homo sapiens
  source 1..355: mol_type = unassigned DNA; mol_type = unassigned DNA
tgtgtggaagaaatacctggatcagtttaagaaccccctgatcctgctgctgctgggctctgccctggtgagtgtcctcaccaaggagtatgaggacgccgtcagcatcgccacggcagtgcttgtcgtggtcactgtcgccttcatccagcacatctgatgtgcttcctgccaggagtacaggtcggagaaatctctggaagagctgaccaagctggttcctccagaatgtaactgcctaagagaaggaaaactccagcacctgcttgctcgagaactggttcctggtgatgtcgtatctctctcgatcggagaccggatccctgcagacatccgactcactgaggtcacggac

SEQ ID NO: 1904 - DNA, 504 bp, Homo sapiens
  source 1..504: mol_type = unassigned DNA; mol_type = unassigned DNA
agttctcagtgttctgggaatgttattcatcgatgcgttttggcagcaaaataggcttctggtttaagaaccccctgatcctgctgctgctgggctctgccctggtgagtgtcctcaccaaggagtatgaggacgccgtcagcatcgccacggcagtgcttgtcgtggtcactgtcgccttcatccaggagtacaggtcggagaaatctctggaagagctgaccaagctggttcctccagaatgtaactgcctaagagaaggaaaactccagcacctgcttgctcgagaactggttcctggtgatgtcgtatctctctcgatcggagaccggatccctgcagacatccgactcactgaggtcacggacctcttggtggatgaatccagtttcaccggggaagccgagccatgtagtaaaacagacagccccttgacaggcggtggggacctcaccaccctcagcaacatcgtcttcatggggaccctggtgcagtatgggaggg

SEQ ID NO: 1905 - DNA, 2782 bp, Homo sapiens
  source 1..2782: mol_type = unassigned DNA; mol_type = unassigned DNA
agttctcagtgttctgggaatgttattcatcgatgcgttttggcagcaaaataggcttctggtttaagaaccccctgatcctgctgctgctgggctctgccctggtgagtgtcctcaccaaggagtatgaggacgccgtcagcatcgccacggcagtgcttgtcgtggtcactgtcgccttcatccagcctaagagaaggaaaactccagcacctgcttgctcgagaactggttcctggtgatgtcgtatctctctcgatcggagaccggatccctgcagacatccgactcactgaggtcacggacctcttggtggatgaatccagtttcaccggggaagccgagccatgtagtaaaacagacagccccttgacaggcggtggggacctcaccaccctcagcaacatcgtcttcatggggaccctggtgcagtatgggaggggccagggggtcgtgattggaacaggggaaagctctcagttcggagaagtgtttaagatgatgcaggctgaagagacacctaaaactcctttgcagaaaagcatggacaggctaggaaagcaactgacactcttctcctttggcataatcggtctcatcatgctcattggctggtcgcaagggaaacaactcctgagtatgttcacgatcggggtcagcctggctgtggcggccattccagagggtctgcccatcgtcgtcatggtgacgctggtcctgggagtgctgcggatggccaagaagcgggtcatcgtgaagaagttacccatcgtggagactttaggttgctgcagcgttctctgttctgacaagacggggactctgactgccaatgaaatgacagtgacccagcttgtaacgtcagatgggcttcgtgccgaggtcagcggagttgggtatgacggtcaagggactgtgtgtcttctaccatccaaggaagtcattaaggaattttccaatgtctcagtgggaaagttagtggaggcgggctgtgttgccaacaatgcggtcatcagaaagaacgccgtgatggggcagcccaccgagggtgcattgatggccctggcgatgaagatggacttaagtgatattaaaaattcatatataagaaaaaaagagattccattcagttcagagcagaagtggatggcggtgaaatgcagtctgaagactgaggatcaggaagacatttacttcatgaaaggggccttggaagaggtgatccgctactgcaccatgtacaacaacgggggcatccccctgccgctgacgccccagcagaggtcattctgcctgcaggaagagaagaggatggggtcgctcggtttgcgggtgctggccctggcttctgggcccgagctggggcggctgacgtttctcggtcttgtgggcatcattgaccccccgagagttggcgtgaaggaagcagtccaggttctctccgagtctggtgtgtctgtgaagatgataacgggggatgccctggagacggccttggccataggaagaaacatcggcctgtgcaacgggaagctgcaagccatgtccggggaggaggtggacagcgtggagaagggcgagctggccgaccgcgtggggaaggtgtccgtgttcttcaggaccagcccaaagcacaagctcaaaatcatcaaggctctgcaggagtcaggggcgatcgtggccatgactggggatggggtgaacgacgcagtggccctgaagtctgcagacattgggatcgccatggggcagacagggacggacgtcagcaaagaggccgccaacatgatcctggtggatgatgacttctcagccatcatgaatgcagtggaggaaggcaagggtattttttacaacatcaaaaactttgtccgattccagctgagcacgagcatctccgccctgagtctcatcactctgtccaccgtgttcaacctgcccagccccctcaacgccatgcagatcctatggatcaacatcatcatggatgggccaccggcgcagagcttgggggtagagcccgttgacaaagacgccttcaggcagccaccacggagtgtgcgggacaccatcctcagcagagccctcatcctgaagatcctcatgtccgcggccatcatcatcagcgggaccctctttatcttctggaaggagatgcctgaagacagagcaagcactccccgcaccacgacgatgacgttcacttgttttgtgtttttcgatctcttcaacgccttgacctgccgctctcagaccaagctgatatttgagatcggctttctcaggaaccacatgttcctctactccgtcctggggtccatcctggggcagctggcggtcatttacatccccccgctgcagagggtcttccagacggagaacctgggagcgcttgatttgctgtttttaactggattggcctcatccgtcttcattttgtcagagctcctcaaactatgtgaaaaatactgttgcagccccaagagagtccagatgcaccctgaagatgtgtagtggaccgcactccgcggcaccttccctaatcatctcgatctggttgtgactgtggcccctgccgtgtctcctcgtcaggggagacttttaggaggccgcagccttccatcaccggatcagtttttcctcttaggaaagctgcaggaacctcgtgggctccagggacccaggcccacatccatccagcgttcccgctggctgtgggacagacagggaggggcctgtacagaaacaccacactgtttattaaatcacaatgatttttatt

SEQ ID NO: 1906 - DNA, 548 bp, Homo sapiens
  source 1..548: mol_type = unassigned DNA; mol_type = unassigned DNA
attcatcgatgcgttttggcagcaaaataggcttctggtgacagggaactcatcacctcacaaggcagccctgttcctctgtctcaggagtctcaccattaggaattctaccttagcacggcgtaaggctctggacgggatggcagggaggcactaggctggtgctctgaggaggtggcatctgggcagagatctgagtgaaatgagacggaaagccatgtgaggatgtggatggagggcgtcgctggagggcagggtgcagagtccctgaggggacaggagcctggcagcctgggaatcaaggtgcccagaccagtttaagaaccccctgatcctgctgctgctgggctctgccctggtgagtgtcctcaccaaggagtatgaggacgccgtcagcatcgccacggcagtgcttgtcgtggtcactgtcgccttcatccaggagtacaggtcggagaaatctctggaagagctgaccaagctggttcctccagaatgtaactgcctaagagaaggaaaactccagcacctgcttgctcgagaactgg

SEQ ID NO: 1907 - DNA, 397 bp, Homo sapiens
  source 1..397: mol_type = unassigned DNA; mol_type = unassigned DNA
tctgccctggtgagtgtcctcaccaaggagtatgaggacgccgtcagcatcgccacggcagtgcttgtcgtggtcactgtcgccttcatccaggtgagtatttcctgaggtcccagtcagggtaagctgggcgggacaggagcttcatggagtccccacctttaaacagcacatctgatgtgcttcctgccaggagtacaggtcggagaaatctctggaagagctgaccaagctggttcctccagaatgtaactggtaagtcagagcctccctgggactttttggttcactggaggagccagggagctggagagtttggcaaatgtttgctgaaagttgtatccttggtagtgtcggacaagagaaccacatctcactgggagttctaaggcctggt

SEQ ID NO: 1908 - DNA, 575 bp, Homo sapiens
  source 1..575: mol_type = unassigned DNA; mol_type = unassigned DNA
gggaagccgagccatgtagtaaaacagacagccccttgacaggcggtggggacctcaccaccctcagcaacatcgtcttcatggggaccctggtgcagtatgggaggggccagggggtcgtgattggaacaggggaaagctctcagttcggagaagtgtttaagatgatgcaggctgaagagacacctaaaactcctttgcagaaaagcatggacaggctaggaaagcaactgacactcttctcctttggcataatcggtctcatcatgctcattggctggtcgcaagggaaacaactcctgagtatgttcacgatcggggtcaggtaagagtgctatggccgccccttgccttgccagggtggtcaatgggctctgagcccttccctgccgcaagagaaggtggggaggctgcagaataggaagggttgggaaggtgcagccccgtcacccaaactccagcctcccaatagcatgttctccgacaggtacagagtgcccggcgaatgcttgcaaaatgaatgacagcaaatgatccagggtgtcccttttgtattaggctgttcttgcattgct

SEQ ID NO: 1909 - DNA, 386 bp, Homo sapiens
  source 1..386: mol_type = unassigned DNA; mol_type = unassigned DNA
agactagaaccaggacactggggacacctaagacaagcttcaccagccaaaagcattgccagccccagctgagagtcacacactccttaaatgtgttagaggggactcatttgacctttcgatccagcctggctgtggcggccattccagagggtctgcccatcgtcgtcatggtgacgctggtcctgggagtgctgcggatggccaagaagcgggtcatcgtgaagaagttacccatcgtggagactttaggttgctgcagcgttctctgttctgacaagacggggactctgactgccaatgaaatgacagtgacccagcttgtaacgtcagatgggcttcgtgccgaggtcagcggagttgggtatgacggtcaagggactgtg

SEQ ID NO: 1910 - DNA, 878 bp, Homo sapiens
  source 1..878: mol_type = unassigned DNA; mol_type = unassigned DNA
gtgggtccccggaggcttggctggcagtggggctgggtcacagctttgaaatctgattcttcgtcttccccgtctccgtgtccaggtgtccgtgttcttcaggaccagcccaaagcacaagctcaaaatcatcaaggctctgcaggagtcaggggcgatcgtggccatgactggggatggggtgaacgacgcagtggccctgaagtctgcagacattgggatcgccatggggcagacagggacggacgtcagcaaagaggccgccaacatgatcctggtggatgatgacttctcagccatcatgaatgcagtggaggaaggcaagggtattttttacaacatcaaaaactttgtccgattccagctgagcaccttgggggtagagcccgttgacaaagacgccttcaggcagccaccacggagtgtgcgggacaccatcctcagcagagccctcatcctgaagatcctcatgtccgcggccatcatcatcagcgggaccctctttatcttctggaaggagatgcctgaagacagagcaagcactccccgcaccacgacgatgacgttcacttgttttgtgtttttcgatctcttcaacgccttgacctgccgctctcagaccaagctgatatttgagatcggctttctcaggaaccacatgttcctctactccgtcctggggtccatcctggggcagctggcggtcatttacatccccccgctgcagagggtcttccagacggagaacctgggagcgcttgatttgctgtttttaactggattggcctcatccgtcttcattttgtcagagctcctcaaactatgtgaaaaatactgttgcagccccaagagagtccagatgcaccctgaagatgtgt

SEQ ID NO: 1911 - DNA, 2003 bp, Homo sapiens
  source 1..2003: mol_type = unassigned DNA; mol_type = unassigned DNA
tttctgctccctctgcctggatgctctctctgggcaacctgcatggctcattctcatgcttcattccagtcaccagtcactgccttcaggaagtcttccctgattgcactcccactcaatcccctcaccctgctgtatttttccctagagaggaagatacacacagacacacttttccttatggatctgattgtgatctgtctcccctttagaacatcagtttcatggaggcggagtttgtgtttcatccctgatgtctagagataaagggcttgccactcagtaggtgctcaggagtccacccgctccgccacttaatatccccttcaacaagctggccaagtggtgtgggggaaggaatgcgctttggagtcaggggacccatctggccacgtgtgcgtaaccgtatgagcacagagccagtgcttccgctggagctcagtgctgctgttatcaccagtgatagctgccaagggaaagagagtcctcatttgtgtccccaaagccaagtgtgagggttacctctcctgccagccctccctgggagcagaagtgggaccaggaagctggcctcagctgtgtctgagcggcagggcctcacccggccactcccaccataccgcctgctgcgggtctagcctcaaccctgctgtgtggagttggctggaggctggtctctctcagctgatgaggggctctgcggagggcggagcctggagcctgtttctccaggcgcaacgttggggggggtcccctcggggtgatggagatcatctgggtgtatggaactgtgtgtggttggccttacggggtggtcttccttcactgtctgcgggacagatggaggggcacagctgcccatggacccaggctctggggcttctggaaggtgccgaggagggcaggtgcgatgcctgggggcgttcagcaaatgcctggccctgccccctgtgccaacttggcctgggaggctcaggcacagctgtttcaagggtcctttatttcattcctggttcatttcaaagtgtctgtgtcttgttcggagcagcttgggggtagagcccgttgacaaagacgccttcaggcagccaccacggagtgtgcgggacaccatcctcagcagagccctcatcctgaagatcctcatgtccgcggccatcatcatcagcgggaccctctttatcttctggaaggagatgcctgaagacagagcaagcactccccgcaccacgacgatgacgttcacttgttttgtgtttttcgatctcttcaacgccttgacctgccgctctcagaccaagctgatatttgagatcggctttctcaggaaccacatgttcctctactccgtcctggggtccatcctggggcagctggcggtcatttacatccccccgctgcagagggtcttccagacggagaacctgggagcgcttgatttgctgtttttaactggattggcctcatccgtcttcattttgtcagagctcctcaaactatgtgaaaaatactgttgcagccccaagagagtccagatgcaccctgaagatgtgtagtggaccgcactccgcggcaccttccctaatcatctcgatctggttgtgactgtggcccctgccgtgtctcctcgtcaggggagacttttaggaggccgcagccttccatcaccggatcagtttttcctcttaggaaagctgcaggaacctcgtgggctccagggacccaggcccacatccatccagcgttcccgctggctgtgggacagacagggaggggcctgtacagaaacaccacactgtttattaaatcacaatgatttttattaaccatgtctaactacgtatctgtgccacagcttgcagtgaggcaggccactcgtggcagatacaaggggctcctgagaggcagtgggtaggatggtcacactctgcccattgccctcctggaggccccatttcctcatcataaaatgagggacttttaaataaagtgctatgccgggg

SEQ ID NO: 1912 - DNA, 1491 bp, Homo sapiens
  source 1..1491: mol_type = unassigned DNA; mol_type = unassigned DNA
agctgatgaggggctctgcggagggcggagcctggagcctgtttctccaggcgcaacgttggggggggtcccctcggggtgatggagatcatctgggtgtatggaactgtgtgtggttggccttacggggtggtcttccttcactgtctgcgggacagatggaggggcacagctgcccatggacccaggctctggggcttctggaaggtgccgaggagggcaggtgcgatgcctgggggcgttcagcaaatgcctggccctgccccctgtgccaacttggcctgggaggctcaggcacagctgtttcaagggtcctttatttcattcctggttcatttcaaagtgtctgtgtcttgttcggagcagcttgggggtagagcccgttgacaaagacgccttcaggcagccaccacggagtgtgcgggacaccatcctcagcagagccctcatcctgaagatcctcatgtccgcggccatcatcatcagcgggaccctctttatcttctggaaggaggtgagcgagggtcaccccggcctgttctccaagccctggtgcggtgcagacgctggggactgcagtccctgccctcctgccacagctcacatctgggagaggcaaacatgtacacacaccggacaatgtgatgccatcagaggcgtggggtgcatgaggcaaagggactgggtgacccttgaaagaagggaggtcgccaggtgtgtgcctgggaactacagaggccagcggggtggagatgactttgccgagacgggagttgaaatgtacatgaggacaggctgccccctgttcccttgtcaccaggaaacaatttgaaatctgctaaatatcctcctgtgttacactctagaggtgattgtttgctttggatctaggcctgggtcaccttttcatggcctgcaggttcagggagctctatgccaggacgggccacgatctaggtgggaaatgaggcaggtgacccatgtgaccacaccacagattgcccatgtgcaggaagcgggaggggaccctggccgggtaccctgcctccattttccctccagctctccctctactactgacggccatccttcagccttccttgtaggaaatgaccttcactctgggtttaactggagtggcatcacctcccagggagacagttacttcctggaggaagtggtgtttcctccacccataggtgccctgcccccatcctcatggtggcagcaaatcagcatgtgctggggagaccctggggtagcagccactgacctcacacctggaggaagctgtgtgaccgattcatgagcttgtaagtggctcccagccatgccccaggagcagtgaggcaggcctgtgccctttggttcaggatggaggttgtctcttcccgcctaacctctcacctttgtgctcaccttccagatgcctgaagacagagcaagcactccccgcaccacgacgatgacgttcacttgttttgtgttttt

SEQ ID NO: 1913 - DNA, 481 bp, Homo sapiens
  source 1..481: mol_type = unassigned DNA; mol_type = unassigned DNA
ccaccacggagtgtgcgggacaccatcctcagcagagccctcatcctgaagatcctcatgtccgcggccatcatcatcagcgggaccctctttatcttctggaaggagatgcctgaagacagagcaagcactccccgcaccacgacgatgacgttcacttgttttgtgtttttcgatctcttcaacgccttgacctgccgctctcaggtgagacccgggctgaccctcctcgctgcagagctgctgtgtgttctcgacagcagcgccccgaccctgcccgcagcattgagcggctctggctcagcgtgggcagtcagagctcccctgcctgtacctggggtgtggacagcacacaatcccccgtgtgaccttctccctgcagaccaagctgatatttgagatcggctttctcaggaaccacatgttcctctactccgtcctggggtccatcctggggcagctggcggtcatttacatcccc

SEQ ID NO: 1914 - DNA, 292 bp, Homo sapiens
  source 1..292: mol_type = unassigned DNA; mol_type = unassigned DNA
atcatcatcagcgggaccctctttatcttctggaaggagctctccctctactactgacggccatccttcagccttccttgtaggaaatgaccttcactctgggtttaactggagtggcatcacctcccagggagacagttacttcctggaggaagtggtgtttcctccacccataggtgccctgcccccatcctcatggtggcagcaaatcagcatgtgctggggagaccctggggtagcagccactgacctcacacctggaggaagctgtgtgaccgattcatgagcttgt

SEQ ID NO: 1915 - DNA, 411 bp, Homo sapiens
  source 1..411: mol_type = unassigned DNA; mol_type = unassigned DNA
acgcgcttccctgccactgggttagggaaggcttgccggaaggacgatttcggaggacagcaggtgttagccaggcagcggagcgagcgccaacaggcgcactggggcggagagacgccgtgagcaaggttcctgacggagacttcgcccttcatgtggtccaacctgggcattggcctagctatctccctgtctgtggttggggcagcctggggcatctatattaccggctcctccatcattggtggaggagtgaaggcccccaggatcaagaccaagaacctggtcagcatcatcttctgtgaggctgtggccatctacggcatcatcatggcaattgtcattagcaacatggctgagcctttcagtgccacagaccccaaggccatcggccatcggaactaccatgca

SEQ ID NO: 1916 - DNA, 1298 bp, Homo sapiens
  source 1..1298: mol_type = unassigned DNA; mol_type = unassigned DNA
acaggctaggacgcacggctgccagagaggacgccttaggggcccgcgagcaggctcgggaataaaacagggctggcagggcgaggtggagagactcgagaaggaccggccagatgtcgaagttcctagagaggagggcgcccaagcctccgccgagacgcgtgactacaactaccacaatccccagcgcctgcggttccagcgtcgccttgctctagacgggcggcggcgctgcgcggggaaccggcgtggggtcacgtggtaccggcgcatcacgtgggcgagttaggtgacgctgcggggcgggcggacagactgcgggacggacggtggacgctgggacgcgtttgtagctccggccccgccgttccgacccccgccgccgtcgccgccatgacggggctagcactgctctactccggggtcttcgtggccttctgggcctgcgcgctggccgtgggagtctgctacaccatttttgatttgggcttccgctttgatgtggcatggttcctgacggagacttcgcccttcatgtggtccaacctgggcattggcctagctatctccctgtctgtggttggggcagcctggggcatctatattaccggctcctccatcattggtggaggagtgaaggcccccaggatcaagaccaagaacctggtcagcatcatcttctgtgaggctgtggccatctacggcatcatcatggcaattgtcattagcaacatggctgagcctttcagtgccacagaccccaaggccatcggccatcggaactaccatgcaggctactccatgtttggggctggcctcaccgtaggcctgtctaacctcttctgtggagtctgcgtgggcatcgtgggcagtggggctgccctggccgatgctcagaaccccagcctctttgtaaagattctcatcgtggagatctttggcagcgccattggcctctttggggtcatcgtcgcaattcttcagacctccagagtgaagatgggtgactagatgatatgtgtgggtggggccgtgcctcacttttatttattgctggttttcctgggacagctggagctgtgtcccttagcctttcagaggcttggtgttcagggccctccctgcactcccctcttgctgcgtgttgatttggaggcactgcagtccaggccgagtcctcagtgcggggagcaggctgctgctgctgactctgtgcagctgcgcacctgtgtcccccacctccaccctcaacccatcttcctagtgtttgtgaaataaacttggtatttgtctgggtc

SEQ ID NO: 1917 - DNA, 1685 bp, Homo sapiens
  source 1..1685: mol_type = unassigned DNA; mol_type = unassigned DNA
tgcggggcgggcggacagactgcgggacggacggtggacgctgggacgcgtttgtagctccggccccgccgttccgacccccgccgccgtcgccgccatgacggggctagcactgctctactccggggtcttcgtggccttctgggcctgcgcgctggccgtgggagtctgctacaccatttttgatttgggcttccgctttgatgtggcatggttcctgacggagacttcgcccttcatgtggtccaacctgggcattggcctagctatctccctgtctgtggttggggcagcctggggcatctatattaccggctcctccatcattggtggaggagtgaaggcccccaggatcaagaccaagaacctggtcagcatcatcttctgtgaggctgtggccatctacggcatcatcatggcaattgtcattagcaacatggctgagcctttcagtgccacagaccccaaggccatcggccatcggaactaccatgcaggctactccatgtttggggctggcctcaccgtaggcctgtctaacctcttctgtggagtctgcgtgggcatcgtgggcagtggggctgccctggccgatgctcagaaccccagcctctttgtaaagattctcatcgtggagatctttggcagcgccattggcctctttggggtcatcgtcgcaattcttcaggtgatgaatccccttgggaagcctctgtgtccttgtccccaacctagccttaccctccttctggagaagctgaagtgctctccttctctacctataactatagattcccccaaacagcttccacctcctcatttccatcttctggttttctcctacaggggctctctatttttgtctctgatttggtgtcactgacaacagccctgttctttttcccccctttctaatgcgttgtatctgtatagcacttagtcctccctctttctgttctctcattttatctgccatgcttttcatgtctccagtctgtatttgtgatctagactagaatggaattttgtctgtctatatcagtctgtcatggtgtgtttgactgtctctcggagctatgtgtatctccctctcacatgcctgtcagtaggacaccattgtctaaattgtgtgtgtctagtctgtctgacagtgtgtgagtttgtgactaaggatcagcctgagggtctgagtgtgactgtgggtgcttgactgagttgattcttagtgactagctttatccatatgccacttctctccgtctgtcccacagcgtaactctgtggttgtctgtccctgtctgccttgtctgtcacagtgtgtccatcctggttagtcatatatctcttgtggtctgtccatccaaccatgtgctagatgtcatcttctatcatttgtcactgccttacctattcctctgtccctgcctgatttctcctgttctttttttgcagacctccagagtgaagatgggtgactagatgatatgtgtgggtggggccgtgcctcacttttatttattgctggttttcctgggacagctggagctgtgtcccttagcctttcagaggcttggtgttcagggccctccctgcactcccctcttgctgcgtgttgatttggaggcactgcagtccaggccgagtcctcagtgcggggagcaggctgctgctgctgactctgtgca

SEQ ID NO: 1918 - DNA, 944 bp, Homo sapiens
  source 1..944: mol_type = unassigned DNA; mol_type = unassigned DNA
gggcgggcggacagactgcgggacggacggtggacgctgggacgcgtttgtagctccggccccgccgttccgacccccgccgccgtcgccgccatgacggggctagcactgctctactccggggtcttcgtggccttctgggcctgcgcgctggccgtgggttcctgacggagacttcgcccttcatgtggtccaacctgggcattggcctagctatctccctgtctgtggttggggcagcctggggcatctatattaccggctcctccatcattggtggaggagtgaaggcccccaggatcaagaccaagaacctggtcagcatcatcttctgtgaggctgtggccatctacggcatcatcatggcaattgtcattagcaacatggctgagcctttcagtgccacagaccccaaggccatcggccatcggaactaccatgcaggctactccatgtttggggctggcctcaccgtaggcctgtctaacctcttctgtggagtctgcgtgggcatcgtgggcagtggggctgccctggccgatgctcagaaccccagcctctttgtaaagattctcatcgtggagatctttggcagcgccattggcctctttggggtcatcgtcgcaattcttcagacctccagagtgaagatgggtgactagatgatatgtgtgggtggggccgtgcctcacttttatttattgctggttttcctgggacagctggagctgtgtcccttagcctttcagaggcttggtgttcagggccctccctgcactcccctcttgctgcgtgttgatttggaggcactgcagtccaggccgagtcctcagtgcggggagcaggctgctgctgctgactctgtgcagctgcgcacctgtgtcccccacctccaccctcaacccatcttcctagtgtttgtgaaataaacttggtatttgtct

SEQ ID NO: 1919 - DNA, 865 bp, Homo sapiens
  source 1..865: mol_type = unassigned DNA; mol_type = unassigned DNA
cgggcggacagactgcgggacggacggtggacgctgggacgcgtttgtagctccggccccgccgttccgacccccgccgccgtcgccgccatgacggggctagcactgctctactccggggtcttcgtggccttctgggcctgcgcgctggccgtgggtgaggccgggtcctggcgggcgggagcagcatcgcggccgagctggccgggtcggaactcggcggggaagtggcctgcggggaatactggccccccgcgcgctctgcacccgaggctctggggacttgcgcctgcgagggcctctgactccgacaaaggagacccggatttccagctgcttgaggaggggttcctgacggagacttcgcccttcatgtggtccaacctgggcattggcctagctatctccctgtctgtggttggggcagcctggggcatctatattaccggctcctccatcattggtggaggagtgaaggcccccaggatcaagaccaagaacctggtcagcatcatcttctgtgaggctgtggccatctacggcatcatcatggcaattgtcattagcaacatggctgagcctttcagtgccacagaccccaaggccatcggccatcggaactaccatgcaggctactccatgtttggggctggcctcaccgtaggcctgtctaacctcttctgtggagtctgcgtgggcatcgtgggcagtggggctgccctggccgatgctcagaaccccagcctctttgtaaagattctcatcgtggagatctttggcagcgccattggcctctttggggtcatcgtcgcaattcttcagacctccagagtgaagatgggtgactagatgatatgtgtgggtg

SEQ ID NO: 1920 - DNA, 536 bp, Homo sapiens
  source 1..536: mol_type = unassigned DNA; mol_type = unassigned DNA
acagactgcgggacggacggtggacgctgggacgcgtttgtagctccggccccgccgttccgacccccgccgccgtcgccgccatgacggggctagcactgctctactccggggtcttcgtggccttctgggcctgcgcgctggccgtgggttcctgacggagacttcgcccttcatgtggtccaacctgggcattggcctagctatctccctgtctgtggttggggcagcctggggcatctatattaccggctcctccatcattggtggaggagtgaaggcccccaggatcaagaccaagaacctggtcagcctttcagtgccacagaccccaaggccatcggccatcggaactaccatgcaggctactccatgtttggggctggcctcaccgtaggcctgtctaacctcttctgtggagtctgcgtgggcatcgtgggcagtggggctgccctggccgatgctcagaaccccagcctctttgtaaagattctcatcgtggagatctttggcagcgccattggcctctttggggt

SEQ ID NO: 1921 - DNA, 530 bp, Homo sapiens
  source 1..530: mol_type = unassigned DNA; mol_type = unassigned DNA
agactgcgggacggacggtggacgctgggacgcgtttgtagctccggccccgccgttccgacccccgccgccgtcgccgccatgacggggctagcactgctctactccggggtcttcgtggccttctgggcctgcgcgctggccgtggctgtactgtcacctgggggcagcctgaggacgccccttcagggaggtggcccttcagctcggcagctactttaggttgaagaacttctctctaccgagcagcccgtaaccccctttttctccctcactgctgcaggagtctgctacaccatttttgatttgggcttccgctttgatgtggcatggttcctgacggagacttcgcccttcatgtggtccaacctgggcattggcctagctatctccctgtctgtggttggggcagcctggggcatctatattaccggctcctccatcattggtggaggagtgaaggcccccaggatcaagaccaagaacctggtcagcatcatcttctgtgaggctgtggccatctacggcat

SEQ ID NO: 1922 - DNA, 2432 bp, Homo sapiens
  source 1..2432: mol_type = unassigned DNA; mol_type = unassigned DNA
cggacggtggacgctgggacgcgtttgtagctccggccccgccgttccgacccccgccgccgtcgccgccatgacggggctagcactgctctactccggggtcttcgtggccttctgggcctgcgcgctggccgtgggtgaggccgggtcctggcgggcgggagcagcatcgcggccgagctggccgggtcggaactcggcggggaagtggcctgcggggaatactggccccccgcgcgctctgcacccgaggctctggggacttgcgcctgcgagggcctctgactccgacaaaggagacccggatttccagctgcttgaggaggggtgcgggcgggtaggggccgcgagggcagcactcccccgtcctgccactatcgctgtctcccctcgctcccacgtctcactgctgtcccccctttcttgctcctgaccggcccgctcggtcacaagccggctgctccggttcctcttttcccagtcgctttgccctcccccacccacagcttgttgggtaaacagcggaacggactgggccggcgggatctggctggagcgcttgctccctcggtcccgcctcggattcgggcttgcgggtggcgaccctgcctgcgcaggtgcttggtctgggaggtggttttagcgagggaatggcagaaaatggaggcctaagcagaggaatctgtctacacagctgtactgtcacctgggggcagcctgaggacgccccttcagggaggtggcccttcagctcggcagctactttaggttgaagaacttctctctaccgagcagcccgtaaccccctttttctccctcactgctgcaggagtctgctacaccatttttgatttgggcttccgctttgatgtggcatggttcctgacggagacttcgcccttcatgtggtccaacctgggcattggcctagctatctccctgtctgtggttggggcagcctggggcatctatattaccggctcctccatcattggtggaggagtgaaggcccccaggatcaagaccaagaacctggtcagcatcatcttctgtgaggctgtggccatctacggcatcatcatggcaattgtcattagcaacatggctgagcctttcagtgccacagaccccaaggccatcggccatcggaactaccatgcaggctactccatgtttggggctggcctcaccgtaggcctgtctaacctcttctgtggagtctgcgtgggcatcgtgggcagtggggctgccctggccgatgctcagaaccccagcctctttgtaaagattctcatcgtggagatctttggcagcgccattggcctctttggggtcatcgtcgcaattcttcaggtgatgaatccccttgggaagcctctgtgtccttgtccccaacctagccttaccctccttctggagaagctgaagtgctctccttctctacctataactatagattcccccaaacagcttccacctcctcatttccatcttctggttttctcctacaggggctctctatttttgtctctgatttggtgtcactgacaacagccctgttctttttcccccctttctaatgcgttgtatctgtatagcacttagtcctccctctttctgttctctcattttatctgccatgcttttcatgtctccagtctgtatttgtgatctagactagaatggaattttgtctgtctatatcagtctgtcatggtgtgtttgactgtctctcggagctatgtgtatctccctctcacatgcctgtcagtaggacaccattgtctaaattgtgtgtgtctagtctgtctgacagtgtgtgagtttgtgactaaggatcagcctgagggtctgagtgtgactgtgggtgcttgactgagttgattcttagtgactagctttatccatatgccacttctctccgtctgtcccacagcgtaactctgtggttgtctgtccctgtctgccttgtctgtcacagtgtgtccatcctggttagtcatatatctcttgtggtctgtccatccaaccatgtgctagatgtcatcttctatcatttgtcactgccttacctattcctctgtccctgcctgatttctcctgttctttttttgcagacctccagagtgaagatgggtgactagatgatatgtgtgggtggggccgtgcctcacttttatttattgctggttttcctgggacagctggagctgtgtcccttagcctttcagaggcttggtgttcagggccctccctgcactcccctcttgctgcgtgttgatttggaggcactgcagtccaggccgagtcctcagtgcggggagcaggctgctgctgctgactctgtgcagctgcgcacctgtgtcccccacctccaccctcaacccatcttcctagtgtttgtgaaataaacttggtatttgtctgggtca

SEQ ID NO: 1923 - DNA, 1664 bp, Homo sapiens
  source 1..1664: mol_type = unassigned DNA; mol_type = unassigned DNA
ggacggtggacgctgggacgcgtttgtagctccggccccgccgttccgacccccgccgccgtcgccgccatgacggggctagcactgctctactccggggtcttcgtggccttctgggcctgcgcgctggccgtgggtgaggccgggtcctggcgggcgggagcagcatcgcggccgagctggccgggtcggaactcggcggggaagtggcctgcggggaatactggccccccgcgcgctctgcacccgaggctctggggacttgcgcctgcgagggcctctgactccgacaaaggagacccggatttccagctgcttgaggaggggtgcgggcgggtaggggccgcgagggcagcactcccccgtcctgccactatcgctgtctcccctcgctcccacgtctcactgctgtcccccctttcttgctcctgaccggcccgctcggtcacaagccggctgctccggttcctcttttcccagtcgctttgccctcccccacccacagcttgttgggtaaacagcggaacggactgggccggcgggatctggctggagcgcttgctccctcggtcccgcctcggattcgggcttgcgggtggcgaccctgcctgcgcaggtgcttggtctgggaggtggttttagcgagggaatggcagaaaatggaggcctaagcagaggaatctgtctacacagctgtactgtcacctgggggcagcctgaggacgccccttcagggaggtggcccttcagctcggcagctactttaggttgaagaacttctctctaccgagcagcccgtaaccccctttttctccctcactgctgcaggagtctgctacaccatttttgatttgggcttccgctttgatgtggcatggttcctgacggagacttcgcccttcatgtggtccaacctgggcattggcctagctatctccctgtctgtggttggggcagcctggggcatctatattaccggctcctccatcattggtggaggagtgaaggcccccaggatcaagaccaagaacctggtcagcatcatcttctgtgaggctgtggccatctacggcatcatcatggcaattgtcattagcaacatggctgagcctttcagtgccacagaccccaaggccatcggccatcggaactaccatgcaggctactccatgtttggggctggcctcaccgtaggcctgtctaacctcttctgtggagtctgcgtgggcatcgtgggcagtggggctgccctggccgatgctcagaaccccagcctctttgtaaagattctcatcgtggagatctttggcagcgccattggcctctttggggtcatcgtcgcaattcttcagacctccagagtgaagatgggtgactagatgatatgtgtgggtggggccgtgcctcacttttatttattgctggttttcctgggacagctggagctgtgtcccttagcctttcagaggcttggtgttcagggccctccctgcactcccctcttgctgcgtgttgatttggaggcactgcagtccaggccgagtcctcagtgcggggagcaggctgctgctgctgactctgtgcagctgcgcacctgtgtcccccacctccaccctcaacccatcttcctagtgtttgtgaaataaacttggtatttgtctggg

SEQ ID NO: 1924 - DNA, 962 bp, Homo sapiens
  source 1..962: mol_type = unassigned DNA; mol_type = unassigned DNA
ggacgctgggacgcgtttgtagctccggccccgccgttccgacccccgccgccgtcgccgccatgacggggctagcactgctctactccggggtcttcgtggccttctgggcctgcgcgctggccgtgggagtctgctacaccatttttgatttgggcttccgctttgatgtggcatggttcctgacggagacttcgcccttcatgtggtccaacctgggcattggcctagctatctccctgtctgtggttggggcagcctggggcatctatattaccggctcctccatcattggtggaggagtgaaggcccccaggatcaagaccaagaacctggtcaggtaagtgtcagggtccttggacttttgtcagaaccagctgtgttggcgctgcctgtgtgtttgatctgacatactgtttctgacaagccaccttgtgggatgggatgttataggggaaagattgctggggacttactgggcaggaaggacggtttctttctcatttctttctcctttccactccttacccctaatctctaccactaccagcatcatcttctgtgaggctgtggccatctacggcatcatcatggcaattgtcattagcaacatggctgagcctttcagtgccacagaccccaaggccatcggccatcggaactaccatgcaggtgggtggatgggcgtatgaatgcaaaatgctgggacttcatgcctgcttccactctcccccatcccagcttgggccatcattttgatattctctcacctactttttctgctttgcagagtggggatggtgattggccccattagcccatatctcccccattcctggcttagcctcactgcacccctctctatcctcccaggctactccatgtttggggctggcctcaccgtaggcctgtctaacctcttctgtggagtctgcgtgggcatcgtgggcagtggggctgcc

SEQ ID NO: 1925 - DNA, 419 bp, Homo sapiens
  source 1..419: mol_type = unassigned DNA; mol_type = unassigned DNA
ggccgtgggtgaggccgggtcctggcgggcgggagcagcatcgcggccgagctggccgggtcggaactcggcggggaagtggcctgcggggaatactggccccccgcgcgctctgcacccgaggctctggggacttgcgcctgcgagggcctctgactccgacaaaggagacccggatttccagctgcttgaggaggggtgcgggcgggagtctgctacaccatttttgatttgggcttccgctttgatgtggcatggttcctgacggagacttcgcccttcatgtggtccaacctgggcattggcctagctatctccctgtctgtggttggggcagcctggggcatctatattaccggctcctccatcattggtggaggagtgaaggcccccaggatcaagaccaagaacctggtcag

SEQ ID NO: 1926 - DNA, 577 bp, Homo sapiens
  source 1..577: mol_type = unassigned DNA; mol_type = unassigned DNA
tgatgtggcatggtaagggagggcagggggaggattccccttgaagcttcttccctgcagcctctcttcttttctctggtctgagtccctcccccacaccactgcctgcctgggacatggacctttgggaaatacgcggtcagttgttgcctgtagaactggtggtggggttgaagggggtttgaggggttaagattttgtgctccgcttccctgctagagctgaactgctttcttctctgcttccacaacaggttcctgacggagacttcgcccttcatgtggtccaacctgggcattggcctagctatctccctgtctgtggttggggcagcctggggcatctatattaccggctcctccatcattggtggaggagtgaaggcccccaggatcaagaccaagaacctggtcaggtaagtgtcagggtccttggacttttgtcagaaccagctgtgttggcgctgcctgtgtgtttgatctgacatactgtttctgacaagccaccttgtgggatgggatgttataggggaaagattgctggggacttactgggcaggaaggacggtttctttctc

SEQ ID NO: 1927 - DNA, 825 bp, Homo sapiens
  source 1..825: mol_type = unassigned DNA; mol_type = unassigned DNA
gagctgaactgctttcttctctgcttccacaacaggttcctgacggagacttcgcccttcatgtggtccaacctgggcattggcctagctatctccctgtctgtggttggggcagcctggggcatctatattaccggctcctccatcattggtggaggagtgaaggcccccaggatcaagaccaagaacctggtcagcatcatcttctgtgaggctgtggccatctacggcatcatcatggcaattgtcattagcaacatggctgagcctttcagtgccacagaccccaaggccatcggccatcggaactaccatgcaggctactccatgtttggggctggcctcaccgtaggcctgtctaacctcttctgtggagtctgcgtgggcatcgtgggcagtggggctgccctggccgatgctcagaaccccagcctctttgtaaagattctcatcgtggagatctttggcagcgccattggcctctttggggtcatcgtcgcaattcttcagacctccagagtgaagatgggtgactagatgatatgtgtgggtggggccgtgcctcacttttatttattgctggttttcctgggacagctggagctgtgtcccttagcctttcagaggcttggtgttcagggccctccctgcactcccctcttgctgcgtgttgatttggaggcactgcagtccaggccgagtcctcagtgcggggagcaggctgctgctgctgactctgtgcagctgcgcacctgtgtcccccacctccaccctcaacccatcttcctagtgtttgtgaaataaacttggtatttgtctgggtca

SEQ ID NO: 1928 - DNA, 5918 bp, Homo sapiens
  source 1..5918: mol_type = unassigned DNA; mol_type = unassigned DNA
aatcttcagctacttggagcaacagccattgaggataaattacaagatcaagtgcctgaaaccatagaaacgctaatgaaagcagacatcaaaatctggatccttacaggggacaagcaagaaactgccattaacatcggacactcctgcaaactgttgaagaagaacatgggaatgattgttataaatgaaggctctcttgatggtttctcctcttcaaaaatctgaagttgttgagatggttaagaaacaagtcaaagtcgtaacgcttgcaatcggtgatggagcaaatgatgtcagcatgatacagacagcgcacgttggtgttggtatcagtggcaatgaaggcctgcaggcagctaattcctctgactactccatagctcagttcaaatatttgaagaatttactgatgattcatggtgcctggaactataacagagtctccaagtgcatcttatactgcttctacaagaatatagtgctctatattatcgagatctggtttgcctttgttaatggcttttctggacagatcctctttgaaagatggtgtataggtctctataacgtgatgtttacagcaatgcctcctttaactcttggaatatttgagagatcatgcagaaaagagaacatgttgaagtaccctgaattatacaaaacatctcagaatgccctggacttcaacaccaaggttttctgggttcattgtttaaatggcctcttccactcagttattctgttttggtttccactaaaagcccttcagtatggtactgcatttggaaatgggaaaacctcggattatctgctactgggaaactttgtgtacacttttgtggtgataactgtgtgtttgaaagctggattggagacatcatattggacatggttcagccacatagcgatatgggggagcatcgcactctgggtggtgttttttggaatctactcatctctgtggcctgccattccgatggcccctgatatgtcaggagaggcagccatgttgttcagttctggagtcttttggatgggcttgttattcatccctgtggcatctctgctccttgatgtggtgtacaaggttatcaagaggactgcttttaaaacattggtcgatgaagttcaggagctggaggcaaaatctcaagacccaggagcagttgtacttggaaaaagcctgaccgagagggcgcaactgctcaagaacgtctttaagaagaaccacgtgaacttgtaccgctctgaatccttgcaacaaaatctgctccatgggtatgcgttctctcaagatgaaaatggaatcgtttcacagtctgaagtgataagagcatatgataccacgaaacagaggcccgacgaatggtgatggggagagcctgaaaggcaggctctgttacctctctaaggagagctaccaggttgtcaccgcagtctgctaaccaattccagtctggtccatgaagaggaaaggtagatctgagctcatctcgctgatggacattcagattcatgtatattatagacataagcactgtgcaactgtactgtaacaccatctcttttggatttttttaaggtatttgctaagtctttgtaaacggaaattgaaaatgacctggtatcttgccagagggctttcttaaacggagaataagtcagtattcttatgccattactgtggggctgtaactgactgtcagtttattggctgtaccacaaggtaaccaaccattaaaaaactctaaatgatatttagttaaagggactcttggtatccagacttagatttcaggatatgctgaaacaaaccagcattcttaaggaactgactcaccttcctgagcaaaatttctaaacaagcatttgtgtccaaaattgtcttgataaatgtttgccaaagaggttcagtaagtgtttttctagttcagtagtcatatgcccagaaatgtaagagaaagtttacttccagttccgctgtaagatctgcatgcctgactttccaaatgtaagagtgatttacaaaaatgaatatttcaaggcatttgctactaaaatcggtgatgttgcacctttggccttacaaatgcttctttgttgtttgtcgtgtttatttgttagaggacacacgtgttaatgtgactctgttgttatgacactgatttttcaaactatgtatgtttcaggtatttctgatgaagtttcatcatcatttagatttttctaaaaatctggctaatgcagtagattgagtgatgtcattttgtcttaaagtttttcctcttaagaaacatatgctacgtatttacgtgggatttccaaagcttctgttgcaatatttggaataacatgtcagataaatgcatgggcttttgtcctgtgttccagttcccactagagatgcctgtgtcttgtgtagcacacccagtgttatggtgactgccccctatactgaagactgaaaattatttcacagttcactcatcaaatagttcccaaaattcgtcacatgctgcttattgggacaaataggtagtacattttccccatttaaaaaatgcggattttactcaggccggtaactttacagtcagaggacacgttcatcatgagtagcttttgttagtatgttttaaaatgtatcttcagttcaattattttcagcatttacaagacatctgaaaatggctattttgctaccaacagtaaatgaaggggctgtttaaaaaccacaaccagttttctacactattttttaaataatactttcatttgaaaaaaaggaattagttttcagatacacttcagagattgaagcaaactatttgccttttactcaaaagcctgcttgcctttacatggacttaccagcaaaataggtagaactttctcttttaaaaaaagtcaactagaattgagaagaggtgattttttttcagatcgcttctcgagtttaatattttcacattcttttcaccctttttctcaatctagatttaaaattaggatatatgtcatttccttgtctgtatttgtagctccttagttaccagtatgcctctccattttctacaaataagaggttataacacatatacataattctaaccttaagggaacacacgtttacatactttacttcccaagcccttcctgtttggggtacagattgagagagtcatgaatcaacacatctagcaagaccacaggtgtaagagtctaagatcgtcttcaaaattctgaagtcccagtctttacctgtccagtgaatgaatattcagagcagcttttcctgggcttcccagtggtgatagctgaggtcaaaccacaaaaaataagaaagcaagagtgaaatgcacccctccagagaaacactttgtagtgtttaattctgttaatagagaagagctgcttctgtttgcgctcacttcatcagtggcacccttctgcagaattttaatataaaaacattatggatataatagaactggattttctgacttaaaaatgtaagttttattttaatcttgaaacgtggattgtttctgtggagctcttaaacatgagaagaatacttacggttgataatgtgtaacatgatctgaaatgtgactaatttgagcctctttgtcccatcgtcctgtttttgaattattgacattgtcagtctctttgcttcctgggtgagacttggggtttgagggacagggaatgaccttcttggtgaaacttaaaatataacattgcaattgcagtgactttacagtgttaaattagagaaaatagtctgattttttaaaccttccttaactggaaaaaagtcacatggttttaccaggattgaaataaacagtcaatgtgacttttaacatgtgtttttttgaaataaagggcacgtactcttcaattaaaaagttccttatagggactctggcaaatgctaacacagttgctttacaatgtttacaattcagacaatacgacttataatagaaaatcctcattcatttagcattgaaaagctggaagttgcttctttaatgttgaatagtatacagtggtattgagcatggactttctaaatgttttatatatacatataaaaatatattggtgtctcacacccagaaagatgttatattgtagatattattaggaaaacagtgtttctcaggaacgttgtaaattttaaatgatatatgtacttcccgtcctcccacctccactctgtgctctaatgtgagactgcttcagcagtgttgctaagttaatggaaaactttttctaatcaagtcaggtgaatgtgtattctgctaaataatgttagccatttacatgaattgtatggtcattaaatggaatcagtgattcctctttaatttccagaggggaaatgaattatggaaatcagtcagcattctgatcattaaattttatactttaattttgccgttcagcattctaaatatccaatgtgaaagtcacatgataatttgttttgcattgcgtgcactgtacaacacttacaacttgtcatttaaaatgttttctcgggaaatgaatgctagtcagaaagtaatagattgtattattcatagttttaaaattatgacaatgtcataattactacaaagctaaataatcgtgtttatttttgtgcagttgccctttgatagttcctggttttaaaacctattaagtgtataatcttacaaatagtcatctacaaaatttatggagaaagtgcccagcccattcacatcacatggaccaggaattcttttgtaaatgacttaaggtaacatcatgcagttcagtgcctaataaatgctttttaatgatgaacatttctataatgactcgtaagataccatagtctgatttttctcacattaaaataactgaagtcacttgtgtaacgtagttatactttgctgcattttaattaaccttcaacagctattaaagtggaatgtaagttaaattttgaaggaaaggaaataaatgttttccatatttcgtcttgatttactttctgtatgagaacagctgtgtttttgataggtttatggtttgcatgagttcatatttaaagtgatccaggccaatgcatggctattgctgtaaatcttgatgtttatttctgccttgtaaagttctatcacggcctacctggaatttaaaattcagtagacaaattaattggtcctctgcacaacttttttaataagtagattattttacaaagaaatttgaacaaatttaattgaatcttttgtttagcttgcctctaagaacttttcttaataaagctcccaaaacttctcagcaaataaatctcccttaagtaggaaagctagatttcatatttgcttactttgaattaacagcaactttccacaggtaaatctgttcttgcaaagatgtgagcagaatagttaaaaataatatttttatgtttcatggttctaaatggaagccataaatgcagtaaatactatctgttgtttaactactttaatcgtcattttttacattttcaagtttattaggttaagaaaaacagggcagccttggaaggcagctactacagaaaactgcagttttgcgttaaagataaagtagtattttcagctccctgaaaaaccattcctgctgaaactgctgtagaaattgtgaagctgcatgagtggagagtattgaatctgtggttatagtagttttctcaggtttgtttatcttgatgtttgatgcactgtgttttatagttattaaaattgagtaatattatttctatgcagtgttatgtgtcattggccttttgtgaatgtgcatgttttaaactgcaaattttaaacattttgtcctctaattgttattaaaaatgaaataaactttaccattacttaaaa

SEQ ID NO: 1929 - DNA, 8270 bp, Homo sapiens
  source 1..8270: mol_type = unassigned DNA; mol_type = unassigned DNA
aagagctcgcccagctctgcgggcgccgccaccttcgccgccaccgctgcctttctcctcctcctgtcggcgtgcgggggccgcgcccggcggcagctctgccctaggtgggcggcggcgcggcccaggctgcagctgagcgctctgcgcggcgcagccgggtctcccgcgtgtaccacgccgtgacaggtgcagagtccgggctgaggacccacctgcagccgccgccgcgatgcccaccatgcggaggaccgtgtcggagatccgctcgcgcgccgaaggttatgagaagacagatgatgtttcagagaagacctcactggctgaccaggaggaagtaaggactattttcatcaaccagccccagctgacaaaattctgcaataaccatgtcagcactgcaaaatacaacataatcacattccttccaagatttctctactctcagttcagaagagctgctaattcattttttctctttattgcactgctgcagcaaatacctgatgtgtcaccaacaggtcgttatacaacactggttcctctcttatttattttagctgtggcagctatcaaagagataatagaagatattaaacgacataaagctgataatgcagtgaacaagaaacaaacgcaagttttgagaaatggtgcttgggaaattgtccactgggaaaaggtggcagtaggggagatagtgaaagtgaccaatggggaacatctcccagcagatctcatcagtctgtcctcaagtgagccccaagccatgtgctacattgaaacatccaacttagatggtgaaacaaacttgaaaattagacagggcttaccagcaacatcagatatcaaagacgttgacagtttgatgaggatttctggcagaattgagtgtgaaagtccaaacagacatctctacgattttgttggaaacataaggcttgatggacatggcaccgttccactgggagcagatcagattcttcttcgaggagctcagttgagaaatacacagtgggttcatggaatagttgtctacactggacatgacaccaagctgatgcagaattcaacaagtccaccacttaagctctcaaatgtggaacggattacaaatgtacaaattttgattttattttgtatcttaattgccatgtctcttgtctgttctgtgggctcagccatttggaatcgaaggcattctggaaaagactggtatctcaatctaaactatggtggcgctagtaattttggactgaatttcttgaccttcatcatccttttcaacaatctcattcctatcagcttattggttacattagaagttgtgaaatttacccaggcatacttcataaattgggatcttgacatgcactatgaacccacagacactgctgctatggctcgaacatctaatctgaatgaggaacttggccaggttaaatacatattttctgacaaaactggtactctgacatgcaatgtaatgcagtttaagaagtgcaccatagcgggagttgcttatggccatgtccctgaacctgaggattatggctgctctcctgatgaatggcagaactcacagtttggagatgaaaaaacatttagtgattcatcattgctggaaaatctccaaaataatcatccaactgcacctataatatgtgaatttcttacaatgatggcagtctgtcacacagcagtgccagagcgagaaggtgacaagattatttatcaagcagcatctccagatgagggagcattggtcagagcagccaagcaattgaattttgttttcactggaagaacacccgactcggtgattatagattcactggggcaggaagaaagatatgaattgctcaatgtcttggagtttaccagtgctaggaaaagaatgtcagtgattgttcgcactccatctggaaagttacgactctactgcaaaggagctgacactgtaatttatgatcgactggcagagacgtcaaaatacaaagaaattaccctaaaacatttagagcagtttgctacagaagggttaagaactttatgttttgctgtggctgagatttcagagagcgactttcaggagtggcgagcagtctatcagcgagcatctacatctgtgcagaacaggctactcaaactcgaagagagttatgagttgattgaaaagaatcttcagctacttggagcaacagccattgaggataaattacaagatcaagtgcctgaaaccatagaaacgctaatgaaagcagacatcaaaatctggatccttacaggggacaagcaagaaactgccattaacatcggacactcctgcaaactgttgaagaagaacatgggaatgattgttataaatgaaggctctcttgatggaacaagggaaactctcagtcgtcactgtactacccttggtgatgctctccggaaagagaatgattttgctcttataattgatgggaaaaccctcaaatatgccttaacctttggagtacgacagtatttcctggacttagctttgtcatgcaaagctgtcatttgctgtcgggtttctcctcttcaaaaatctgaagttgttgagatggttaagaaacaagtcaaagtcgtaacgcttgcaatcggtgatggagcaaatgatgtcagcatgatacagacagcgcacgttggtgttggtatcagtggcaatgaaggcctgcaggcagctaattcctctgactactccatagctcagttcaaatatttgaagaatttactgatgattcatggtgcctggaactataacagagtctccaagtgcatcttatactgcttctacaagaatatagtgctctatattatcgagatctggtttgcctttgttaatggcttttctggacagatcctctttgaaagatggtgtataggtctctataacgtgatgtttacagcaatgcctcctttaactcttggaatatttgagagatcatgcagaaaagagaacatgttgaagtaccctgaattatacaaaacatctcagaatgccctggacttcaacaccaaggttttctgggttcattgtttaaatggcctcttccactcagttattctgttttggtttccactaaaagcccttcagtatggtactgcatttggaaatgggaaaacctcggattatctgctactgggaaactttgtgtacacttttgtggtgataactgtgtgtttgaaagctggattggagacatcatattggacatggttcagccacatagcgatatgggggagcatcgcactctgggtggtgttttttggaatctactcatctctgtggcctgccattccgatggcccctgatatgtcaggagaggcagccatgttgttcagttctggagtcttttggatgggcttgttattcatccctgtggcatctctgctccttgatgtggtgtacaaggttatcaagaggactgcttttaaaacattggtcgatgaagttcaggagctggaggcaaaatctcaagacccaggagcagttgtacttggaaaaagcctgaccgagagggcgcaactgctcaagaacgtctttaagaagaaccacgtgaacttgtaccgctctgaatccttgcaacaaaatctgctccatgggtatgcgttctctcaagatgaaaatggaatcgtttcacagtctgaagtgataagagcatatgataccacgaaacagaggcccgacgaatggtgatggggagagcctgaaaggcaggctctgttacctctctaaggagagctaccaggttgtcaccgcagtctgctaaccaattccagtctggtccatgaagaggaaaggtagatctgagctcatctcgctgatggacattcagattcatgtatattatagacataagcactgtgcaactgtactgtaacaccatctcttttggatttttttaaggtatttgctaagtctttgtaaacggaaattgaaaatgacctggtatcttgccagagggctttcttaaacggagaataagtcagtattcttatgccattactgtggggctgtaactgactgtcagtttattggctgtaccacaaggtaaccaaccattaaaaaactctaaatgatatttagttaaagggactcttggtatccagacttagatttcaggatatgctgaaacaaaccagcattcttaaggaactgactcaccttcctgagcaaaatttctaaacaagcatttgtgtccaaaattgtcttgataaatgtttgccaaagaggttcagtaagtgtttttctagttcagtagtcatatgcccagaaatgtaagagaaagtttacttccagttccgctgtaagatctgcatgcctgactttccaaatgtaagagtgatttacaaaaatgaatatttcaaggcatttgctactaaaatcggtgatgttgcacctttggccttacaaatgcttctttgttgtttgtcgtgtttatttgttagaggacacacgtgttaatgtgactctgttgttatgacactgatttttcaaactatgtatgtttcaggtatttctgatgaagtttcatcatcatttagatttttctaaaaatctggctaatgcagtagattgagtgatgtcattttgtcttaaagtttttcctcttaagaaacatatgctacgtatttacgtgggatttccaaagcttctgttgcaatatttggaataacatgtcagataaatgcatgggcttttgtcctgtgttccagttcccactagagatgcctgtgtcttgtgtagcacacccagtgttatggtgactgccccctatactgaagactgaaaattatttcacagttcactcatcaaatagttcccaaaattcgtcacatgctgcttattgggacaaataggtagtacattttccccatttaaaaaatgcggattttactcaggccggtaactttacagtcagaggacacgttcatcatgagtagcttttgttagtatgttttaaaatgtatcttcagttcaattattttcagcatttacaagacatctgaaaatggctattttgctaccaacagtaaatgaaggggctgtttaaaaaccacaaccagttttctacactattttttaaataatactttcatttgaaaaaaaggaattagttttcagatacacttcagagattgaagcaaactatttgccttttactcaaaagcctgcttgcctttacatggacttaccagcaaaataggtagaactttctcttttaaaaaaagtcaactagaattgagaagaggtgattttttttcagatcgcttctcgagtttaatattttcacattcttttcaccctttttctcaatctagatttaaaattaggatatatgtcatttccttgtctgtatttgtagctccttagttaccagtatgcctctccattttctacaaataagaggttataacacatatacataattctaaccttaagggaacacacgtttacatactttacttcccaagcccttcctgtttggggtacagattgagagagtcatgaatcaacacatctagcaagaccacaggtgtaagagtctaagatcgtcttcaaaattctgaagtcccagtctttacctgtccagtgaatgaatattcagagcagcttttcctgggcttcccagtggtgatagctgaggtcaaaccacaaaaaataagaaagcaagagtgaaatgcacccctccagagaaacactttgtagtgtttaattctgttaatagagaagagctgcttctgtttgcgctcacttcatcagtggcacccttctgcagaattttaatataaaaacattatggatataatagaactggattttctgacttaaaaatgtaagttttattttaatcttgaaacgtggattgtttctgtggagctcttaaacatgagaagaatacttacggttgataatgtgtaacatgatctgaaatgtgactaatttgagcctctttgtcccatcgtcctgtttttgaattattgacattgtcagtctctttgcttcctgggtgagacttggggtttgagggacagggaatgaccttcttggtgaaacttaaaatataacattgcaattgcagtgactttacagtgttaaattagagaaaatagtctgattttttaaaccttccttaactggaaaaaagtcacatggttttaccaggattgaaataaacagtcaatgtgacttttaacatgtgtttttttgaaataaagggcacgtactcttcaattaaaaagttccttatagggactctggcaaatgctaacacagttgctttacaatgtttacaattcagacaatacgacttataatagaaaatcctcattcatttagcattgaaaagctggaagttgcttctttaatgttgaatagtatacagtggtattgagcatggactttctaaatgttttatatatacatataaaaatatattggtgtctcacacccagaaagatgttatattgtagatattattaggaaaacagtgtttctcaggaacgttgtaaattttaaatgatatatgtacttcccgtcctcccacctccactctgtgctctaatgtgagactgcttcagcagtgttgctaagttaatggaaaactttttctaatcaagtcaggtgaatgtgtattctgctaaataatgttagccatttacatgaattgtatggtcattaaatggaatcagtgattcctctttaatttccagaggggaaatgaattatggaaatcagtcagcattctgatcattaaattttatactttaattttgccgttcagcattctaaatatccaatgtgaaagtcacatgataatttgttttgcattgcgtgcactgtacaacacttacaacttgtcatttaaaatgttttctcgggaaatgaatgctagtcagaaagtaatagattgtattattcatagttttaaaattatgacaatgtcataattactacaaagctaaataatcgtgtttatttttgtgcagttgccctttgatagttcctggttttaaaacctattaagtgtataatcttacaaatagtcatctacaaaatttatggagaaagtgcccagcccattcacatcacatggaccaggaattcttttgtaaatgacttaaggtaacatcatgcagttcagtgcctaataaatgctttttaatgatgaacatttctataatgactcgtaagataccatagtctgatttttctcacattaaaataactgaagtcacttgtgtaacgtagttatactttgctgcattttaattaaccttcaacagctattaaagtggaatgtaagttaaattttgaaggaaaggaaataaatgttttccatatttcgtcttgatttactttctgtatgagaacagctgtgtttttgataggtttatggtttgcatgagttcatatttaaagtgatccaggccaatgcatggctattgctgtaaatcttgatgtttatttctgccttgtaaagttctatcacggcctacctggaatttaaaattcagtagacaaattaattggtcctctgcacaacttttttaataagtagattattttacaaagaaatttgaacaaatttaattgaatcttttgtttagcttgcctctaagaacttttcttaataaagctcccaaaacttctcagcaaataaatctcccttaagtaggaaagctagatttcatatttgcttactttgaattaacagcaactttccacaggtaaatctgttcttgcaaagatgtgagcagaatagttaaaaataatatttttatgtttcatggttctaaatggaagccataaatgcagtaaatactatctgttgtttaactactttaatcgtcattttttacattttcaagtttattaggttaagaaaaacagggcagccttggaaggcagctactacagaaaactgcagttttgcgttaaagataaagtagtattttcagctccctgaaaaaccattcctgctgaaactgctgtagaaattgtgaagctgcatgagtggagagtattgaatctgtggttatagtagttttctcaggtttgtttatcttgatgtttgatgcactgtgttttatagttattaaaattgagtaatattatttctatgcagtgttatgtgtcattggccttttgtgaatgtgcatgttttaaactgcaaattttaaacattttgtcctctaattgttattaaaaatgaaataaactttaccattacttaaaa

SEQ ID NO: 1930 - DNA, 8209 bp, Homo sapiens
  source 1..8209: mol_type = unassigned DNA; mol_type = unassigned DNA
agctctgcgggcgccgccaccttcgccgccaccgctgcctttctcctcctcctgtcggcgtgcgggggccgcgcccggcggcagctctgccctaggtgggcggcggcgcggcccaggctgcagctgagcgctctgcgcggcgcagccgggtctcccgcgtgtaccacgccgtgacaggtgcagagtccgggctgaggacccacctgcagccgccgccgcgatgcccaccatgcggaggaccgtgtcggagatccgctcgcgcgccgaaggttatgagaagacagatgatgtttcagagaagacctcactggctgaccaggaggaagtaaggactattttcatcaaccagccccagctgacaaaattctgcaataaccatgtcagcactgcaaaatacaacataatcacattccttccaagatttctctactctcagttcagaagagctgctaattcattttttctctttattgcactgctgcagcaaatacctgatgtgtcaccaacaggtcgttatacaacactggttcctctcttatttattttagctgtggcagctatcaaagagataatagaagatattaaacgacataaagctgataatgcagtgaacaagaaacaaacgcaagttttgagaaatggtgcttgggaaattgtccactgggaaaaggtaaatgttggagatatagttataataaaaggcaaagagtatatacctgctgacactgtacttctctcatcaagtgagccccaagccatgtgctacattgaaacatccaacttagatggtgaaacaaacttgaaaattagacagggcttaccagcaacatcagatatcaaagacgttgacagtttgatgaggatttctggcagaattgagtgtgaaagtccaaacagacatctctacgattttgttggaaacataaggcttgatggacatggcaccgttccactgggagcagatcagattcttcttcgaggagctcagttgagaaatacacagtgggttcatggaatagttgtctacactggacatgacaccaagctgatgcagaattcaacaagtccaccacttaagctctcaaatgtggaacggattacaaatgtacaaattttgattttattttgtatcttaattgccatgtctcttgtctgttctgtgggctcagccatttggaatcgaaggcattctggaaaagactggtatctcaatctaaactatggtggcgctagtaattttggactgaatttcttgaccttcatcatccttttcaacaatctcattcctatcagcttattggttacattagaagttgtgaaatttacccaggcatacttcataaattgggatcttgacatgcactatgaacccacagacactgctgctatggctcgaacatctaatctgaatgaggaacttggccaggttaaatacatattttctgacaaaactggtactctgacatgcaatgtaatgcagtttaagaagtgcaccatagcgggagttgcttatgggcagaactcacagtttggagatgaaaaaacatttagtgattcatcattgctggaaaatctccaaaataatcatccaactgcacctataatatgtgaatttcttacaatgatggcagtctgtcacacagcagtgccagagcgagaaggtgacaagattatttatcaagcagcatctccagatgagggagcattggtcagagcagccaagcaattgaattttgttttcactggaagaacacccgactcggtgattatagattcactggggcaggaagaaagatatgaattgctcaatgtcttggagtttaccagtgctaggaaaagaatgtcagtgattgttcgcactccatctggaaagttacgactctactgcaaaggagctgacactgtaatttatgatcgactggcagagacgtcaaaatacaaagaaattaccctaaaacatttagagcagtttgctacagaagggttaagaactttatgttttgctgtggctgagatttcagagagcgactttcaggagtggcgagcagtctatcagcgagcatctacatctgtgcagaacaggctactcaaactcgaagagagttatgagttgattgaaaagaatcttcagctacttggagcaacagccattgaggataaattacaagatcaagtgcctgaaaccatagaaacgctaatgaaagcagacatcaaaatctggatccttacaggggacaagcaagaaactgccattaacatcggacactcctgcaaactgttgaagaagaacatgggaatgattgttataaatgaaggctctcttgatggaacaagggaaactctcagtcgtcactgtactacccttggtgatgctctccggaaagagaatgattttgctcttataattgatgggaaaaccctcaaatatgccttaacctttggagtacgacagtatttcctggacttagctttgtcatgcaaagctgtcatttgctgtcgggtttctcctcttcaaaaatctgaagttgttgagatggttaagaaacaagtcaaagtcgtaacgcttgcaatcggtgatggagcaaatgatgtcagcatgatacagacagcgcacgttggtgttggtatcagtggcaatgaaggcctgcaggcagctaattcctctgactactccatagctcagttcaaatatttgaagaatttactgatgattcatggtgcctggaactataacagagtctccaagtgcatcttatactgcttctacaagaatatagtgctctatattatcgagatctggtttgcctttgttaatggcttttctggacagatcctctttgaaagatggtgtataggtctctataacgtgatgtttacagcaatgcctcctttaactcttggaatatttgagagatcatgcagaaaagagaacatgttgaagtaccctgaattatacaaaacatctcagaatgccctggacttcaacaccaaggttttctgggttcattgtttaaatggcctcttccactcagttattctgttttggtttccactaaaagcccttcagtatggtactgcatttggaaatgggaaaacctcggattatctgctactgggaaactttgtgtacacttttgtggtgataactgtgtgtttgaaagctggattggagacatcatattggacatggttcagccacatagcgatatgggggagcatcgcactctgggtggtgttttttggaatctactcatctctgtggcctgccattccgatggcccctgatatgtcaggagaggcagccatgttgttcagttctggagtcttttggatgggcttgttattcatccctgtggcatctctgctccttgatgtggtgtacaaggttatcaagaggactgcttttaaaacattggtcgatgaagttcaggagctggaggcaaaatctcaagacccaggagcagttgtacttggaaaaagcctgaccgagagggcgcaactgctcaagaacgtctttaagaagaaccacgtgaacttgtaccgctctgaatccttgcaacaaaatctgctccatgggtatgcgttctctcaagatgaaaatggaatcgtttcacagtctgaagtgataagagcatatgataccacgaaacagaggcccgacgaatggtgatggggagagcctgaaaggcaggctctgttacctctctaaggagagctaccaggttgtcaccgcagtctgctaaccaattccagtctggtccatgaagaggaaaggtagatctgagctcatctcgctgatggacattcagattcatgtatattatagacataagcactgtgcaactgtactgtaacaccatctcttttggatttttttaaggtatttgctaagtctttgtaaacggaaattgaaaatgacctggtatcttgccagagggctttcttaaacggagaataagtcagtattcttatgccattactgtggggctgtaactgactgtcagtttattggctgtaccacaaggtaaccaaccattaaaaaactctaaatgatatttagttaaagggactcttggtatccagacttagatttcaggatatgctgaaacaaaccagcattcttaaggaactgactcaccttcctgagcaaaatttctaaacaagcatttgtgtccaaaattgtcttgataaatgtttgccaaagaggttcagtaagtgtttttctagttcagtagtcatatgcccagaaatgtaagagaaagtttacttccagttccgctgtaagatctgcatgcctgactttccaaatgtaagagtgatttacaaaaatgaatatttcaaggcatttgctactaaaatcggtgatgttgcacctttggccttacaaatgcttctttgttgtttgtcgtgtttatttgttagaggacacacgtgttaatgtgactctgttgttatgacactgatttttcaaactatgtatgtttcaggtatttctgatgaagtttcatcatcatttagatttttctaaaaatctggctaatgcagtagattgagtgatgtcattttgtcttaaagtttttcctcttaagaaacatatgctacgtatttacgtgggatttccaaagcttctgttgcaatatttggaataacatgtcagataaatgcatgggcttttgtcctgtgttccagttcccactagagatgcctgtgtcttgtgtagcacacccagtgttatggtgactgccccctatactgaagactgaaaattatttcacagttcactcatcaaatagttcccaaaattcgtcacatgctgcttattgggacaaataggtagtacattttccccatttaaaaaatgcggattttactcaggccggtaactttacagtcagaggacacgttcatcatgagtagcttttgttagtatgttttaaaatgtatcttcagttcaattattttcagcatttacaagacatctgaaaatggctattttgctaccaacagtaaatgaaggggctgtttaaaaaccacaaccagttttctacactattttttaaataatactttcatttgaaaaaaaggaattagttttcagatacacttcagagattgaagcaaactatttgccttttactcaaaagcctgcttgcctttacatggacttaccagcaaaataggtagaactttctcttttaaaaaaagtcaactagaattgagaagaggtgattttttttcagatcgcttctcgagtttaatattttcacattcttttcaccctttttctcaatctagatttaaaattaggatatatgtcatttccttgtctgtatttgtagctccttagttaccagtatgcctctccattttctacaaataagaggttataacacatatacataattctaaccttaagggaacacacgtttacatactttacttcccaagcccttcctgtttggggtacagattgagagagtcatgaatcaacacatctagcaagaccacaggtgtaagagtctaagatcgtcttcaaaattctgaagtcccagtctttacctgtccagtgaatgaatattcagagcagcttttcctgggcttcccagtggtgatagctgaggtcaaaccacaaaaaataagaaagcaagagtgaaatgcacccctccagagaaacactttgtagtgtttaattctgttaatagagaagagctgcttctgtttgcgctcacttcatcagtggcacccttctgcagaattttaatataaaaacattatggatataatagaactggattttctgacttaaaaatgtaagttttattttaatcttgaaacgtggattgtttctgtggagctcttaaacatgagaagaatacttacggttgataatgtgtaacatgatctgaaatgtgactaatttgagcctctttgtcccatcgtcctgtttttgaattattgacattgtcagtctctttgcttcctgggtgagacttggggtttgagggacagggaatgaccttcttggtgaaacttaaaatataacattgcaattgcagtgactttacagtgttaaattagagaaaatagtctgattttttaaaccttccttaactggaaaaaagtcacatggttttaccaggattgaaataaacagtcaatgtgacttttaacatgtgtttttttgaaataaagggcacgtactcttcaattaaaaagttccttatagggactctggcaaatgctaacacagttgctttacaatgtttacaattcagacaatacgacttataatagaaaatcctcattcatttagcattgaaaagctggaagttgcttctttaatgttgaatagtatacagtggtattgagcatggactttctaaatgttttatatatacatataaaaatatattggtgtctcacacccagaaagatgttatattgtagatattattaggaaaacagtgtttctcaggaacgttgtaaattttaaatgatatatgtacttcccgtcctcccacctccactctgtgctctaatgtgagactgcttcagcagtgttgctaagttaatggaaaactttttctaatcaagtcaggtgaatgtgtattctgctaaataatgttagccatttacatgaattgtatggtcattaaatggaatcagtgattcctctttaatttccagaggggaaatgaattatggaaatcagtcagcattctgatcattaaattttatactttaattttgccgttcagcattctaaatatccaatgtgaaagtcacatgataatttgttttgcattgcgtgcactgtacaacacttacaacttgtcatttaaaatgttttctcgggaaatgaatgctagtcagaaagtaatagattgtattattcatagttttaaaattatgacaatgtcataattactacaaagctaaataatcgtgtttatttttgtgcagttgccctttgatagttcctggttttaaaacctattaagtgtataatcttacaaatagtcatctacaaaatttatggagaaagtgcccagcccattcacatcacatggaccaggaattcttttgtaaatgacttaaggtaacatcatgcagttcagtgcctaataaatgctttttaatgatgaacatttctataatgactcgtaagataccatagtctgatttttctcacattaaaataactgaagtcacttgtgtaacgtagttatactttgctgcattttaattaaccttcaacagctattaaagtggaatgtaagttaaattttgaaggaaaggaaataaatgttttccatatttcgtcttgatttactttctgtatgagaacagctgtgtttttgataggtttatggtttgcatgagttcatatttaaagtgatccaggccaatgcatggctattgctgtaaatcttgatgtttatttctgccttgtaaagttctatcacggcctacctggaatttaaaattcagtagacaaattaattggtcctctgcacaacttttttaataagtagattattttacaaagaaatttgaacaaatttaattgaatcttttgtttagcttgcctctaagaacttttcttaataaagctcccaaaacttctcagcaaataaatctcccttaagtaggaaagctagatttcatatttgcttactttgaattaacagcaactttccacaggtaaatctgttcttgcaaagatgtgagcagaatagttaaaaataatatttttatgtttcatggttctaaatggaagccataaatgcagtaaatactatctgttgtttaactactttaatcgtcattttttacattttcaagtttattaggttaagaaaaacagggcagccttggaaggcagctactacagaaaactgcagttttgcgttaaagataaagtagtattttcagctccctgaaaaaccattcctgctgaaactgctgtagaaattgtgaagctgcatgagtggagagtattgaatctgtggttatagtagttttctcaggtttgtttatcttgatgtttgatgcactgtgttttatagttattaaaattgagtaatattatttctatgcagtgttatgtgtcattggccttttgtgaatgtgcatgttttaaactgcaaattttaaacattttgtcctctaattgttattaaaaatgaaataaactttaccattactt

SEQ ID NO: 1931 - DNA, 560 bp, Homo sapiens
  source 1..560: mol_type = unassigned DNA; mol_type = unassigned DNA
gtgaaaaaaatagtaataactaattttttattctaaaaattgccatgcttagaatatatgtagtcagtttttaaaagtgaataacactactgttgttttgtatttttttattttaattgtgttatactggctctgtgttgccatttgacttaaatataactgagtggggggtggtgaggagatcctactttttactgggagaaggattattggggaccaaactccttagggagaaaatggcctcaaaagtctgtctaaatacttgaaatttcattcgctatctgagaaaatgtgtaaaaagaatcactaggctacggatttctcgagcaatcttttgtttaagtctaactctctttggtggtcctgtgggcacactggggtctctgccgagttgataattcatttcacacatttgcacctgctctgcagcctgaccgagagggcgcaactgctcaagaacgtctttaagaagaaccacgtgaacttgtaccgctctgaatccttgcaacaaaatctgctccatgggtatgcgttctctcaagatgaaaatggaatcgttt

SEQ ID NO: 1932 - DNA, 920 bp, Homo sapiens
  source 1..920: mol_type = unassigned DNA; mol_type = unassigned DNA
agctgtcatttgctgtcgggtttctcctcttcaaaaatctgaagttgttgagatggttaagaaacaagtcaaagtcgtaacgcttgcaatcggtgatggagcaaatgatgtcagcatgatacagacagcgcacgttggtgttggtatcagtggcaatgaaggcctgcaggcagctaattcctctgactactccatagctcagttcaaatatttgaagaatttactgatgattcatggtgcctggaactataacagagtctccaagtgcatcttatactgcttctacaagaatatagtgctctatattatcgagatctggtttgcctttgttaatggcttttctggacagatcctctttgaaagatggtgtataggtctctataacgtgtttgtgcgctttagatgtttacagcaatgcctcctttaactcttggaatatttgagagatcatgcagaaaagagaacatgttgaagtaccctgaattatacaaaacatctcagaatgccctggacttcaacaccaaggttttctgggttcattgtttaaatggcctcttccactcagttattctgttttggtttccactaaaagcccttcagtatggtactgcatttggaaatgggaaaacctcggattatctgctactgggaaactttgtgtacacttttgtggtgataactgtgtgtttgaaagctggattggagacatcatattggacatggttcagccacatagcgatatgggggagcatcgcactctgggtggtgttttttggaatctactcatctctgtggcctgccattccgatggcccctgatatgtcaggagaggcagccatgttgttcagttctggagtcttttggatgggcttgttattcatccctgtggcatctctgctccttgatgtggtgtacaaggt

SEQ ID NO: 1933 - DNA, 469 bp, Homo sapiens
  source 1..469: mol_type = unassigned DNA; mol_type = unassigned DNA
gtttctcctcttcaaaaatctgaagttgttgagatggttaagaaacaagtcaaagtcgtaacgcttgcaatcggtgatggagcaaatgatgtcagcatgatacagacagcgcacgttggtgttggtatcagtggcaatgaaggcctgcaggcagctaattcctctgactactccatagctcagttcaaatatttgaagaatttactgatgattcatggtgcctggaactataacagagtctccaagtgcatcttatactgcttctacaagaatatagtgctctatattatcgagaacactgacattcaagcaaataacaatttatacagtttatttacatagatttatcaagataccaggaatttaaagccactgccagcaataaatctgcttataaaaagttaattttataaaataagaatgtccaacttgtcgctttttaaatctaaattgacagcaataaagtaga

SEQ ID NO: 1934 - DNA, 324 bp, Homo sapiens
  source 1..324: mol_type = unassigned DNA; mol_type = unassigned DNA
cattttagaatgcttgaatatattttgtgatacaatcatgaaatctgtgatgtcttacttagaaatgcaggccaaattacatttaatttattgagggtttggagacataacactttactcataaagtacattaacaaatagatcagtgggctggtataaatgaactgggtttactctattttttacccccttcaggcagaactcacagtttggagatgaaaaaacatttagtgattcatcattgctggaaaatctccaaaataatcatccaactgcacctataatatgtgaatttcttacaatgatggcagtctgtcacacagc

SEQ ID NO: 1935 - DNA, 537 bp, Homo sapiens
  source 1..537: mol_type = unassigned DNA; mol_type = unassigned DNA
ttaaatataatgtgcaaatctattcatttgcattatcttgaagaccattactgattgttgtcaggaaattgcttttgggtccttctggctgaaaagctaatccgtgagttgtcatgcatgggttctgcctcacagcatcttgctgttagaatgaaaatcatcaagaagctaagtaactattactttgtctagaacgaaaggctttagtgagtctgagcatttaaataagttattattatgcttttcttcccgcactaaatctttgtgcttctcaactccaaactacagtgagccccaagccatgtgctacattgaaacatccaacttagatggtgaaacaaacttgaaaattagacagggcttaccagcaacatcagatatcaaagacgttgacagtttgatgaggatttctggcagaattgagtgtgaaagtccaaacagacatctctacgattttgttggaaacataaggcttgatggacatggcaccgttccactgggagcagatcagattcttcttcgaggagctcagttgag

SEQ ID NO: 1936 - DNA, 326 bp, Homo sapiens
  source 1..326: mol_type = unassigned DNA; mol_type = unassigned DNA
aaacgacataaagctgataatgcagtgaacaagaaacaaacgcaagttttgagaaatggtgcttgggaaattgtccactgggaaaagtgagccccaagccatgtgctacattgaaacatccaacttagatggtgaaacaaacttgaaaattagacagggcttaccagcaacatcagatatcaaagacgttgacagtttgatgaggatttctggcagaattgagtgtgaaagtccaaacagacatctctacgattttgttggaaacataaggcttgatggacatggcaccgttccactgggagcagatcagattcttcttcgaggag

SEQ ID NO: 1937 - DNA, 2238 bp, Homo sapiens
  source 1..2238: mol_type = unassigned DNA; mol_type = unassigned DNA
agctctgcgggcgccgccaccttcgccgccaccgctgcctttctcctcctcctgtcggcgtgcgggggccgcgcccggcggcagctctgccctaggtgggcggcggcgcggcccaggctgcagctgagcgctctgcgcggcgcagccgggtctcccgcgtgtaccacgccgtgacaggtgcagagtccgggctgaggacccacctgcagccgccgccgcgatgcccaccatgcggaggaccgtgtcggagatccgctcgcgcgccgaaggttatgagaagacagatgatgtttcagagaagacctcactggctgaccaggaggaagtaaggactattttcatcaaccagccccagctgacaaaattctgcaataaccatgtcaggtaagaactaccaaagaatgccatgagaccagccagcagagcagagctggttaggtcaaaatgaaaatgcttgcaaagagctttcagtgcagtcagttaatatttgagagctccctgttggcagtgtgaataggctgtttccccatcttctctcccatagagaaatattcataagaatctggaaatagcgaggagcagaaagaataagcacccatcctctgccgatgctgcatagatattgaataatgaaagctgcttatgtgtaaatgcctctgtcctaaacctgttaatagagcgatgcgttactggttttggttagcaagttttaacattttagaagaggtctttgcaattctgcaccaagaattccttctggttatatagtctttaagtattggtttttgatagttgtgaagtttagtatggtgtggaggaatggagggctgtgcgaattacttcactgcactgttgtgttttcattccaacaataatgtaaaaagtatctgtgtaagcactggccacttatgcggcttctgggaccacataaacaccttcaataccaataaagtgtttctccagtggcagagttaactagatttgagaagtgcccacttaatatgtacaatttcaaattctagaggaacatttctcaatttgggtaatgtggcatgtgtctgctttaatctcctttctatttgataaacaagaggaagatctgggtgtttctaagacctaagtagtgatatcttactgatgtgggcatatctggtgtgtttagtgtggatttctagccatgttcctggagtggcagtgaagaaaattcaaacagaaccccagagatctccctgaaattatccaggaaaggcatctctgtttacagtgtctggtcaaattgctcaaattgctgatttcggggttcttttggcaagattttattttctagtcacacgttgtactctgtcttatggagggctggagccctttaactccaaagttgctcttctttgtaagctacttctagtaatgttaagcagaataattggccaaataggacaaaagattatgcaaaaaaaaaaaaatctgtggtattcatgctttaccatttatttaaccttttcactctttttcatttaggttaatgaccctttgcaatattctcccaatttgaaacagccggcaaatgttccttatctaactttttatatgttagtaacagaactttgtaagtgtgggtgctaattatggagaagttttatgctacttttcatttttgttttctagcactgcaaaatacaacataatcacattccttccaagatttctctactctcagttcagaagagctgctaattcattttttctctttattgcactgctgcaggtaaagtcacgtcataaaaccttgtcaaatgttcaggtactaataaatgttaagcccgtgaccaatcccctgaggtttatgtaaatgccgagagataagctggttttggtggacatttctggctcctgctgcaagcagtgttggaatccactaccttttccagccttttgattcatttttatcagcttattttgggtgttctataaatttgatgtggcaaggactgttcattttgggtggtaaaggggatgggacgttttcttaaaatgctaattttcatagtaaaagtatcaactctgaaccttagaatgcaagaagttaaatcttgtgcttctctttgtatttaaattagttgtagtcagaaaaagttttagtttattaaaaagtagcatattgaacatatgcttaaatttgaaaaaatattttcattgaacttgaaaataaaaaatttttaaaacaccacaaaacacaag

SEQ ID NO: 1938 - DNA, 5818 bp, Homo sapiens
  source 1..5818: mol_type = unassigned DNA; mol_type = unassigned DNA
atgagtacagaaagagactcagaaacgacatttgacgaggattctcagcctaatgacgaagtggttccctacagtgatgatgaaacagaagatgaacttgatgaccaggggtctgctgttgaaccagaacaaaaccgagtcaacagggaagcagaggagaaccgggagccattcagaaaagaatgtacatggcaagtcaaagcaaacgatcgcaagtaccacgaacaacctcactttatgaacacaaaattcttgtgtattaaggagagtaaatatgcgaataatgcaattaaaacatacaagtacaacgcatttacctttataccaatgaatctgtttgagcagtttaagagagcagccaatttatatttcctggctcttcttatcttacaggcagttcctcaaatctctaccctggcttggtacaccacactagtgcccctgcttgtggtgctgggcgtcactgcaatcaaagacctggtggacgatgtggctcgccataaaatggataaggaaatcaacaataggacgtgtgaagtcattaaggatggcaggttcaaagttgctaagtggaaagaaattcaagttggagacgtcattcgtctgaaaaaaaatgattttgttccagctgacattctcctgctgtctagctctgagcctaacagcctctgctatgtggaaacagcagaactggatggagaaaccaatttaaaatttaagatgtcacttgaaatcacagaccagtacctccaaagagaagatacattggctacatttgatggttttattgaatgtgaagaacccaataacagactagataagtttacaggaacactattttggagaaacacaagttttcctttggatgctgataaaattttgttacgtggctgtgtaattaggaacaccgatttctgccacggcttagtcatttttgcaggtgctgacactaaaataatgaagaatagtgggaaaaccagatttaaaagaactaaaattgattacttgatgaactacatggtttacacgatctttgttgttcttattctgctttctgctggtcttgccatcggccatgcttattgggaagcacaggtgggcaattcctcttggtacctctatgatggagaagacgatacaccctcctaccgtggattcctcattttctggggctatatcattgttctcaacaccatggtacccatctctctctatgtcagcgtggaagtgattcgtcttggacagagtcacttcatcaactgggacctgcaaatgtactatgctgagaaggacacacccgcaaaagctagaaccaccacactcaatgaacagctcgggcagatccattatatcttctctgataagacggggacactcacacaaaatatcatgacctttaaaaagtgctgtatcaacgggcagatatatggggaccatcgggatgcctctcaacacaaccacaacaaaatagagcaagttgattttagctggaatacatatgctgatgggaagcttgcattttatgaccactatcttattgagcaaatccagtcagggaaagagccagaagtacgacagttcttcttcttgctcgcagtttgccacacagtcatggtggataggactgatggtcagctcaactaccaggcagcctctcccgatgaaggtgccctggtaaacgctgccaggaactttggctttgccttcctcgccaggacccagaacaccatcaccatcagtgaactgggcactgaaaggacttacaatgttcttgccattttggacttcaacagtgaccggaagcgaatgtctatcattgtaagaaccccagaaggcaatatcaagctttactgtaaaggtgctgacactgttatttatgaacggttacatcgaatgaatcctactaagcaagaaacacaggatgccctggatatctttgcaaatgaaactcttagaaccctatgcctttgctacaaggaaattgaagaaaaagaatttacagaatggaataaaaagtttatggctgccagtgtggcctccaccaaccgggacgaagctctggataaagtatatgaggagattgaaaaagacttaattctcctgggagctacagctattgaagacaagctacaggatggagttccagaaaccatttcaaaacttgcaaaagctgacattaagatctgggtgcttactggagacaaaaaggaaactgctgaaaatataggatttgcttgtgaacttctgactgaagacaccaccatctgctatggggaggatattaattctcttcttcatgcaaggatggaaaaccagaggaatagaggtggcgtctacgcaaagtttgcacctcctgtgcaggaatctttttttccacccggtggaaaccgtgccttaatcatcactggttcttggttgaatgaaattcttctcgagaaaaagaccaagagaaataagattctgaagctgaagttcccaagaacagaagaagaaagacggatgcggacccaaagtaaaaggaggctagaagctaagaaagagcagcggcagaaaaactttgtggacctggcctgcgagtgcagcgcagtcatctgctgccgcgtcacccccaagcagaaggccatggtggtggacctggtgaagaggtacaagaaagccatcacgctggccatcggagatggggccaatgacgtgaacatgatcaaaactgcccacattggcgttggaataagtggacaagaaggaatgcaagctgtcatgtcgagtgactattcctttgctcagttccgatatctgcagaggctactgctggtgcatggccgatggtcttacataaggatgtgcaagttcctacgatacttcttttacaaaaactttgcctttactttggttcatttctggtactccttcttcaatggctactctgcgcagactgcatacgaggattggttcatcaccctctacaacgtgctgtacaccagcctgcccgtgctcctcatggggctgctcgaccaggatgtgagtgacaaactgagcctccgattccctgggttatacatagtgggacaaagagacttactattcaactataagagattctttgtaagcttgttgcatggggtcctaacatcgatgatcctcttcttcatacctcttggagcttatctgcaaaccgtagggcaggatggagaggcaccttccgactaccagtcttttgccgtcaccattgcctctgctcttgtaataacagtcaatttccagattggcttggatacttcttattggacttttgtgaatgctttttcaatttttggaagcattgcactttattttggcatcatgtttgactttcatagtgctggaatacatgttctctttccatctgcatttcaatttacaggcacagcttcaaacgctctgagacagccatacatttggttaactatcatcctggctgttgctgtgtgcttactacccgtcgttgccattcgattcctgtcaatgaccatctggccatcagaaagtgataagatccagaagcatcgcaagcggttgaaggcggaggagcagtggcagcgacggcagcaggtgttccgccggggcgtgtcaacgcggcgctcggcctacgccttctcgcaccagcggggctacgcggacctcatctcctccgggcgcagcatccgcaagaagcgctcgccgcttgatgccatcgtggcggatggcaccgcggagtacaggcgcaccggggacagctgatcccttacccccaggctgggatgcggccacaaagcacgtctatttttttatgaaagactctcaggactttgtgtgtgtgtgtgaattgcattcatcacaaagatattgaagacaataaataatctttataacaaactccttgggttggactattaaacaatagcagagccaagaaataggacttttaaaagtcctattattcggccgggcgtggtggctcaggtctgtaatcccagcactttaggaggctgaggaggggagatcacctgaggccaggagttcgagaccagcccagccaacatggtgaaaccctgtctctaccataaattaaaaattagccgggcttggtggtgggcacccgtaatcccacctatttgagaagctgaagcagaagaatcgcttgaacctgggagatggaggttacagtgagccgagattgcgccactgcactccagcctgggtgacagagcaagactctgtcttaagaaaaatttaaaaataggccgggcatggtggctcatgcctgtcatcctagcactttgggaggccaaggcaggtggatcacttgaggtcaggagaccagcccggccaacatggtgaaaccccatctctactaaaaatacaaaaattagctggaaatcgcttgaacctgggaggtggaggttccagtgagccgagatcgtggcactgcactccaacctgagcaacagagtgagacaccagctcaaaaaaaattttttaataataataaaagtcctattattcaactggttatgtacattatggttgaaagggaacgttttaatccagtctcaatccagggcaatagaattacaaagcatgttgtatttcagttcaaatggtattgtattataaaattacagttacattttcctttcggtgatcttcagcataatttcccagaggcccctttttcctccctataggccatcttattaacagattttaaaatttatagtaatgacaaatgacttatcagtgttcatcatctgaaagctaagtggttcgttcaatcactttttcaaagttgatagtagattgcatggtttcatgtttcctcatattggtttattaattctatttaatcaaggaaaataacttcagattccataaagtttcagtttatttttagtttactactaggtgagatagcacattacatacttttactatcaaatattattttagcagcttcccatagtaccaaatgatttgattccctactctcattttttaaagcatataaatatttatgggcttaaaaagggggtttttaaaaactgaggatatcagtaataaattgcagaatattttgcaaagctttcttttggaaagcaaacttttgtgcctgcctatatgcaaagtattttatcagggacttgaacaaagacctcactctttttcacttgtcttatgtcgagagaaaaggttattggcagccacattcctaagactggggaatggtgtgtccttttaaatttgaagataactttaggtaattatggaaactcctcaaagaggagaaagtaatttttttccagacatttttctcattctgtgtctttcacacactagtttccatagttcgagaattctgttttttaccattgggctgtgaatgttcacaatatcagtcctgttgaattcctatgaggtaatcacaatgtgtatatgttcattttctaggtatgataaaagaatgtatggctttttattctgtggaagtaaaatcctgaacgtttacaacttttccttaacttgtaaataaaaaattgtaagttttttctttttttacagaaaacttagcttgtgtaattctgttagtttcagatttctctcctgtttttgcaaattgtgggaaagattgacaatgcaaatgtgtcaaagacatactgttgggtgcaatattaacaattttaaatgcaaatttctttggataaattatttctatattctgtaaatctgagatttaatgtatattttgtttaaaaaaatgatttagtaaaatctttgaaaagtatgatcttctaaagtatttaaa

SEQ ID NO: 1939 - DNA, 489 bp, Homo sapiens
  source 1..489: mol_type = unassigned DNA; mol_type = unassigned DNA
ggggattgggtttcaacatatgaatttggagggggattctaacattcagaccatagcagtaaataagcagcttgctctcgtctgtacaatgagaataaaatctctactacttgccactcgtatccgagctctctacggaaaataatcttctgtcttcctagcgtggaagtgattcgtcttggacagagtcacttcatcaactgggacctgcaaatgtactatgctgagaaggacacacccgcaaaagctagaaccaccacactcaatgaacagctcgggcagatccattatatcttctctgataagacggggacactcacacaaaatatcatgacctttaaaaagtgctgtatcaacgggcagatatatggggaccatcgggatgcctctcaacacaaccacaacaaaatagagcaagttgattttagctggaatacatatgctgatgggaagcttgcattttatgaccactatcttattgagcaaatc

SEQ ID NO: 1940 - DNA, 540 bp, Homo sapiens
  source 1..540: mol_type = unassigned DNA; mol_type = unassigned DNA
gtgctaaagtaaaccattaaaagcacatgcatttgcaaattaccaccaaatagaatggattcaagagtaccttataatgtacatggcaagtcaaagcaaacgatcgcaagtaccacgaacaacctcactttatgaacacaaaattcttgtgtattaaggagagtaaatatgcgaataatgcaattaaaacatacaagtacaacgcatttacctttataccaatgaatctgtttgagcagtttaagagagcagccaatttatatttcctggctcttcttatcttacaggcagttcctcaaatctctaccctggcttggtacaccacactagtgcccctgcttgtggtgctgggcgtcactgcaatcaaagacctggtggacgatgtggctcgccataaaatggataaggaaatcaacaataggacgtgtgaagtcattaaggatggcaggttcaaagttgctaagtggaaagaaattcaagttggagacgtcattcgtctgaaaaaaaatgattttgttccagctgacattctcctgctgt

SEQ ID NO: 1941 - DNA, 532 bp, Homo sapiens
  source 1..532: mol_type = unassigned DNA; mol_type = unassigned DNA
cagggctggggccgggcgggcggcggcagcggccaggtgcgcagcgagcgctccgagcggcgcgcaccaggcggatgccccagccggggcccagcgaacgccaggtagttccaatttgccagcagaatgagtacagaaagagactcagaaacgacatttgacgaggattctcagcctaatgacgaagtggttccctacagtgatgatgaaacagaagatgaacttgatgaccaggggtctgctgttgaaccagaacaaaaccgagtcaacagggaagcagaggagaaccgggagccattcagaaaagaataatgcaattaaaacatacaagtacaacgcatttacctttataccaatgaatctgtttgagcagtttaagagagcagccaatttatatttcctggctcttcttatcttacaggcagttcctcaaatctctaccctggcttggtacaccacactagtgcccctgcttgtggtgctgggcgtcactgcaatcaaagacctggtggacgatgtggctcgccataaa

SEQ ID NO: 1942 - DNA, 527 bp, Homo sapiens
  source 1..527: mol_type = unassigned DNA; mol_type = unassigned DNA
gactccatctcaaaaaataaagcagcaaggttcaggaactcaggcttattttaaaaaaaagaaaatgaagaagaagaaagaaggaaaaggggctggatatggtagctcatgcctgtaatcccagtattttgtgaggccaaggagggaggattgcttgacctcaggagttcaagagcatcctgagcaaactagcaagacctcatctctactaaaaaccaaaaaaattagctgggtgtgatggtgcacacctttagtctcagctacttaggaggctgaggcaggaggatcacttgagcctgggagattgaggctgcagtgagcttgatcaccccagtgtactccagcctaggtgacagagcaagaacttgaatcaacaaccaaaaaaaaaaaaaaaaaggaagaaaaaagaagcaaaccacctcatgtgtatgccacactcacaggaaattaaagatgtgaacaccaaaagcaggtagttccaatttgccagcagaatgagtacagaaagagactcagaaacgacattt

SEQ ID NO: 1943 - DNA, 1701 bp, Homo sapiens
  source 1..1701: mol_type = unassigned DNA; mol_type = unassigned DNA
agttggcgcgggccgcgggcgaggcggggccgcgcgcggggtcccctcctcctgccggtcaggtcccctcaggagcgccgggcgcagtctgcgcctcccgctccccgcctccggccgggtccgggacgccgcggctgtggggtcggcccgctaaggacaaggtcgggagactgggtggcgatgcccgagtgcgactggaggcagccgagcggaggcgacggcggttgggatctgtccctcctgaccggggagcgggactcggacgggcgccgggatttcgccagggaataaaaatgttcttcaaatgtttcttgaggatagaagattgatagttgggggaagaaatgcagaagcaaatatagtatcaaaagtggtacttcagttctcttagcattgattccagtcttctgtttccatttgaaaagaataaagcactcagaataacaagccattccttccttacacaggttaacagaaccttctggatatttaacagatggcccaattaactataaatataaaactaaatgtacttggctcattgaaggctatccaaatgcagtgttaagattaagattcaatcattttgctacagaatgtagctgggatcatatgtatgtttatgatggagattcaatatatgcacctttaatagctgtacttagtggtttgatagtccctgaaataaggggcaatgaaactgtgcctgaagttgttactacatctggctatgcactgttacatttttttagtgatgctgcgtataatctaactggtttcaacattttctattcaatgtagaaattggtaaccagagaatttttcaccagaaatattataaatatccttgaatcagcaatttattatggaatttatttatcctacaacgtatccaaaatcaattcttgtcctaacaattgctctggtcatgggaagtgtacaactagtgtctctgttccaagtcaagtatattgtgaatgtgataaatactggaagggtgaagcttgtgatattccttactgtaaagccaattgcggcagtccagatcacggttactgtgacctgactggagaaaaattatgtgtctgcaatgatagttggcaaggtcctgattgttctttgaatgttccctctactgagtcttactggattctgccaaacgttaaacccttcagtccttctgtaggtcgggcttcacataaagcagttttacacgggaaatttatgtgggtgattggtggatatacttttaactacagttcttttcaaatggtcctaaattacaatttagaaagcagtatatggaatgtaggaactccatcaaggggacctctccagagatatggacactctcttgctttatatcaggaaaacatctttatgtatggaggcagaattgaaacaaatgatggcaatgtcacagatgaattatgggtttttaacatacatagtcagtcatggagtacaaaaactcctactgttcttggacatggtcagcagtatgctgtggagggacattcagcacatattatggagttggatagtagagatgttgtcatgatcataatatttggatattctgcaatatatggttatacaagcagcatacaggaataccatatctgtgagttacttaaaaattgtaatttctttattgattgggaatgtttttctctttaataaaatcttcatatgaattta

SEQ ID NO: 1944 - DNA, 1818 bp, Homo sapiens
  source 1..1818: mol_type = unassigned DNA; mol_type = unassigned DNA
agttggcgcgggccgcgggcgaggcggggccgcgcgcggggtcccctcctcctgccggtcaggtcccctcaggagcgccgggcgcagtctgcgcctcccgctccccgcctccggccgggtccgggacgccgcggctgtggggtcggcccgctaaggacaaggtcgggagactgggtggcgatgcccgagtgcgactggaggcagccgagcggaggcgacggcggttgggatctgtccctcctgaccggggagcgggactcggacgggcgccggtgaggaggaggagaagcggcggcggagaggttttctgcggccggaattcccttcaacagcatccctgtcggcgcccgcgagcgcagtctcgccgggcaggggcgccggggaagatggagactgggggccgggcccgcactggtaccccgcagccagcggccccgggggtgtggagggctcggccggcgggcggcggcggcgggggcgcctcctcctggctgctggacgggaacagctggctgctgtgctatggcttcctctacctggcgctctacgcgcaggtgtcccagtccaagccgtgcgagaggaccggctcctgcttctcgggccgctgtgtcaactccacctgcctctgcgacccgggctgggtgggggaccagtgccagcactgccagggcaggttcaagttaacagaaccttctggatatttaacagatggcccaattaactataaatataaaactaaatgtacttggctcattgaaggctatccaaatgcagtgttaagattaagattcaatcattttgctacagaatgtagctgggatcatatgtatgtttatgatggagattcaatatatgcacctttaatagctgtacttagtggtttgatagtccctgaaataaggggcaatgaaactgtgcctgaagttgttactacatctggctatgcactgttacatttttttagtgatgctgcgtataatctaactggtttcaacattttctattcaatcaattcttgtcctaacaattgctctggtcatgggaagtgtacaactagtgtctctgttccaagtcaagtatattgtgaatgtgataaatactggaagggtgaagcttgtgatattccttactgtaaagccaattgcggcagtccagatcacggttactgtgacctgactggagaaaaattatgtgtctgcaatgatagttggcaaggtcctgattgttctttgaatgttccctctactgagtcttactggattctgccaaacgttaaacccttcagtccttctgtaggtcgggcttcacataaagcagttttacacgggaaatttatgtgggtgattggtggatatacttttaactacagttcttttcaaatggtcctaaattacaatttagaaagcagtatatggaatgtaggaactccatcaaggggacctctccagagatatggacactctcttgctttatatcaggaaaacatctttatgtatggaggcagaattgaaacaaatgatggcaatgtcacagatgaattatgggtttttaacatacatagtcagtcatggagtacaaaaactcctactgttcttggacatggtcagcagtatgctgtggagggacattcagcacatattatggagttggatagtagagatgttgtcatgatcataatatttggatattctgcaatatatggttatacaagcagcatacaggaataccatatctgtgagttacttaaaaattgtaatttctttattgattgggaatgtttttctctttaataaaatcttcatatgaatttagtcaaaa

SEQ ID NO: 1945 - DNA, 932 bp, Homo sapiens
  source 1..932: mol_type = unassigned DNA; mol_type = unassigned DNA
cgcgggccgcgggcgaggcggggccgcgcgcggggtcccctcctcctgccggtcaggtcccctcaggagcgccgggcgcagtctgcgcctcccgctccccgcctccggccgggtccgggacgccgcggctgtggggtcggcccgctaaggacaaggtcgggagactgggtggcgatgcccgagtgcgactggaggcagccgagcggaggcgacggcggttgggatctgtccctcctgaccggggagcgggactcggacgggcgccggttaacagaaccttctggatatttaacagatggcccaattaactataaatataaaactaaatgtacttggctcattgaaggctatccaaatgcagtgttaagattaagattcaatcattttgctacagaatgtagctgggatcatatgtatgtttatgatggagattcaatatatgcacctttaatagctgtacttagtggtttgatagtccctgaaataaggggcaatgaaactgtgcctgaagttgttactacatctggctatgcactgttacatttttttagtgatgctgcgtataatctaactggtttcaacattttctattcaatcaattcttgtcctaacaattgctctggtcatgggaagtgtacaactagtgtctctgttccaagtcaagtatattgtgaatgtgataaatactggaagggtgaagcttgtgatattccttactgtaaagccaattgcggcagtccagatcacggttactgtgacctgactggagaaaaattatgtgtctgcaatgatagttggcaaggtcctgattgttctttgaatgttccctctactgagtcttactggattctgccaaacgttaaacccttcagtccttctgtaggtcgggcttcacataaagcagttttacacgggaaatttatgtgggtgat

SEQ ID NO: 1946 - DNA, 1583 bp, Homo sapiens
  source 1..1583: mol_type = unassigned DNA; mol_type = unassigned DNA
cgctccccgcctccggccgggtccgggacgccgcggctgtggggtcggcccgctaaggacaaggtcgggagactgggtggcgatgcccgagtgcgactggaggcagccgagcggaggcgacggcggttgggatctgtccctcctgaccggggagcgggactcggacgggcgccggtgaggaggaggagaagcggcggcggagaggttttctgcggccggaattcccttcaacagcatccctgtcggcgcccgcgagcgcagtctcgccgggcaggggcgccggggaagatggagactgggggccgggcccgcactggtaccccgcagccagcggccccgggggtgtggagggctcggccggcgggcggcggcggcgggggcgcctcctcctggctgctggacgggaacagctggctgctgtgctatggcttcctctacctggcgctctacgcgcaggtgtcccagtccaagccgtgcgagaggaccggctcctgcttctcgggccgctgtgtcaactccacctgcctctgcgacccgggctgggtgggggaccagtgccagcactgccagggcaggttcaagttaacagaaccttctggatatttaacagatggcccaattaactataaatataaaactaaatgtacttggctcattgaaggctatccaaatgcagtgttaagattaagattcaatcattttgctacagaatgtagctgggatcatatgtatgtttatgatggagattcaatatatgcacctttaatagctgtacttagtggtttgatagtccctgaaataaggggcaatgaaactgtgcctgaagttgttactacatctggctatgcactgttacatttttttagtgatgctgcgtataatctaactggtttcaacattttctattcaatcaattcttgtcctaacaattgctctggtcatgggaagtgtacaactagtgtctctgttccaagtcaagtatattgtgaatgtgataaatactggaagggtgaagcttgtgatattccttactgtaaagccaattgcggcagtccagatcacggttactgtgacctgactggagaaaaattatgtgtctgcaatgatagttggcaaggtcctgattgttctttgaatgttccctctactgagtcttactggattctgccaaacgttaaacccttcagtccttctgtaggtcgggcttcacataaagcagttttacacgggaaatttatgtgggtgattggtggatatacttttaactacagttcttttcaaatggtcctaaagaaaacatctttatgtatggaggcagaattgaaacaaatgatggcaatgtcacagatgaattatgggtttttaacatacatagtcagtcatggagtacaaaaactcctactgttcttggacatggtcagcagtatgctgtggagggacattcagcacatattatggagttggatagtagagatgttgtcatgatcataatatttggatattctgcaatatatggttatacaagcagcatacaggaataccatatctgtgagttacttaaaaattgtaatttctttattgat

SEQ ID NO: 1947 - DNA, 8479 bp, Homo sapiens
  source 1..8479: mol_type = unassigned DNA; mol_type = unassigned DNA
ggacgggcgccggtgaggaggaggagaagcggcggcggagaggttttctgcggccggaattcccttcaacagcatccctgtcggcgcccgcgagcgcagtctcgccgggcaggggcgccggggaagatggagactgggggccgggcccgcactggtaccccgcagccagcggccccgggggtgtggagggctcggccggcgggcggcggcggcgggggcgcctcctcctggctgctggacgggaacagctggctgctgtgctatggcttcctctacctggcgctctacgcgcaggtgtcccagtccaagccgtgcgagaggaccggctcctgcttctcgggccgctgtgtcaactccacctgcctctgcgacccgggctgggtgggggaccagtgccagcactgccagggcaggttcaagttaacagaaccttctggatatttaacagatggcccaattaactataaatataaaactaaatgtacttggctcattgaaggctatccaaatgcagtgttaagattaagattcaatcattttgctacagaatgtagctgggatcatatgtatgtttatgatggagattcaatatatgcacctttaatagctgtacttagtggtttgatagtccctgaaataaggggcaatgaaactgtgcctgaagttgttactacatctggctatgcactgttacatttttttagtgatgctgcgtataatctaactggtttcaacattttctattcaatcaattcttgtcctaacaattgctctggtcatgggaagtgtacaactagtgtctctgttccaagtcaagtatattgtgaatgtgataaatactggaagggtgaagcttgtgatattccttactgtaaagccaattgcggcagtccagatcacggttactgtgacctgactggagaaaaattatgtgtctgcaatgatagttggcaaggtcctgattgttctttgaatgttccctctactgagtcttactggattctgccaaacgttaaacccttcagtccttctgtaggtcgggcttcacataaagcagttttacacgggaaatttatgtgggtgattggtggatatacttttaactacagttcttttcaaatggtcctaaattacaatttagaaagcagtatatggaatgtaggaactccatcaaggggacctctccagagatatggacactctcttgctttatatcaggaaaacatctttatgtatggaggcagaattgaaacaaatgatggcaatgtcacagatgaattatgggtttttaacatacatagtcagtcatggagtacaaaaactcctactgttcttggacatggtcagcagtatgctgtggagggacattcagcacatattatggagttggatagtagagatgttgtcatgatcataatatttggatattctgcaatatatggttatacaagcagcatacaggaataccatatctcatcaaacacttggcttgttccagaaactaaaggagctattgtacaaggtggatatggccatactagtgtgtatgatgaaataacaaagtccatttatgttcatggagggtataaagcattgccagggaacaaatatggattggttgatgatctttataaatatgaagttaacactaagacttggactattttgaaagaaagtgggtttgccagataccttcattcagctgttcttatcaatggagctatgcttatttttggaggaaatacccataatgacacttccttgagtaacggtgcaaaatgtttttctgccgatttcctggcatatgacatagcttgtgatgaatggaaaatactaccaaaaccaaatcttcatagagatgtcaacagatttggacactctgcagtagtcattaacgggtccatgtatatatttgggggattttctagtgtactccttaatgatatccttgtatacaagcctccaaattgcaaggctttcagagatgaagaactttgtaaaaatgctggtccagggataaaatgtgtttggaataaaaatcactgtgaatcttgggaatctgggaatactaataatattcttagagcaaagtgccctcctaaaacagctgcttctgatgacagatgttacagatatgcagattgtgccagctgtactgccaatacaaatgggtgccaatggtgtgatgacaagaaatgcatttcggcaaatagtaactgcagtatgtctgtcaagaactacaccaaatgtcatgtgagaaatgagcagatttgtaacaaacttaccagctgtaaaagctgttcactaaacttgaattgccagtgggatcagagacagcaagaatgccaggctttaccagctcatctttgtggagaaggatggagtcatattggggatgcttgtcttagagtcaattccagtagagaaaactatgacaatgcaaaactttattgctataatcttagtggaaatcttgcttcattaacaacctcaaaagaagtagaatttgttctggatgaaatacagaagtatacacaacagaaagtatcaccttgggtaggcttgcgcaagatcaatatatcctattggggatgggaagacatgtctccttttacaaacacaacactacagtggcttcctggcgaacccaatgattctgggttttgtgcatatctggaaagggctgcagtggcaggcttaaaagctaatccttgtacatctatggcaaatggccttgtctgtgaaaaacctgttgttagtccaaatcaaaatgcgaggccgtgcaaaaagccatgctctctgaggacatcatgttccaactgtacaagcaatggcatggagtgtatgtggtgcagcagtacgaaacgatgtgttgactctaatgcctatatcatctcttttccatatggacaatgtctagagtggcaaactgccacctgctcccctcaaaattgttctggattgagaacctgtggacagtgtttggaacagcctggatgtggctggtgcaatgatcctagtaatacaggaagaggacattgcattgaaggttcttcacggggaccaatgaagcttattggaatgcaccacagtgagatggttcttgacaccaatctttgccccaaagaaaagaactatgagtggtcctttatccagtgtccagcttgccagtgtaatggacatagcacttgcatcaataataatgtgtgcgaacagtgtaaaaatctcaccacaggaaagcagtgtcaagattgtatgccaggttattatggagatccaaccaatggtggacagtgcacagcttgtacatgcagtggccatgcaaatatctgtcatctgcacacaggaaaatgtttctgcacaactaaaggaataaaaggtgaccaatgccaattatgtgactctgaaaatcgctatgttggtaatccacttagaggaacatgttattacagccttttgattgattatcaatttaccttcagcttattacaggaagatgatcgccaccatactgccataaactttatagcaaacccagaacagtcgaacaaaaatctggatatatcaattaatgcatcaaacaactttaatctcaacattacgtggtctgtcggttcaacagctggaacaatatctggggaagagacttctatagtttccaagaataatataaaggaatacagagatagtttttcctatgaaaaatttaactttagaagcaatcctaacattacattctatgtgtacgtcagcaacttttcctggcctattaaaatacagattgcattctcacaacacaatacaatcatggaccttgtgcagttttttgtcaccttcttcagttgtttcctatccttattgctggtggctgctgtggtatggaagatcaaacaaacttgttgggcttctcgacggagagagcaactgcttcgagaacgacagcagatggccagccgtccctttgcttctgttgatgtagctctggaagtgggagctgaacaaacagagtttctgcgagggccattagagggggcacccaagccaattgccattgaaccatgtgctgggaacagagctgctgttctgactgtgtttctttgtctaccacgaggatcatcaggtgcccctccccctgggcagtcaggccttgcaattgccagtgccctaatagatatttcacaacagaaagcttcagatagtaaagataagacttctggagtccggaatcgaaaacacctttcaacacgtcaaggaacttgtgtctgagaaatggaaaccgctcctgtatattctgtactgttttacttcgggcttctgttaaagctgttctatggccttggattttatggaggcagatctctgtatcatccagagcctgagtacagtttccttccaaatggacaatgacccaggtggccaaagaatgttcatgagttttataaaagtattgatggtcacaggtgataaagtcagtttttaccactatcttaggcttattatagctaacattaaattactctggaaaaagatgtatattgtttcttaatgaagatgaaaaatatgtaattcatataaatcaactgtttatatcccaagacttgaaagaaagacattttttaatgcctgaatgatgagaattgtacagtttttgcctcataagcaaacttgaatcacctgtgtatgaacagggaatgaacacattgcaatggctttaaatgctcttttatctcgttgtaaaggtaaggcaagattttgatgtagtaggatgtaggtaatgtatttaaatatttcatatgaccatatcgtgtccaaactcagtctgagaatgtgacagctttccgcctaactagaatgcagaccagaatgagttcaactcattctgtgcaacttcacagggggtttattagaatgctcagtgtagaggacattcctgtcatccatgccaactacctaactcgttatcagagctgatagagcatggaaaagtctgtccagcgatcagttgttcccctccttccaaaaacagcctccaataccacaacctgaaaagagccgaaatggttattttacagcatacaagcttctgctccagtatgataatttttaattgcctaagaatcattggatcagacctaaatgatccatctgcatttttataagaatggatctttctttgcccttcctctcctagctgctagattttaactaccttttacaaatgttacaaaatgtattttagaggcgacatctctcaagatgacctgagttccttcctgccaactgttccacctagaatacaagtagagaagagcactggctggcaagcatcaacaggagtcttcttcccaacacgagcgcatccatgtcctgagaaaaagtctgtggtttagaaaatatgtccatggttgcccacagtcagcacactcttagtgactcaaaattctgaattatggcagaaaggaaaaataaaacatacttcacattagaacacagaatcatttacatcctaatactgaccacagttcactaaagctcagtagcattaacagatatagtttggaattgcagtttcctcacttcagggtgacaagatatgtataacagtgacagaaatctccaaagctgctgtatatgatatagctttgttaaatatgaaggtcctttaaatacaattgatgtttagtactatatatgtacttttcacattctttggatttctggaaggttatgacactttactgtttacagctaatgcatagttacttgcatgccatggttgtacagtagcagactatgaccctattgtgatattaagtgtttatttcataatgccatttatacatagctgaatttgatgaggattgaatgtcatatataagaggaatgatcatacaatatgtagttgcatcttatataagatttctaggttgcatctaaccatgactatgtcattattttgataattaggcatttatgaattatagtatatattcctcatgttggcatgataattttgctattttccatgcattaaaaataagacaaattcttagagtaattttagtaattttatctataatctgtggggtttttttggagggggaggccactggttgtttctacttccctgtgatattttctctctcattaaaggaatgagctaagtttgtaaatatctcctaaaaacaatcaagtaattttattagcttcttttggaccctctaaatattgacttctctcatgaaaaaataaattgatgaaactaatgattacaaagatataatcattttttaaaaagtgattgcccaatgtatttctctaacaattgtcacaagagaaagcataacaataaaaatacaaaaacatacagatttagatgtaaaatctatataagctatatttttagggaggctaagcagatagtattactgtggaagaattatcaagttttattcacctcaaatcccactgggttcttaaaacttgaaaattcaaattgtagagaattatgagacacaatgtgatgtttagttaaagtcatgctatacctttctgggccacatattgctaactctgtggctaattatgcaattaattctcaacgtatcaaagcttttcactggcagtaaattctttgccctcaggtgaagtggattgaaaagacatcaaggatcaaggataatcactttgaatctgttggtttttccccctacattccagacactttaaatttggatgctttcattttttttaaatcaaaccacacaaatatgcagatactttcccagaatttcgcagttaaatggctgatcctcttgaaaactaaccttaatggaattctaaacatttcagtttagaatgactttgaaaaattccttagatttttaggatgttttattctgccaagtatgaaaaaaaaatggttaaatacaatggagttttaaaaattaacctggggattctatttgaactagaaaattcctattggaaaagaatttgcacatacttacagattcagctaataaattttaagaggattaggattctcataattctttaaatgaaaatttgttttagtgatacacagagatgccgtatactatagtgttatgttcagtaggaaaacttcaaatagttcgtatttaaaaaggtaattgatccttgctgtacttcccaacatctcatcttcttttagctgcagtaagatagaggtgactgtatggctacagttcatggtataaggtcatttagggtgcacactggcacacaggctggaaaacgggcactggacccagctttcaggtgtgtggtgctgggtaagtttcacctttgaagcctcagccttccatctgtaaagggcggtaatggtgcccacctttcgaggcattgcgaggctagatggtaacacacagaaagctcccacagtgggaccttgatgcagcgtagctggtattaacaaccgtggggacaccaggccactctttttctaccagttgttttatgaatccacctattaattttcatccatcttttggtcgtaggtaaaggtcaatcaggtttttcaaaaagactccctgaataacttaagttcctgtatttctaagatatagggatttctacaaaacgactttgacatttagtcaataaagacttaaactcttcttaaatctatagttttaggagagtttttcttaaaattactgactgatgacattgagacaagagcatcaatgatcacctttcacgtacaaactaggcaagacagggtcagtgcttacattttgtggttatacatgatacatcttttctcagtgaacataaaactatgatttgaaaggtgtcttatatttaaaaaagattgtaaaatgaaaactgaccaaatgaactaattctacccacctatggtctttttaaatgtcgagtttcaaaacccatttgccgtatactagagtgagcttggaaacttacctgattacaggaattgcttgggttcaggcagattcccactttcacctctagagatttagattcagaaacactggggtaggccctggagagcagtactcttaacaagctcctcagtgcttcttaccattaggcaaattagggaaacactgcattgggtcaaagtgctgcctttaatcgaccattagagggagttctctaaataacaaagttattactctaattcaaaatgctttaaagaattttccaaggaatacaagccatctggttggtgttagttatagcagtgatttcattagagtgtacatttaacattttagttttatcaaaattttttgaaattaagaattagaaccagagctcctatcagtatatatgtacacaggtgtgcatgccagtgttcaaaagattgtgtaaaagttcaagcccgttttagaaagccaacattttatgttataatatgctgttaatcaggactttattaaataaaaacattggctcttccaacccccac

SEQ ID NO: 1948 - DNA, 311 bp, Homo sapiens
  source 1..311: mol_type = unassigned DNA; mol_type = unassigned DNA
atatatggttatacaagcagcatacaggaataccatatctcatcaaacacttggcttgttccagaaactaaaggagctattgtacaaggtggatatggccatactagtgtgtatgatgaaataacaaagtccatttatgttcatggagggtataaagcattgccagggaacaaatatggattggttgatgatctttataaatatgaagttaacactaagacttgggtgcttggtctccttgtggtgaagcagttttgaaggtttcatggtttcattggatggctggttgcaacgtattgtacaaagtggac

SEQ ID NO: 1949 - DNA, 648 bp, Homo sapiens
  source 1..648: mol_type = unassigned DNA; mol_type = unassigned DNA
ctgtgaaaaacctgttgttagtccaaatcaaaatgcgaggccgtgcaaaaagccatgctctctgaggacatcatgttccaactgtacaagcaatggcatggagtgtatgtggtgcagcagtacgaaacgatgtgttgactctaatgcctatatcatctcttttccatatggacaatgtctagagtggcaaactgccacctgctcccctcaaaattgttctggattgagaacctgtggacagtgtttggaacagcctggatgtggctggtgcaatgatcctagtaatacaggaagaggacattgcattgaaggttcttcacggggaccaatgaagcttattggaatgcaccacagtgagatggttcttgacaccaatctttgccccaaagaaaagaactatgagtggtcctttatccagtgtccagcttgtacatgcagtggccatgcaaatatctgtcatctgcacacaggaaaatgtttctgcacaactaaaggaataaaaggtgaccaatgccaattatgtgactctgaaaatcgctatgttggtaatccacttagaggaacatgttattacagccttttgattgattatcaatttaccttcagcttattacaggaagatgatcgccaccatactgccataaactt

SEQ ID NO: 1950 - DNA, 569 bp, Homo sapiens
  source 1..569: mol_type = unassigned DNA; mol_type = unassigned DNA
tgactctaatgcctatatcatctcttttccatatggacaatgtctagagtggcaaactgccacctgctcccctcaaaattgttctggattgagaacctgtggacagtgtttggaacagcctggatgtggctggtgcaatgatcctagtaatacaggaagaggacattgcattgaaggttcttcacggggaccaatgaagcttattggaatgcaccacagtgagatggttcttgacaccaatctttgccccaaagaaaagaactatgagtggtcctttatccagtgtccagcttgtacatgcagtggccatgcaaatatctgtcatctgcacacaggaaaatgtttctgcacaactaaaggaataaaaggtgaccaatgccaattatgtgactctgaaaatcgctatgttggtaatccacttagaggaacatgttattattgcattctcacaacacaatacaatcatggaccttgtgcagttttttgtcaccttcttcagttgtttcctatccttattgctggtggctgctgtggtatggaagatcaaacaaacttgttgggcttctcga

SEQ ID NO: 1951 - DNA, 768 bp, Homo sapiens
  source 1..768: mol_type = unassigned DNA; mol_type = unassigned DNA
tcgaacaaaaatctggatatatcaattaatgcatcaaacaactttaatctcaacattacgtggtctgtcggttcaacagctggaacaatatctggggaagagacttctatagtttccaagaataatataaaggaatacagagatagtttttcctatgaaaaatttaactttagaagcaatcctaacattacattctatgtgtacgtcagcaacttttcctggcctattaaaatacagattgcattctcacaacacaatacaatcatggaccttgtgcagttttttgtcaccttcttcagttgtttcctatccttattgctggtggctgctgtggtatggaagatcaaacaaacttgttgggcttctcgacggagagagacagagtcacactcttgtcacccaggctggcgtgcagtgtggggatctcagctcactgcaacctccgcatcctgggtcaagcaattctccattacaggcgcccactaccacgctcagctaatttttgtattttttagtagagatggggtttcaccatgttggccagactggacctcaggcgatctgcccacctcggcctcctaaagtgctgggattacaggcgtgagccaccgcgccgggcctctatgtgaactctttaaatttagacattttcaacaacattgctgttcatttctgtagtagattaaggtgtgttcatataactgaacttctaaactcgtgatatatagattatttttggcctaaacagtgttttaaaaatttaaaaag

SEQ ID NO: 1952 - DNA, 529 bp, Homo sapiens
  source 1..529: mol_type = unassigned DNA; mol_type = unassigned DNA
tcaggaatcagtatttcatttgatttttaaactgccatcaaggctaagacaaagcccttatgagataaaggccaaactcctcaggatagctctacagggctcttccaaatcagatcccatcctgaccttccagcttcaccttccattgcttctactgcatctcaccctccccaaaccagatctgcttgccaggcgccagacatactgaagacaggacatgacttcaggccttgcaattgccagtgccctaatagatatttcacaacagaaagcttcagatagtaaagataagacttctggagtccggaatcgaaaacacctttcaacacgtcaaggaacttgtgtctgagaaatggaaaccgctcctgtatattctgtactgttttacttcgggcttctgttaaagctgttctatggccttggattttatggaggcagatctctgtatcatccagagcctgagtacagtttccttccaaatggacaatgacccaggtggccaaagaatgttcatgagttttataaaagt

SEQ ID NO: 1953 - DNA, 10602 bp, Homo sapiens
  source 1..10602: mol_type = unassigned DNA; mol_type = unassigned DNA
ctactacagtggcggagccgtacaggacctgtttcactgcagggggatccaaaacaagccccgtggagcagcagccagagcaacagcagccgcaagacattgtttctctccctctgcccccccttccccacgcaaccccagatccatttacactttacagttttacctcacaaaaactactacaagcaccaagctccctgatggaaaggagcatcgtgcatcaagtcaccagggtggtccattcaagctgcagatttgtttgtcatccttgtacagcaatctcctcctccactgccactacagggaagtgcatcacatgtcagcatactggagcatagtgaaagagtctattttgaagcttcaaacttagtgctgctgcagaccaggaacaagagagaaagagtggatttcagcctgcacggatggtcttgaaacacaaatggtttttggtctaggcgttttacactgagattctccactgccaccctttctactcaagcaaaatcttcgtgaaaagatctgctgcaaggaactgatagcttatggttctccattgtgatgaaagcacatggtacagttttccaaagaaattagaccattttcttcgtgagaaagaaatcgacgtgctgttttcatagggtatttctcacttctctgtgaaaggaagaaagaacacgcctgagcccaagagccctcaggagccctccagagcctgtgggaagtctccatggtgaagtataggctgaggctacctgtgaacagtacgcagtgaatgttcatccagagctgctgttggcggattgtacccacggggagatgattcctcatgaagagcctggatcccctacagaaatcaaatgtgactttccgtttatcagactaaaatcagagccatccagacagtgaaacagtcaccgtggaggggggacggcgaaaaatgaaatccaaccaagagcggagcaacgaatgcctgcctcccaagaagcgcgagatccccgccaccagccggtcctccgaggagaaggcccctaccctgcccagcgacaaccaccgggtggagggcacagcatggctcccgggcaaccctggtggccggggccacgggggcgggaggcatgggccggcagggacctcggtggagcttggtttacaacagggaataggtttacacaaagcattgtccacagggctggactactccccgcccagcgctcccaggtctgtccccgtggccaccacgctgcctgccgcgtacgccaccccgcagccagggaccccggtgtcccccgtgcagtacgctcacctgccgcacaccttccagttcattgggtcctcccaatacagtggaacctatgccagcttcatcccatcacagctgatccccccaaccgccaaccccgtcaccagtgcagtggcctcggccgcaggggccaccactccatcccagcgctcccagctggaggcctattccactctgctggccaacatgggcagtctgagccagacgccgggacacaaggctgagcagcagcagcagcagcagcagcagcagcagcagcagcatcagcatcagcagcagcagcagcagcagcagcagcagcagcagcagcagcacctcagcagggctccggggctcatcaccccggggtcccccccaccagcccagcagaaccagtacgtccacatttccagttctccgcagaacaccggccgcaccgcctctcctccggccatccccgtccacctccacccccaccagacgatgatcccacacacgctcaccctggggcccccctcccaggtcgtcatgcaatacgccgactccggcagccactttgtccctcgggaggccaccaagaaagctgagagcagccggctgcagcaggccatccaggccaaggaggtcctgaacggtgagatggagaagagccggcggtacggggccccgtcctcagccgacctgggcctgggcaaggcaggcggcaagtcggttcctcacccgtacgagtccaggcacgtggtggtccacccgagcccctcagactacagcagtcgtgatccttcgggggtccgggcctctgtgatggtcctgcccaacagcaacacgcccgcagctgacctggaggtgcaacaggccactcatcgtgaagcctccccttctaccctcaacgacaaaagtggcctgcatttagggaagcctggccaccggtcctacgcgctctcaccccacacggtcattcagaccacacacagtgcttcagagccactcccggtgggactgccagccacggccttctacgcagggactcaaccccctgtcatcggctacctgagcggccagcagcaagcaatcacctacgccggcagcctgccccagcacctggtgatccccggcacacagcccctgctcatcccggtcggcagcactgacatggaagcgtcgggggcagccccggccatagtcacgtcatccccccagtttgctgcagtgcctcacacgttcgtcaccaccgcccttcccaagagcgagaacttcaaccctgaggccctggtcacccaggccgcctacccagccatggtgcaggcccagatccacctgcctgtggtgcagtccgtggcctccccggcggcggctccccctacgctgcctccctacttcatgaaaggctccatcatccagttggccaacggggagctaaagaaggtggaagacttaaaaacagaagatttcatccagagtgcagagataagcaacgacctgaagatcgactccagcaccgtagagaggattgaagacagccatagcccgggcgtggccgtgatacagttcgccgtcggggagcaccgagcccaggtcagcgttgaagttttggtagagtatcctttttttgtgtttggacagggctggtcatcctgctgtccggagagaaccagccagctctttgatttgccgtgttccaaactctcagttggggatgtctgcatctcgcttaccctcaagaacctgaagaacggctctgttaaaaagggccagcccgtggatcccgccagcgtcctgctgaagcactcaaaggccgacggcctggcgggcagcagacacaggtatgccgagcaggaaaacggaatcaaccaggggagtgcccagatgctctctgagaatggcgaactgaagtttccagagaaaatgggattgcctgcagcgcccttcctcaccaaaatagaacccagcaagcccgcggcaacgaggaagaggaggtggtcggcgccagagagccgcaaactggagaagtcagaagacgaaccacctttgactcttcctaagccttctctaattcctcaggaggttaagatttgcattgaaggccggtctaatgtaggcaagtagaggcagcgtgggggaaaggaaacgtggctctcccttatcatttgtatccagattactgtactgtaggctaaaataacacagtatttacatgttatcttcttaattttaggtttctgttctaaccttgtcattagagttacagcaggtgtgtcgcaggagactggtgcatatgctttttccacgagtgtctgtcagtgagcgggcgggaggaagggcacagcaggagcggtcagggctccaggcatccccggggaagaaaggaacggggcttcacagtgcctgccttctctagcggcacagaagcagccgggggcgctgactcccgctagtgtcaggagaaaagtcccgtgggaagggtcctgcaggggtgcagggttgcacgcatgtgggggtgcacaggcgctgtggcggcgagtgagggtctctttttctctgcctccctctgcctcactctcttgctatcggcatgggccgggggggttcagagcagtgtcctcctggggttcccacgtgcaaaatcaacatcaggaacccagcttcagggcatcgcggagacgcgtcagatggcagatttggaaagttaaccatttaaaagaacatttttctctccaacatattttacaataaaagcaacttttaattgtatagatatatatttccccctatggggcctgactgcactgatatatattttttttaaagagcaactgccacatgcgggatttcatttctgctttttactagtgcagcgatgtcaccagggtgttgtggtggacagggaagcccctgctgtcatggccccacatggggtaaggggggttgggggtgggggagagggagagagcgaacacccacgctggtttctgtgcagtgttaggaaaaccaatcaggttattgcattgacttcactcccaagaggtagatgcaaactgcccttcagtgagagcaacagaagctcttcacgttgagtttgcgaaatctttttgtctttgaactctagtactgtttatagttcatgactatggacaactcgggtgccactttttttttttttcagattccagtgtgacatgaggaattagattttgaagatgagcatatattactatctttaagcatttaaaaatactgttcacactttattaccaagcatcttggtctctcattcaacaagtactgtatctcactttaaactctttggggaaaaaacaaaaacaaaaaaaactaagttgctttctttttttcaacactgtaactacatttcagctctgcagaattgctgaagagcaagatattgaaagtttcaatgtggtttaaagggatgaatgtgaattatgaactagtatgtgacaataaatgaccaccaagtactacctgacgggaggcacttttcactttgatgtctgagaatcagttcaaggcatatgcagagttggcagagaaactgagagaaaagggatggagaagagaatactcatttttgtccagtgtttttctttttaagatgaacttttaaagaaccttgcgatttgcacatattgagtttataacttgtgtgatattcctgcagtttttatccaataacattgtgggaaaggtttgggggactgaacgagcataaataaatgtagcaaaatttctttctaacctgcctaaactctaggccattttataaggttatgttcctttgaaaattcattttggtctttttaccacatctgtcacaaaaagccaggtcttagcgggctcttagaaactctgagaattttcttcagattcattgagagagttttccataaagacatttatatatgtgagcaagattttttttaaacaattactttattattgttgttattaatgttattttcagaatggcttttttttttctattcaaaatcaaatcgagatttaatgtttggtacaaacccagaaagggtatttcatagtttttaaacctttcattcccagagatccgaaatatcatttgtgggttttgaatgcatctttaaagtgctttaaaaaaaagttttataagtagggagaaatttttaaatattcttacttggatggctgcaactaaactgaacaaatacctgacttttcttttaccccattgaaaatagtactttcttcgtttcacaaattaaaaaaaaaatctggtatcaacccacattttggctgtctagtattcatttacatttagggttcaccaggactaatgatttttataaaccgttttctggggtgtaccaaaaacatttgaataggtttagaatagctagaatagttccttgactttcctcgaatttcattaccctctcagcatgcttgcagagagctgggtgggctcattcttgcagtcatactgcttatttagtgctgtattttttaaacgtttctgttcagagaacttgcttaatcttccatatattctgctcagggcacttgcaattattaggttttgtttttctttttgttttttagcctttgatggtaagaggaatacgggctgccacatagactttgttctcattaatatcactatttacaactcatgtggactcagaaaaacacacaccaccttttggcttacttcgagtattgaattgactggatccactaaaccaacactaagatgggaaaacacacatggtttggagcaataggaacatcatcataatttttgtggttctatttcaggtataggaattataaaataattggttctttctaaacacttgtcccatttcattctcttgcttttttagcatgtgcaatactttctgtgccaatagagtctgaccagtgtgctatatagttaaagctcattcccttttggctttttccttgtttggttgatcttccccattctggccagagcagggctggagggaaggagccaggagggagagagcctcccacctttcccctgctgcggatgctgagtgctggggcggggagccttcaggagccccgtgcgtctgccgccacgttgcagaaagagccagccaaggagacccgggggaggaaccgcagtgtcccctgtcaccacacggaatagtgaatgtggagtgtggagaggaaggaggcagattcatttctaagacgcactctggagccatgtagcctggagtcaacccattttccacggtcttttctgcaagtgggcaggcccctcctcggggtctgtgtccttgagacttggagccctgcctctgagcctggacgggaagtgtggcctgttgtgtgtgtgcgttctgagcgtgttggccagtggctgtggaggggaccacctgccacccacggtcaccactcccttgtggcagctttctcttcaaataggaagaacgcacagagggcaggagcctcctgtttgcagacgttggcgggccccgaggctcccagagcagcctctgtcaccgcttctgtgtagcaaacattaacgatgacaggggtagaaattcttcggtgccgttcagcttacaaggatcagccatgtgcctctgtactatgtccactttgcaatatttaccgacagccgtcttttgttctttctttcctgttttccatttttaaactagtaacagcaggccttttgcgtttacaatggaacacaatcaccaagaaattagtcagggcgaaaagaaaaaaataatactattaataagaaaccaacaaacaagaacctctctttctagggatttctaaatatataaaatgactgttccttagaatgtttaacttaagaattatttcagtttgtctgggccacactggggcagaggggggagggagggatacagagatggatgccacttacctcagatcttttaaagtggaaatccaaattgaattttcatttggactttcaggataattttctatgttggtcaacttttcgttttccctaactcacccagtttagtttgggatgatttgatttctgttgttgttgatcccatttctaacttggaattgtgagcctctatgttttctgttaggtgagtgtgttgggttttttccccccaccaggaagtggcagcatccctccttctcccctaaagggactctgcggaacctttcacacctctttctcagggacggggcaggtgtgtgtgtggtacactgacgtgtccagaagcagcactttgactgctctggagtagggttgtacaatttcaaggaatgtttggatttcctgcatcttgtggattactccttagataccgcatagattgcaatataatgctgcatgttcaagatgaacagtagctcctagtaatcataaaatccactctttgcacagtttgatctttactgaaatatgttgccaaaatttatttttgttgttgtagctctggattttgttttgttttgttttttaaggaaacgattgacaataccctttaacatctgtgactactaaggaaacctatttctttcatagagagaaaaatctccaatgcttttgaagacactaataccgtgctatttcagatatgggtgaggaagcagagctctcggtaccgaaggccgggcttcttgagctgtgttggttgtcatggctactgtttcatgaaccacaagcagctcaacagactggtctgttgccttctgaaaccctttgcacttcaatttgcaccaggtgaaaacagggccagcagactccatggcccaattcggtttcttcggtggtgatgtgaaaggagagaattacactttttttttttttaagtggcgtggaggcctttgcttccacatttgtttttaacccagaatttctgaaatagagaatttaagaacacatcaagtaataaatatacagagaatatacttttttataaagcacatgcatctgctattgtgttgggttggtttcctctcttttccacggacagtgttgtgtttctggcatagggaaactccaaacaacttgcacacctctactccggagctgagatttcttttacatagatgacctcgcttcaaatacgttaccttactgatgataggatcttttcttgtagcactataccttgtgggaatttttttttaaatgtacacctgatttgagaagctgaagaaaacaaaattttgaagcactcactttgaggagtacaggtaatgttttaaaaaattgcacaaaagaaaaatgaatgtcgaaatgattcattcagtgtttgaaagatatggctctgttgaaacaatgagtttcatactttgtttgtaaaaaaaaaaaagcagagaagggttgaaagttacatgtttttttgtatatagaaatttgtcatgtctaaatgatcagatttgtatggttatggcctggaagaattactacgtaaaaggctcttaaactatacctatgcttattgttatttttgttacatatagccctcgtctgagggaggggaactcggtattctgcgatttgagaatactgttcattcctatgctgaaagtacttctctgagctcccttcttagtctaaactcttaagccattgcaacttctttttcttcagagatgatgtttgacattttcagcacttcctgttcctataaacccaaagaatataatcttgaacacgaagtgtttgtaacaagggatccaggctaccaatcaaacaggactcattatggggacaaaaaaaaaaattatttcaccttctttccccccacacctcatttaaatggggggagtaaaaacatgatttcaatgtaaatgcctcattttattttagttttattttgatttttatttaatataaagaggccagaataaatacggagcatcttctcagaatagtattcctgtccaaaaatcaagccggacagtggaaactggacagctgtggggatattaagcacccccacttacaattcttaaattcagaatctcgtcccctcccttctcgttgaaggcaactgttctggtagctaactttctcctgtgtaatggcgggagggaacaccggcttcagtttttcatgtccccatgacttgcatacaaatggttcaactgtattaaaattaagtgcatttggccaataggtagtatctatacaataacaacaatctctaagaatttccataacttttcttatctgaaaggactcaagtcttccactgcagatacattggaggcttcacccacgttttctttccctttagtttgtttgctgtctggatggccaatgagcctgtctccttttctgtggccaatctgaaggccttcgttggaagtgttgtttacagtaatccttaccaagataacatactgtcctccagaataccaagtattaggtgacactagctcaagctgttgtcttcagagcagttaccaagaagctcggtgcacaggttttctctggttcttacaggaaccacctactctttcagttttctggcccaggagtggggtaaatcctttagttagtgcatttgaacttgatacctgtgcattcagttctgtgaatactgccctttttggcggggtttcctcatctccccagcctgaactgctcaactctaaacccaaattagtgtcagccgaaaggaggtttcaagatagtcctgtcagtatttgtggtgaccttcagattagacagtcttcatttccagccagtggagtcctggctccagagccatctctgagactcgtactactggatgttttaatatcagatcattacccaccatatgcctcccacaggccaagggaaaacagacaccagaacttgggttgagggcactaccagactgacatggccagtacagaggagaactagggaaggaatgatgttttgcaccttattgaaaagaaaattttaagtgcatacataatagttaagagcttttattgtgacaggagaacttttttccatatgcgtgcatactctctgtaattccagtgtaaaatattgtacttgcactagcttttttaaacaaatattaaaaaatggaagaattcatattctattttctaatcgtggtgtgtctatttgtaggatacactcgagtctgtttattgaattttatggtccctttctttgatggtgcttgcaggttttctaggtagaaattatttcattattataataaaacaatgtttgattcaaaatttgaacaaaattgttttaaataaattgtctgtataccagtacaagtttattgtttcagtatactcgtactaataaaataacagtgccaattgca

SEQ ID NO: 1954 - DNA, 892 bp, Homo sapiens
  source 1..892: mol_type = unassigned DNA; mol_type = unassigned DNA
aggaggagggatcacttgagttgagctctgctgactagattgcatttctgtgggaagagatggatggagcatgaggaaggccatgtgtgtgtctgggacataacaagccaatgcacgcatactggagcatagtgaaagagtctattttgaagcttcaaacttagtgctgctgcagaccaggaacaagagagaaagagtggatttcagcctgcacggatggtcttgaaacacaaatggtttttggtctaggcgttttacactgagattctccactgccaccctttctactcaagcaaaatcttcgtgaaaagatctgctgcaaggaactgatagcttatggttctccattgtgatgaaagcacatggtacagttttccaaagaaattagaccattttcttcgtgagaaagaaatcgacgtgctgttttcatagggtatttctcacttctctgtgaaaggaagaaagaacacgcctgagcccaagagccctcaggagccctccagagcctgtgggaagtctccatggtgaagtataggctgaggctacctgtgaacagtacgcagtgaatgttatctgatgcacaaaggaaaataataatacaaaacccataacctattcattgtattgttgcggtagatcgagctacatgctgcacagcaaaagaccttctttgcacttctttcaagcagaattattgctgtatattcactctgaactgagagatcattgcaaaaaaaaaaaagaagaagaagaagagaagaaaagaaaaaagaaataggttaagcaaattttgtggtggtgcttatgtgtgcacagacatgcatgaggcctccgcatcttccaaacttggaaagcatattttaacagcacaaatatatctacatgtttgatc

SEQ ID NO: 1955 - DNA, 1569 bp, Homo sapiens
  source 1..1569: mol_type = unassigned DNA; mol_type = unassigned DNA
atttctactacagtggcggagccgtacaggacctgtttcactgcagggggatccaaaacaagccccgtggagcagcagccagagcaacagcagccgcaagacattgtttctctccctctgcccccccttccccacgcaaccccagatccatttacactttacagagcatcgtgcatcaagtcaccagggtggtccattcaagctgcagatttgtttgtcatccttgtacagcaatctcctcctccactgccactacagggaagtgcatcacatgtcagcatactggagcatagtgaaagagtctattttgaagcttcaaacttagtgctgctgcagaccaggaacaagagagaaagagtggatttcagcctgcacggatggtcttgaaacacaaatggtttttggtctaggcgttttacactgagattctccactgccaccctttctactcaagcaaaatcttcgtgaaaagatctgctgcaaggaactgatagcttatggttctccattgtgatgaaagcacatggtacagttttccaaagaaattagaccattttcttcgtgagaaagaaatcgacgtgctgttttcatagggtatttctcacttctctgtgaaaggaagaaagaacacgcctgagcccaagagccctcaggagccctccagagcctgtgggaagtctccatggtgaagtataggctgaggctacctgtgaacagtacgcagtgaatgttgtaagttaacaaccaagaacaatatgtgtagtggcttgccttgtaggattcatgaatcacttgatgtaaccgagccaggtgttgaaggggtattagcatgagctctaggtgatcgtccaattaatttctttttttaattggaagggaatttaattttttaagggaagaggtcctgtttgtatttgctggaacttgcctttctctcggcttctatggcatgctgcaaactatctacttcaggaataaaaggatggaatacagtgattctttcattgtaggaacaccttttctactggtacagtcaaatagtatcagatttagagcagcccctttaaactgggctgttgcagttcttttaggttggtgagtagggggtaaaattctccaggctaaggattagcaatcagagtttccatccagcaattattcttctgtatgtgcagttgatgaaaatgacatttttctctctggcttgtaaaatcttgaggtatgcaagttacaagcagttatgtttggtgcttcccttacttaaaatgagctgatttactggttttgatcagttactggcttgggattttgagattagtaaagtttgttcccacatgtcacctgatggccgccttgcatgagaagttttagtgtcaggtaatggaagagatgacatagtgtgacttcagggagcccttccactaggaaataatgcaaaggtgctcagccctcctactttctagagaatttaccttgttgctggactgtgtcacaaaacacagttaggagattttgaccaggaaagaaaatagctacatgaaacccaggatggcctatgaatacctctga

SEQ ID NO: 1956 - DNA, 853 bp, Homo sapiens
  source 1..853: mol_type = unassigned DNA; mol_type = unassigned DNA
ctgcagatttgtttgtcatccttgtacagcaatctcctcctccactgccactacagggaagtgcatcacatgtcagcatactggagcatagtgaaagagtctattttgaagcttcaaacttagtgctgctgcagaccaggaacaagagagaaagagtggatttcagcctgcacggatggtcttgaaacacaaatggtttttgaatatttaagagaaaacctttttggccgctttgataatgataatttttgtctattgaatggtgatgctgtgattttcaggatgtatgtatcatggaaactggtagagaaagaaagaactgagatcatgctgaagtatactggggcccaccaagaggtagagctgagtgcaccaattgtcaccaaaatggcaacccgtaaaagagaaccattcttaagaaagagtcatgtaccatcaagcggggatttccagaagcctctgatagtaacagttctcccttccattcctttcctctctactttcaagatgcgatgatgacaaaaagactgacttgtcaaaaaaaccatgaaattccatacaaatgggcaagctgacatatagcagcttcggaaatttccacaatcgctcctctgagttgcctcaaggagaagaaaagtgagagaaaggaagggtacctttgcccccattaaggcacatgtagcatcctggaagctttgaaattacctgtccccaaagttattagaattatgtcattttttggttgttatattatgaaagcctccccacccctaaaagtttgtctataataatttttttgatcaggatttttacttcttaaattaatattaaagcattttaatgtttctagaaa

SEQ ID NO: 1957 - DNA, 744 bp, Homo sapiens
  source 1..744: mol_type = unassigned DNA; mol_type = unassigned DNA
ctactacagtggcggagccgtacaggacctgtttcactgcagggggatccaaaacaagccccgtggagcagcagccagagcaacagcagccgcaagacattgtttctctccctctgcccccccttccccacgcaaccccagatccatttacactttacaaacatcagtgctctatcctcatgtccttctaagaatcaaaagttttaacctcacagaatccagcgtgtggcttgtgagtgagactcctttttccatgtgataaccggtctgctttggggaggcaaaagaatcttaccgacacgtacatattttaggatgggctctgagccaattcatcaagccaactcctcactttgaaacaagaaagtgaagaggatgtttcatgattgtggaatacctgccagaggaagaatctaccgaagttcagtcaactattaattggaaaggaggcagcagactgaggagatagagaatctttgctctcaggtggatggaggttggagtcctcaatctgtcacttgtgggtacattatgtagctccttcacctccatttctttatttattagaaggcgggtaataaaagtgtccactgcctaggatggttctagggcttagaggagataatgaaactcaagggcttaacatgtgaatgttagctattatcattgcatgtgtccattaacacccaaagataaccagtgttgtttagtagttctttgcgtattttctttctaaatagataa

SEQ ID NO: 1958 - DNA, 3362 bp, Homo sapiens
  source 1..3362: mol_type = unassigned DNA; mol_type = unassigned DNA
gtataccgcagacatcatttctactacagtggcggagccgtacaggacctgtttcactgcagggggatccaaaacaagccccgtggagcagcagccagagcaacagcagccgcaagacattgtttctctccctctgcccccccttccccacgcaaccccagatccatttacactttacagagcatcgtgcatcaagtcaccagggtggtccattcaagctgcagatttgtttgtcatccttgtacagcaatctcctcctccactgccactacagggaagtgcatcacatgtcaggtcacagaacagaaagtgctggtggacatctcttcttgccccaagatcttcgttggaagtccccgggacttggtgtctttgccgttcaaagtgtttatgaactcgccaggaggcataatgtgtcaccattttattctgggccaccctaaaggatgacacccagcttcagagacctcctcttggacgacatccctgagaatcaatgttttagctgtcccatagtctgacgtctgtttccgaccgcttttgagctggcgcaggcttagtcattaatggccaggacgatgttaaatgttctgcctgattggcttgcagctacacaccttttgtcatttgcagagcagcaactccctcttgagctcttggggagtctttacacaaatacactagaaaaaaggcacccatccattttttttccatcttggcattagctcacaggcatagtcctgggatgacctggagtagaggcagtggaggataaattcatcttgcacagacttgtttgtgctagttctagcctgtctctcgccacagatctagcttttaaatactcaagtgattggttttgtgtaggaatgtgtggattgttggattggaagaattttctccctggatttctagtgtttacataagcagatacaaaaaaaatttgatcactgatttaaatagcagggcttattttaaaaagttatgggtgcttcaaggtggtacagaataaaaatgtcagggttttttttttttttttttttaacaagtcgtaacacaaccaaaatgtatatattaatgttttgtcaggaaagggtcaaaatggaaaatttgcaacaaagacaaactacaatagaacaagtgcaaacagaagctgacaaatatatgcccctcgttgggagttcagcccatggaatgttatgtaggacaaaaggaatggaagagatatttcagtaacattttgttctctgtcaaaaaccttctgaaatataaatctgctgtgtattggagaatggatacagcaattgattcaagttgaatagctttcatttaactagaatatcccacagaaagcagttcttgttctgacaaccatatttttgctttctttcacttaaagaaaattgaattcatgtttacatatcttatagggttgttttatggacaaagacacgggtcaaaccccatcacagtggctagtgttacaacaaatagaaacatttctaaatgaaataacatttctaagccagggccagtgcctgcagtaataatactaggttggtattatgaagccatttgcaactataaataattcagtcatagatgtgctttttttaaaatcctggttttttaaaattctagtcttttgccaatacacacacccatacacatacttcacctatttgcataatagaggaggaatatgaatatgtatataataaagtcactttattttggactttctgaaacagattaccttttttcttctcctcatgatggctccctgagttgcttccaattgttgaaattccataattacccacaaatatggatgtgcccttctaagggtcttgccatgtcaaccagcccagctgaaagctaatagccagtgttagcggtttaaggaactgagcttcagaattgagagcccccagcaaaggaagttctgtttttattctccatttctactctcctcaaggagaaattaggtgtttattgttttgttttgttttttaaattcccagatcattctggcattggtcctggattcgctgcaaatgtaatttttagcaacatctattactcctgaaatattttggctcttcgtggcctgtatgattcagtagactctgaggttttccaagtacattaaggacttaaatacagaatgtcttaaaattttagggctattgatcaagagaaagcttctcgaggaataaagttctgttaggttttagccctattctgctttcaaaattcttaactggatgccgtctattttgttttctttctgtgtttataactaatttgctacttgggtttattgttttcttacttagaaactacttttttttttgttttgtaaatgcacagcacttaaaaatataaaacagttccaaacagttccaacctgttcattgtttataccttgaccatcttttctgtcttattgctgaaccatcgcttctctttctacttctcttctgggatttcatcttgctcagctaaaattctagtgtgttattctgaatattatggctggagtttcctgaccaacttcttgcatctgagtccatttcctgtgcttaaggctgctggcattccattcactgctcctagtcaaaactgaaacttctcctgctaatgagattaggccttacaacactattaatttcttcctctctatttcttgctccattgttatttctcagagatgaaaatctatttgtcattatgagattcattttggcatcacttactaaagttcccttggatttttctgttcttcatacaccctacagcttcaaactgcaacagtcatcaactggtctttgacaaattagttgtctctacacatggtttacaatattacactagctgtttaaaaataattaagcttctttctgtgttctttgctgtgggtcaggaactttacttcctttgccatgcaacacagaagttaatcacaaatgggtcctctgaaccaaataattaaaaatagagcaaagtttctgaaccaggcggttggcagaaacgtctgtacttccatctgtgcatggttaggaaaatatttcacgatatttaaatagcatcagctttgctctcttttgtgtgagagtgtgtctgtgtgtctatgcgtaattcattgctttgaaggtttgtttgactgttagataatcatataaaaaaagttactggcaaggaaacaggaaagcaaatccaggtgttttgtgcatacattctttatttaccagtctctgtgaaggagcaatgatcttgcttttgcttttctctctgactgaaagtttttgccttgttatgtgctgcagaaaactaaataacattgcattttgactttgaaa

SEQ ID NO: 1959 - DNA, 1648 bp, Homo sapiens
  source 1..1648: mol_type = unassigned DNA; mol_type = unassigned DNA
ggaggagagagcagagtataccgcagacatcatttctactacagtggcggagccgtacaggacctgtttcactgcagggggatccaaaacaagccccgtggagcagcagccagagcaacagcagccgcaagacattgtttctctccctctgcccccccttccccacgcaaccccagatccatttacactttacagtcacagaacagaaagtgctggtggacatctcttcttgccccaagatcttcgttggaagtccccgggacttggtgtctttgccgttcaaagtgtttatgaactcgccaggaggcataatgtgtcaccattttattctgggccaccctaaaggatgacacccagcttcagagacctcctcttggacgacatccctgagaatcaatgttttagctgtcccatagtctgacgtctgtttccgaccgcttttgagctggcgcaggcttagtcattaatggccaggacgatgttaaatgttctgcctgattggcttgcagctacacaccttttgtcatttgcagagcagcaactccctcttgagctcttggggagtctttacacaaatacactagaaaaaaggcacccatccattttttttccatcttggcattagctcacaggcatagtcctgggatgacctggagtagaggcagtggaggataaattcatcttgcacagacttgtttgtgctagttctagcctgtctctcgccacagatctagcttttaaatactcaagtgattggttttgtgtaggaatgtgtggattgttggattggaagaattttctccctggatttctagtgtttacataagcagatacaaaaaaaatttgatcactgatttaaatagcagggcttattttaaaaagttatgggtgcttcaaggtggtacagaataaaaatgtcagggttttttttttttttttttttaacaagtcgtaacacaaccaaaatgtatatattaatgttttgtcaggaaagggtcaaaatggaaaatttgcaacaaagacaaactacaatagaacaagtgcaaacagaagctgacaaatatatgcccctcgttgggagttcagcccatggaatgttatgtaggacaaaaggaatggaagagatatttcagtaacattttgttctctgtcaaaaaccttctgaaatataaatctgctgtgtattggagaatggatacagcaattgattcaagttgaatagctttcatttaactagaatatcccacagaaagcagttcttgttctgacaaccatatttttgctttctttcacttaaagaaaattgaattcatgtttacatatcttatagggttgttttatggacaaagacacgggtcaaaccccatcacagtggctagtgttacaacaaatagaaacatttctaaatgaaataacatttctaagccagggccagtgcctgcagtaataatactaggttggtattatgaagccatttgcaactataaataattcagtcatagatgtgctttttttaaaatcctggttttttaaaattctagtcttttgccaatacacacacccatacacatacttcacctatttgcataatagaggaggaatatgaatatgtatataataaagtcactttattttggactttctgaaa

SEQ ID NO: 1960 - DNA, 647 bp, Homo sapiens
  source 1..647: mol_type = unassigned DNA; mol_type = unassigned DNA
atcatttctactacagtggcggagccgtacaggacctgtttcactgcagggggatccaaaacaagccccgtggagcagcagccagagcaacagcagccgcaagacattgtttctctccctctgcccccccttccccacgcaaccccagatccatttacactttacagttttacctcacaaaaactactacaagcaccaagctccctgatggaaaggagcatcgtgcatcaagtcaccagggtggtccattcaagctgcagatttgtttgtcatccttgtacagcaatctcctcctccactgccactacagggaagtgcatcacatgtcaggtcacagaacagaaagtgctggtggacatctcttcttgccccaagatcttcgttggaagtccccgggacttggtgtctttgccgttcaaagtgtttatgaactcgccaggaggcataatgtgtcaccattttattctgggccaccctaaaggatgacacccagcttcagagacctcctcttggacgacatccctgagaatcaatgttttagctgtcccatagtctgacgtctgtttccgaccgcttttgagctggcgcaggcttagtcattaatggccaggacgatgttaaatgttctgcctgattggcttgcagct

SEQ ID NO: 1961 - DNA, 568 bp, Homo sapiens
  source 1..568: mol_type = unassigned DNA; mol_type = unassigned DNA
agagtataccgcagacatcatttctactacagtggcggagccgtacaggacctgtttcactgcagggggatccaaaacaagccccgtggagcagcagccagagcaacagcagccgcaagacattgtttctctccctctgcccccccttccccacgcaaccccagatccatttacactttacagagcatcgtgcatcaagtcaccagggtggtccattcaagctgcagatttgtttgtcatccttgtacagcaatctcctcctccactgccactacagggaagtgcatcacatgtcaggtgagagttttgcgatgctctctgttttccatctgaggataaagtcctgacctggaaaattgcctcctagccatgctcccttactttgttggctgttgaatatcattttctttgcaaactctgtttgggcatagtgtgggaagttgagaaattgccaagattgttttttaaaacttcgattaaagtatctatctatttggtttaatctatatgttcatgaagactttcatttgactttgcgatgattgataattgccaattggggcttgaa

SEQ ID NO: 1962 - DNA, 10587 bp, Homo sapiens
  source 1..10587: mol_type = unassigned DNA; mol_type = unassigned DNA
gaggagagagcagagtataccgcagacatcatttctactacagtggcggagccgtacaggacctgtttcactgcagggggatccaaaacaagccccgtggagcagcagccagagcaacagcagccgcaagacattgtttctctccctctgcccccccttccccacgcaaccccagatccatttacactttacagagcatcgtgcatcaagtcaccagggtggtccattcaagctgcagatttgtttgtcatccttgtacagcaatctcctcctccactgccactacagggaagtgcatcacatgtcagcatactggagcatagtgaaagagtctattttgaagcttcaaacttagtgctgctgcagaccaggaacaagagagaaagagtggatttcagcctgcacggatggtcttgaaacacaaatggtttttggtctaggcgttttacactgagattctccactgccaccctttctactcaagcaaaatcttcgtgaaaagatctgctgcaaggaactgatagcttatggttctccattgtgatgaaagcacatggtacagttttccaaagaaattagaccattttcttcgtgagaaagaaatcgacgtgctgttttcatagggtatttctcacttctctgtgaaaggaagaaagaacacgcctgagcccaagagccctcaggagccctccagagcctgtgggaagtctccatggtgaagtataggctgaggctacctgtgaacagtacgcagtgaatgttcatccagagctgctgttggcggattgtacccacggggagatgattcctcatgaagagcctggatcccctacagaaatcaaatgtgactttccgtttatcagactaaaatcagagccatccagacagtgaaacagtcaccgtggaggggggacggcgaaaaatgaaatccaaccaagagcggagcaacgaatgcctgcctcccaagaagcgcgagatccccgccaccagccggtcctccgaggagaaggcccctaccctgcccagcgacaaccaccgggtggagggcacagcatggctcccgggcaaccctggtggccggggccacgggggcgggaggcatgggccggcagggacctcggtggagcttggtttacaacagggaataggtttacacaaagcattgtccacagggctggactactccccgcccagcgctcccaggtctgtccccgtggccaccacgctgcctgccgcgtacgccaccccgcagccagggaccccggtgtcccccgtgcagtacgctcacctgccgcacaccttccagttcattgggtcctcccaatacagtggaacctatgccagcttcatcccatcacagctgatccccccaaccgccaaccccgtcaccagtgcagtggcctcggccgcaggggccaccactccatcccagcgctcccagctggaggcctattccactctgctggccaacatgggcagtctgagccagacgccgggacacaaggctgagcagcagcagcagcagcagcagcagcagcagcagcagcatcagcatcagcagcagcagcagcagcagcagcagcagcagcagcagcagcacctcagcagggctccggggctcatcaccccggggtcccccccaccagcccagcagaaccagtacgtccacatttccagttctccgcagaacaccggccgcaccgcctctcctccggccatccccgtccacctccacccccaccagacgatgatcccacacacgctcaccctggggcccccctcccaggtcgtcatgcaatacgccgactccggcagccactttgtccctcgggaggccaccaagaaagctgagagcagccggctgcagcaggccatccaggccaaggaggtcctgaacggtgagatggagaagagccggcggtacggggccccgtcctcagccgacctgggcctgggcaaggcaggcggcaagtcggttcctcacccgtacgagtccaggcacgtggtggtccacccgagcccctcagactacagcagtcgtgatccttcgggggtccgggcctctgtgatggtcctgcccaacagcaacacgcccgcagctgacctggaggtgcaacaggccactcatcgtgaagcctccccttctaccctcaacgacaaaagtggcctgcatttagggaagcctggccaccggtcctacgcgctctcaccccacacggtcattcagaccacacacagtgcttcagagccactcccggtgggactgccagccacggccttctacgcagggactcaaccccctgtcatcggctacctgagcggccagcagcaagcaatcacctacgccggcagcctgccccagcacctggtgatccccggcacacagcccctgctcatcccggtcggcagcactgacatggaagcgtcgggggcagccccggccatagtcacgtcatccccccagtttgctgcagtgcctcacacgttcgtcaccaccgcccttcccaagagcgagaacttcaaccctgaggccctggtcacccaggccgcctacccagccatggtgcaggcccagatccacctgcctgtggtgcagtccgtggcctccccggcggcggctccccctacgctgcctccctacttcatgaaaggctccatcatccagttggccaacggggagctaaagaaggtggaagacttaaaaacagaagatttcatccagagtgcagagataagcaacgacctgaagatcgactccagcaccgtagagaggattgaagacagccatagcccgggcgtggccgtgatacagttcgccgtcggggagcaccgagcccaggtcagcgttgaagttttggtagagtatcctttttttgtgtttggacagggctggtcatcctgctgtccggagagaaccagccagctctttgatttgccgtgttccaaactctcagttggggatgtctgcatctcgcttaccctcaagaacctgaagaacggctctgttaaaaagggccagcccgtggatcccgccagcgtcctgctgaagcactcaaaggccgacggcctggcgggcagcagacacaggtatgccgagcaggaaaacggaatcaaccaggggagtgcccagatgctctctgagaatggcgaactgaagtttccagagaaaatgggattgcctgcagcgcccttcctcaccaaaatagaacccagcaagcccgcggcaacgaggaagaggaggtggtcggcgccagagagccgcaaactggagaagtcagaagacgaaccacctttgactcttcctaagccttctctaattcctcaggaggttaagatttgcattgaaggccggtctaatgtaggcaagtagaggcagcgtgggggaaaggaaacgtggctctcccttatcatttgtatccagattactgtactgtaggctaaaataacacagtatttacatgttatcttcttaattttaggtttctgttctaaccttgtcattagagttacagcaggtgtgtcgcaggagactggtgcatatgctttttccacgagtgtctgtcagtgagcgggcgggaggaagggcacagcaggagcggtcagggctccaggcatccccggggaagaaaggaacggggcttcacagtgcctgccttctctagcggcacagaagcagccgggggcgctgactcccgctagtgtcaggagaaaagtcccgtgggaagggtcctgcaggggtgcagggttgcacgcatgtgggggtgcacaggcgctgtggcggcgagtgagggtctctttttctctgcctccctctgcctcactctcttgctatcggcatgggccgggggggttcagagcagtgtcctcctggggttcccacgtgcaaaatcaacatcaggaacccagcttcagggcatcgcggagacgcgtcagatggcagatttggaaagttaaccatttaaaagaacatttttctctccaacatattttacaataaaagcaacttttaattgtatagatatatatttccccctatggggcctgactgcactgatatatattttttttaaagagcaactgccacatgcgggatttcatttctgctttttactagtgcagcgatgtcaccagggtgttgtggtggacagggaagcccctgctgtcatggccccacatggggtaaggggggttgggggtgggggagagggagagagcgaacacccacgctggtttctgtgcagtgttaggaaaaccaatcaggttattgcattgacttcactcccaagaggtagatgcaaactgcccttcagtgagagcaacagaagctcttcacgttgagtttgcgaaatctttttgtctttgaactctagtactgtttatagttcatgactatggacaactcgggtgccactttttttttttttcagattccagtgtgacatgaggaattagattttgaagatgagcatatattactatctttaagcatttaaaaatactgttcacactttattaccaagcatcttggtctctcattcaacaagtactgtatctcactttaaactctttggggaaaaaacaaaaacaaaaaaaactaagttgctttctttttttcaacactgtaactacatttcagctctgcagaattgctgaagagcaagatattgaaagtttcaatgtggtttaaagggatgaatgtgaattatgaactagtatgtgacaataaatgaccaccaagtactacctgacgggaggcacttttcactttgatgtctgagaatcagttcaaggcatatgcagagttggcagagaaactgagagaaaagggatggagaagagaatactcatttttgtccagtgtttttctttttaagatgaacttttaaagaaccttgcgatttgcacatattgagtttataacttgtgtgatattcctgcagtttttatccaataacattgtgggaaaggtttgggggactgaacgagcataaataaatgtagcaaaatttctttctaacctgcctaaactctaggccattttataaggttatgttcctttgaaaattcattttggtctttttaccacatctgtcacaaaaagccaggtcttagcgggctcttagaaactctgagaattttcttcagattcattgagagagttttccataaagacatttatatatgtgagcaagattttttttaaacaattactttattattgttgttattaatgttattttcagaatggcttttttttttctattcaaaatcaaatcgagatttaatgtttggtacaaacccagaaagggtatttcatagtttttaaacctttcattcccagagatccgaaatatcatttgtgggttttgaatgcatctttaaagtgctttaaaaaaaagttttataagtagggagaaatttttaaatattcttacttggatggctgcaactaaactgaacaaatacctgacttttcttttaccccattgaaaatagtactttcttcgtttcacaaattaaaaaaaaaatctggtatcaacccacattttggctgtctagtattcatttacatttagggttcaccaggactaatgatttttataaaccgttttctggggtgtaccaaaaacatttgaataggtttagaatagctagaatagttccttgactttcctcgaatttcattaccctctcagcatgcttgcagagagctgggtgggctcattcttgcagtcatactgcttatttagtgctgtattttttaaacgtttctgttcagagaacttgcttaatcttccatatattctgctcagggcacttgcaattattaggttttgtttttctttttgttttttagcctttgatggtaagaggaatacgggctgccacatagactttgttctcattaatatcactatttacaactcatgtggactcagaaaaacacacaccaccttttggcttacttcgagtattgaattgactggatccactaaaccaacactaagatgggaaaacacacatggtttggagcaataggaacatcatcataatttttgtggttctatttcaggtataggaattataaaataattggttctttctaaacacttgtcccatttcattctcttgcttttttagcatgtgcaatactttctgtgccaatagagtctgaccagtgtgctatatagttaaagctcattcccttttggctttttccttgtttggttgatcttccccattctggccagagcagggctggagggaaggagccaggagggagagagcctcccacctttcccctgctgcggatgctgagtgctggggcggggagccttcaggagccccgtgcgtctgccgccacgttgcagaaagagccagccaaggagacccgggggaggaaccgcagtgtcccctgtcaccacacggaatagtgaatgtggagtgtggagaggaaggaggcagattcatttctaagacgcactctggagccatgtagcctggagtcaacccattttccacggtcttttctgcaagtgggcaggcccctcctcggggtctgtgtccttgagacttggagccctgcctctgagcctggacgggaagtgtggcctgttgtgtgtgtgcgttctgagcgtgttggccagtggctgtggaggggaccacctgccacccacggtcaccactcccttgtggcagctttctcttcaaataggaagaacgcacagagggcaggagcctcctgtttgcagacgttggcgggccccgaggctcccagagcagcctctgtcaccgcttctgtgtagcaaacattaacgatgacaggggtagaaattcttcggtgccgttcagcttacaaggatcagccatgtgcctctgtactatgtccactttgcaatatttaccgacagccgtcttttgttctttctttcctgttttccatttttaaactagtaacagcaggccttttgcgtttacaatggaacacaatcaccaagaaattagtcagggcgaaaagaaaaaaataatactattaataagaaaccaacaaacaagaacctctctttctagggatttctaaatatataaaatgactgttccttagaatgtttaacttaagaattatttcagtttgtctgggccacactggggcagaggggggagggagggatacagagatggatgccacttacctcagatcttttaaagtggaaatccaaattgaattttcatttggactttcaggataattttctatgttggtcaacttttcgttttccctaactcacccagtttagtttgggatgatttgatttctgttgttgttgatcccatttctaacttggaattgtgagcctctatgttttctgttaggtgagtgtgttgggttttttccccccaccaggaagtggcagcatccctccttctcccctaaagggactctgcggaacctttcacacctctttctcagggacggggcaggtgtgtgtgtggtacactgacgtgtccagaagcagcactttgactgctctggagtagggttgtacaatttcaaggaatgtttggatttcctgcatcttgtggattactccttagataccgcatagattgcaatataatgctgcatgttcaagatgaacagtagctcctagtaatcataaaatccactctttgcacagtttgatctttactgaaatatgttgccaaaatttatttttgttgttgtagctctggattttgttttgttttgttttttaaggaaacgattgacaataccctttaacatctgtgactactaaggaaacctatttctttcatagagagaaaaatctccaatgcttttgaagacactaataccgtgctatttcagatatgggtgaggaagcagagctctcggtaccgaaggccgggcttcttgagctgtgttggttgtcatggctactgtttcatgaaccacaagcagctcaacagactggtctgttgccttctgaaaccctttgcacttcaatttgcaccaggtgaaaacagggccagcagactccatggcccaattcggtttcttcggtggtgatgtgaaaggagagaattacactttttttttttttaagtggcgtggaggcctttgcttccacatttgtttttaacccagaatttctgaaatagagaatttaagaacacatcaagtaataaatatacagagaatatacttttttataaagcacatgcatctgctattgtgttgggttggtttcctctcttttccacggacagtgttgtgtttctggcatagggaaactccaaacaacttgcacacctctactccggagctgagatttcttttacatagatgacctcgcttcaaatacgttaccttactgatgataggatcttttcttgtagcactataccttgtgggaatttttttttaaatgtacacctgatttgagaagctgaagaaaacaaaattttgaagcactcactttgaggagtacaggtaatgttttaaaaaattgcacaaaagaaaaatgaatgtcgaaatgattcattcagtgtttgaaagatatggctctgttgaaacaatgagtttcatactttgtttgtaaaaaaaaaaaagcagagaagggttgaaagttacatgtttttttgtatatagaaatttgtcatgtctaaatgatcagatttgtatggttatggcctggaagaattactacgtaaaaggctcttaaactatacctatgcttattgttatttttgttacatatagccctcgtctgagggaggggaactcggtattctgcgatttgagaatactgttcattcctatgctgaaagtacttctctgagctcccttcttagtctaaactcttaagccattgcaacttctttttcttcagagatgatgtttgacattttcagcacttcctgttcctataaacccaaagaatataatcttgaacacgaagtgtttgtaacaagggatccaggctaccaatcaaacaggactcattatggggacaaaaaaaaaaattatttcaccttctttccccccacacctcatttaaatggggggagtaaaaacatgatttcaatgtaaatgcctcattttattttagttttattttgatttttatttaatataaagaggccagaataaatacggagcatcttctcagaatagtattcctgtccaaaaatcaagccggacagtggaaactggacagctgtggggatattaagcacccccacttacaattcttaaattcagaatctcgtcccctcccttctcgttgaaggcaactgttctggtagctaactttctcctgtgtaatggcgggagggaacaccggcttcagtttttcatgtccccatgacttgcatacaaatggttcaactgtattaaaattaagtgcatttggccaataggtagtatctatacaataacaacaatctctaagaatttccataacttttcttatctgaaaggactcaagtcttccactgcagatacattggaggcttcacccacgttttctttccctttagtttgtttgctgtctggatggccaatgagcctgtctccttttctgtggccaatctgaaggccttcgttggaagtgttgtttacagtaatccttaccaagataacatactgtcctccagaataccaagtattaggtgacactagctcaagctgttgtcttcagagcagttaccaagaagctcggtgcacaggttttctctggttcttacaggaaccacctactctttcagttttctggcccaggagtggggtaaatcctttagttagtgcatttgaacttgatacctgtgcattcagttctgtgaatactgccctttttggcggggtttcctcatctccccagcctgaactgctcaactctaaacccaaattagtgtcagccgaaaggaggtttcaagatagtcctgtcagtatttgtggtgaccttcagattagacagtcttcatttccagccagtggagtcctggctccagagccatctctgagactcgtactactggatgttttaatatcagatcattacccaccatatgcctcccacaggccaagggaaaacagacaccagaacttgggttgagggcactaccagactgacatggccagtacagaggagaactagggaaggaatgatgttttgcaccttattgaaaagaaaattttaagtgcatacataatagttaagagcttttattgtgacaggagaacttttttccatatgcgtgcatactctctgtaattccagtgtaaaatattgtacttgcactagcttttttaaacaaatattaaaaaatggaagaattcatattctattttctaatcgtggtgtgtctatttgtaggatacactcgagtctgtttattgaattttatggtccctttctttgatggtgcttgcaggttttctaggtagaaattatttcattattataataaaacaatgtttgattcaaaatttgaacaaaattgttttaaataaattgtctgtataccagtacaagtttattgtttcagtatactcgtactaataaaataacagtgccaattgca

SEQ ID NO: 1963 - DNA, 3022 bp, Homo sapiens
  source 1..3022: mol_type = unassigned DNA; mol_type = unassigned DNA
ctattcgatctacaggggagcggagtcgcttcgtggccgccagcccgggaaggggcgccagccagctggcggacgcacggcttagaggggcgtctgggcagagaggtttggggctggggagagatgcagtgagcttgggagagtggactggtagcacaaataatgtgtgcataagggttagaagaggaggtcctggagctttggtcttctcttttccccctgcaattgtgcatttcggagggactcttgctgcaagctcggtaggcaatagcatccgctccaagactacacttcccagaaggctgtgagtgggtggggggggggggggcgcggggaacaggcaacctgtgttgcgcttgcgcaaagactgcgctggaaaggcaggtggggaggaggggaggcgtgcccgcgacggggcgagggggagggggccgcgcggcggcggcgccagggcgggcgcgcgtccgcggcggtgatggcggtgcgtgaacgcgcggcggcagcaatggccgctctggagcggcgggtgccgagtctcgatgacttcgcgggacagagctggagctcgtgggtggagcgggccgacctgcccgcggctgacgaaactgaggtacaagggcaacccctgcccaaaggccctctaagaaggggagggacttgcatagctgaccaaggagactttgaagatgctcaaggaccaaagacagcagtttctctgctctgtgaccatcctatcagtgcaggacctgagaagctgggtgtaactttgacaatgctatggggctgagctggaggagagtagcaaaaacacgaagaagttggatgccatgaccctcattaaagaagacatgtccatcttcgggcactgccctgcccatgatgacttctacttggttgtgtgtaaccactgcagccaagtggtgaagcctcaagctttccagaagcactgcgaaagaagacatgggcccctcagcaagctttatggccgggccccacccccacctccagcccctgccagctctcagaaatgccatgtagtgaatgggcagggcccagcttgtagggccccaggttccacgaaaacctcctccagggagaagggccaggggtcccggagccgtggccaccagcctcctgagaagacccagaaggacaacctctgccttttcgtgcctgtggtgaatctggagaagatgtccagtctcccgaagcctgatggacatggaatcagggtggccccaccctctgcttttctcagccagccagggggcctcaccaaggactcccctggaaaacctcccatggctcccccttctaaagaacctcctggcagagagaacatcgagatcatccccagtgaggggtccagtcactgggctgaaggcagccctcctgaaaaggagcccagtgggaccaggctgccccctaaaacccaccggaagatggctcggaaggagtgcgacctcaacaggcagtgtggggtaataaatccagagaccaaaaagatctgtacccgcctgttgacctgcaagatccactcagtacaccagcgccgggaagtccagggccgggccaaggactttgacgtgctggtggcagagctgaaggccaactcccgcaaaggggagtctcccaaggagaagagcccagggcgcaaggagcaagttctcgagcgcccctcccaggagctcccctcctcagtccaggttgtagcagcggtggctgctcccagcagcaccttctctgttcgtgccaagcagacctacccatactgtgcactgcccaggtcccgggcctcctccgagagtgaattggatgatgaaggcccctgtggtggtgatggggacccaggcctgttccccttccccatgccccggggtgggacccaggcctccagcgaagagagtgaggaggaggggacatctgacgacctccacccaccccctgactgccattatgcaacccggcccccacggccacaggcgttctgcacctttgggagccggctggtgagcccaggatgctatgtgtttagccgccggctggaccggttctgctcagcactcagctccatgctggaacggcacctcagcacacacatgtggaagaagatcccaccggcagctgaacctccagctcaccttgtcaactccccgttatctgctcccctgagcccatcctctacaggcacctgcccccgccttccaggtccaaccctgagacctgcctgcccagcctccatgccccccaccaaggacaaccttgtccccagctaccctgcaggctcccccagcgtggcggctgcctgtagccaggcagagtgcatgggcgggagccaggctatcacctcaccactgcctgccaacacgccatccccgtccttcagcaagctgccgccttccaaggccagcaagtcatccaaaggcaaggacggggtggaggtggaggccccttctcgaaagcggaagttatcccctggccctaccactcttaaacggacctgcatcctggagcccactggaaaagggaaaccctctggctgtaggggcctctcggccaaaactaaaacagccctgagcatggggcttaatgggacaatggggccaagagtgaagcgggcagggcccctggactgtcgtggctcccctcatcagctccccacaccagtcaaggcttctcagctggagaaccggggagcagctggacacccagccaaggccctgccaaccaactgcctctctgaggaggaggtggccaagaagcggaaaaacctggccacttattgccggccagtgaaggccaagcactgtcaggctggtgcccctgctgatgtggcctgctctgtgcgccgcaagaagccaggcccggccctggcctttgaggagaagtgctctacactgaagtcaaaagcccattaacgagaaagtgcctgcccactgcaacggagccgccagcacctcctcccctccagatccgggccccaggctgctgccgctttttataactttatattatttttttt

SEQ ID NO: 1964 - DNA, 2318 bp, Homo sapiens
  source 1..2318: mol_type = unassigned DNA; mol_type = unassigned DNA
gcgtccgcggcggtgatggcggtgcgtgaacgcgcggcggcagcaatggccgctctggagcggcgggtgccgagtctcgatgacttcgcgggacagagctggagctcgtgggtggagcgggccgacctgcccgcggctgacggggctgagctggaggagagtagcaaaaacacgaagaagttggatgccatgaccctcattaaagaagacatgtccatcttcgggcactgccctgcccatgatgacttctacttggttgtgtgtaaccactgcagccaagtggtgaagcctcaagctttccagaagcactgcgaaagaagacatgggcccctcagcaagctttatggccgggccccacccccacctccagcccctgccagctctcagaaatgccatgtagtgaatgggcagggcccagcttgtagggccccaggttccacgaaaacctcctccagggagaagggccaggggtcccggagccgtggccaccagcctcctgagaagacccagaaggacaacctctgccagccagggggcctcaccaaggactcccctggaaaacctcccatggctcccccttctaaagaacctcctggcagagagaacatcgagatcatccccagtgaggggtccagtcactgggctgaaggcagccctcctgaaaaggagcccagtgggaccaggctgccccctaaaacccaccggaagatggctcggaaggagtgcgacctcaacaggcagtgtggggtaataaatccagagaccaaaaagatctgtacccgcctgttgacctgcaagatccactcagtacaccagcgccgggaagtccagggccgggccaaggactttgacgtgctggtggcagagctgaaggccaactcccgcaaaggggagtctcccaaggagaagagcccagggcgcaaggagcaagttctcgagcgcccctcccaggagctcccctcctcagtccaggttgtagcagcggtggctgctcccagcagcaccttctctgttcgtgccaagcagacctacccatactgtgcactgcccaggtcccgggcctcctccgagagtgaattggatgatgaaggcccctgtggtggtgatggggacccaggcctgttccccttccccatgccccggggtgggacccaggcctccagcgaagagagtgaggaggaggggacatctgacgacctccacccaccccctgactgccattatgcaacccggcccccacggccacaggcgttctgcacctttgggagccggctggtgagcccaggatgctatgtgtttagccgccggctggaccggttctgctcagcactcagctccatgctggaacggcacctcagcacacacatgtggaagaagatcccaccggcagctgaacctccagctcaccttgtcaactccccgttatctgctcccctgagcccatcctctacaggcacctgcccccgccttccaggtccaaccctgagacctgcctgcccagcctccatgccccccaccaaggacaaccttgtccccagctaccctgcaggctcccccagcgtggcggctgcctgtagccaggcagagtgcatgggcgggagccaggctatcacctcaccactgcctgccaacacgccatccccgtccttcagcaagctgccgccttccaaggccagcaagtcatccaaaggcaaggacggggtggaggtggaggccccttctcgaaagcggaagttatcccctggccctaccactcttaaacggacctgcatcctggagcccactggaaaagggaaaccctctggctgtaggggcctctcggccaaaactaaaacagccctgagcatggggcttaatgggacaatggggccaagagtgaagcgggcagggcccctggactgtcgtggctcccctcatcagctccccacaccagtcaaggcttctcagctggagaaccggggagcagctggacacccagccaaggccctgccaaccaactgcctctctgaggaggaggtggccaagaagcggaaaaacctggccacttattgccggccagtgaaggccaagcactgtcaggctggtgcccctgctgatgtggcctgctctgtgcgccgcaagaagccaggcccggccctggcctttgaggagaagtgctctacactgaagtcaaaagcccattaacgagaaagtgcctgcccactgcaacggagccgccagcacctcctcccctccagatccgggccccaggctgctgccgctttttataactttatattatttttttttaagaaaaaaagctctttaaaatacctcaa

SEQ ID NO: 1965 - DNA, 4375 bp, Homo sapiens
  source 1..4375: mol_type = unassigned DNA; mol_type = unassigned DNA
ggggacctgggagagtatctatttgggatgccacatagtagcagaaaggacccatcgagaaatctcaagaagagactcagggacttatagaaacattggttaaggacggtttcccctttaaatggggaagcaggcccagaaaagagatgatacttacccacaatcacccaactagttagcagtggaaccctaaactgcaccttgaagtgaagggtcccataagaaaggtggatggattcttcttagtggggccatcttagtccagatgcagcaggtgaaggaagatgggcatttgagaatggacccactgaaaggttccccaagtggtcctagcaccaggagcttgtcacggagtgtgggcttcatactgttgagctgcaggccctgcttggggcttctggaaaggggacaacctctgggttgtcttctgggaagaacagtctctggtaaggagaggctggagactctctaaaactggccctgacccttctgagctgtgtttctcctctaggggctgagctggaggagagtagcaaaaacacgaagaagttggatgccatgaccctcattaaagaaggtgggagtcgacacacattagggctgggacccagggcagacaggaccacgctccacttttccaccacactacagaaggaggtggctgcttgaagcagctgtctggggaccctcattttgataggtccgagtcggccggttgttctggctcctgtgacctgtcgttggagatcataatcataggtgattgcccactcacctgaaagcgtataccctttgggactgcttagatcgaactctggaagctggaagcattcagcatggagcttgttatatcagcggggaggtgaagtgccttctgagtgtggggtgggagtgctctccgatcttccagagaaaccctgggatcttcagccccagtgacatgggcttctgtcattgcagacatgtccatcttcgggcactgccctgcccatgatgacttctacttggttgtgtgtaaccactgcagccaagtggtgaagcctcaagctttccagaagcactgcgaaagaagacatgggcccctcagcaagctttatggccgggccccacccccacctccagcccctgccagctctcagaaatgccatgtagtgaatgggcagggcccagcttgtagggccccaggttccacgaaaacctcctccagggagaagggccaggggtcccggagccgtggccaccagcctcctgagaagacccagaaggacaacctctgccttttcgtgcctgtggtgaatctggagaagatgtccagtctcccgaagcctgatggacatggaatcagggtggccccaccctctgcttttctcagccagccagggggcctcaccaaggactcccctggaaaacctcccatggctcccccttctaaagaacctcctggcagagagaacatcgagatcatccccagtgaggggtccagtcactgggctgaaggcagccctcctgaaaaggagcccagtgggaccaggctgccccctaaaacccaccggaagatggctcggaaggagtgcgacctcaacaggcagtgtggggtaataaatccagagaccaaaaagatctgtacccgcctgttgacctgcaagatccactcagtacaccagcgccgggaagtccagggccgggccaaggactttgacgtgctggtggcagagctgaaggccaactcccgcaaaggggagtctcccaaggagaagagcccagggcgcaaggagcaagttctcgagcgcccctcccaggagctcccctcctcagtccaggttgtagcagcggtggctgctcccagcagcaccttctctgttcgtgccaagcagacctacccatactgtgcactgcccaggtacgtctagaatccaacccctacctcacctgggggtacttggcccctaagccatcaggggcccctggaaacaggctcagggagtgtcctggaagaggcactccctcagccctgagtgtgggggtattcctggggctcctgacagtggtgtggaagcaggagactcccctgtttccaaccaggcataccacagcaccccagcctctcggcagtgtgccagatccaacactcaggatatgaacattttcccagctgcctccaacagaccgaaacttgtcactggggagctgaaagggtcacactcctgggcaaggcagccctatgtgtattcactcactggccccttcgcgtgcagaggctatgccggaccccagggagagcctgacttgctgaaggagacacacatgcatctctgcctgtcacacaaggggcagacacgaaacacaggctcagctcacagacaggctcacaggaatatgtgatgcaagaagggggttgagcgagttgactgggctgaccagagctgggtacagttttaactgtgaagattttctggaggaggcggatctgcagcagattatcccctgaggaggaaggggctgggaggtgaaggggctggggagagaatcccttgggagcagtctctctgtctcttactctgtgagctgtgtcgttccctcctgtccttcccttccctctgtcctcttctgattgccctgcagggtgtctgccctggtgccctgctctttgagctcggcaggttcaaggatgcccctactctgaccccacaacagtcacattcccctggcatcccttttggcccttccaggtcccgggcctcctccgagagtgaattggatgatgaaggcccctgtggtggtgatggggacccaggcctgttccccttccccatgccccggggtgggacccaggcctccagcgaagagagtgaggaggaggggacatctgacgacctccacccaccccctgactgccattatgcaacccggcccccacggccacaggcgttctgcacctttgggagccggctggtgagcccaggatgctatgtgtttagccgccggctggaccggttctgctcagcactcagctccatgctggaacggcacctcagcacacacatgtggaagaagatcccaccggcagctgaacctccagctcaccttgtcaactccccgttatctgctcccctgagcccatcctctacaggcacctgcccccgccttccaggtccaaccctgagacctgcctgcccagcctccatgccccccaccaaggacaaccttgtccccagctaccctgcaggctcccccagcgtggcggctgcctgtagccaggcagagtgcatgggcgggagccaggctatcacctcaccactgcctgccaacacgccatccccgtccttcagcaagctgccgccttccaaggccagcaagtcatccaaaggcaaggacggggtggaggtggaggccccttctcgaaagcggaagttatcccctggccctaccactcttaaacggacctgcatcctggagcccactggaaaagggaaaccctctggctgtaggggcctctcggccaaaactaaaacagccctgagcatggggcttaatgggacaatggggccaagagtgaagcgggcagggcccctggactgtcgtggctcccctcatcagctccccacaccagtcaaggcttctcagctggagaaccggggagcagctggacacccagccaaggccctgccaaccaactgcctctctgaggaggaggtggccaagaagcggaaaaacctggccacttattgccggccagtgaaggccaagcactgtcaggctggtgcccctgctgatgtggcctgctctgtgcgccgcaagaagccaggcccggccctggcctttgaggagaagtgctctacactgaaggtaccagccaggctccctgaagattgatgagggtggggcacacagggggtacctgatacagagaagatgctacattggtgtttgtgcagggaaagggaggaaggggaagttgagagagttcctggactgttttctttaggaagaggtaggtcagttcttagcaaagtgactccagctttttgcctggtgaaccttcccctatccctaaccctttcccttgggctgaggagatgcggcacccctccacccctgcttttgctataatcaaagggctacttctttctgaattggctgtgaccctcattccaggtactggagctacctctgttccctgaaggaaagggagtttgagtccctgggtcacagcctaacatgccgagcagcaagtcaaaagcccattaacgagaaagtgcctgcccactgcaacggagccgccagcacctcctcccctccagatccgggccccaggctgctgccgctttttataactttatattatttttttttaagaaaaaaagctctttaaaat

SEQ ID NO: 1966 - DNA, 726 bp, Homo sapiens
  source 1..726: mol_type = unassigned DNA; mol_type = unassigned DNA
aacattttcccagctgcctccaacagaccgaaacttgtcactggggagctgaaagggtcacactcctgggcaaggcagccctatgtgtattcactcactggccccttcgcgtgcagaggctatgccggaccccagggagagcctgacttgctgaaggagacacacatgcatctctgcctgtcacacaaggggcagacacgaaacacaggctcagctcacagacaggctcacaggaatatgtgatgcaagaagggggttgagcgagttgactgggctgaccagagctgggtacagttttaactgtgaagattttctggaggaggcggatctgcagcagattatcccctgaggaggaaggggctgggaggtcccgggcctcctccgagagtgaattggatgatgaaggcccctgtggtggtgatggggacccaggcctgttccccttccccatgccccggggtgggacccaggcctccagcgaagagagtgaggaggaggggacatctgacgacctccacccaccccctgactgccattatgcaacccggcccccacggccacaggcgttctgcacctttgggagccggctggtgagcccaggatgctatgtgtttagccgccggctggaccggttctgctcagcactcagctccatgctggaacggcacctcagcacacacatgtggaagaagatcccaccggcagctgaacctccagctcaccttg

SEQ ID NO: 1967 - DNA, 1715 bp, Homo sapiens
  source 1..1715: mol_type = unassigned DNA; mol_type = unassigned DNA
cagctcacagacaggctcacaggaatatgtgatgcaagaagggggttgagcgagttgactgggctgaccagagctgggtacagttttaactgtgaagattttctggaggaggcggatctgcagcagattatcccctgaggaggaaggggctgggaggtgaaggggctggggagagaatcccttgggagcagtctctctgtctcttactctgtgagctgtgtcgttccctcctgtccttcccttccctctgtcctcttctgattgccctgcagggtgtctgccctggtgccctgctctttgagctcggcaggttcaaggatgcccctactctgaccccacaacagtcacattcccctggcatcccttttggcccttccaggtcccgggcctcctccgagagtgaattggatgatgaaggcccctgtggtggtgatggggacccaggcctgttccccttccccatgccccggggtgggacccaggcctccagcgaagagagtgaggaggaggggacatctgacgacctccacccaccccctgactgccattatgcaacccggcccccacggccacaggcgttctgcacctttgggagccggctggtgagcccaggatgctatgtgtttagccgccggctggaccggttctgctcagcactcagctccatgctggaacggcacctcagcacacacatgtggaagaagatcccaccggcagctgaacctccagctcaccttgtcaactccccgttatctgctcccctgagcccatcctctacaggcacctgcccccgccttccaggtccaaccctgagacctgcctgcccagcctccatgccccccaccaaggacaaccttgtccccagctaccctgcaggctcccccagcgtggcggctgcctgtagccaggcagagtgcatgggcgggagccaggctatcacctcaccactgcctgccaacacgccatccccgtccttcagcaagctgccgccttccaaggccagcaagtcatccaaaggcaaggacggggtggaggtggaggccccttctcgaaagcggaagttatcccctggccctaccactcttaaacggacctgcatcctggagcccactggaaaagggaaaccctctggctgtaggggcctctcggccaaaactaaaacagccctgagcatggggcttaatgggacaatggggccaagagtgaagcgggcagggcccctggactgtcgtggctcccctcatcagctccccacaccagtcaaggcttctcagctggagaaccggggagcagctggacacccagccaaggccctgccaaccaactgcctctctgaggaggaggtggccaagaagcggaaaaacctggccacttattgccggccagtgaaggccaagcactgtcaggctggtgcccctgctgatgtggcctgctctgtgcgccgcaagaagccaggcccggccctggcctttgaggagaagtgctctacactgaagtcaaaagcccattaacgagaaagtgcctgcccactgcaacggagccgccagcacctcctcccctccagatccgggccccaggctgctgccgctttttataactttatattatttttttttaagaaaaaaagctctttaaaatacctcaagactgtctccctgttctgttgctgctatgaaaatataaaaacagaaacatagaaaaggaaggaaaaaaaa

SEQ ID NO: 1968 - DNA, 929 bp, Homo sapiens
  source 1..929: mol_type = unassigned DNA; mol_type = unassigned DNA
cttccaggtccaaccctgagacctgcctgcccagcctccatgccccccaccaaggacaaccttgtccccagctaccctgcaggctcccccagcgtggcggctgcctgtagccaggcagagtgcatgggcgggagccaggctatcacctcaccactgcctgccaacacgccatccccgtccttcagcaagctgccgccttccaaggccagcaagtcatccaaaggcaaggacggggtggaggtggaggccccttctcgaaagcggaagttatcccctggccctaccactcttaaacggacctgcatcctggagcccactggaaaagggaaaccctctggctgtaggggcctctcggccaaaactaaaacagccctgagcatggggcttaatgggacaatggggccaagagtgaagcgggcagggcccctggactgtcgtggctcccctcatcagctccccacaccagtcaaggcttctcagctggagaaccggggagcagctggacacccagccaaggccctgccaaccaactgcctctctgaggaggaggtggccaagaagcggaaaaacctggccacttattgccggccagtgaaggccaagcactgtcaggctggtgcccctgctgatgtggcctgctctgtgcgccgcaagaagccaggcccggccctggcctttgaggagaagtgctctacactgaaggtactggagctacctctgttccctgaaggaaagggagtttgagtccctgggtcacagcctaacatgccgagcagcaagtcaaaagcccattaacgagaaagtgcctgcccactgcaacggagccgccagcacctcctcccctccagatccgggccccaggctgctgccgctttttataactttatattatttttttttaagaaaaaaagctctttaaaatacctcaa

SEQ ID NO: 1969 - DNA, 1457 bp, Homo sapiens
  source 1..1457: mol_type = unassigned DNA; mol_type = unassigned DNA
tggacacgccccctccctgtctcccaccgatgattggcgcacggaactccgccttgggtttggaaggctcgcctgggagctcatacctggctagggccgaggattggctgttccggggctagggagcgctttctcccgggaaccgcggctgtgacccaagtggcccggaccagtttggggctgcgtgcggcctgcctcaagcaaccaggtacgtaggtcggcggcccagctcggcgctgcggtgggagccggagggcgacagtcagagccggggtgccagcgggacgcgaccgccagatccacttaggaccccgtcgttctgcgaagcggccacgtctgagtcccggggcctcctcgtgctgcagatgtcgccttaggacctcggccaggataccctctgccatgctcttgtgctgcccgtgatcaccgactggcccttgtaagcaccttcgcagagctgcgcctgccctttctgaaggctgtggaagaggttggagtgggcgcatcttagcttgccccatccccatttgaggtctgtcggagctgcccttcagtgtgagcatccacaatgggtaccccagcctcggtggtcagtgagccacccccttggcaggccccgattgaggcccggggccgcaagcaggcctcggccaacatcttccaggacgccgagctgctgcagatccaagccctgtttcaacgcagcggggaccagctggccgaggaacgggcacagatcatctgggaatgtgcaggggaccaccgtgtggctgaggccctcaagaggctgcgcaggaagaggcccccaaggcagaaacccctgggccactcgctacaccactgcagccgcctcagaatcctggagccccactctgcactggccaacccacagagtgccacagagacagcctccagtgagcagtatctgcactctaggaagaaaagtgccaggatccgccggaactggaggaagtcaggccccacaagctacctccaccagatcagacactgatccagggaaagagccaggaatggcagtgtcttccctcttgccaaaaggcctggggaggtgaaggaagagagactttaggcaagcagcccaaaggggtaaatgaaagcaagaggctgctgccactgacctgctccattcagaacaagactggatgcttctgttgagctctccattatgtgggacccattcctcaccaaaatgaggagagacagtgactgttcctgccacagtccttcccagtctaacactattcctgggctgcatgatattcccctgggagcaaagtgacaggcacttagatgcagcatttcaccactcatgctactaatcatctacctgctactactgtaaaccatggttccagcagcctgttccacacccccacaccatcaggatagcacagggaaactgtagtttaagtggcaaataaaaacatttgcatcaa

SEQ ID NO: 1970 - DNA, 4737 bp, Homo sapiens
  source 1..4737: mol_type = unassigned DNA; mol_type = unassigned DNA
gggaaggaggcaggggtgctgagaaggcggctgctgggcagagccggtggcaagggcctcccctgccgctgtgccaggcaggcagtgccaaatccggggagcctggagctggggggagggccggggacagcccggccctgccccctcccccgctgggagcccaacaacttctgaggaaagtttggcacccatggcgtggcggtgccccaggatgggcagggtcccgctggcctggtgcttggcgctgtgcggctgggcgtgcatggcccccaggggcacgcaggctgaagaaagtcccttcgtgggcaacccagggaatatcacaggtgcccggggactcacgggcacccttcggtgtcagctccaggttcagggagagccccccgaggtacattggcttcgggatggacagatcctggagctcgcggacagcacccagacccaggtgcccctgggtgaggatgaacaggatgactggatagtggtcagccagctcagaatcacctccctgcagctttccgacacgggacagtaccagtgtttggtgtttctgggacatcagaccttcgtgtcccagcctggctatgttgggctggagggcttgccttacttcctggaggagcccgaagacaggactgtggccgccaacacccccttcaacctgagctgccaagctcagggacccccagagcccgtggacctactctggctccaggatgctgtccccctggccacggctccaggtcacggcccccagcgcagcctgcatgttccagggctgaacaagacatcctctttctcctgcgaagcccataacgccaagggggtcaccacatcccgcacagccaccatcacagtgctcccccagcagccccgtaacctccacctggtctcccgccaacccacggagctggaggtggcttggactccaggcctgagcggcatctaccccctgacccactgcaccctgcaggctgtgctgtcagacgatgggatgggcatccaggcgggagaaccagaccccccagaggagcccctcacctcgcaagcatccgtgcccccccatcagcttcggctaggcagcctccatcctcacaccccttatcacatccgcgtggcatgcaccagcagccagggcccctcatcctggacccactggcttcctgtggagacgccggagggagtgcccctgggcccccctgagaacattagtgctacgcggaatgggagccaggccttcgtgcattggcaagagccccgggcgcccctgcagggtaccctgttagggtaccggctggcgtatcaaggccaggacaccccagaggtgctaatggacatagggctaaggcaagaggtgaccctggagctgcagggggacgggtctgtgtccaatctgacagtgtgtgtggcagcctacactgctgctggggatggaccctggagcctcccagtacccctggaggcctggcgcccagggcaagcacagccagtccaccagctggtgaaggaaccttcaactcctgccttctcgtggccctggtggtatgtactgctaggagcagtcgtggccgctgcctgtgtcctcatcttggctctcttccttgtccaccggcgaaagaaggagacccgttatggagaagtgtttgaaccaacagtggaaagaggtgaactggtagtcaggtaccgcgtgcgcaagtcctacagtcgtcggaccactgaagctaccttgaacagcctgggcatcagtgaagagctgaaggagaagctgcgggatgtgatggtggaccggcacaaggtggccctggggaagactctgggagagggagagtttggagctgtgatggaaggccagctcaaccaggacgactccatcctcaaggtggctgtgaagacgatgaagattgccatctgcacgaggtcagagctggaggatttcctgagtgaagcggtctgcatgaaggaatttgaccatcccaacgtcatgaggctcatcggtgtctgtttccagggttctgaacgagagagcttcccagcacctgtggtcatcttacctttcatgaaacatggagacctacacagcttcctcctctattcccggctcggggaccagccagtgtacctgcccactcagatgctagtgaagttcatggcagacatcgccagtggcatggagtatctgagtaccaagagattcatacaccgggacctggcggccaggaactgcatgctgaatgagaacatgtccgtgtgtgtggcggacttcgggctctccaagaagatctacaatggggactactaccgccagggacgtatcgccaagatgccagtcaagtggattgccattgagagtctagctgaccgtgtctacaccagcaagagcgatgtgtggtccttcggggtgacaatgtgggagattgccacaagaggccaaaccccatatccgggcgtggagaacagcgagatttatgactatctgcgccagggaaatcgcctgaagcagcctgcggactgtctggatggactgtatgccttgatgtcgcggtgctgggagctaaatccccaggaccggccaagttttacagagctgcgggaagatttggagaacacactgaaggccttgcctcctgcccaggagcctgacgaaatcctctatgtcaacatggatgagggtggaggttatcctgaaccccctggagctgcaggaggagctgaccccccaacccagccagaccctaaggattcctgtagctgcctcactgcggctgaggtccatcctgctggacgctatgtcctctgcccttccacaacccctagccccgctcagcctgctgataggggctccccagcagccccagggcaggaggatggtgcctgagacaaccctccacctggtactccctctcaggatccaagctaagcactgccactggggaaaactccaccttcccactttcccaccccacgccttatccccacttgcagccctgtcttcctacctatcccacctccatcccagacaggtccctccccttctctgtgcagtagcatcaccttgaaagcagtagcatcaccatctgtaaaaggaaggggttggattgcaatatctgaagccctcccaggtgttaacattccaagactctagagtccaaggtttaaagagtctagattcaaaggttctaggtttcaaagatgctgtgagtctttggttctaaggacctgaaattccaaagtctctaattctattaaagtgctaaggttctaaggcctactttttttttttttttttttttttttttttttgcgatagagtctcactgtgtcacccaggctggagtgcagtggtgcaatctcgcctcactgcaaccttcacctaccgagttcaagtgattttcctgccttggcctcccaagtagctgggattacaggtgtgtgccaccacacccggctaatttttatatttttagtagagacagggtttcaccatgttggccaggctggtctaaaactcctgacctcaagtgatctgcccacctcagcctcccaaagtgctgagattacaggcatgagccactgcactcaaccttaagacctactgttctaaagctctgacattatgtggttttagattttctggttctaacatttttgataaagcctcaaggttttaggttctaaagttctaagattctgattttaggagctaaggctctatgagtctagatgtttattcttctagagttcagagtccttaaaatgtaagattatagattctaaagattctatagttctagacatggaggttctaaggcctaggattctaaaatgtgatgttctaaggctctgagagtctagattctctggctgtaaggctctagatcataaggcttcaaaatgttatcttctcaagttctaagattctaatgatgatcaattatagtttctgaggctttatgataatagattctcttgtataagatcctagatcctaagggtcgaaagctctagaatctgcaattcaaaagttccaagagtctaaagatggagtttctaaggtccggtgttctaagatgtgatattctaagacttactctaagatcttagattctctgtgtctaagattctagatcagatgctccaagattctagatgattaaataagattctaacggtctgttctgtttcaaggcactctagattccattggtccaagattccggatcctaagcatctaagttataagactctcacactcagttgtgactaactagacaccaaagttctaataatttctaatgttggacacctttaggttctttgctgcattctgcctctctaggaccatggttaagagtccaagaatccacatttctaaaatcttatagttctaggcactgtagttctaagactcaaatgttctaagtttctaagattctaaaggtccacaggtctagactattaggtgcaatttcaaggttctaaccctatactgtagtattctttggggtgcccctctccttcttagctatcattgcttcctcctccccaactgtgggggtgtgcccccttcaagcctgtgcaatgcattagggatgcctcctttcccgcaggggatggacgatctcccacctttcgggccatgttgcccccgtgagccaatccctcaccttctgagtacagagtgtggactctggtgcctccagaggggctcaggtcacataaaactttgtatatcaacga

SEQ ID NO: 1971 - DNA, 3206 bp, Homo sapiens
  source 1..3206: mol_type = unassigned DNA; mol_type = unassigned DNA
gctgggcagagccggtggcaagggcctcccctgccgctgtgccaggcaggcagtgccaaatccggggagcctggagctggggggagggccggggacagcccggccctgccccctcccccgctgggagcccaacaacttctgaggaaagtttggcacccatggcgtggcggtgccccaggatgggcagggtcccgctggcctggtgcttggcgctgtgcggctgggcgtgcatggcccccaggggcacgcaggctgaagaaagtcccttcgtgggcaacccagggaatatcacaggtgcccggggactcacgggcacccttcggtgtcagctccaggttcagggagagccccccgaggtacattggcttcgggatggacagatcctggagctcgcggacagcacccagacccaggtgcccctgggtgaggatgaacaggatgactggatagtggtcagccagctcagaatcacctccctgcagctttccgacacgggacagtaccagtgtttggtgtttctgggacatcagaccttcgtgtcccagcctggctatgttgggctggagggcttgccttacttcctggaggagcccgaagacaggactgtggccgccaacacccccttcaacctgagctgccaagctcagggacccccagagcccgtggacctactctggctccaggatgctgtccccctggccacggctccaggtcacggcccccagcgcagcctgcatgttccagggctgaacaagacatcctctttctcctgcgaagcccataacgccaagggggtcaccacatcccgcacagccaccatcacagtgctcccccagcagccccgtaacctccacctggtctcccgccaacccacggagctggaggtggcttggactccaggcctgagcggcatctaccccctgacccactgcaccctgcaggctgtgctgtcagacgatgggatgggcatccaggcgggagaaccagaccccccagaggagcccctcacctcgcaagcatccgtgcccccccatcagcttcggctaggcagcctccatcctcacaccccttatcacatccgcgtggcatgcaccagcagccagggcccctcatcctggacccactggcttcctgtggagacgccggagggagtgcccctgggcccccctgagaacattagtgctacgcggaatgggagccaggccttcgtgcattggcaagagccccgggcgcccctgcagggtaccctgttagggtaccggctggcgtatcaaggccaggacaccccagaggtgctaatggacatagggctaaggcaagaggtgaccctggagctgcagggggacgggtctgtgtccaatctgacagtgtgtgtggcagcctacactgctgctggggatggaccctggagcctcccagtacccctggaggcctggcgcccagtgaaggaaccttcaactcctgccttctcgtggccctggtggtatgtactgctaggagcagtcgtggccgctgcctgtgtcctcatcttggctctcttccttgtccaccggcgaaagaaggagacccgttatggagaagtgtttgaaccaacagtggaaagaggtgaactggtagtcaggtaccgcgtgcgcaagtcctacagtcgtcggaccactgaagctaccttgaacagcctgggcatcagtgaagagctgaaggagaagctgcgggatgtgatggtggaccggcacaaggtggccctggggaagactctgggagagggagagtttggagctgtgatggaaggccagctcaaccaggacgactccatcctcaaggtggctgtgaagacgatgaagattgccatctgcacgaggtcagagctggaggatttcctgagtgaagcggtctgcatgaaggaatttgaccatcccaacgtcatgaggctcatcggtgtctgtttccagggttctgaacgagagagcttcccagcacctgtggtcatcttacctttcatgaaacatggagacctacacagcttcctcctctattcccggctcggggaccagccagtgtacctgcccactcagatgctagtgaagttcatggcagacatcgccagtggcatggagtatctgagtaccaagagattcatacaccgggacctggcggccaggaactgcatgctgaatgagaacatgtccgtgtgtgtggcggacttcgggctctccaagaagatctacaatggggactactaccgccagggacgtatcgccaagatgccagtcaagtggattgccattgagagtctagctgaccgtgtctacaccagcaagagcgatgtgtggtccttcggggtgacaatgtgggagattgccacaagaggccaaaccccatatccgggcgtggagaacagcgagatttatgactatctgcgccagggaaatcgcctgaagcagcctgcggactgtctggatggactgtatgccttgatgtcgcggtgctgggagctaaatccccaggaccggccaagttttacagagctgcgggaagatttggagaacacactgaaggccttgcctcctgcccaggagcctgacgaaatcctctatgtcaacatggatgagggtggaggttatcctgaaccccctggagctgcaggaggagctgaccccccaacccagccagaccctaaggattcctgtagctgcctcactgcggctgaggtccatcctgctggacgctatgtcctctgcccttccacaacccctagccccgctcagcctgctgataggggctccccagcagccccagggcaggaggatggtgcctgagacaaccctccacctggtactccctctcaggatccaagctaagcactgccactggggaaaactccaccttcccactttcccaccccacgccttatccccacttgcagccctgtcttcctacctatcccacctccatcccagacaggtccctccccttctctgtgcagtagcatcaccttgaaagcagtagcatcaccatctgtaaaaggaaggggttggattgcaatatctgaagccctcccaggtgttaacattccaagactctagagtccaaggtttaaagagtctagattcaaaggttctaggtttcaaagatgctgtgagtctttggttctaaggacctgaaattccaaagtctctaattctattaaagtgctaaggttctaaggc

SEQ ID NO: 1972 - DNA, 1708 bp, Homo sapiens
  source 1..1708: mol_type = unassigned DNA; mol_type = unassigned DNA
aaagtttggcacccatggcgtggcggtgccccaggatgggcagggtcccgctggcctggtgcttggcgctgtgcggctgggcgtgcatggcccccaggggcacgcaggctgaagaaagtcccttcgtgggcaacccagggaatatcacaggtgcccggggactcacgggcacccttcggtgtcagctccaggttcagggagagccccccgaggtacattggcttcgggatggacagatcctggagctcgcggacagcacccagacccaggtgcccctgggtgaggatgaacaggatgactggatagtggtcagccagctcagaatcacctccctgcagctttccgacacgggacagtaccagtgtttggtgtttctgggacatcagaccttcgtgtcccagcctggctatgttgggctggagggcttgccttacttcctggaggagcccgaagacaggactgtggccgccaacacccccttcaacctgagctgccaagctcagggacccccagagcccgtggacctactctggctccaggatgctgtccccctggccacggctccaggtcacggcccccagcgcagcctgcatgttccagggctgaacaagacatcctctttctcctgcgaagcccataacgccaagggggtcaccacatcccgcacagccaccatcacagtgctcccccagcagccccgtaacctccacctggtctcccgccaacccacggagctggaggtggcttggactccaggcctgagcggcatctaccccctgacccactgcaccctgcaggctgtgctgtcagacgatgggatgggcatccaggcgggagaaccagaccccccagaggagcccctcacctcgcaagcatccgtgcccccccatcagcttcggctaggcagcctccatcctcacaccccttatcacatccgcgtggcatgcaccagcagccagggcccctcatcctggacccactggcttcctgtggagacgccggagggagtgcccctgggcccccctgagaacattagtgctacgcggaatgggagccaggccttcgtgcattggcaagagccccgggcgcccctgcagggtaccctgttagggtaccggctggcgtatcaaggccaggacaccccagaggtgctaatggacatagggctaaggcaagaggtgaccctggagctgcagggggacgggtctgtgtccaatctgacagtgtgtgtggcagcctacactgctgctggggatggaccctggagcctcccagtacccctggaggcctggcgcccagggcaagcacagccagtccaccagctggtgaaggaaccttcaactcctgccttctcgtggccctggtggtatgtactgctaggagcagtcgtggccgctgcctgtgtcctcatcttggctctcttccttgtccaccggcgaaagaaggagacccgttatggagaagtgtttgaaccaacagtggaaagaggtgaactggtagtcaggtaccgcgtgcgcaagtcctacagtcgtcggaccactgaagctacctgtaagtgaaccctatgccccactgccctggcctggatctaaaggctgtagagaatctggcctgctgggcttctgtacatgtgtgagccaaaagtttctaaaggccttgggatactagaatgtcagaaccacagaccctagaaataacagatttgtgg

SEQ ID NO: 1973 - DNA, 543 bp, Homo sapiens
  source 1..543: mol_type = unassigned DNA; mol_type = unassigned DNA
agatcccgagcctccttcccgacgggatggacgctagatcccagtcccttgggagggctcccgtcctcctctcagagcctccgccctccaccccactctgaggcacgcaggctgaagaaagtcccttcgtgggcaacccagggaatatcacaggtgcccggggactcacgggcacccttcggtgtcagctccaggttcagggagagccccccgaggtacattggcttcgggatggacagatcctggagctcgcggacagcacccagacccaggtgcccctgggtgaggatgaacaggatgactggatagtggtcagccagctcagaatcacctccctgcagctttccgacacgggacagtaccagtgtttggtgtttctgggacatcagaccttcgtgtcccagcctggctatgttgggctggagggcttgccttacttcctggaggagcccgaagacaggactgtggccgccaacacccccttcaacctgagctgccaagctcagggacccccagagcccgtggacctactctggctccagg

SEQ ID NO: 1974 - DNA, 2557 bp, Homo sapiens
  source 1..2557: mol_type = unassigned DNA; mol_type = unassigned DNA
agcacacgcgtaaacaacacgcagaactgcagtcgcacttacaagacttggtcccagggccgggcaccgagtggctctgcctgcgatccagcactttgggaggccgaggcgggaggatcgcttggggccagaagtttgagagcagcctgggcaacgtgggctgaacaagacatcctctttctcctgcgaagcccataacgccaagggggtcaccacatcccgcacagccaccatcacagtgctcccccagcagccccgtaacctccacctggtctcccgccaacccacggagctggaggtggcttggactccaggcctgagcggcatctaccccctgacccactgcaccctgcaggctgtgctgtcagacgatgggatgggcatccaggcgggagaaccagaccccccagaggagcccctcacctcgcaagcatccgtgcccccccatcagcttcggctaggcagcctccatcctcacaccccttatcacatccgcgtggcatgcaccagcagccagggcccctcatcctggacccactggcttcctgtggagacgccggagggagtgcccctgggcccccctgagaacattagtgctacgcggaatgggagccaggccttcgtgcattggcaagagccccgggcgcccctgcagggtaccctgttagggtaccggctggcgtatcaaggccaggacaccccagaggtgctaatggacatagggctaaggcaagaggtgaccctggagctgcagggggacgggtctgtgtccaatctgacagtgtgtgtggcagcctacactgctgctggggatggaccctggagcctcccagtacccctggaggcctggcgcccagggcaagcacagccagtccaccagctggtgaaggaaccttcaactcctgccttctcgtggccctggtggtatgtactgctaggagcagtcgtggccgctgcctgtgtcctcatcttggctctcttccttgtccaccggcgaaagaaggagacccgttatggagaagtgtttgaaccaacagtggaaagaggtgaactggtagtcaggtaccgcgtgcgcaagtcctacagtcgtcggaccactgaagctaccttgaacagcctgggcatcagtgaagagctgaaggagaagctgcgggatgtgatggtggaccggcacaaggtggccctggggaagactctgggagagggagagtttggagctgtgatggaaggccagctcaaccaggacgactccatcctcaaggtggctgtgaagacgatgaagattgccatctgcacgaggtcagagctggaggatttcctgagtgaagcggtctgcatgaaggaatttgaccatcccaacgtcatgaggctcatcggtgtctgtttccagggttctgaacgagagagcttcccagcacctgtggtcatcttacctttcatgaaacatggagacctacacagcttcctcctctattcccggctcggggaccagccagtgtacctgcccactcagatgctagtgaagttcatggcagacatcgccagtggcatggagtatctgagtaccaagagattcatacaccgggacctggcggccaggaactgcatgctgaatgagaacatgtccgtgtgtgtggcggacttcgggctctccaagaagatctacaatggggactactaccgccagggacgtatcgccaagatgccagtcaagtggattgccattgagagtctagctgaccgtgtctacaccagcaagagcgatgtgtggtccttcggggtgacaatgtgggagattgccacaagaggccaaaccccatatccgggcgtggagaacagcgagatttatgactatctgcgccagggaaatcgcctgaagcagcctgcggactgtctggatggactgtatgccttgatgtcgcggtgctgggagctaaatccccaggaccggccaagttttacagagctgcgggaagatttggagaacacactgaaggccttgcctcctgcccaggagcctgacgaaatcctctatgtcaacatggatgagggtggaggttatcctgaaccccctggagctgcaggaggagctgaccccccaacccagccagaccctaaggattcctgtagctgcctcactgcggctgaggtccatcctgctggacgctatgtcctctgcccttccacaacccctagccccgctcagcctgctgataggggctccccagcagccccagggcaggaggatggtgcctgagacaaccctccacctggtactccctctcaggatccaagctaagcactgccactggggaaaactccaccttcccactttcccaccccacgccttatccccacttgcagccctgtcttcctacctatcccacctccatcccagacaggtccctccccttctctgtgcagtagcatcaccttgaaagcagtagcatcaccatctgtaaaaggaaggggttggattgcaatatctgaagccctcccaggtgttaacattccaagactctagagtccaaggtttaaagagtctagattcaaaggt

SEQ ID NO: 1975 - DNA, 679 bp, Homo sapiens
  source 1..679: mol_type = unassigned DNA; mol_type = unassigned DNA
agcagctggactgagactgggggacagaactccaaagcccactgagatgtgggaaaacatggagaagcacacggagcattcacaacttattgccgtcagagtcaatacatggatcctccctctgtggtggtcaccagccaccaggccccaggagaaaagaagaaactgaagtgcctggcctacgacttctacccagggaaaattgatgtgcactggactcgggccggcgaggtgcaggagcctgagttacggggagatgttcttcacaatggaaatggcacttaccagtcctgggtggtggtggcagtgcccccgcaggacacagccccctactcctgccacgtgcagcacagcagcctggcccagcccctcgtggtgccctgggaggccagctaggaagcaagggttggaggcaatgtgggatctcagacccagtagctgcccttcctgcctgatgtgggagctgaaccacagaaatcacagtcaatggatccacaaggcctgaggagcagtgtggggggacagacaggaggtggatttggagaccgaagactgggatgcctgtcttgagtagacttggacccaaaaaatcatctcaccttgagcccacccccaccccattgtctaatctgtagaagctaataaataatcatccctccttgcctagcataacagagaa

SEQ ID NO: 1976 - DNA, 1307 bp, Homo sapiens
  source 1..1307: mol_type = unassigned DNA; mol_type = unassigned DNA
atcatttttttttctctattaggggaggagcccgtcctggcactcccattggcctgtagattcacctcccctgggcagggccccaggacccaggataatatctgtgcctcctgcccagaaccctccaagcagacacaatggtaagaatggtgcctgtcctgctgtctctgctgctgcttctgggtcctgctgtcccccaggagaaccaagatggtcgttactctctgacctatatctacactgggctgtccaagcatgttgaagacgtccccgcgtttcaggcccttggctcactcaatgacctccagttctttagatacaacagtaaagacaggaagtctcagcccatgggactctggagacaggtggaaggaatggaggattggaagcaggacagccaacttcagaaggccagggaggacatctttatggagaccctgaaagacatcgtggagtattacaacgacagtaacgggtctcacgtattgcagggaaggtttggttgtgagatcgagaataacagaagcagcggagcattctggaaatattactatgatggaaaggactacattgaattcaacaaagaaatcccagcctgggtccccttcgacccagcagcccagataaccaagcagaagtgggaggcagaaccagtctacgtgcagcgggccaaggcttacctggaggaggagtgccctgcgactctgcggaaatacctgaaatacagcaaaaatatcctggaccggcaagatcctccctctgtggtggtcaccagccaccaggccccaggagaaaagaagaaactgaagtgcctggcctacgacttctacccagggaaaattgatgtgcactggactcgggccggcgaggtgcaggagcctgagttacggggagatgttcttcacaatggaaatggcacttaccagtcctgggtggtggtggcagtgcccccgcaggacacagccccctactcctgccacgtgcagcacagcagcctggcccagcccctcgtggtgccctgggaggccagctaggaagcaagggttggaggcaatgtgggatctcagacccagtagctgcccttcctgcctgatgtgggagctgaaccacagaaatcacagtcaatggatccacaaggcctgaggagcagtgtggggggacagacaggaggtggatttggagaccgaagactgggatgcctgtcttgagtagacttggacccaaaaaatcatctcaccttgagcccacccccaccccattgtctaatctgtagaagctaataaataatcatccctccttgcctagca

SEQ ID NO: 1977 - DNA, 719 bp, Homo sapiens
  source 1..719: mol_type = unassigned DNA; mol_type = unassigned DNA
tgacctatatctacactgggctgtccaagcatgttgaagacgtccccgcgtttcaggcccttggctcactcaatgacctccagttctttagatacaacagtaaagacaggaagtctcagcccatgggactctggagacagcaaaaatatcctggaccggcaagatcctccctctgtggtggtcaccagccaccaggccccaggagaaaagaagaaactgaagtgcctggcctacgacttctacccagggaaaattgatgtgcactggactcgggccggcgaggtgcaggagcctgagttacggggagatgttcttcacaatggaaatggcacttaccagtcctgggtggtggtggcagtgcccccgcaggacacagccccctactcctgccacgtgcagcacagcagcctggcccagcccctcgtggtgccctgggaggccagctaggaagcaagggttggaggcaatgtgggatctcagacccagtagctgcccttcctgcctgatgtgggagctgaaccacagaaatcacagtcaatggatccacaaggcctgaggagcagtgtggggggacagacaggaggtggatttggagaccgaagactgggatgcctgtcttgagtagacttggacccaaaaaatcatctcaccttgagcccacccccaccccattgtctaatctgtagaagctaataaataatcatccctccttgcctagc

SEQ ID NO: 1978 - DNA, 2027 bp, Homo sapiens
  source 1..2027: mol_type = unassigned DNA; mol_type = unassigned DNA
gtaagaatggtgcctgtcctgctgtctctgctgctgcttctgggtcctgctgtcccccaggagaaccaagatggtcgttactctctgacctatatctacactgggctgtccaagcatgttgaagacgtccccgcgtttcaggcccttggctcactcaatgacctccagttctttagatacaacagtaaagacaggaagtctcagcccatgggactctggagacaggtggaaggaatggaggattggaagcaggacagccaacttcagaaggccagggaggacatctttatggagaccctgaaagacatcgtggagtattacaacgacagtaacgggtctcacgtattgcagggaaggtttggttgtgagatcgagaataacagaagcagcggagcattctggaaatattactatgatggaaaggactacattgaattcaacaaagaaatcccagcctgggtccccttcgacccagcagcccagataaccaagcagaagtgggaggcagaaccagtctacgtgcagcgggccaaggcttacctggaggaggagtgccctgcgactctgcggaaatacctgaaatacagcaaaaatatcctggaccggcaaggtactcactgcttcctgctccccagtactgagcccagaataaaagacgatctcaggctaggagctcaggcaacatcttagtccggtctcatctgttcctggatgtccctcagacccccagctttcatcttttaggatttattccttccctgggataatataatttgtggtccaaaaagaacatcatcaaaatttcaggcagaatgggccaggaaggccattctttcttgatgagtgtccccaaatcatctccaattaacagacaaggagcttgaggttagggaggtgagggtaacactgtctgtaagaggcagagctgggactcaaattccagatttcagattccaaatcccatcgttttttatctctacaatgatgcctcccatctgggtggtggagagaagggaggcgtgtaaaatgtcagccccagaaggacaagagcaagccagtgtgagcggaattgatggctgcaagctgagacttggattggagacgtagtgagactcaggattgtgcagtgctgcagggaagtggttgctggatagaggcatgggctgaaccaagcagctggactgagactgggggacagaactccaaagcccactgagatgtgggaaaacatggagaagcacacggagcattcacaacttattgccgtcagagtcaatacatgggtgaggtggggattgggcaagagggaaagcgtcagccttccctgatattctggaaagtctcccggggctgggggtgggcaggtacagagcttcgagctctgctgatcgctgacatccaggggtgggggtaggaagagacctgggccgggagaagtccacctcaagcctgcagtgtcacactctatccctccacagatcctccctctgtggtggtcaccagccaccaggccccaggagaaaagaagaaactgaagtgcctggcctacgacttctacccagggaaaattgatgtgcactggactcgggccggcgaggtgcaggagcctgagttacggggagatgttcttcacaatggaaatggcacttaccagtcctgggtggtggtggcagtgcccccgcaggacacagccccctactcctgccacgtgcagcacagcagcctggcccagcccctcgtggtgccctgggaggccagctaggaagcaagggttggaggcaatgtgggatctcagacccagtagctgcccttcctgcctgatgtgggagctgaaccacagaaatcacagtcaatggatccacaaggcctgaggagcagtgtggggggacagacaggaggtggatttggagaccgaagactgggatgcctgtcttgagtagacttggacccaaaaaatcatctcaccttgagcccacccccaccccattgtctaatctgtagaagctaataaataatcatccctcctt

SEQ ID NO: 1979 - DNA, 787 bp, Homo sapiens
  source 1..787: mol_type = unassigned DNA; mol_type = unassigned DNA
ctggaacccctgggctcaagcgatccactcgcttcagcttctcaaagtgctgggattacaggcatgagccacagcgcccaggctgtagctctcttaaggaggaacatatctcatctgagacaaacctgaaatgccaaaccaaactgagttagcccctctctgtctgttgtatatattggagtaataacctatttgtcttgataaagggattgcatgcttgaattgcaaaaacctttatttcttttgggttgcccaatgtgcaagactaagagttattttgataaatttctcaccaggctgactgtctctctgtggggtcgggggagttttcagggtctcacgtattgcagggaaggtttggttgtgagatcgagaataacagaagcagcggagcattctggaaatattactatgatggaaaggactacattgaattcaacaaagaaatcccagcctgggtccccttcgacccagcagcccagataaccaagcagaagtgggaggcagaaccagtctacgtgcagcgggccaaggcttacctggaggaggagtgccctgcgactctgcggaaatacctgaaatacagcaaaaatatcctggaccggcaagatcctccctctgtggtggtcaccagccaccaggccccaggagaaaagaagaaactgaagtgcctggcctacgacttctacccagggaaaattgatgtgcactggactcgggccggcgaggtgcaggagcctgagttacggggagatgttcttcacaatggaaatggcacttaccagtc

SEQ ID NO: 1980 - DNA, 540 bp, Homo sapiens
  source 1..540: mol_type = unassigned DNA; mol_type = unassigned DNA
cagaaccctccaagcagacacaatggtaagaatggtgcctgtcctgctgtctctgctgctgcttctgggtcctgctgtcccccaggagaaccaagatggtcgttactctctgacctatatctacactgggctgtccaagcatgttgaagacgtccccgcgtttcaggcccttggctcactcaatgacctccagttctttagatacaacagtaaagacaggaagtctcagcccatgggactctggagacaggtggaaggaatggaggattggaagcaggacagccaacttcagaaggccagggaggacatctttatggagaccctgaaagacatcgtggagtattacaacgacagtaacggtcagtgaataacagaccacaggggtggaaggtctaacccaagaggcagcccccccagtgtgagtggcaagggatcagcaggatggaaatagtcccaatcccaggggaagaacaggagacacagcagaaacacagacatgtccacatcccacccaccccacagcacaggtgctccccgctt

SEQ ID NO: 1981 - DNA, 4721 bp, Homo sapiens
  source 1..4721: mol_type = unassigned DNA; mol_type = unassigned DNA
atcaccgagggcgggcgcctcagcccgggaggacactccccagggtaaactacaggcctcacaaagcggagggagctggacgcgaaggctcggcagcggcgccgacaggcttaccccaggcccactctaggccgcacagggttcgcgccacctccggcccaggacagctctcagacgctgccagcgtggagctcgacccggctcacaatgcgctgggccccgcagcgtgagcgcaggcgcccgagaggcggcgggggtcgggcggacggcgcgctccagccgagccgcctccctctctcggcccacacccgcgcggccgcccttcgcctgccggggagctgcgggtggctggagggcgggaagcgaccggccagtctgcacctgcatgacccggtcgcgcgccgacccctcccctctctctcccgggctcagtcctccttcctcttccgtccccctcccttttctccgggctgcaaccgggttccgccccgctcgcgcggctgcccggccagctgtgatgtcaccaggccacgccccctaatataaatactggcgtcgctggcgccgccttctcacactttcaggctctgatcgcggccgcagtttttccttttttcttctgccgtcgccttctctgcctcttctcatcctttctcgctctgctgctctgcagtgtgacgagtccgaatcctcttcccacccagcccgcgcctttcttcttttgcctgcgctgttctatttctccttcggccgccgccgccactgctgcacacagctggtgtcggtgccgcgcttttacccccaagtcgttcccgcagcctatggcccaggccgccttgggtatttctgctcaaggtaaccacatccctctttaaaaattccgccgaaaaagagaagacgctttacccgactctttgggccgttatctcacggcgaactttctgaccaagtatacaactacccagagggcctaggagaagtgctgtatagagagcagttcgacttcaacgctgagccaccttgggaacctagctgatgataggggggttccatctcccaacttgtccattttgttgcatattctaaggacccagacataggcttggtggcccgtctcttgtctttcctggtttatgactttcggctttgtggaatacggctgagatgaaaggatttattgatgatgcaaactactccgttggcctgttggatgaaggaacaaaccttggaaatgttattgataactatgtttatgaacataccctgacagggaaaaatgcattttttgtgggagatcttggaaagattgtgaagaaacacagtcaatggcagaatgtagtggctcagataaagccattctacacagtgaagtgcaactctgctccagctgtacttgagattttggcagctcttggaaccggatttgcttgttccagtaaaaatgaaatggctttagtgcaagagttgggtgtacctccagaaaacattatttacataagtccttgcaagcaagtgtctcagataaagtatgcagcaaaagttggagtgaatatcctgacatgtgacaatgaaattgaattgaagaaaattgcacgtaatcacccaaatgccaaggtcttactacatattgcaacagaagataatattggaggtgaagagggtaacatgaagtttggcactaccctgaagaactgtaggcatctcttggaatgtgctaaggaacttgatgtccaaataattggggttaaatttcatgtttcgagtgcttgcaaagaatctcaagtatatgtacatgctctatctgatgctcgatgtgtgtttgacatggctggagaaattggctttacgatgaacatgttagacattggtggaggattcacgggaactgaatttcaattggaagaggttaatcatgttatcagccctctgttggatatctactttcctgaaggatctggtgttaagataatttcagaacccggaagctactatgtgtcttctgcatttacactcgcagttaatatcatagcaaagaaagttgttgaaaatgataaatttccctctggagtagaaaaaaccggaagtgatgaaccagccttcatgtattatatgaatgatggtgtttatggttcttttgcaagtaaactgtctgaggacttaaataccattccagaggttcacaagaaatacaaggaagatgagcctctgtttacaagcagcctttggggtccatcctgtgatgagcttgatcaaattgtggaaagctgtcttcttcctgagctgaatgtgggagattggcttatctttgataacatgggagcagattctttccatgaaccatctgcttttaatgattttcagaggccagccatttattacatgatgtcattcagtgattggtatgagatgcaagatgctggaattacttcagactcaatgatgaagaacttcttctttgtgccttcttgcattcagctgagccaagaagacagcttttccgctgaagcttaaacaggcattaacgcttctttagatctgaagttgcaggttaagcttgtctggtcaacattccagtgtggaaaaataatttaaacaatcttattctcttaattcttttggcaacaaaaactattagtaatagctatttgggaccagacaaaatcagctttcatctataattcattggggataatgggagatttagataatgtatccagatttaaacctaccagtttgtcctaccccttaagcgtttaaaataaaatatgcaacaaaatggatgacttagtggagatggaagcccattaattgggttccccattaaatcgtttacatacaagaacacagtttttatactaaggatttgtgtttaaagtcttgtaaagttcatgtctttcacccagatatatcaaatgttagaagaccagtgtgacttcattagataacgtttagtgtatttagaatgtgtaaatttgtgctttgaactgtagtttaataaatgtaaaattgcatcatagtatttgttgacctaatgtaacccttgtatgattgcaataaaattttgtgtagattttactgttttttcaggctaaaactttgggaaaggggctagctagcaaaggtagttttgaaatagatgtgtatatggactgttttgaagggtttttttctttatagcccagttaagttttgtttggctcggtgcatttttcatttatttaattagtaatttaagtaaagtgtttggtaaatcattgtgaagttcagattcattatggagagttgatgtgcagtaagcatgatgtttaacaattttaacaccaaaaatgttaatcctgcataaatcaactgtaataataaataggtgtttctgtatagatagaatgcatagagtaccttagtaaatctttgaatcacaatcttttggctgaaatggaagattctgttaaatactttgaataaacttggggggagggaaataaaattgcagaaaactgcagagcactaaaacttaaagaagggctacatctttatccagaaacctgttgctcttttgcacggaatgtttaaattcagagttgggatgggggttggggtgaagcacacttattatcttcagttgcagtgatttcaaatttaggattttttgttgttggtttgaactgtccccttagtttcttgttatttccaatttgttctgcttagtcattacttttaattcttttcttactaaaattttatggtggttgggggaagggagttagcatcactaacctgacagttgttgccaggaatttgctttgtttactgctagtatattagaaatcctagatctcagaatcacaatagtaataaacaacaggggtcattttttcctaacttactctgtgttcaggtgtggaatttctgtctcccaagaggaaatgtgacttcactttggtgccaatggacagaaaattctacctgtgctacataggagaagtttggaatgcacttaatagctggtttttacaccttgatttcgaggtggaaagaaattgatcatgaatctctaataaatttaaatctcttaaaccagtaggtgcttaatattttttgatttgattaatgcccatttaaatctcatgggttctattaaaaatatatatatatagggccccaatccattgccatcaaattgcccttggacttttccaaggtatattatggggttttatgcaaaattccaagctaccatgtaactttttttaaccatttaacaaggagggggaactgtttcctaccttctttacatgttgtgcattgttgtggtccagaaatgccaaacctttttaaagatggtgcaactttgagtccttggcttgactatacaggccttgaacttcatggcatatcaactttgccatatctgcaggagagctgttctataagaaatagctcagagttgcaaatatcacatgtgaatgatacggtaacttttaagaaatgtctgtattgtatttgaagactgtttgccataaatctgaaatttgaacctatgtatttcaatttggtatgctaaaaagttctgaattaatgtaaagttttttgttataatattgtaatctcagttcaaaagttaactgcaaatataaaacccaatgatttctatatagtaaattgaactgtaaaggtaacttgtgtgtgattctgaatacatagataaatgtttttattcctca

SEQ ID NO: 1982 - DNA, 2857 bp, Homo sapiens
  source 1..2857: mol_type = unassigned DNA; mol_type = unassigned DNA
aaatactggcgtcgctggcgccgccttctcacactttcaggctctgatcgcggccgcagtttttccttttttcttctgccgtcgccttctctgcctcttctcatcctttctcgctctgctgctctgcagtgtgacgagtccgaatcctcttcccacccagcccgcgcctttcttcttttgcctgcgctgttctatttctccttcggccgccgccgccactgctgcacacagctggtgtcggtgccgcgcttttacccccaagtcgttcccgcagcctatggcccaggccgccttgggtatttctgctcaaggtaaccacatccctctttaaaaattccgccgaaaaagagaagacgctttacccgactctttgggccgttatctcacggcgaactttctgaccaagtatacaactacccagagggcctaggagaagtgctgtatagagagcagttcgacttcaacgctgagccaccttgggaacctagctgatgataggggggttccatctcccaacttgtccatggaggtcttcacttcagaaatccaagactcatattcatccagcttggtgtcaagtgggctgttgctgccagaattatcttgtgattatttgagagatgtatcagtttcttctgaagtacaatcaactgtagaagcctttgtagcagtttgttgcatattctaaggacccagacataggcttggtggcccgtctcttgtctttcctggtttatgactttcggctttgtggaatacggctgagatgaaaggatttattgatgatgcaaactactccgttggcctgttggatgaaggaacaaaccttggaaatgttattgataactatgtttatgaacataccctgacagggaaaaatgcattttttgtgggagatcttggaaagattgtgaagaaacacagtcaatggcagaatgtagtggctcagataaagccattctacacagtgaagtgcaactctgctccagctgtacttgagattttggcagctcttggaaccggatttgcttgttccagtaaaaatgaaatggctttagtgcaagagttgggtgtacctccagaaaacattatttacataagtccttgcaagcaagtgtctcagataaagtatgcagcaaaagttggagtgaatatcctgacatgtgacaatgaaattgaattgaagaaaattgcacgtaatcacccaaatgccaaggtcttactacatattgcaacagaagataatattggaggtgaagagggtaacatgaagtttggcactaccctgaagaactgtaggcatctcttggaatgtgctaaggaacttgatgtccaaataattggggttaaatttcatgtttcgagtgcttgcaaagaatctcaagtatatgtacatgctctatctgatgctcgatgtgtgtttgacatggctggagaaattggctttacgatgaacatgttagacattggtggaggattcacgggaactgaatttcaattggaagaggttaatcatgttatcagccctctgttggatatctactttcctgaaggatctggtgttaagataatttcagaacccggaagctactatgtgtcttctgcatttacactcgcagttaatatcatagcaaagaaagttgttgaaaatgataaatttccctctggagtagaaaaaaccggaagtgatgaaccagccttcatgtattatatgaatgatggtgtttatggttcttttgcaagtaaactgtctgaggacttaaataccattccagaggttcacaagaaatacaaggaagatgagcctctgtttacaagcagcctttggggtccatcctgtgatgagcttgatcaaattgtggaaagctgtcttcttcctgagctgaatgtgggagattggcttatctttgataacatgggagcagattctttccatgaaccatctgcttttaatgattttcagaggccagccatttattacatgatgtcattcagtgattggtatgagatgcaagatgctggaattacttcagactcaatgatgaagaacttcttctttgtgccttcttgcattcagctgagccaagaagacagcttttccgctgaagcttaaacaggcattaacgcttctttagatctgaagttgcaggttaagcttgtctggtcaacattccagtgtggaaaaataatttaaacaatcttattctcttaattcttttggcaacaaaaactattagtaatagctatttgggaccagacaaaatcagctttcatctataattcattggggataatgggagatttagataatgtatccagatttaaacctaccagtttgtcctaccccttaagcgtttaaaataaaatatgcaacaaaatggatgacttagtggagatggaagcccattaattgggttccccattaaatcgtttacatacaagaacacagtttttatactaaggatttgtgtttaaagtcttgtaaagttcatgtctttcacccagatatatcaaatgttagaagaccagtgtgacttcattagataacgtttagtgtatttagaatgtgtaaatttgtgctttgaactgtagtttaataaatgtaaaattgcatcatagtatttgttgacctaatgtaacccttgtatgattgcaataaaattttgtgtagattttactgttttttcaggctaaaactttgggaaaggggctagctagcaaaggtagttttgaaatagatgtgtatatggactgttttgaagggtttttttctttatagcccagttaagttttgtttggctcggtgcatttttcatttatttaattagtaatttaagtaaagtgtttggtaaatcat

SEQ ID NO: 1983 - DNA, 565 bp, Homo sapiens
  source 1..565: mol_type = unassigned DNA; mol_type = unassigned DNA
ttttagtagagatggagttttgccatgttgttcaggctgatcttgaactcctgacctcaagtgatcctcccacctcagcctcacaaagtgctaggattacagtagaaaaaaccggaagtgatgaaccagccttcatgtattatatgaatgatggtgtttatggttcttttgcaagtaaactgtctgaggacttaaataccattccagaggttcacaagaaatacaaggaagatgagcctctgtttacaagcagcctttggggtccatcctgtgatgagcttgatcaaattgtggaaagctgtcttcttcctgagctgaatgtgggagattggcttatctttgataacatgggagcagattctttccatgaaccatctgcttttaatgattttcagaggccagccatttattacatgatgtcattcagtgattggtatgagatgcaagatgctggaattacttcagactcaatgatgaagaacttcttctttgtgccttcttgcattcagctgagccaagaagacagcttttccgctgaagcttaaacaggcattaacgcttcttt

SEQ ID NO: 1984 - DNA, 839 bp, Homo sapiens
  source 1..839: mol_type = unassigned DNA; mol_type = unassigned DNA
ttgtacataaataggtggtagtcttttaaacaaagaatgggatcatgctgtgccttacacaatagataacattccatgtcagtctagttttaagttttaatttaagtcaacataaaaattaatgaagtactatctcgaatagatgaagggaaaagaagaatggactttacgggtacagttctatggattttagtacttgtgtgaccactgccacaatcaggaagtattctattctgaaactttatcactagtaatactagtgaataatagtaatgctgttactcagcttgattaatgttcatttttatttatttcacaacagacacatttttgtatttggttgggtaaaattgaatgttcagttttatgctcaactgaatgtgatacgatttggtagtgcttgttacttcactatataaacataaaagtgccacatatacataaaagcacaccttattgtataaccgtggaacagtactgataattgacttattgttaagaatttttgtttatagaattacagttttatcttggcattgccttttctataaagctggtactgtaacttttgggtaattagaagctaatgcttctaatactttaaatatttggtaaagttaatggggatacttaatggtatgaatatgatgagtgacagttgaaagaaattacaggaggtgtctctacaactttctgctcctttaaatttagtattctatgtgtttcagatttcatgtttcgagtgcttgcaaagaatctcaagtatatgtacatgctctatctgatgctcgatgtgtgtttgacatggctggagaaattggctttacgatgaacatgtt

SEQ ID NO: 1985 - DNA, 680 bp, Homo sapiens
  source 1..680: mol_type = unassigned DNA; mol_type = unassigned DNA
gtgctgtatagagagcagttcgacttcaacgctgagccaccttgggaacctagctgatgataggggggttccatctcccaacttgtccattttgttgcatattctaaggacccagacataggcttggtggcccgtctcttgtctttcctggtttatgactttcggctttgtggaatacggctgagatgaaaggatttattgatgatgcaaactactccgttggcctgttggatgaaggaacaaaccttggaaatgttattgataactatgtttatgaacataccctgaatgaaatggctttagtgcaagagttgggtgtacctccagaaaacattatttacataagtccttgcaagcaagtgtctcagataaagtatgcagcaaaagttggagtgaatatcctgacatgtgacaatgaaattgaattgaagaaaattgcacgtaatcacccaaatgccaaggtcttactacatattgcaacagaagataatattggaggtgaagagggtaacatgaagtttggcactaccctgaagaactgtaggcatctcttggaatgtgctaaggaacttgatgtccaaataattggggttaaatttcatgtttcgagtgcttgcaaagaatctcaagtatatgtacatgctctatctgatgctcgatgtgtgtttgacatggctgga

SEQ ID NO: 1986 - DNA, 872 bp, Homo sapiens
  source 1..872: mol_type = unassigned DNA; mol_type = unassigned DNA
gataggggggttccatctcccaacttgtccattttgttgcatattctaaggacccagacataggcttggtggcccgtctcttgtctttcctggtttatgactttcggctttgtggaatacggctgagatgaaaggatttattgatgatgcaaactactccgttggcctgttggatgaaggaacaaaccttggaaatgttattgataactatgtttatgaacataccctgacagggaaaaatgcattttttgtgggagatcttggaaagattgtgaagaaacacagtcaatggcagaatgtagtggctcagataaagccattctacacagtgaagtgcaactctgctccagctgtacttgagattttggcagctcttggaaccggatttgcttgttccagtaaaaatgaaatggctttagtgcaagagttgggtgtacctccagaaaacattatttacataagtccttgcaagcaagtgtctcagataaagtatgcagcaaaagttggagtgaatatcctgacatgtgacaatgaaattgaattgaagaaaattgcacgtaatcacccaaatgccaagattgtttttcattaggttcacttgattcatccgtcgctggatttgggagcactggcaacataatcaacacacttcctacaatcttcaggcttcacatgtgctgatgatgatgtaaaccaactctgccccaatcatctccccttctcttagggtcttactacatattgcaacagaagataatattggaggtgaagagggtaacatgaagtttggcactaccctgaagaactgtaggcatctcttggaatgtgctaaggaacttgatgtccaaataattggggttaagtgagtattt

SEQ ID NO: 1987 - DNA, 660 bp, Homo sapiens
  source 1..660: mol_type = unassigned DNA; mol_type = unassigned DNA
acacatggaggttcctggagagtggcgggcccagggagggcatggaggtttcacatccctccccctgtatcttgccctatgtgtctcttcatctgtatccttcgcaatatcctttataataaaccagtaaacacagggcgaactttctgaccaagtatacaactacccagagggcctaggagaagtgctgtatagagagcagttcgacttcaacgctgagccaccttgggaacctagctgatgataggggggttccatctcccaacttgtccattttgttgcatattctaaggacccagacataggcttggtggcccgtctcttgtctttcctggtttatgactttcggctttgtggaatacggctgagatgaaaggatttattgatgatgcaaactactccgttggcctgttggatgaaggaacaaaccttggaaatgttattgataactatgtttatgaacataccctgacagggaaaaatgcattttttgtgggagatcttggaaagattgtgaagaaacacagtcaatggcagaatgtagtggctcagataaagccattctacacagtgaagtgcaactctgctccagctgtacttgagattttggcagctcttggaaccggatttgcttgttccagtaaaaatgaaatggcttta

SEQ ID NO: 1988 - DNA, 773 bp, Homo sapiens
  source 1..773: mol_type = unassigned DNA; mol_type = unassigned DNA
cttttttcttctgccgtcgccttctctgcctcttctcatcctttctcgctctgctgctctgcagtgtgacgagtccgaatcctcttcccacccagcccgcgcctttcttcttttgcctgcgctgttctatttctccttcggccgccgccgccactgctgcacacagctggtgtcggtgccgcgcttttacccccaagtcgttcccgcagcctatggcccaggccgccttgggtatttctgctcaaggtaaccacatccctctttaaaaattccgccgaaaaagagaagacgctttacccgactctttgggccgttatctcacgagttctttcctcatcatccataaatgtcattcattgagcatgtgatcagcttctcctagatagatgaaacattttgcctccaccaggagtgccttgatcctggtgagatacactttagggcgaactttctgaccaagtatacaactacccagagggcctaggagaagtgctgtatagagagcagttcgacttcaacgctgagccaccttgggaacctagctgatgataggggggttccatctcccaacttgtccattttgttgcatattctaaggacccagacataggcttggtggcccgtctcttgtctttcctggtttatgactttcggctttgtggaatacggctgagatgaaaggatttattgatgatgcaaactactccgttggcctgttggatgaaggaacaaaccttggaaatgttattgataactatgtttatgaacatacc

SEQ ID NO: 1989 - DNA, 574 bp, Homo sapiens
  source 1..574: mol_type = unassigned DNA; mol_type = unassigned DNA
agcccgcgcctttcttcttttgcctgcgctgttctatttctccttcggccgccgccgccactgctgcacacagctggtgtcggtgccgcgcttttacccccaagtcgttcccgcagcctatggcccaggccgccttgggtatttctgctcaaggtaaccacatccctctttaaaaattccgccgaaaaagagaagacgctttacccgactctttgggccgttatctcacggcgaactttctgaccaagtatacaactacccagagggcctaggagaagtgctgtatagagagcagttcgacttcaacgctgagccaccttgggaacctagctgatgataggggggttccatctcccaacttgtccatctctccctgttctacttccagggaggtcttcacttcagaaatccaagactcatattcatccagcttggtgtcaagtgggctgttgctgccagaattatcttgtgattatttgagagatgtatcagtttcttctgaagtacaatcaactgtagaagcctttgtagcagtttgttgcatattctaaggacccagacataggcttggtgg

SEQ ID NO: 1990 - DNA, 576 bp, Homo sapiens
  source 1..576: mol_type = unassigned DNA; mol_type = unassigned DNA
actccctgtcctgctgccctgtgaagaaggtgcctgcttctcttttgccttctaccatgattagttaattgagaaagaagccatgtggtctgtggcagcagctggaggaaggcatggtgactcaacagggctctgcatggaagagtacaaggtggttctgggaagcagcaaagattggccaccccaaggctctgagggagccgcatgcaggctctaagcagaatcaggccaacccctggcctggaggaagtaggggaagagagctgccagtggcaagacctgctcaggctgtggcgaactttctgaccaagtatacaactacccagagggcctaggagaagtgctgtatagagagcagttcgacttcaacgctgagccaccttgggaacctagctgatgataggggggttccatctcccaacttgtccatggaggtcttcacttcagaaatccaagactcatattcatccagcttggtgtcaagtgggctgttgctgccagaattatcttgtgattatttgagagatgtatcagtttcttctgaagtacaatcaactgtagaagcctttgtagcag

SEQ ID NO: 1991 - DNA, 1694 bp, Homo sapiens
  source 1..1694: mol_type = unassigned DNA; mol_type = unassigned DNA
gccggggcgaggcgggggaggggccgtgagtgccgcagtcggccagccatggagcggagcttgctggcggcgaggccgcggcgacaaggtagccacccccgcagcatgcctcgaccgcggtccgcagctgcaccgcctctccccgccccccagggtgcgctggtcccggtcgcgcgctcagacctccgcatcccgggcgtggtcggttaagtccccggccgtgacccaggcccggggagctagtctccgcccttcgctcttacggatcccctcggagtacgccgcaccatgcagctcaggctcttccggcgcctccttctcgccgctttgctgctggtgatcgtctggaccctcttcgggccttcggggttgggggaggagctgctgagcctctcactagcctccctgctcccagcccccgcctcaccggggccgcccctggccctgccccgcctcttgatccccaaccaggaagcttgcagtggtcccggggcccctcccttcctgctcatcctggtgtgcacggctccggagaacctgaaccagagaaacgccattcgggcttcgtggggcgggctgcgcgaggcccgggggctcagggtacagacgctattcttgctgggagagccgaacgcacagcaccccgtgtggggttcccaggggagtgacctggcctcggagtcagcagcccagggggatatcttgcaggccgccttccaggactcctaccgcaacctcaccctaaagaccctcagcgggctgaactgggctgagaaacactgccccatggcccgatacgtcctcaagacggacgatgatgtgtatgtcaacgtccctgaactggtatcagagctggtcttgcgagggggccgttgggggcaatgggagagaagcacggaaccccagagagaggctgagcaggaaggaggccaggttttgcacagcgaggaagtgcctcttctgtacttgggccgggtgcactggcgcgtgaacccctctcggacaccggggggcaggcaccgcgtatcagaggagcagtggcctcacacctggggcccctttccaccctatgcctcaggcacggggtatgtgctgtcagcgtctgctgtgcagctcattctcaaggtggccagccgggcaccccttctcccattagaggatgtctttgtgggggtaagtgcccgacgaggaggcctcgccccaacacagtgtgtcaagctggctggtgccacccactacccgctagaccggtgctgctatgggaaattcctgctgacgtcccacaggctggacccctggaagatgcaggaagcctggaagctggtgggtggctctgacggggaaaggactgcgcccttttgctcctggttccagggagtcctgggcatcctgcggtgtcgagcaatagcctggcttcagagctgagagtgcctggggccacaggaaaggcaggaacaggaccttctctctcccaggcccaacgcaggggccctcactggctgcagctgatctgtttccttataccagatcctcagtctcactaaagacagcgatatgggagacacccaggggcctggcccgccagcccaaaagatggtcatcgggaagagaaaaagaaaaaaatgctgcagttgttctctcaagctagggcagaagaggggtgtcaagctcctcaataaacttgtctccacttc

SEQ ID NO: 1992 - DNA, 1694 bp, Homo sapiens; identical to SEQ ID NO: 1991
  source 1..1694: mol_type = unassigned DNA; mol_type = unassigned DNA

SEQ ID NO: 1993 - DNA, 1694 bp, Homo sapiens
  source 1..1694: mol_type = unassigned DNA; mol_type = unassigned DNA
gccggggcgaggcgggggaggggccgtgagtgccgcagtcggccagccatggagcggagcttgctggcggcgaggccgcggcgacaaggtagccacccccgcagcatgcctcgaccgcggtccgcagctgcaccgcctctccccgccccccagggtgcgctggtcccggtcgcgcgctcagacctccgcatcccgggcgtggtcggttaagtccccggccgtgacccaggcccggggagctagtctccgcccttcgctcttacggatcccctcggagtacgccgcaccatgcagctcaggctcttccggcgcctccttctcgccgctttgctgctggtgatcgtctggaccctcttcgggccttcggggttgggggaggagctgctgagcctctcactagcctccctgctcccagcccccgcctcaccggggccgcccctggccctgccccgcctcttgatccccaaccaggaagcttgcagtggtcccggggcccctcccttcctgctcatcctggtgtgcacggctccggagaacctgaaccagagaaacgccattcgggcttcgtggggcgggctgcgcgaggcccgggggctcagggtacagacgctattcttgctgggagagccgaacgcacagcaccccgtgtggggttcccaggggagtgacctggcctcggagtcagcagcccagggggatatcttgcaggccgccttccaggactcctaccgcaacctcaccctaaagaccctcagcgggctgaactgggctgagaaacactgccccatggcccgatacgtcctcaagacggacgatgatgtgtatgtcaacgtccctgaactggtatcagagctggtcttgcgagggggccgttgggggcaatgggagagaagcacggaaccccagagagaggctgagcaggaaggaggccaggttttgcacagcgaggaagtgcctcttctgtacttgggccgggtgcactggcgcgtgaacccctctcggacaccggggggcaggcaccgcgtatcagaggagcagtggcctcacacctggggcccctttccaccctatgcctcaggcacggggtatgtgctgtcagcgtctgctgtgcagctcattctcaaggtggccagccgggcaccccttctcccattagaggatgtctttgtgggggtaagtgcccgacgaggaggcctcgccccaacacagtgtgtcaagctggctggtgccacccactacccgctagaccggtgctgctatgggaaattcctgctgacgtcccacaggctggacccctggaagatgcaggaagcctggaagctggtgggtggctctgacggggaaaggactgcgcccttttgctcctggttccagggagtcctgggcatcctgcggtgtcgagcaatagcctggcttcagagctgagagtgcctggggccacaggaaaggcaggaacaggaccttctctctcccaggcccaacgcaggggccctcactggctgcagctgatctgtttccttataccagatcctcagtctcactaaagacagcgatatgggagacacccaggggcctggcccgccagcccaaaagatggtcatcgggaagaaaaaaagaaaaaaatgctgcagttgttctctcaagctagggcagaagaggggtgtcaagctcctcaataaacttgtctccacttc

SEQ ID NO: 1994 - DNA, 1694 bp, Homo sapiens; identical to SEQ ID NO: 1991
  source 1..1694: mol_type = unassigned DNA; mol_type = unassigned DNA

SEQ ID NO: 1995 - DNA, 1694 bp, Homo sapiens; identical to SEQ ID NO: 1991
  source 1..1694: mol_type = unassigned DNA; mol_type = unassigned DNA

SEQ ID NO: 1996 - DNA, 800 bp, Homo sapiens
  source 1..800: mol_type = unassigned DNA; mol_type = unassigned DNA
gggagacacccaggggcctggcccgccagcccaaaagatggtcatcgggaagagaaaaagaaaaaaatgctgcagttgttctctcaagctagggcagaagaggggtgtcaagctcctcaataaacttgtctccacttcttcgagtgcagtgtggtcttcaccaggacccccagaacaccacaaacctggagagcccagaggctgccagaccctgctgcatgggaaggacatctccagggacatgggagagaggacagcctctctgaggaggaaggcccctaaaaggcaaagctaaggccacagcagccacaagaacctcagcgcagagccctgcccacagcaggtgcccagtgaatacctgatgacaaaaggaatcagaggaaaatacaaatcagacagaaaagctgtggaaaatgcagatactccctcaggaacagcagaaatccaaagcagacaccacctccacccctcacatcagccagacctggagagaacgatcatcttgaatgacaatgatgaacacagcgctccctattttgctaagcgctgtgctaaactatatgccttaactcatcttaatgtctacaacagcttatatgagggctttaaaccaaggcttggtaaactactgcccatgggccaaacctggcccatcatctagttctgtatagcccacaagccaagaatggtttttacatttttaagtggttgaaaaaaaatcaaaagaatattttgagactgtgaaaaccgtatgaaattcaaattccaatatccaacaaataaagttttattggaacggg

SEQ ID NO: 1997 - DNA, 6565 bp, Homo sapiens
  source 1..6565: mol_type = unassigned DNA; mol_type = unassigned DNA
tgagaagacaagagcaagggactgagagcaggcttccgctgcggcgcgcgaacacagccgggacacaacccccagcgtctccacccgctcctcgccaccccggcgggaatgtgaggaaggaaagcccccagcgccgccgcccgccctcgaaggcgtcccagagagcgtcctgggggcccgcggctggagcccttgtgcccgcagcaccgccggactggagcggcgaggcgcaccgggtgccgcttctcggcttccactcttcagaaagagcgcggtggggatcagcgcctttcccgcactcggcacaactccgggaccggcggcgcgcggctggaccgagtcccgcttcccgccagctcacctggagtcgggggcagcccctgcccgcccgcctgcaccccttgtcgctctagcttgcgcgaacctgccgctcctccacgcccaggtagtgagccccgcggctccaggtctctgcagcgccctcggccccatggacagcgcacccatcaccactccctaagtgctggcgccgccgctgtccaagctgcgcactggggtccctcggctcgcccctctctggggtgtccgagaggccagggagcgtgcaccatgaagtccgcgcttttcacccgcttctttatcctcctgccctggatcctaattgtcatcatcatgctcgacgtggacacgcgcaggccagtgcccccgctcaccccgcgcccctacttctctccctacgcggtgggccgcgggggcgcccgactcccgctccgcaggggcggcccggctcacgggacccaaaagcgcaaccagtctcggccgcagccacagccggagccgcagctgcccaccatctatgccatcacgcccacctacagccgcccggtgcagaaagcggagctgacccgcctggccaacacgttccgccaggtggcgcagctgcactggatcctggtggaggacgcggcggcgcgcagcgagctggtgagccgcttcctggcgcgggccgggctgcccagcactcacctgcacgtgcccacgccgcggcgctacaagcggcccgggctgccgcgcgccactgagcagcgcaacgcgggcctcgcctggctgcgccagaggcaccagcaccagcgcgcgcagcccggcgtgctcttcttcgctgacgacgacaacacctatagtctggagctcttccaggagatgcgaaccacccgcaaggtctccgtctggcctgtgggcctggttggtgggcggcgctacgaacgtccgctggtggaaaacggcaaagttgttggctggtacaccggctggagagcagacaggccttttgccatcgacatggcaggatttgctgtaagtcttcaagtcattttgtccaatccaaaagctgtatttaagcgtcgtggatcccagccagggatgcaagaatctgactttctcaaacagataacaacagtcgaagaactggaaccgaaagcaaataactgcactaaggttctcgtgtggcacactcggacagagaaggttaatctagccaacgagccaaagtaccacctggacacagtgaaaattgaggtataaattgaagcagcaactggtgcagtttgtccagccagtggatccatatggaagaggatgtttggagtttaggctacagagcattcaggtattgtttgttttacttcagtacagcagcctttcttgtcatctgatggacatctgtttaaatggagcttgtcagttaacataagctaattggatggttggtacaaaatgtatgttttgtcttcatttgttctgcatgttttctctacaacaactaaattggaagatttttttgtacagtgccgatactgcaagataccactcttgagtatatattttttctttttctccaatttgcccttataattggtagacttgaacaggttggtagacttgaacaggtttttaaaacagacaagtattttgtcagctaaacgttcctgatgattcctgactttgcaatactaagtaatttttggaaggttagtggcagtatacatcataggaaataaaaacccacaaatgaaaaggtctatggagtcatgtttaatgtagggaaataacattttgtcaatactaggcaccataaaatgtaaacacaattactgtcataaacctagatataccttcaaggattgaagattgaaagtggctttgttttagttagttaccctgtttgcatatagtgcagaaaaaggtcttcatgttagcactatgtacattaagaagagatccaaattacaagagaggcagataaaatttgaattctttaagcattcattaaacgaagttttggagtaacatccacgtttatcttcctttcactaatcacgttccctgttaagcacatcataacaacagcacagtgaagtgaatgatgaaataagagcattttgatacactagaaaacagtgctcagtgagacatttacattctatttatatgattaaacatttgatcatacagtaccttcctacaggattactggctaattttggggtggggtttatactattagaggtattactaacatgataactacttcccttatatgcaaacattagagctataattttattgagaggaaaactgattttgcaagttgagcagcttctcaaataatgcagtacatgaaatcatgggaaatatgagcaaagctgcccttgacataaaatgatttatcaacctgcttttcaccacatcaaattgaatcagtacagaccaacacggtcaatcagatcattcttaatatgaacaaatgggtaaaaagaaaaaaaatatgcatatgaataaacaggggaactagatgcgtttcagcaaggaatgtcaggtggtagttctggatgaaacttgtattgcagttttcatttccacagttgtgtgctgagagtctgacctgatgagcttccagaccatcctgctgttgtgctggagggctggccaaaacctgcagtaggggttgcactactgatactcatgccagccatctgctgattcatctgtgaaacatataaaaggcttagttcaagaggcttacttcacttttaattcttgtttctttagccacacagttggtcattttttcattaatgtgacaactagtccaagcactggaataaaaacagagtaccatacaaatatttcttaaagcaaatagctactttgttcccttctttatctactttctagatacagtttccccaaagattaaccacaacttacttaaaaaaaaataccaaagcaatcttgggattttaatgagtccgctactctaactaactttcacctacactaggatattgtgctttaactactaaggagtaagaaaattttaggaagtaaaatagtctaaaattatcctataaactttgtatgatagatattattctctattaaaatcttatatacttcctaaatatttttaaagtggtcataaagcatttatttctctcgctgatctaacaacataaacatctaaaatttattttcattgtatgcaataaagcataagattacatgtatttttcttcaagactggagtcaaatatatatatatataagcatcttaaccctgtgattctcttacttccaaaattggtgataagagaaggaaaggcaagatttaccatatagtgagtgggtttaaaacttacactcagagttagactgtgttcttaatttaatacatttgacttgacttatttacagtttcaaagacactaacataaactacatcactaatcaggcataagtgtctgaagaagcagatcacgtcttcatacctactaaaggacattttaaccaccttgtcattggccagtagattgcactgatggagtgctggagaacagcatcacccttctgcattatctggaagtaagagccagtattaactccttcctggttcatctagcaccttaacctgagctgggtgtgcttcagcatgttgaccatgtgactgacacttagcacatacaattttttagattcccagcgggtagagaccaatgttttacctatattcttgtaaatggtggtagcaaaattaactgtgatatatagtgattgtgctaatgttagaaatcactctagactattccctgaatgctctaaaggtaaaacaagtgaccaaacagaaaccaagattgccaaaatgctggaggaacatcaatgggaagtgtaaaaggaagaagagtgggagcatgaacctctctaagagcctttgtctgtgcagctagagaaaagtcagaacacagcacctgaaatagaaatgttctatctcagctctaacttaggtagaaataggattttataatatgaggggatgtctggttcacaccttatgggaattgaatctttttgtactctttttaaacataaaagtcattatagggtatgtaaaaagaaaatacaactttacaaaggtttctcaacaaaaagaatttttacagagccatggggcagtaatcatccgacctgaaaaatagccttagatccctcataaaatagtgctttgagaatatgaggctagatttttattttctaataaaagatcctaaaattattagtgaagctaagttgtctaagtggactgtaaaaatgtcccaccagcaagctggataaagcttagtgctaatctcagaggtgacagagagggagtctcatgatgcctgagataatttctggccattagtggtgttcacgttacagttacattacaatttgaaatgaaagatgtttaaccttttttttacagaatactctaaaatagcgataataacacatcatttgtctatctgatacaacttcataatatttatagatacttttgaccctataacatattatccctattgaattctttctgccagatcactagacttaaaaaaaaaaaaaaaaaaaaaaaaaaaagatttagaaaataaatctggtttgatttgggagaagctagaaagtaaatgacccctacctgtgagaggctccactggggctgctgagcttgcggcaggccaaacttactctggggtgcacccatttgtcccaccattcctccttgggggccaacaacgttctgaggaagtggcatcacaccagtttgtgcatttcccataaacccattgggcatgggcatgcccaccatcatgcttggactctgtcccatcacatttcctataaggccaggagctgcaggcacaggcacgcccatcgatggaaagccctgaaatgcagctggtgcttgtgaggtaaatggtatatttgtgggtcccataaatacacctgcaccacaaaaagaaaatgaatgaagacagagctatcacgtgtagttgcactcatctctataatcacagaaaaattgcctttctgaactactcacagcaaacattttaattccagtttggctgctcctactactcagaccaacccacacctaaaccctgagagctggttgtttctaggatgcagacaaatcagttattaacctgagtaaatttaattaagaaatgtaaatcatatgcaacagccacacaaaatatcttccactgtgaagaccaaactatgtagcatgacatcatacactgttttattgctgatttgtaccactggtcccccagtacgaaacagggaagtgagagctgactatatctcgcttcaataggtgtagtgggctgcccaacaattttagctcacatgtgaaatgcagctcattattttaaaggaaatggtgtgaaagattaaaactctgtaaacaataaggcttatgctaatattttgttatgattacaaaaaaattcatagattttttttaatccatgtggtaactcaagactgtttacctgcagagaaaatacactgtacgcagtcataaacttcatgcaaatcgtttcaataattcatcaaagataatccatgttctataagcttgtgaaacaacatttagtgatctatgaacagcttgttaattccaaataaagttctgtgaatcctgtacatgcctcttaattttttaattctaatgctcattcatttcggcttcatagttgtataaactgcaacaacaaaagcactcactacatggaacaataaaagatatataattgatcttattatataattacaaaggatgtacttctagtaatgtcactgaaagcagatatcaaaattcattaccaggagtactttgctgttgaatggttcctgtgccatacagagataagatggagtctttggaaagttgtttctttgccacttcttctgattttgtagtttgctcagtgaataaatctagatccccagatgttactgtagacagggttgcagctgctggtgcagagggtgtcccctgagacaaacaccaaaataagctatcaaattctgcatagtaaagcgcagcttatccattacttaaaatccaaataaagttataaaattagataggaatcaaacaattgtagaaggtaaaatggtgccattcaagaggatcacttacaagcccaagcccatataaaaacatctacaatca

SEQ ID NO: 1998 - DNA, 5206 bp, Homo sapiens
  source 1..5206: mol_type = unassigned DNA; mol_type = unassigned DNA
atgaagtccgcgcttttcacccgcttctttatcctcctgccctggatcctaattgtcatcatcatgctcgacgtggacacgcgcaggccagtgcccccgctcaccccgcgcccctacttctctccctacgcggtgggccgcgggggcgcccgactcccgctccgcaggggcggcccggctcacgggacccaaaagcgcaaccagtctcggccgcagccacagccggagccgcagctgcccaccatctatgccatcacgcccacctacagccgcccggtgcagaaagcggagctgacccgcctggccaacacgttccgccaggtggcgcagctgcactggatcctggtggaggacgcggcggcgcgcagcgagctgatgcgaaccacccgcaaggtctccgtctggcctgtgggcctggttggtgggcggcgctacgaacgtccgctggtggaaaacggcaaagttgttggctggtacaccggctggagagcagacaggccttttgccatcgacatggcaggatttgctgtaagtcttcaagtcattttgtccaatccaaaagctgtatttaagcgtcgtggatcccagccagggatgcaagaatctgactttctcaaacagataacaacagtcgaagaactggaaccgaaagcaaataactgcactaaggttctcgtgtggcacactcggacagagaaggttaatctagccaacgagccaaagtaccacctggacacagtgaaaattgaggtataaattgaagcagcaactggtgcagtttgtccagccagtggatccatatggaagaggatgtttggagtttaggctacagagcattcaggtattgtttgttttacttcagtacagcagcctttcttgtcatctgatggacatctgtttaaatggagcttgtcagttaacataagctaattggatggttggtacaaaatgtatgttttgtcttcatttgttctgcatgttttctctacaacaactaaattggaagatttttttgtacagtgccgatactgcaagataccactcttgagtatatattttttctttttctccaatttgcccttataattggtagacttgaacaggttggtagacttgaacaggtttttaaaacagacaagtattttgtcagctaaacgttcctgatgattcctgactttgcaatactaagtaatttttggaaggttagtggcagtatacatcataggaaataaaaacccacaaatgaaaaggtctatggagtcatgtttaatgtagggaaataacattttgtcaatactaggcaccataaaatgtaaacacaattactgtcataaacctagatataccttcaaggattgaagattgaaagtggctttgttttagttagttaccctgtttgcatatagtgcagaaaaaggtcttcatgttagcactatgtacattaagaagagatccaaattacaagagaggcagataaaatttgaattctttaagcattcattaaacgaagttttggagtaacatccacgtttatcttcctttcactaatcacgttccctgttaagcacatcataacaacagcacagtgaagtgaatgatgaaataagagcattttgatacactagaaaacagtgctcagtgagacatttacattctatttatatgattaaacatttgatcatacagtaccttcctacaggattactggctaattttggggtggggtttatactattagaggtattactaacatgataactacttcccttatatgcaaacattagagctataattttattgagaggaaaactgattttgcaagttgagcagcttctcaaataatgcagtacatgaaatcatgggaaatatgagcaaagctgcccttgacataaaatgatttatcaacctgcttttcaccacatcaaattgaatcagtacagaccaacacggtcaatcagatcattcttaatatgaacaaatgggtaaaaagaaaaaaaatatgcatatgaataaacaggggaactagatgcgtttcagcaaggaatgtcaggtggtagttctggatgaaacttgtattgcagttttcatttccacagttgtgtgctgagagtctgacctgatgagcttccagaccatcctgctgttgtgctggagggctggccaaaacctgcagtaggggttgcactactgatactcatgccagccatctgctgattcatctgtgaaacatataaaaggcttagttcaagaggcttacttcacttttaattcttgtttctttagccacacagttggtcattttttcattaatgtgacaactagtccaagcactggaataaaaacagagtaccatacaaatatttcttaaagcaaatagctactttgttcccttctttatctactttctagatacagtttccccaaagattaaccacaacttacttaaaaaaaaataccaaagcaatcttgggattttaatgagtccgctactctaactaactttcacctacactaggatattgtgctttaactactaaggagtaagaaaattttaggaagtaaaatagtctaaaattatcctataaactttgtatgatagatattattctctattaaaatcttatatacttcctaaatatttttaaagtggtcataaagcatttatttctctcgctgatctaacaacataaacatctaaaatttattttcattgtatgcaataaagcataagattacatgtatttttcttcaagactggagtcaaatatatatatatataagcatcttaaccctgtgattctcttacttccaaaattggtgataagagaaggaaaggcaagatttaccatatagtgagtgggtttaaaacttacactcagagttagactgtgttcttaatttaatacatttgacttgacttatttacagtttcaaagacactaacataaactacatcactaatcaggcataagtgtctgaagaagcagatcacgtcttcatacctactaaaggacattttaaccaccttgtcattggccagtagattgcactgatggagtgctggagaacagcatcacccttctgcattatctggaagtaagagccagtattaactccttcctggttcatctagcaccttaacctgagctgggtgtgcttcagcatgttgaccatgtgactgacacttagcacatacaattttttagattcccagcgggtagagaccaatgttttacctatattcttgtaaatggtggtagcaaaattaactgtgatatatagtgattgtgctaatgttagaaatcactctagactattccctgaatgctctaaaggtaaaacaagtgaccaaacagaaaccaagattgccaaaatgctggaggaacatcaatgggaagtgtaaaaggaagaagagtgggagcatgaacctctctaagagcctttgtctgtgcagctagagaaaagtcagaacacagcacctgaaatagaaatgttctatctcagctctaacttaggtagaaataggattttataatatgaggggatgtctggttcacaccttatgggaattgaatctttttgtactctttttaaacataaaagtcattatagggtatgtaaaaagaaaatacaactttacaaaggtttctcaacaaaaagaatttttacagagccatggggcagtaatcatccgacctgaaaaatagccttagatccctcataaaatagtgctttgagaatatgaggctagatttttattttctaataaaagatcctaaaattattagtgaagctaagttgtctaagtggactgtaaaaatgtcccaccagcaagctggataaagcttagtgctaatctcagaggtgacagagagggagtctcatgatgcctgagataatttctggccattagtggtgttcacgttacagttacattacaatttgaaatgaaagatgtttaaccttttttttacagaatactctaaaatagcgataataacacatcatttgtctatctgatacaacttcataatatttatagatacttttgaccctataacatattatccctattgaattctttctgccagatcactagacttaaaaaaaaaaaaaaaaaaaaaaaaaaaagatttagaaaataaatctggtttgatttgggagaagctagaaagtaaatgacccctacctgtgagaggctccactggggctgctgagcttgcggcaggccaaacttactctggggtgcacccatttgtcccaccattcctccttgggggccaacaacgttctgaggaagtggcatcacaccagtttgtgcatttcccataaacccattgggcatgggcatgcccaccatcatgcttggactctgtcccatcacatttcctataaggccaggagctgcaggcacaggcacgcccatcgatggaaagccctgaaatgcagctggtgcttgtgaggtaaatggtatatttgtgggtcccataaatacacctgcaccacaaaaagaaaatgaatgaagacagagctatcacgtgtagttgcactcatctctataatcacagaaaaattgcctttctgaactactcacagcaaacattttaattccagtttggctgctcctactactcagaccaacccacacctaaaccctgagagctggttgtttctaggatgcagacaaatcagttattaacctgagtaaatttaattaagaaatgtaaatcatatgcaacagccacacaaaatatcttccactgtgaagaccaaactatgtagcatgacatcatacactgttttattgctgatttgtaccactggtcccccagtacgaaacagggaagtgagagctgactatatctcgcttcaataggtgtagtgggctgcccaacaattttagctcacatgtgaaatgcagctcattattttaaaggaaatggtgtgaaagattaaaactctgtaaacaataaggcttatgctaatattttgttatgattacaaaaaaattcatagattttttttaatccatgtggtaactcaagactgtttacctgcagagaaaatacactgtacgcagtcataaacttcatgcaaatcgtttcaataattcatcaaagataatccatgttctataagcttgtgaaacaacatttagtgatctatgaacagcttgttaattccaaataaagttctgtgaatcctg

SEQ ID NO: 1999 - DNA, 4254 bp, Homo sapiens
  source 1..4254: mol_type = unassigned DNA; mol_type = unassigned DNA
cgatggcgcggcggagacggagggaggaggggagccggcagagaagggtcagccgcggcggcagggcggcggcggcagcggcgcagctccgctccccgcgcgtctcccttccccgcgcccaggtagggcgctcagcctccgccgccaggatgcggccgcccgcctgctggtggctgctcgcgccgccggcgctgctcgcgctcctcacctgctccctggcttttggtttggcttctgaagatacaaagaaagaggtcaagcagtctcaggatttggagaaaagtggtatatcaaggaaaaatgacatagacttaaaaggaattgtattcgtcatccagagtcaaagtaattcttttcatgcaaagagagcagagcagttaaaaaaaagcatcttaaagcaggctgcagatcttacacaggagctccccagtgtcctcctccttcatcagctggctaaacaagaaggtgcatggaccatacttccgttgttaccgcatttttctgtaacatatagcagaaattcatcttggattttcttctgtgaagaagagacaagaatacagattccaaaactcttggaaaccctcagaagatatgacccctctaaggaatggtttttgggaaaagcattacatgatgaagaagctacaataattcaccattatgccttttccgagaatcctacagtttttaagtatccagactttgctgcaggctgggccttaagtattccacttgtaaacaagcttaccaagagactaaagagtgaatccttgaaatccgactttacaatagatttaaaacatgagattgccctctacatctgggacaaaggcggaggacctcccctgaccccagtgcctgagttttgtaccaatgacgtggacttctactgtgctaccacattccattcttttctaccgctttgtagaaagccagtgaagaagaaggatatttttgttgcagtaaaaacatgcaagaaatttcatggtgacagaatacctattgttaagcagacttgggagagccaggcaagtctcattgaatactatagtgactatactgaaaattccattcctactgtggatttgggaattcctaatacagatagaggtcattgtggaaagacatttgccattttggaaagatttctgaatcgtagccaggacaaaacagcatggttagtcattgtggatgatgatacattaataagtatctccaggctccagcacttgcttagctgttatgactccggcgagcctgtgtttctgggagagcgctacggctacggcctgggcactggtggctacagctacatcacgggaggaggaggaatggtcttcagcagagaagccgtcaggagacttctcgccagtaaatgtcgatgctacagcaatgatgctcccgatgatatggtcctgggaatgtgctttagtggcttgggaatccctgtgacacacagccctctcttccatcaggctcggccggtggattaccctaaggactacctttctcatcaagttcccatatcgttccacaaacactggaacatcgatccagtgaaggtgtatttcacatggttggcacccagtgacgaagacaaagccaggcaggagacacagaaaggttttcgagaggagttataaatcagggtgacctgtgcgcctagcctgcgcagggaatgaactggagactgtggcctcatcccactgtgctgtgctcacaacacttgtgtctgccacatggcattgggtgcttcctgactttagggggagattttatgtatggtattttttgacagaggaagaaaaggggtcacaggagaaacatttttttttctgggaaaaatcacttgcttttgacttatgcagttgttttaacacttagtgatgactgtgtattctccaagctgtgatacagcagtttttttttattgtcacagggaaataaatggtaccagaagtccctttcctgttctgtctcttcattgtaatggaagtttcagttgggcatgagcctggagagatgtgactgtctacagttctatttgtatatataaaaagaagactgaaagtcttttgacatggatattgtgaatggtatgaacttttaaaccatattattgatgatgaaaattatttcctgggaactcagtaggaataataccgtattaaggaataatactgtacataaaacatcatgaaaccctagatatgaaatcccctgaagtctgtaatcatggtggttatgttttgtctattcttttgctgtttgtgcctcataaaaagagaatgaggtcttctgctagagcttcgtattgctttggaagttcatctgtgttttatttctccctgaagccctatctttatggcttacttgtaacatgaaagtagtagatgctgccagaaaatagtgtcctcaatattttaaaacaatgttgacatgttttgttcaagtcagcaagctctatgtgagtctcaggaagtgaattaaatttggaccttatgttttactcttgttttttttttttttttaaatgttacttaatgactctctcctgactcaggagagaaaccccttgtggaaggacagcatggtgatcaggcaatttctctgggttcccaaagaatgacatttgaacacagtattttgaaacagctctagttttcaaattatatctttaatatatagtaatgtaacatattcagtattaatgtataaaaagcactctaattatataattcagtttttgtaaaggtatttgcataaaatttaatatgtcttaaactaattttggtaaattacttcttttttttctttttaataaaaactgttactcattaactttgcttataatgctttttatagcccagcacagaatttaaagccataccaccaaaagtacctgtgtgtgttaatatgtttttcttgtagcatagattgactatttgcaatagtattagtatttaccatttttccaaattagcaactaccagacctcacgtgttgcagtgataacacaatgcattggattcagttttgtgaaaatggattctgtggccatccaagggatgtatcagggatgatcagctgatgagaggctccagaaggatttctagatcgcttcaagcctatactgatggccttagctttgttcagtcattgtaactgggattgttgtcattgctaccgtggtagtcaccttcatgtcatctataatagtactcctggagagccctggctgcctacaccagtggaaaagagtctccagttctgctctggcctactaactgttaccactgagagaacaacatgttcatttgacatgattgaagctggcatccgtatatgaagatccttgtcaagctttcttctgtggtctgattagtgccttctactgataccggggcacctcctctggtacttttaagtgttttgttaattatatttactttttggaatggtgtaagcctaaccacaagtaaaagatctttgcctaagtttttgatttctcaaatattgtgttcattagtctagactgggaatggggaggggaaatggggaaaatgaatgaatgaaatcagaaaaaagtcagcggctcagtaaatacagtttaaagagagaataattacttcagagctacccttttaagagaaaaccatcagaaattgataatgtttatataaagtttataaagccattgtgttttgttatataacaaatcagagatgttattttagaatcgattcccatctaaagaactcaattttgagtctgacatttccaggaccagatattgtcttactcacatttcctttgctttgaaatagggctttccttccaaatggctatttttaggctagggatgttaacatcagggatttgtgtgtggaataactggaatgtcatttttgcttttaagccatttctgatgatatagccaaagcaggttgtctgactatgtaggatttttacatcttgaaactaaatcagaaatccagacatgaaaataacctttctagaatgcctaggagcagaaaacaataatagcatgctaaatcacaaatgatgctatgtatgggtatgtaaatatcagtgctgtctgcatttctgggtttattgaagacctcttgttgtatatatcctcaaaaattaatgtaattgacatcttcaagaatgtttctattgtcttccattcataatcagagatgtaatttgtatggactaaataaaaactttattatgtaatgaaaa

SEQ ID NO: 2000 - DNA, 811 bp, Homo sapiens
  source 1..811: mol_type = unassigned DNA; mol_type = unassigned DNA
tcatcctagcacatttcagtcactacctgaagttatttgatttactttcttaatttccatttctccactctagggaatggtttttgggaaaagcattacatgatgaagaagctacaataattcaccattatgccttttccgagaatcctacagtttttaagtatccagactttgctgcaggctgggccttaagtattccacttgtaaacaagcttaccaagagactaaagagtgaatccttgaaatccgactttacaatagatttaaaacatgagattgccctctacatctgggacaaaggcggaggacctcccctgaccccagtgcctgagttttgtaccaatgacgtggacttctactgtgctaccacattccattcttttctaccgctttgtagaaagccagtgaagaagaaggatatttttgttgcagtaaaaacatgcaagaaatttcatggtgacagaattaattgagaagaaacacccgtgttctttaataaacctattagagcgaaaaaggactgaaagcctaaaggctgaggaaattgaaagcaaaatttgcacagcctgcaggacccttgctggggactgaggaaagttcttgacctttcctcacagcttcttccagcattatgcaatggaggatattttacccaacagtgtgaacttttagtggctgcaagctgcagggagccctttctgggtacctattgttaagcagacttgggagagccaggcaagtctcattgaatactatagtgactatactgaaaattccattcctactgtggatttgggaattcctaatacag

SEQ ID NO: 2001 - DNA, 4123 bp, Homo sapiens
  source 1..4123: mol_type = unassigned DNA; mol_type = unassigned DNA
atcccgcccgcatacagcccgcatcccgccggggaagcgagcccagtccagcgctgcccgtccagtcctcgcccaagatttaaagcccgcaagttttgttcttgagaccagcgactttagctccgatgcgggaaggaaagccgacctccgatttggacatttaaagagctgggcttgaacttcgtgagtttcgctctaaactgcccttgaaatgaagctggacttggaggtggcatggaatattcacatgggagagccgcatgaggccgcccaccacgcttcctgaaggatgcccgtgtggaagaattttgacgtgccagtgtcctcgttctacagggtgttccattcttccgcaatctcagaaaaatgggactaaaagaaactattttgtaaaataagaagacttccatttttaatgaccaacatgtattaagatggacacctactctacgaaacacgaagttctatggtctcgaagaagcccgtgcctgtttaaaactgatcctaactaaaaacagacttgagtggatatgagaatgttggttagtggcagaagagtcaaaaaatggcagttaattattcagttatttgctacttgttttttagcgagcctcatgtttttttgggaaccaatcgataatcacattgtgagccatatgaagtcatattcttacagatacctcataaatagctatgactttgtgaatgataccctgtctcttaagcacacctcagcggggcctcgctaccaatacttgattaaccacaaggaaaagtgtcaagctcaagacgtcctccttttactgtttgtaaaaactgctcctgaaaactatgatcgacgttccggaattagaaggacgtggggcaatgaaaattatgttcggtctcagctgaatgccaacatcaaaactctgtttgccttaggaactcctaatccactggagggagaagaactacaaagaaaactggcttgggaagatcaaaggtacaatgatataattcagcaagactttgttgattctttctacaatcttactctgaaattacttatgcagttcagttgggcaaatacctattgtccacatgccaaatttcttatgactgctgatgatgacatatttattcacatgccaaatctgattgagtaccttcaaagtttagaacaaattggtgttcaagacttttggattggtcgtgttcatcgtggtgcccctcccattagagataaaagcagcaaatactacgtgtcctatgaaatgtaccagtggccagcttaccctgactacacagccggagctgcctatgtaatctccggtgatgtagctgccaaagtctatgaggcatcacagacactaaattcaagtctttacatagacgatgtgttcatgggcctctgtgccaataaaatagggatagtaccgcaggaccatgtgtttttttctggagagggtaaaactccttatcatccctgcatctatgaaaaaatgatgacatctcatggacacttagaagatctccaggacctttggaagaatgctacagatcctaaagtaaaaaccatttccaaaggtttttttggtcaaatatactgcagattaatgaagataattctcctttgtaaaattagctatgtggacacatacccttgtagggctgcgtttatctaatagtacttgaatgttgtatgttttcactgtcactgagtcaaacctggatgaaaaaaacctttaaatgttcgtctataccctaagtaaaatgaggacgaaagacaaatattttgaaagcctagtccatcagaatgtttctttgattctagaagctgtttaatatcacttatctacttcattgcctaagttcatttcaaagaatttgtatttagaaaaggtttatattattagtgaaaacaaaactaaagggaagttcaagttctcatgtaatgccacatatatacttgaggtgtagagatgttattaagaagttttgatgttagaataattgcttttggaaaataccaaatgaacgtacagtacaacatttcaaggaaatgaatatattgttagaccaggtaagcaagtttatttttgttaaagagcacttggtggaggtagtaggggcagggaaaggtcagcataggagagaaagttcatgaatctggtaaaacagtctcttgttcttaagaggagatgtagaaaaatgtgtacaatgttattataaacagacaaatcacgtcttaccacatccatgtagctactggtgttagagtcattaaaatacctttttttgcatcttttttcaaagtttaatgtgaacttttagaaaagtgattaatgttgccctaatactttatatgtttttaatggatttttttttaagtattagaaaatgacacataacacgggcagctggttgctcatagggtccttctctagggagaaaccattgttaattcaaataagctgattttaatgacgttttcaactggtttttaaatattcaatattggtctgtgtttaagtttgttatttgaatgtaatttacatagaggaatataataatggagagacttcaaatggaaagacagaacattacaagcctaatgtctccataattttataaaatgaaatcttagtgtctaaatccttgtactgattactaaaattaacccactcctccccaacaaggtcttataaaccacagcactttgttccaagttcagagttttaaattgagagcattaaacatcaaagttataatatctaaaacaatttatttttcatcaataactgtcagaggtgatctttattttctaaatatttcaaacttgaaaacagagtaaaaaagtgatagaaaagttgccagtttggggttaaagcatttttaaagctgcatgttccttgtaatcaaagagatgtgtctgagatctaatagagtaagttacatttattttacaaagcaggataaaaatgtggctataatacacactacctcccttcactacagaaagaactaggtggtgtctactgctagggagattatatgaaggccaaaataatgacttcagcaagagtgactgaactcactctaaggcctttgactgcagaggcacctgttagggaaaatcagatgtctcatataataaggtgatgtcggaaacacgcaaaacaaaacgaaaaaagatttctcagtatacacaactgaatgatgatacttacaatttttagcaggtagctttttaatgtttacagaaattttaatttttttctattttgaaatttgaggcttgtttacattgcttagataatttagaatttttaactaatgtcaaaactacagtgtcaaacattctaggttgtagttactttcagagtagatacagggttttagatcattacagtttaagttttctgaccaattaaaaaaacatagagaacaaaagcatatttgaccaagcaacaagcttataattaatttttattagttgattgattaatgatgtattgccttttgcccatatataccctgtgtatctatacttggaagtgtttaaggttgccattggttgaaaacataagtgtctctggccatcaaagtgatcttgtttacagcagtgcttttgtgaaacaattatttatttgctgaaagagctcttctgaactgtgtccttttaatttttgcttagaatagaatggaacaagtttaaatttcaaggaaatatgaaggcacttcctttttttctaagaaggaagttgctagatgattccttcatcacacttacttaaagtactgagaagagtatctgtaaataaaagggttccaaccttttaaaaaagaaggaaaaaactttttggtgctccagtgtagggctatctttttaaaaaatgtcaacaaagggaaaataaactatcagcttggatggtcacttgaatagaagatggttatacacagtgttattgttaaaatttttttaccttttggttggtttgcatcttttttccatattgttaattttataccaaaatgttaaatatttgtattacttgaattttgctcttgtatggcaaaataattagtgagtttaaaaaaaatctatagtttccaataaacaactgaaaaattatcatga

SEQ ID NO: 2002 - DNA, 561 bp, Homo sapiens
  source 1..561: mol_type = unassigned DNA; mol_type = unassigned DNA
agcccagtccagcgctgcccgtccagtcctcgcccaagatttaaagcccgcaagttttgttcttgagaccagcgactttagctccgatgcgggaaggaaagccgacctccgatttggacatttaaagagctgggcttgaacttcgtgagtttcgctctaaactgcccttgaaatgaagctggacttggaggtaaagtcactgggaagctggcctggggcggggtttccccctcttctcgtattttagaaacggacagcggcagtgcagccctagtttgctgtggcatggaatattcacatgggagagccgcatgaggccgcccaccacgcttcctgaaggatgcccgtgtggaagaattttgacgtgccagtgtcctcgttctacagggtgttccattcttccgcaatctcagaaaaatgggactaaaagaaactattttgtaaaataagaagacttccatttttaatgaccaacatgtattaagatggacacctactctacgaaacacgaagttctatggtctcgaagaagcccgtgcctgtttaaaactgatcctaact

SEQ ID NO: 2003 - DNA, 550 bp, Homo sapiens
  source 1..550: mol_type = unassigned DNA; mol_type = unassigned DNA
agcgactttagctccgatgcgggaaggaaagccgacctccgatttggacatttaaagagctgggcttgaacttcgtgagtttcgctctaaactgcccttgaaatgaagctggacttggaggtggctgatcaggacagtatgaaatttcatacagtttcctaacttgagaaaacatggtgatgcaattcctccaaccaggagggatttatggacagcggtggctacgtcctaatctgcccagaatacaggatgactaaacaaattggcaaacggacgcagctttctctctctctaagaaaagtctgctgagaaccctcgttcccactctgtttctgcctccaagaagaaaagcctaaaactcactttcttccggactctttcaaggaagctgattaaaagaagctcctaaaccagaggtgcagacaaggtgatgatgtggctctcagaggaaggtgtgctacctacaaccctgctggcttcatggaagaatatgcttctcaaatgcaaatccaatcaagttatctccctgcttaaatccaaactcgctcat

SEQ ID NO: 2004 - DNA, 608 bp, Homo sapiens
  source 1..608: mol_type = unassigned DNA; mol_type = unassigned DNA
agtttgctgtaagtttccttactttgttactgaggcccccagagctccacgcataagtggtgtgaccagaaaccttttaacaagacccgcctgagcctgcgttagagctcccgctcggaaagtggcatggaatattcacatgggagagccgcatgaggccgcccaccacgcttcctgaaggatgcccgtgtggaagaattttgacgtgccagtgtcctcgttctacagggtgttccattcttccgcaatctcagaaaaatgggactaaaagaaactattttgtaaaataagaagacttccatttttaatgaccaacatgtattaagatggacacctactctacgaaacacgaagttctatggtctcgaagaagcccgtgcctgtttaaaactgatcctaactaaaaacagacttgagtggatatgagaatgttggttagtggcagaagagtcaaaaaatggcagttaattattcagttatttgctacttgttttttagcgagcctcatgtttttttgggaaccaatcgataatcacattgtgagccatatgaagtcatattcttacagatacctcataaatagctatgactttgtgaatgataccctg

SEQ ID NO: 2005 - DNA, 3368 bp, Homo sapiens
  source 1..3368: mol_type = unassigned DNA; mol_type = unassigned DNA
ctgggccggtggttccgcgcggagttagtctgtggtcagttacgtggtgaaaacacggctgtgccgcggccgcatctttccgcggccgaggcctctctgggtgggagtgttggcttcctttccggatcgctaaatggggaaagttctggccgctcggcgggatacgtctccaggccacggatggttcgttctccgtgccgcggccccgagctgggctccctgggtctccagcgcgggctcccggcattgggggctgcgggccggcccctccgccccgcccccgccccgccgcgcctcctcggccgagcggctcgcggtctccggcgcgggaggctccgagtctgcccactccgggccgagcgaggtctctggaggagaagagtggcgaggaggtgagggcacgccggccctcgcccggcgggtggcgccaggacttcaggtggcatggaatattcacatgggagagccgcatgaggccgcccaccacgcttcctgaaggatgcccgtgtggaagaattttgacgtgccagtgtcctcgttctacagggtgttccattcttccgcaatctcagaaaaatgggactaaaagaaactattttgtaaaataagaagacttccatttttaatgaccaacatgtattaagatggacacctactctacgaaacacgaagttctatggtctcgaagaagcccgtgcctgtttaaaactgatcctaactaaaaacagacttgagtggatatgagaatgttggttagtggcagaagagtcaaaaaatggcagttaattattcagttatttgctacttgttttttagcgagcctcatgtttttttgggaaccaatcgataatcacattgtgagccatatgaagtcatattcttacagatacctcataaatagctatgactttgtgaatgataccctgtctcttaagcacacctcagcggggcctcgctaccaatacttgattaaccacaaggaaaagtgtcaagctcaagacgtcctccttttactgtttgtaaaaactgctcctgaaaactatgatcgacgttccggaattagaaggacgtggggcaatgaaaattatgttcggtctcagctgaatgccaacatcaaaactctgtttgccttaggaactcctaatccactggagggagaagaactacaaagaaaactggcttgggaagatcaaaggtacaatgatataattcagcaagactttgttgattctttctacaatcttactctgaaattacttatgcagttcagttgggcaaatacctattgtccacatgccaaatttcttatgactgctgatgatgacatatttattcacatgccaaatctgattgagtaccttcaaagtttagaacaaattggtgttcaagacttttggattggtcgtgttcatcgtggtgcccctcccattagagataaaagcagcaaatactacgtgtcctatgaaatgtaccagtggccagcttaccctgactacacagccggagctgcctatgtaatctccggtgatgtagctgccaaagtctatgaggcatcacagacactaaattcaagtctttacatagacgatgtgttcatgggcctctgtgccaataaaatagggatagtaccgcaggaccatgtgtttttttctggagagggtaaaactccttatcatccctgcatctatgaaaaaatgatgacatctcatggacacttagaagatctccaggacctttggaagaatgctacagatcctaaagtaaaaaccatttccaaaggtttttttggtcaaatatactgcagattaatgaagataattctcctttgtaaaattagctatgtggacacatacccttgtagggctgcgtttatctaatagtacttgaatgttgtatgttttcactgtcactgagtcaaacctggatgaaaaaaacctttaaatgttcgtctataccctaagtaaaatgaggacgaaagacaaatattttgaaagcctagtccatcagaatgtttctttgattctagaagctgtttaatatcacttatctacttcattgcctaagttcatttcaaagaatttgtatttagaaaaggtttatattattagtgaaaacaaaactaaagggaagttcaagttctcatgtaatgccacatatatacttgaggtgtagagatgttattaagaagttttgatgttagaataattgcttttggaaaataccaaatgaacgtacagtacaacatttcaaggaaatgaatatattgttagaccaggtaagcaagtttatttttgttaaagagcacttggtggaggtagtaggggcagggaaaggtcagcataggagagaaagttcatgaatctggtaaaacagtctcttgttcttaagaggagatgtagaaaaatgtgtacaatgttattataaacagacaaatcacgtcttaccacatccatgtagctactggtgttagagtcattaaaatacctttttttgcatcttttttcaaagtttaatgtgaacttttagaaaagtgattaatgttgccctaatactttatatgtttttaatggatttttttttaagtattagaaaatgacacataacacgggcagctggttgctcatagggtccttctctagggagaaaccattgttaattcaaataagctgattttaatgacgttttcaactggtttttaaatattcaatattggtctgtgtttaagtttgttatttgaatgtaatttacatagaggaatataataatggagagacttcaaatggaaagacagaacattacaagcctaatgtctccataattttataaaatgaaatcttagtgtctaaatccttgtactgattactaaaattaacccactcctccccaacaaggtcttataaaccacagcactttgttccaagttcagagttttaaattgagagcattaaacatcaaagttataatatctaaaacaatttatttttcatcaataactgtcagaggtgatctttattttctaaatatttcaaacttgaaaacagagtaaaaaagtgatagaaaagttgccagtttggggttaaagcatttttaaagctgcatgttccttgtaatcaaagagatgtgtctgagatctaatagagtaagttacatttattttacaaagcaggataaaaatgtggctataatacacactacctcccttcactacagaaagaactaggtggtgtctactgctagggagattatatgaaggccaaaataatgacttcagcaagagtgactgaactcactctaaggcctttgactgcagaggcacctgttagggaaaatcagatgtctcatataataaggtgatgtcggaaacacgc

SEQ ID NO: 2006 - DNA, 684 bp, Homo sapiens
  source 1..684: mol_type = unassigned DNA; mol_type = unassigned DNA
gaacgccgcgcccaccaattcggttgccggccgggggccccaggcttgcggccacccgcctccggctggagggctgaattcgagtcgaaagcccgtgtcgggctggaaagaagaaaccgccaacctgagaacgctttcggtggcatggaatattcacatgggagagccgcatgaggccgcccaccacgcttcctgaaggatgcccgtgtggaagaattttgacgtgccagtgtcctcgttctacagggtgttccattcttccgcaatctcagaaaaatgggactaaaagaaactattttgtaaaataagaagacttccatttttaatgaccaacatgtattaagatggacacctactctacgaaacacgaagttctatggtctcgaagaagcccgtgcctgtttaaaactgatcctaactaaaaacagacttgagtggatatgagaatgttggttagtggcagaagagtcaaaaaatggcagttaattattcagttatttgctacttgttttttagcgagcctcatgtttttttgggaaccaatcgataatcacattgtgagccatatgaagtcatattcttacagatacctcataaatagctatgactttgtgaatgataccctgtctcttaagcacacctcagcggggcctcgctaccaatacttgattaaccacaaggaaa

SEQ ID NO: 2007 - DNA, 715 bp, Homo sapiens
  source 1..715: mol_type = unassigned DNA; mol_type = unassigned DNA
gagtttctagtctgttgattggccactgacccgtgctgcaggcacacaaaggaagctgcacccacagcagtctgttgtggatggttgctgagctgcgcattcggcattgggcttgctttgtttcctgccaggcccagcattttcttctaccagatcggcaggcttgtgggcttcttcctaggtccctcccctgcactctgaataggaaagctggaagctgtgctttagagaagctttaagacgccgaaagaaaccagaagagtgagcgccagttgtatgtgcgtggtctccatccgcaaagccggagctgggcgcaacagtgttgacttaaagcattttgacttgttgatgtcaatttggaacagctgaaaaaatacaggaaaataagataaatacgtacatgttgagggtggggacaaaatgaaggttctgaaccagctgccggcttacagtagccatataagcaacagcagcaatgcaccaacctggtggcatggaatattcacatgggagagccgcatgaggccgcccaccacgcttcctgaaggatgcccgtgtggaagaattttgacgtgccagtgtcctcgttctacagggtgttccattcttccgcaatctcagaaaaatgggactaaaagaaactattttgtaaaataagaagacttccatttttaatgaccaacatgtattaagatggacacctactctacgaaac

SEQ ID NO: 2008 - DNA, 1766 bp, Homo sapiens
  source 1..1766: mol_type = unassigned DNA; mol_type = unassigned DNA
tgcacccacagcagtctgttgtggatggttgctgagctgcgcattcggcattgggcttgctttgtttcctgccaggcccagcattttcttctaccagatcggcaggcttgtgggcttcttcctaggtccctcccctgcactctgaataggaaagctggaagctgtgctttagagaagctttaagacgccgaaagaaaccagaagagtgagcgccagttgtatgtggcatggaatattcacatgggagagccgcatgaggccgcccaccacgcttcctgaaggatgcccgtgtggaagaattttgacgtgccagtgtcctcgttctacagggtgttccattcttccgcaatctcagaaaaatgggactaaaagaaactattttgtaaaataagaagacttccatttttaatgaccaacatgtattaagatggacacctactctacgaaacacgaagttctatggtctcgaagaagcccgtgcctgtttaaaactgatcctaactaaaaacagacttgagtggatatgagaatgttggttagtggcagaagagtcaaaaaatggcagttaattattcagttatttgctacttgttttttagcgagcctcatgtttttttgggaaccaatcgataatcacattgtgagccatatgaagtcatattcttacagatacctcataaatagctatgactttgtgaatgataccctgtctcttaagcacacctcagcggggcctcgctaccaatacttgattaaccacaaggaaaagtgtcaagctcaagacgtcctccttttactgtttgtaaaaactgctcctgaaaactatgatcgacgttccggaattagaaggacgtggggcaatgaaaattatgttcggtctcagctgaatgccaacatcaaaactctgtttgccttaggaactcctaatccactggagggagaagaactacaaagaaaactggcttgggaagatcaaaggtacaatgatataattcagcaagactttgttgattctttctacaatcttactctgaaattacttatgcagttcagttgggcaaatacctattgtccacatgccaaatttcttatgactgctgatgatgacatatttattcacatgccaaatctgattgagtaccttcaaagtttagaacaaattggtgttcaagacttttggattggtcgtgttcatcgtggtgcccctcccattagagataaaagcagcaaatactacgtgtcctatgaaatgtaccagtggccagcttaccctgactacacagccggagctgcctatgtaatctccggtgatgtagctgccaaagtctatgaggcatcacagacactaaattcaagtctttacatagacgatgtgttcatgggcctctgtgccaataaaatagggatagtaccgcaggaccatgtgtttttttctggagagggtaaaactccttatcatccctgcatctatgaaaaaatgatgacatctcatggacacttagaagatctccaggacctttggaagaatgctacagatcctaaagtaaaaaccatttccaaaggtttttttggtcaaatatactgcagattaatgaagataattctcctttgtaaaattagctatgtggacacatacccttgtagggctgcgtttatctaatagtacttgaatgttgtatgttttcactgtcactgagtcaaacctggatgaaaaaaacctttaaatgttcgtctataccctaagtaaaatgaggacgaaagacaaa

SEQ ID NO: 2009 - DNA, 663 bp, Homo sapiens
  source 1..663: mol_type = unassigned DNA; mol_type = unassigned DNA
agcagtctgttgtggatggttgctgagctgcgcattcggcattgggcttgctttgtttcctgccaggcccagcattttcttctaccagatcggcaggcttgtgggcttcttcctaggtccctcccctgcactctgaataggaaagctggaagctgtgctttagagaagctttaagacgccgaaagaaaccagaagagtgagcgccagttgtataaagcattttgacttgttgatgtcaatttggaacagctgaaaaaatacaggaaaataagataaatacgtacatgttgagggtggggacaaaatgaaggttctgaaccagctgccggcttacagtagccatataagcaacagcagcaatgcaccaacctggtggcatggaatattcacatgggagagccgcatgaggccgcccaccacgcttcctgaaggatgcccgtgtggaagaattttgacgtgccagtgtcctcgttctacagggtgttccattcttccgcaatctcagaaaaatgggactaaaagaaactattttgtaaaataagaagacttccatttttaatgaccaacatgtattaagatggacacctactctacgaaacacgaagttctatggtctcgaagaagcccgtgcctgtttaaaactgatcctaactaaaaacagac

SEQ ID NO: 2010 - DNA, 528 bp, Homo sapiens
  source 1..528: mol_type = unassigned DNA; mol_type = unassigned DNA
tgtggatggttgctgagctgcgcattcggcattgggcttgctttgtttcctgccaggcccagcattttcttctaccagatcggcaggcttgtgggcttcttcctaggtccctcccctgcactctgaataggaaagctggaagctgtgctttagagaagctttaagacgccgaaagaaaccagaagaaaagcattttgacttgttgatgtcaatttggaacagctgaaaaaatacaggaaaataagataaatacgtacatgttgagggtggggacaaaatgaaggttctgaaccagctgccggcttacagtagccatataagcaacagcagcaatgcaccaacctggtggcatggaatattcacatgggagagccgcatgaggccgcccaccacgcttcctgaaggatgcccgtgtggaagaattttgacgtgccagtgtcctcgttctacagggtgttccattcttccgcaatctcagaaaaatgggactaaaagaaactattttgtaaaataagaagacttccattt

SEQ ID NO: 2011 - DNA, 614 bp, Homo sapiens
  source 1..614: mol_type = unassigned DNA; mol_type = unassigned DNA
attcggcattgggcttgctttgtttcctgccaggcccagcattttcttctaccagatcggcaggcttgtgggcttcttcctaggtccctcccctgcactctgaataggaaagctggaagctgtgctttagagaagctttaagacgccgaaagaaaccagaagagtggcatggaatattcacatgggagagccgcatgaggccgcccaccacgcttcctgaaggatgcccgtgtggaagaattttgacgtgccagtgtcctcgttctacagggtgttccattcttccgcaatctcagaaaaatgggactaaaagaaactattttgtaaaataagaagacttccatttttaatgaccaacatgtattaagatggacacctactctacgaaacacgaagttctatggtctcgaagaagcccgtgcctgtttaaaactgatcctaactaaaaacagacttgagtggatatgagaatgttggttagtggcagaagagtcaaaaaatggcagttaattattcagttatttgctacttgttttttagcgagcctcatgtttttttgggaaccaatcgataatcacattgtgagccatatgaagtcatattcttacagatac

SEQ ID NO: 2012 - DNA, 2748 bp, Homo sapiens
  source 1..2748: mol_type = unassigned DNA; mol_type = unassigned DNA
ggctgatgttcacttttgaagaggaccacaatgaaacccttttaatattactcaatgattccacagacctcctgggtgttaaatcaggtgaatctatttttaaaaattgctatttacttttttaggtggctgatcaggacagtatgaaatttcatacagtttcctaacttgagaaaacatggtgatgcaattcctccaaccaggagggatttatggacagcggtggctacgtcctaatctgcccagaatacaggatgactaaacaaattggcaaacggacgcagctttctctctctctaagaaaagtctgctgagaaccctcgttcccactctgtttctgcctccaagaagaaaagcctaaaactcactttcttccggactctttcaaggaagctgattaaaagaagctcctaaaccagaggtgcagacaaggtgatgatgtggctctcagaggaaggtgtgctacctacaaccctgctggcttcatggaagaatatgcttctcaaatgcaaatccaatcaagttatctccctgcttaaatccaaactcgctcatgtggcccacaaagcctaccttgcctgcctctctctaacctcacccaaaacacacttccattgctctctaggttccagcaccctgaccttttggtctgcactgtgccaggctccctccagccctgaagcctttgcacatgctgttcctcctgtctggaaaggctctcccatcttgtctattcgttctccaggctcaagtgactcttcctgagagccttctctgaccccagtccaggtcaagttcctctgtcacatgcctgaccctgcatccctccttgacagcacttatatcagcttgtaacacatttttgtgtgattattttgttaatgtcagcctctcccacaaactgtaagctcagtgagggatggaagcatgcctatttttaatcatcatggtatcctcagcactcagcacagcacatggtacatcaggaatgctcataagcattaatagagaaatgactgatttgagtcagacgaagactcagtatgccaggacgttcaggccgagagtctaagaggccgccggagggcttcggaaccagtgagcccactcaattcagcctgctcagtaccctgtgtgtactttatcaggaagaaggtacagtccctccctcccctatccgtttcccaaccacaggatcaaaataacccggaagcattacctttgcatcgagggtgagcagcaactcaaactcgttgtaaaactccttggggctgagcaacgggtactccttgactgtgcccaggaatgtcgcaatgtcgttcaaggcgatatcaaccccttctcgagactggcacttgtctacagcttgggaagccaagaggtagattcctgcctcacaccattggctgaccttttggaaagaaacagtgccctgtgcacttcgcctgaccacaactcagagccaccgtaatcctcagcaggtctgagcttgtaaggtgtctacaaggattcccagacaatgggaaattgtcatgggacggcatcgagtttaaggggtctaaccactgtaaattacactatgagggggacaaacccaaaccagctgatacctgtccacttctcagggaagtcactcggtcagcaaaatgagtctcttccattaacagtaattgctacatctccaggaggagacagctaaatatatatttaattaaagacagggtttcactctgtcacccaggctggagtacagtagtgcaattatggcttaatgcagcctggagaggtctaccccaggctcaggtgattcttccaccttagcctcctgagtagctgggactacagatgcatgccaccacaccaggctaatttttccttccttcctcccttccttccttccttccttccttcctctttctttctctctgtctctctttctttctttcctttttttgagacaggttttggccatgttgccgaggctgctctcgaactcctgggctcaagcaatcctcccacctcggcctcccaaagtgctgggattacaggtgtgaggcactgcacccacccagccttatagctaaatatctcttaggctggtctaaccatagagaaatgtaatcaatggcttttggggtttacctgctagtccactcttcttgcatccgaattggttaccagaacacagggtgattaataagacattagacctggcccttacatttcctgggagaagggcatgtcccttttaacaaaaacacaactttcatctttggattcccaggtgatccctatttgcatttactggcgtttgtctttcgtaaggaagcaagaatgcaaagctttgtaactcagcacagcgatactcaagagtttctggatgctgggaggacattagataggtgatgagttctaattattcaatttttaaaaaagactcattttctttgctcttttgaactccactgagacacttgaacagaaagacagggagcccttatgctacctgaagagttatatgaaaagaagtttccagtgccaatacctctgcatttccatttaccatgtgacctgaaaagcaatataaagtaactatacagagaaaaaagatcaaaatgcaacacgccaaagtggttgtctttctaagtgggaaaatgataggcaacttaagtttttgtcttatttttttcctagattatttacagtgaatatgtaccacatttagaataataaaaaatcataaagata

SEQ ID NO: 2013 - DNA, 3706 bp, Homo sapiens
  source 1..3706: mol_type = unassigned DNA; mol_type = unassigned DNA
gcttggggagcctaggggccgtctcggagaaatggggtggtccccgccaggcggcggcggggcgggccctgggcgccgaaggggttaaggcacctgggccaccgcccctgccggcccctcctcccgcggccgggaagaggaaagtcgcggcgggggcgcggcccggtctccgtccccacccgcccgccgtcccgccggcccgagccgtggcgcccagagctgcgagccgctcgcccctccgccgctccggcccgggccgccatgtcgctgtggaagaaaaccgtctaccggagtctgtgcctggccctggccctgctcgtggccgtgacggtgttccaacgcagtctcacccctggtcagtttctgcaggagcctccgccacccaccctggagccacagaaggcccagaagccaaatggacagctggtgaaccccaacaacttctggaagaacccgaaagatgtggctgcgcccacgcccatggcctctcaggggccccaggcctgggacgtgaccaccactaactgctcagccaatatcaacttgacccaccagccctggttccaggtcctggagccgcagttccggcagtttctcttctaccgccactgccgctacttccccatgctgctgaaccacccggagaagtgcaggggcgatgtctacctgctggtggttgtcaagtcggtcatcacgcagcacgaccgccgcgaggccatccgccagacctggggccgcgagcggcagtccgcgggtgggggccgaggcgccgtgcgcaccctcttcctgctgggcacggcctccaagcaggaggagcgcacgcactaccagcagctgctggcctacgaagaccgcctctacggcgacatcctgcagtggggctttctcgacaccttcttcaacctgaccctcaaggagatccacttcctcaagtggctggacatctactgcccccacgtccccttcattttcaaaggcgacgatgacgtcttcgtcaaccccaccaacctgctagaatttctggctgaccggcagccacaggaaaacctgttcgtgggcgatgtcctgcagcacgctcggcccattcgcaggaaagacaacaaatactacatcccgggggccctgtacggcaaggccagctatccgccgtatgcaggcggcggtggcttcctcatggccggcagcctggcccggcgcctgcaccatgcctgcgacaccctggagctctacccgatcgacgacgtctttctgggcatgtgcctggaggtgctgggcgtgcagcccacggcccacgagggcttcaagactttcggcatctcccggaaccgcaacagccgcatgaacaaggagccgtgctttttccgcgccatgctcgtggtgcacaagctgctgccccctgagctgctcgccatgtgggggctggtgcacagcaatctcacctgctcccgcaagctccaggtgctctgaccccagccgggctactaggacaggccagggcacttgctcctgagcccccatggtattggggctggagccacagtgcccaggcctagcctttggtccccaaggggaggtggagggttgaggcctacgtgccactgggtgtggtggggtgcaggtagccagaaagggacctccctgtgtggataattctaggaaactgaggcccaggaacggttggagctgcccagtctggaggccctctctgaggagcgaggcgccaggccctggcagccctcctgacctgggtccgttgctggccccctcagatgtggtgggaggtcctggtgacctctggaggaacgctgtgctcaggtacctgggctaggcctggcctgatgggtctgtggccgcccctcgtcttcacagggaagagtcttctgtgaaatgcctcagtctccccagaggccgggcggccctggcaggagaaactcaaccctgtgcgggctcacaggcaccccccagtccacaccctggtctcctgggagagagggcccagccggctctccgcagccccaggcctgcctggagacgggccgcctctgccacagggcctccactcctggctgtgtcctgtaaggtctggaagggcgaccgctctgactacctcagcgcccctcagaatctccctggggctgcagccctaccccaccccgacacagggcagaagagcagcgctcctggccccccgaagtcccagagctgctgacccccaccccaggcaagtctctcccgcagcccccacacccccaggcctggctccctggctggaaagcagccggtttggccctggaagtggacattcctctattactgtgaagttttatttatgaagaatttggagggagaaggctccaggcttcaggagggggtggtgtcctccctggccctcctcccttccctcccctcattccagctgcctgccctcagcacccccaggcccctcacagcccagccccctccagagccctgccccaccgcaccctgcttctccagggcctagcagaccagcatctgccccggtgaagggatggatcagctgtgggggtgggtgcagaaggttgccacctcctacctcagcgggagtcacctaggaaagatggagggattgacactattttctcaataaaatgggacttttttttttttttttttttttttttggtgtgaaacttcctgttcccagctgcatcagagagcctgtctggggccaaggttgccagagatttctgaagacacagcttgttccttgttcttggctggtgggtgcacaaggacttctggaagggatttagacggggctgagtgctaggattaaagtggggatgggagtacggcaacagaaaaacctgggagctagcaatgcacccagcccttgactgtgccctggtggacagccgagctgtggctctagcgtgagccagtgccttcctgtccctgccaagggtgaggccagagttggccccgaggctaatgtttcagtgggtgagattaggtcggccgtacagaggccggtgggctccctgacatcccttccaggcaacctgaaagcactgaaatagcttatggccctgtgccagggaccttggcccaagctgctgacctccagggtggggagggagctacccccaggagaagagtcactcagacagcagtatgagcaagccagccagcagctccgtgcctgcacccagctcaggggaatcccagggggttcagatgcccaggaaggaaaaggggacagcgctactgctatggaatgagaccaccacttctcctgttgtccttcccagcttctccccaacctccccttttccctagtttataagacaggagaaaagggagaaagcaaaaagctggaaagaaacagaagtaagataaatagctagacgaccttggcgccaccacctggccctggtggttaaaatgataataatattaacccctgaccaaaacgactggtgttatctgtaaatcccagacattgtgtgagaaagcaccgtaaaactttttgtcctattagctgatgtgtgtagcccccagtcacgttcctcacgcttacttgatctattatgaccctttcacgtggaccccttagagttgtaagctcttaaaagggctaggaatttctttttcggggagctcggctcttaagacgcgagtctgccgacgctcccggccgaataaaaacctcttccttctttaa

SEQ ID NO: 2014 - DNA, 627 bp, Homo sapiens
  source 1..627: mol_type = unassigned DNA; mol_type = unassigned DNA
acatgtgatggagctcccgggcggcacagaggatcagagggtgccctctcaatgactctggctctgagtcacctaatgataccgatacctactgctgtgggaagaaaaccgtctaccggagtctgtgcctggccctggccctgctcgtggccgtgacggtgttccaacgcagtctcacccctggtcagtttctgcaggagcctccgccacccaccctggagccacagaaggcccagaagccaaatggacagctggtgaaccccaacaacttctggaagaacccgaaagatgtggctgcgcccacgcccatggcctctcaggggccccaggcctgggacgtgaccaccactaactgctcagccaatatcaacttgacccaccagccctggttccaggtcctggagccgcagttccggcagtttctcttctaccgccactgccgctacttccccatgctgctgaaccacccggagaagtgcaggggcgatgtctacctgctggtggttgtcaagtcggtcatcacgcagcacgaccgccgcgaggccatccgccagacctggggccgcgagcggcagtccgcgggtgggggccgaggcgccgtgcgcaccctcttcctgctgggcacgg

SEQ ID NO: 2015 - DNA, 4427 bp, Homo sapiens
  source 1..4427: mol_type = unassigned DNA; mol_type = unassigned DNA
cgcagcggtttggaacacccctggctgtgccatagtggaggggattccctggtgtactttcacactccctgtagatcgggctcagccaggggagggacgggagcaggtgttctcacatggttgcaagtgggactgccatgtctgtgtgcaaggataagggtgtgctgctctctagatgtctcttgggaaatcatgctgagaggtctgttccccgcagcagtttgctgttctctagttccttaaagataattgattttaagtacttctgtagattgtatattgtagttttctcccagtgatagtgacgtatttcattccagggagaaagcaaaaggccttttttttttttttgtaactcttttctctctttccaagattatcccgaaggcaataattcaagtgattatcttgttcaaacaacaacgtatctcccggaaaacttcacatactcaccatacctcccctgtccagaaaagctgccttatatgcactggcacacaaccttttaaccgtgcgatgcttttcaatgtgggcttcaaagaggccatgaaagacagtgtctgggactgtgtaatcttccacgatgtggatcatctacctgaaaatgaccggaactattacggatgtggagaaatgccacgtcattttgctgcaaagctggataaatacatgtatattcttccatataaagaattttttggtggtgtaagtgggctgacagtggaacaatttagaaagatcaatggttttcctaatgccttctggggatggggaggagaagatgatgacctttggaacaggtatgttgagagttcactatgctggatataatgtaaccagaccagagggagacttaggaaaatacaagtcaattcctcatcaccatagaggtgaagtccagtttttaggacggtataaattactaaggtattccaaggagcgtcagtacatcgatggactgaacaatttaatatataggccaaaaatactggttgataggttgtatacaaacatatctgtaaacctcatgccagagttagctccaatcgaagactattaaaagaagtggctgtcgtggcaaggtagaccacaatgctggatcataaacttggagcgcgctcttagtggaggtcagtgattggctgtgtcacagtgcccttttctctgagaagagccagcagtccacagtgtttacagagtgggactatatacagtcacccttctctcacccgtcctccctgctctgagacacacccctgtggcgagcaccgcagaaacgggaagccactacttaagatcggaagttaagagagctccctccgaagagaaaatttttatactaaaatctataatttaattcaagagaatgcttttatttccgtttaaacatattttgtatatatgtgatataaattaatgtgtgcaaattgtttaaaaattagatgtgttgcagttttgcatgtaatcggttatacctttattggacttttatagacattttttatttgcatgaaaaaaactcactaaatttacatcactaaacaaaggttaacccttgtgtgaaatgaaggaactgtcaataattgacagccaactaatacagtaaactgttatactagttttgagctttagacctcagccttttgtgtggaagaagtcacagctttcttaggctttaaaggaaaagaaggaaggacttaaatagcttttcttcctaccgggattacctatgtttttccttgcttgcaatctcatctgattttgctagaaatcacaaccatattgtttatgcatattgcatgagtattaccaagaaaaatcttaaaagttgtgatgtgacatgatataaaggatctctttatgttaaatgtctttccatgtacctctggtgtgtcagggattttgtgcctcaaaaaatgtttccaaggttgtgtgtttatactgtgtattttttttaaattcacggtgaacagcacttttattatttccagttcagaagagccaaaaaaaagtatcttcatttaaaaagaaatcaagtcagtttttttaaaagaatgatctatggaagaaaacccaatagtacttataatatacaaatgaattatactattagataagaattaaatattctatttttataaagataaatacttagtagataaaaacaaattttaagtttagttttcagacatagaatttcacttttggaggggacccttgaatgttagtttcattcaaactatattttgtttttttcacttttaagagattatatctctggtgttaattactaaaattttctttctaaaagtataatttaatagaattatcttaaaatacatgatcagtattcagtgcgctgatattataatgtcttctatatgtagtatctaaaagcataatttaatagcattgtcttaaaatacgtgatgagttatttggtgcactgatgccataatgtcttctatatgtaatatcttacatgtttgcatgagtgtcagggctttgtccagttatcttcatatgactgttctctgaaaaaaggtcttactacctgatatcaagtacatatcttaattttggatgaatttttccacagtaaagccgaacagtattcttttttgaaaattagcaattataaagattgtttaaaatatcttgatattttcacaaattttaaacaaaaaattaaatatctataaagtgaatgttcaacaacaatgatgagcaatagaaatctatatatgagaaacgtttggataatatttgcctcaaggattgtttacctaaaacagaactatggttatttatctcagattgtaagttttattttgaagtgtcatttttatggcaatattgataacacaaatgaccacaaactaaatcataaaataattgaatccttacactttgagaaaatggatagcttctgtgttatgataccaaacaaaatattttcatatttatttcttagaactatttccaaaatatttatatttcagtttttttatggtactcgaaaaatcaaaccttctgaaaattatgatatttgtacttcatttgtgtattagttcattttctgtttctattacatagtttttaaagtcaatgaaagagattgagaatgttaacatttgttgatcaatgtggagctgtccacattcggtatcttttcatttttatatatattttacagtttcaagaaaacttagtactactagtatctgccttattttcttaagtctgatgttaatttttgtttcaggagtgagatataaacattttgctttttttcagttttgaaatatagtttgtcatcctgtgaaaaccacctcgtttgctttttgtttgtttgttttgcttttttagtgtagacctaaaattatttttgcctataaacagtgaacttaatatgtttctgtgagagtgacagagctgtgcccgtttatcttcattgtattaattattacataaagattaacaaatacattgcaaatgcaaattataggatgtttggaggatttattaatgagcatgtattgattgcctattccatatccagtgcaatgctaggtatgtctatggaaggagtattattacttcatttctaaacaaatgaagtcaagcaaattgagatctttctgaaattatgaagacatcttctgataacttatctgttgtatttcctagtctcaaagtcaagaaacccgtatatgtggacctagggctaataggaggtccctatggcactaactgggaaaattacatggtgcttttcaactacagaaagaagtaatgactaatgggcctgtctgtagagaagaaaaggagaagagtacacatttgctggaactatatataattcacagtggagatagttaattctttgctaaaactagggttttatgagtattttttaaatctacatttaagtttttgtttttgtgaaaagttattcagtaagaaaactttataatattaagtagatacagttatgtattaaaaatttccttatatacccttttgccagccaagatactgatattttaaaacaaaatggaaaaatgtccaatacaatattctctttctggaggcttcctacaagtgaaagcagattttgtcattttatttggcctttgcttgtctttgatatatttctttatgtgtttttcaaatacatactgttgtagatttattgtcttgtatttgcaagtatgccggttgagagaactaaaatggttatagtattgtttatcagaaagaggaagtgtacttaagattattttatttatttagatgaaaggcttctacataaatgcactgaaataaatgctagtaatttcttgtatcccacttctttttttgcttctcatggaaatgtttgtacttttttatcattgtcttttatgaaatataatgttctaaag

SEQ ID NO: 2016 - DNA, 3891 bp, Homo sapiens
  source 1..3891: mol_type = unassigned DNA; mol_type = unassigned DNA
ccggctttcttccgtcctgccgtccccgggcccctagcccccagtcccctctcccccctccacctcttgtccctcggcctccgcgcctcccctcccccgactctctggcctcccattcattccgtccgctccctcccatttcctcttttccgctcgggccctctccccagagcctccccgcgcggaccccgctgcagtctcggggttctcagcacatttatggaagtttagggcctggacagtggccccgagtccggcctgagagcgcagcctgggctgctggcagggaagaggaagatgtctgtgctcaggcggatgatgcgggtttccaatcgctctctcctcgccttcatcttcttcttctccctctcttcgtcctgtctgtacttcatctatgtggccccaggcatcgccaacacatatctctttatggtacaagctcgaggtataatgttgagagaaaatgtgaaaacaataggtcatatgatcaggctgtacacaaataaaaacagtacgctcaacggtacagattatcccgaaggcaataattcaagtgattatcttgttcaaacaacaacgtatctcccggaaaacttcacatactcaccatacctcccctgtccagaaaagctgccttatatgcgaggattcctcaatgtcaatgtaagcgaagtcagttttgatgaaattcatcaactcttctccaaggatttagatattgagccagggggtcattggaggccaaaagactgtaaacccagatggaaggtggcagttctcattcctttccgtaatcgccatgaacatcttccaatttttttcttacatctgattccaatgctccagaagcagcggctggaatttgcgttttatgtcattgaacagactggcacacaaccttttaaccgtgcgatgcttttcaatgtgggcttcaaagaggccatgaaagacagtgtctgggactgtgtaatcttccacgatgtggatcatctacctgaaaatgaccggaactattacggatgtggagaaatgccacgtcattttgctgcaaagctggataaatacatgtatattcttccatataaagaattttttggtggtgtaagtgggctgacagtggaacaatttagaaagatcaatggttttcctaatgccttctggggatggggaggagaagatgatgacctttggaacagagttcactatgctggatataatgtaaccagaccagagggagacttaggaaaatacaagtcaattcctcatcaccatagaggtgaagtccagtttttaggacggtataaattactaaggtattccaaggagcgtcagtacatcgatggactgaacaatttaatatataggccaaaaatactggttgataggttgtatacaaacatatctgtaaacctcatgccagagttagctccaatcgaagactattaaaagaagtggctgtcgtggcaaggtagaccacaatgctggatcataaacttggagcgcgctcttagtggaggtcagtgattggctgtgtcacagtgcccttttctctgagaagagccagcagtccacagtgtttacagagtgggactatatacagtcacccttctctcacccgtcctccctgctctgagacacacccctgtggcgagcaccgcagaaacgggaagccactacttaagatcggaagttaagagagctccctccgaagagaaaatttttatactaaaatctataatttaattcaagagaatgcttttatttccgtttaaacatattttgtatatatgtgatataaattaatgtgtgcaaattgtttaaaaattagatgtgttgcagttttgcatgtaatcggttatacctttattggacttttatagacattttttatttgcatgaaaaaaactcactaaatttacatcactaaacaaaggttaacccttgtgtgaaatgaaggaactgtcaataattgacagccaactaatacagtaaactgttatactagttttgagctttagacctcagccttttgtgtggaagaagtcacagctttcttaggctttaaaggaaaagaaggaaggacttaaatagcttttcttcctaccgggattacctatgtttttccttgcttgcaatctcatctgattttgctagaaatcacaaccatattgtttatgcatattgcatgagtattaccaagaaaaatcttaaaagttgtgatgtgacatgatataaaggatctctttatgttaaatgtctttccatgtacctctggtgtgtcagggattttgtgcctcaaaaaatgtttccaaggttgtgtgtttatactgtgtattttttttaaattcacggtgaacagcacttttattatttccagttcagaagagccaaaaaaaagtatcttcatttaaaaagaaatcaagtcagtttttttaaaagaatgatctatggaagaaaacccaatagtacttataatatacaaatgaattatactattagataagaattaaatattctatttttataaagataaatacttagtagataaaaacaaattttaagtttagttttcagacatagaatttcacttttggaggggacccttgaatgttagtttcattcaaactatattttgtttttttcacttttaagagattatatctctggtgttaattactaaaattttctttctaaaagtataatttaatagaattatcttaaaatacatgatcagtattcagtgcgctgatattataatgtcttctatatgtagtatctaaaagcataatttaatagcattgtcttaaaatacgtgatgagttatttggtgcactgatgccataatgtcttctatatgtaatatcttacatgtttgcatgagtgtcagggctttgtccagttatcttcatatgactgttctctgaaaaaaggtcttactacctgatatcaagtacatatcttaattttggatgaatttttccacagtaaagccgaacagtattcttttttgaaaattagcaattataaagattgtttaaaatatcttgatattttcacaaattttaaacaaaaaattaaatatctataaagtgaatgttcaacaacaatgatgagcaatagaaatctatatatgagaaacgtttggataatatttgcctcaaggattgtttacctaaaacagaactatggttatttatctcagattgtaagttttattttgaagtgtcatttttatggcaatattgataacacaaatgaccacaaactaaatcataaaataattgaatccttacactttgagaaaatggatagcttctgtgttatgataccaaacaaaatattttcatatttatttcttagaactatttccaaaatatttatatttcagtttttttatggtactcgaaaaatcaaaccttctgaaaattatgatatttgtacttcatttgtgtattagttcattttctgtttctattacatagtttttaaagtcaatgaaagagattgagaatgttaacatttgttgatcaatgtggagctgtccacattcggtatcttttcatttttatatatattttacagtttcaagaaaacttagtactactagtatctgccttattttcttaagtctgatgttaatttttgtttcaggagtgagatataaacattttgctttttttcagttttgaaatatagtttgtcatcctgtgaaaaccacctcgtttgctttttgtttgtttgttttgcttttttagtgtagacctaaaattatttttgcctataaacagtgaacttaatatgtttctgtgagagtgacagagctgtgcccgtttatcttcattgtattaattattacataaagattaacaaatacattgcaaatgcaaatta

SEQ ID NO: 2017 - DNA, 2128 bp, Homo sapiens
  source 1..2128: mol_type = unassigned DNA; mol_type = unassigned DNA
ctcgggccctctccccagagcctccccgcgcggaccccgctgcagtctcggggttctcagcacatttatggaagtttagggcctggacagtggccccgagtccggcctgagagcgcagcctgggctgctggcagggaagaggaagatgtctgtgctcaggcggatgatgcgggtttccaatcgctctctcctcgccttcatcttcttcttctccctctcttcgtcctgtctgtacttcatctatgtggccccaggcatcgattatcccgaaggcaataattcaagtgattatcttgttcaaacaacaacgtatctcccggaaaacttcacatactcaccatacctcccctgtccagaaaagctgccttatatgcgaggattcctcaatgtcaatgtaagcgaagtcagttttgatgaaattcatcaactcttctccaaggatttagatattgagccagggggtcattggaggccaaaagactgtaaacccagatggaaggtggcagttctcattcctttccgtaatcgccatgaacatcttccaatttttttcttacatctgattccaatgctccagaagcagcggctggaatttgcgttttatgtcattgaacagactggcacacaaccttttaaccgtgcgatgcttttcaatgtgggcttcaaagaggccatgaaagacagtgtctgggactgtgtaatcttccacgatgtggatcatctacctgaaaatgaccggaactattacggatgtggagaaatgccacgtcattttgctgcaaagctggataaatacatgtatattcttccatataaagaattttttggtggtgtaagtgggctgacagtggaacaatttagaaagatcaatggttttcctaatgccttctggggatggggaggagaagatgatgacctttggaacagagttcactatgctggatataatgtaaccagaccagagggagacttaggaaaatacaagtcaattcctcatcaccatagaggtgaagtccagtttttaggacggtataaattactaaggtattccaaggagcgtcagtacatcgatggactgaacaatttaatatataggccaaaaatactggttgataggttgtatacaaacatatctgtaaacctcatgccagagttagctccaatcgaagactattaaaagaagtggctgtcgtggcaaggtagaccacaatgctggatcataaacttggagcgcgctcttagtggaggtcagtgattggctgtgtcacagtgcccttttctctgagaagagccagcagtccacagtgtttacagagtgggactatatacagtcacccttctctcacccgtcctccctgctctgagacacacccctgtggcgagcaccgcagaaacgggaagccactacttaagatcggaagttaagagagctccctccgaagagaaaatttttatactaaaatctataatttaattcaagagaatgcttttatttccgtttaaacatattttgtatatatgtgatataaattaatgtgtgcaaattgtttaaaaattagatgtgttgcagttttgcatgtaatcggttatacctttattggacttttatagacattttttatttgcatgaaaaaaactcactaaatttacatcactaaacaaaggttaacccttgtgtgaaatgaaggaactgtcaataattgacagccaactaatacagtaaactgttatactagttttgagctttagacctcagccttttgtgtggaagaagtcacagctttcttaggctttaaaggaaaagaaggaaggacttaaatagcttttcttcctaccgggattacctatgtttttccttgcttgcaatctcatctgattttgctagaaatcacaaccatattgtttatgcatattgcatgagtattaccaagaaaaatcttaaaagttgtgatgtgacatgatataaaggatctctttatgttaaatgtctttccatgtacctctggtgtgtcagggattttgtgcctcaaaaaatgtttccaaggttgtgtgtttatactgtgtattttttttaaattcacggtgaacagcacttttattatttccagttcagaagagccaaaaaaaa

SEQ ID NO: 2018 - DNA, 1239 bp, Homo sapiens
  source 1..1239: mol_type = unassigned DNA; mol_type = unassigned DNA
atggaagtttagggcctggacagtggccccgagtccggcctgagagcgcagcctgggctgctggcagggaagaggaagatgtctgtgctcaggcggatgatgcgggtttccaatcgctctctcctcgccttcatcttcttcttctccctctcttcgtcctgtctgtacttcatctatgtggccccaggcatcgccaacacatatctctttatggtacaagctcgaggtataatgttgagagaaaatgtgaaaacaataggtcatatgatcaggctgtacacaaataaaaacagtacgctcaacggtacagattatcccgaaggcaataattcaagtgattatcttgttcaaacaacaacgtatctcccggaaaacttcacatactcaccatacctcccctgtccagaaaagctgccttatatgcgaggattcctcaatgtcaatgtaagcgaagtcagttttgatgaaattcatcaactcttctccaaggatttagatattgagccagggggtcattggaggccaaaagactgtaaacccagatggaagactggcacacaaccttttaaccgtgcgatgcttttcaatgtgggcttcaaagaggccatgaaagacagtgtctgggactgtgtaatcttccacgatgtggatcatctacctgaaaatgaccggaactattacggatgtggagaaatgccacgtcattttgctgcaaagctggataaatacatgtatattcttccatataaagaattttttggtggtgtaagtgggctgacagtggaacaatttagaaagatcaatggttttcctaatgccttctggggatggggaggagaagatgatgacctttggaacagagttcactatgctggatataatgtaaccagaccagagggagacttaggaaaatacaagtcaattcctcatcaccatagaggtgaagtccagtttttaggacggtataaattactaaggtattccaaggagcgtcagtacatcgatggactgaacaatttaatatataggccaaaaatactggttgataggttgtatacaaacatatctgtaaacctcatgccagagttagctccaatcgaagactattaaaagaagtggctgtcgtggcaaggtagaccacaatgctggatcataaacttggagcgcgctcttagtggaggtcagtgattggctgtgtcacagtgcccttttctctgagaagagccagcagtccacagt

SEQ ID NO: 2019 - DNA, 339 bp, Homo sapiens
  source 1..339: mol_type = unassigned DNA; mol_type = unassigned DNA
aggggggattcattaatccaggtcggaaatacaccttgttcctcgaggattttggaaggaaattccacccgcgaagtccccttttggagatgcccttttcctttcagccaacacatatctctttatggtacaagctcgaggtataatgttgagagaaaatgtgaaaacaataggtcatatgatcaggctgtacacaaataaaaacagtacgctcaacggtacagattatcccgaaggcaataattcaagtgattatcttgttcaaacaacaacgtatctcccggaaaacttcacatactcaccatacctcccctgtccagaaaagctgccttatatgcg

SEQ ID NO: 2020 - DNA, 9113 bp, Homo sapiens
  source 1..9113: mol_type = unassigned DNA; mol_type = unassigned DNA
gcggccgccgccctcgccaccccgcctgcccactcccgccgccgccccgctctcgctttccccccggcctcccctcgccccttcccctcccccttcccggcgcactcggggggctgggaacgagctgccatgtgatgcgcgtcccctccgcgagctttcggtgacccacgaactgcccacctcgccggctgccgggagggggctgcgagccgggaagacgcggggaagaggaggcggaaaaggacgcaaagttctccggcgagcgcgttcgttcacatagctcccagttttaacatttcgccacctactgaagacatcatttgggaccaagctgatgagcccttgaagcacagcagataagagtgttgctgttgatcatctttgcctgggaagttgaatgataaagccagaagaaagcatgctttctgatcatttgcagctgtctgcttcagaaagtgagggctccaggaatgaggagaatcttcaagaacttcctcgcactgtgacatgtctgatcccttgctcccatccctgcagcatgaacaaggtggacactcactgacctgtcacaaggttgccccacaaaactttggggtccatgtctgaatggattgccagagccttctcatctctcccttcgcccagttccctgcatcctaagactcgaaggcagcacaggacctggaaaaattacatggtgtgaacggcatgtctgtggatgagaagcctgactcccccatgtatgtgtatgagtccacagtccactgcaccaacatcctcctgggcctcaatgaccagcggaaaaaggatattctctgtgacgtgactttgatcgtggagaggaaggagttccgggcccaccgggctgtgctggccgcatgcagtgaatatttttggcaggcgctggttggacagacaaaaaatgatttggtggtcagcttgcctgaggaggtcacagccaggggctttgggccgctgttacagtttgcctacactgccaagctgttactcagcagagaaaacatccgcgaggtcatccgctgtgctgagttcctgcgcatgcacaacctggaggactcctgcttcagcttcctgcagacccagctcctgaacagtgaggatggcctgtttgtgtgccggaaggatgctgcgtgccagcgcccacacgaggactgcgagaactctgcaggagaggaggaggatgaagaggaggagacgatggattcagagacggccaagatggcttgccccagggaccagatgcttccagagcccatcagctttgaggccgccgccatccccgtagcagagaaggaagaagccctgctgcccgagcctgacgtgcccacagacaccaaggagagctcagaaaaggacgcgttaacgcagtaccccagatacaagaaataccagcttgcatgtaccaagaatgtctataatgcatcatcacacagtacctcaggttttgcaagcacattccgggaagataactctagcaacagcctcaagccggggcttgccagggggcagattaaaagtgagccgcccagtgaagagaatgaggaagagagcatcacgctctgcctgtctggagatgagcctgacgccaaggacagagcgggggatgtcgagatggaccggaaacagcccagccctgcccctacccccacggccccagctggggccgcctgcctggagagatccaggagcgtggcctcgccctcctgcttaaggtctctgttcagcataacgaaaagtgtggagctgtctggcctgcccagtacatctcagcagcactttgccaggagtccagcctgcccttttgacaaggggatcactcagggtgaccttaaaactgactacacccctttcacagggaattatggacagccccacgtgggccagaaggaggtgtccaacttcaccatggggtcgcccctcagggggcctgggttggaggctctctgtaaacaggagggagagctggaccggaggagcgtgatcttctcctccagcgcttgtgaccaagtgagcacctcggtgcattcttattctggggtgagcagtttggacaaagacctctctgagccggtgccaaagggtctgtgggtgggagccggccagtccctccccagctcgcaggcctactcccacggtgggctgatggccgaccacttgccaggaaggatgcggcccaacaccagctgcccggtaccaatcaaagtctgccctcgctcaccccccttggagaccaggaccaggacttccagctcctgctcttcctattcctacgcggaggacgggagcgggggctcaccctgcagcctccctctctgtgagttctcctcctcgccctgttcccagggagccagattccttgccacagaacatcaggaaccaggcctgatgggagatggaatgtacaaccaagtgcggccccaaattaaatgtgagcagtcttatggaaccaactccagtgacgaatccggatcgttctcggaagcagacagtgagtcgtgtcctgtgcaggacaggggccaggaggtaaaacttccttttcctgtagatcaaatcacagatcttccaaggaacgatttccagatgatgattaaaatgcacaagctaacctcagaacagttagagtttattcatgatgtccgacggcgcagcaagaaccgcatcgcggcccagcgctgccgcaaaaggaaactggactgtattcagaatttagaatgtgaaatccgcaaattggtgtgtgagaaagagaaactgttgtcagagaggaatcaactgaaagcatgcatgggggaactgttggacaacttctcctgcctttcccaggaagtttgccgagacatccagagccccgagcagatccaggccctgcatcggtattgccctgtcctcagacccatggacttgcccacggcctccagtattaaccctgcgcccttgggtgctgagcagaacattgcggcctcccaatgcgcagtgggggaaaacgtgccctgctgcttggagccaggcgcggctccccccggacccccctgggcacccagcaacacctccgagaattgtacctctgggaggagactagaaggcactgacccgggaaccttctcagagagaggacctcctcttgaacccaggagccaaacagtgaccgtggacttctgccaggaaatgactgataagtgtacaactgacgaacagcccaggaaagattatacctagtgactcggctctgcctcccagtccgcacacctctcccatccaggcgttcttcagtcagcctgtggcactgttcatctgctgtcccgaagaaaccgagaacacatttggtgcacactacagcggtcttagcagcaatactgttccgaagtatcctctcctcttctcgagcaggagtgatagttaccttcacaatggtgctaccccttgcccaggcaaggaaagacagcagtgatgacactgtctgtctgtggctcaatttcagtcttcacagggatagactacaacacctctaggccccaaccacggattttttttctcagtggcccatgtcacaaaccctatctcaggaatttcttctgaatgttcaatttttttcattgaagacagcttctatacacatcaaagttttatagctagactgtacatattatatataatatatatataaaatatatatatatatatatatatatccatatgcaaaagtcctgcatgcctcaactttctcatcctaaaactggaaacttatttctcatttagaaacaggttccaacattcctcttcttttgtctctgatgctagaactagtttggtaactgttaacatggtcatttttcttgcttcacagttcaattttcaattcgtacttatttatggacaaaattcagtgttggaagctttttcccaaggttttatttcagatttctttttcgtttggtttggttttggcacctccaagtggtgtcatttgagcattgtaggtttgttttttgtttgtttggggggttttgtttgtttttgtttttgtttttgttttccttgcagatactgtacagtaatggtcaactttgccacttgcactgagttttgggtcaaacctattttcttaaatgaagttgtaacttcggtataactcaagtatactgtatattctttgcttttagttaaaaaagtaaaacattttagctaattaaaaagcactcaggtgataattatgtaggaaaaacaatcttgccaaataatgaattcatcctaggatgtgtagacaataatctgcttgaatatttttatatttcacctcctccccacctttccctaagcaaagtttaaacgcagatagagagttcagagttgatgctggatgttcagattcctaagtggggagagagtttggacatctcactcaaaagtacatcagaaaaacaggaatccgtgattttataccagaactcagcaggcattggctcctagaaatcaagttagaaagttttcacccagggagtaagtcccattcatttcaacacgtcctgaggcctcggcttgctcttggaagtgttgtgcagtaggacctgctcccctgaaggacggggccaaccagccactggctttcctgcccaggcttggcctcccaggacatctggcctgaggggatttgaatcacagccccgaaggtcctgccttcaccccattgggagagagcagggcatcctggcatctgcgatccatccctgacacaggctgacacattctttctcctttccttctccaaaggcttggagttttcttctgaggtttttctgccagtgtcttgtctgaaggcagacttcattctgaggctttggacaagctatcaccgggaaccctccctgtccccttcccgaatcacacacataccctaccctcacctgatgataattttctcttcttgctgcaaaactggttggcttgcaacccagagagagcagcttcccttggctctggggccgtgttggccccagccacgtttacaggaaggtgtgccccagaggaggaggaatcagctccctcgctccagtggccttgggtccgggtctcactgagcagcccgagggccactccagcccggctggggaagagagtcctgaacggtttgatgtggggatggggtggtgggcagtggggaatagatggttgactttgtttctttatttgtgccattgtttggacaatattaaagctgcatgtaaaaggggaaattagtatatgatgtaggctaaaagtgaaatcatagtaacatatgttttagtattattaacttttttctgtacaaatattagcactaaatgtttaaatatgtatgaatgccagaaatttgtcagttcatgcagtaggataaaaaaaaaaaaaaaaaaaaaaaaaaggcttttctttttaaacagttccacttttaaaacctgcctctgggtttttgttttttcttgtttgtgtgtgtgtgtgtgtgtgtgtgtgtgtgtgtgtgtgtgtgtgtgtgtgtctgaaacagatcttgataaagctctgtgttggagctgctggtttttgttatggttgttggaatttcttggcctactaggacagttctgtgcttcaccatgaggtttgcctttgtggaaaactggtgacagtgagaatataaactcaatgtgaatcacgtgatacttcgcaggcgtgtgttacagtggagtcagctgacagtattttgctttttaactctattgttgcctttccaagtgacctctcctcttcttttaaaaaaagaacactttctgctcatatcataaccaggtccaacccagcttcttggcatgaggtttaccctggtaacaactcatgtgcaactggtagtcttgaccacattccatccatttcctcaggtttctgtggttcagtagcccagacctgtttggcagccatttctagcaggggcggggcctctttatttctctccaccctaactcagacctcaccttcctcccacccacccctgccttgcttttcttcctcttcccccaacctaacttctgccatgggaactggttaaaaacactgctctaaaaaccatcttccaatttcatagagatttctcacaagttatttcattcataatccaccatgaacagtgactagcttcgtgcagttgttcatgtgatgtgtgtgtgtcttttcctattcagaactatgtgcttgtcaaaattatttctgggttgattcaaagggaggacttgctggggaccagaatccaaacggcctcaagtggaattttaaaacctagcctgtctcttttccctgggatccctctgtcaaccccacgccttttaggaaaaagaaaagtgagtgaacagcaaggaagagtgtttgcacagtacagtaacatttggttgttcttaaggctcttttcttacaaaaataagagaccctccaaccacgggctgtttaggaggatgcctgcttgggtctccaaatggctggggtaggaatggttgttggggcagagccagtggaggtgagtgaccctgagactaatgaacatcccacctaaatccagtcctccccttggatctgcctttgtcctgcttgtgtatccaggcaacctcttttcaagttggtcaggctttggacaggtgagtgatttgctgtatgtgtttgtttctctgcgttacctgggggtgccttgattaaaatcgaactttattacatactgattctggaacaaaacagttagaaaaactttaaaaaaaaaaaaaccgacaaagttacgaggccatcctgctatttatcttctgagttcccagcaatgactcaggcatcagagatgatgctgcagtggaaaacctgactctgtgtgtctgcaactgaatgttgtgcgagtaatttattaactgtctttctaaaggtttgctgcttttaagatgcactataattcgggatgtaatccttacattgcttttccaaggaagggaacaaaagtctagtgattagtatgccaactgccactactccttcaaaaggagccaggaccagcgacaagactcatgagaggactggctaaagtgaagtgtgcacagtgtgaagtttaatgctgttgtcaagaggcctaaacccacattttctcttttaatattttatgattgccatcaaagaagaagaaaaagaaggaacagacaaaggtttgaaaatgataagcctgttaagacaccaaaaactcctgtcccgtgaagctgcttgacatcctgtggagtagcataatcctctcaaaatgaggaagagctgcctgcaaagctttctcaagtccctatttggctacctacttctctacattatgccccatttaaactaggagctgtcttagaaatgacttcaaactgcttcactattgcttacagtttaggaggagtctcagatccagaaggagcaagaatcaagtttggtcctcaaatgactgtaaatagactaaagaacaaggtgttttttgtttttgtttttgttttctaagaataaagctgttcgttgtatcatgagttagtgtttcttccccaaactgaagactgtgttggaagtgcaatttctggtgagtcagtccacaatacaatgccctgtgtggagttggtattcatacaggaaatctgtgtgcacgaggcattgtgtgttgaaagtgtatgtttatagtactgcctgagccatctcatgaccccagcgtccaaaaccgatgctgtagaacagaacatatctgtacacaaatagtgtgtgcaaatagcatttgtacatagaaaagtctcattgtggcagattgagcataaattattcaactgacggtgcaaaaacattacttgcaaagaaaagtttatagtattttcctacactccaccctgggagatgatatttctatcaaatgaatatcagtgcattttaaatgtaatatgaaaacgatgctgccattttgtgaagaatacccacttggttgcagaggccaactttcatagctttgatttaatgttgtgacacggtgtatgcattttgctgtcaagcaatggataaacagctctgactttcattctcattccagtttattgacctcagataaaacactggcccttcttagaagcagaagtgtgcaccaagaccattcatttcaggtagactcacattcagtgccaagtgctcccatgggaataatcagacgcatatgttgcgaaagagtgaagggacttggacaaagaggggttttcctacagatggatgctcagtcttctaccaaaacatgtttggaggcagaactatgacctccccttaagtcctaacaatgtattttgtgtgtgcaaatcctgggatgcccgtttcacgctctgacataaagacatggcacctctagtgagtgatcaggaagattccatatgcatttgggagcttcaggtgcttgttagacacagtgagccattcaaggcaagcaccacctttgctagtgaggccaagagagcctgtgacaatttgacaatttgttccagaaccagtctgatgcaagtgcacctctaatatatgccttacaaactccagaggccatattcaaaacagggtcttctcagtgtatgcaaggggctgcagcccctcttctcttcctccccaggttgaacaatacggacagttttcacacatatctacctgtataaccctctgtacctctcataactggtcaacgactgtaacaggttacatcaggtgtttttctacatactttttacacagattctatgcgattaatgtaatttaattcaatgcatcattttattgtactagttcttaggcttgtccttatttttttctaagtgattgtggtttttctcgtggtttttattgtaaaaaatgaaaggctgttgatgcttattctctgtaactaagaatttttaccttttgggggaaaaaagcattgctatgaactaatgaattgaaacttcatttactcattgtaaatacactattgtgcaaaaaaagttttcactcaattgaattgctagtgttaactgaattttgtctagacaccatttctgttgatgaaataaagacatatcattatgcattgtaaactg

SEQ ID NO: 2021 - DNA, 3981 bp, Homo sapiens
  source 1..3981: mol_type = unassigned DNA; mol_type = unassigned DNA
gcggccgccgccctcgccaccccgcctgcccactcccgccgccgccccgctctcgctttccccccggcctcccctcgccccttcccctcccccttcccggcgcactcggggggctgggaacgagctgccatgtgatgcgcgtcccctccgcgagctttcggtgacccacgaactgcccacctcgccggctgccgggagggggctgcgagccgggaagacgcggggaagaggaggcggaaaaggacgcaaagttctccggcgagctgtctgcttcagaaagtgagggctccaggaatgaggagaatcttcaagaacttcctcgcactgtgacatgtctgatcccttgctcccatccctgcagcatgaacaaggtggacactcactgacctgtcacaaggttgccccacaaaactttggggtccatgtctgaatggattgccagagccttctcatctctcccttcgcccagttccctgcatcctaagactcgaaggcagcacaggacctggaaaaattacatggtgtgaacggcatgtctgtggatgagaagcctgactcccccatgtatgtgtatgagtccacagtccactgcaccaacatcctcctgggcctcaatgaccagcggaaaaaggatattctctgtgacgtgactttgatcgtggagaggaaggagttccgggcccaccgggctgtgctggccgcatgcagtgaatatttttggcaggcgctggttggacagacaaaaaatgatttggtggtcagcttgcctgaggaggtcacagccaggggctttgggccgctgttacagtttgcctacactgccaagctgttactcagcagagaaaacatccgcgaggtcatccgctgtgctgagttcctgcgcatgcacaacctggaggactcctgcttcagcttcctgcagacccagctcctgaacagtgaggatggcctgtttgtgtgccggaaggatgctgcgtgccagcgcccacacgaggactgcgagaactctgcaggagaggaggaggatgaagaggaggagacgatggattcagagacggccaagatggcttgccccagggaccagatgcttccagagcccatcagctttgaggccgccgccatccccgtagcagagaaggaagaagccctgctgcccgagcctgacgtgcccacagacaccaaggagagctcagaaaaggacgcgttaacgcagtaccccagatacaagaaataccagcttgcatgtaccaagaatgtctataatgcatcatcacacagtacctcaggttttgcaagcacattccgggaagataactctagcaacagcctcaagccggggcttgccagggggcagattaaaagtgagccgcccagtgaagagaatgaggaagagagcatcacgctctgcctgtctggagatgagcctgacgccaaggacagagcgggggatgtcgagatggaccggaaacagcccagccctgcccctacccccacggccccagctggggccgcctgcctggagagatccaggagcgtggcctcgccctcctgcttaaggtctctgttcagcataacgaaaagtgtggagctgtctggcctgcccagtacatctcagcagcactttgccaggagtccagcctgcccttttgacaaggggatcactcagggtgaccttaaaactgactacacccctttcacagggaattatggacagccccacgtgggccagaaggaggtgtccaacttcaccatggggtcgcccctcagggggcctgggttggaggctctctgtaaacaggagggagagctggaccggaggagcgtgatcttctcctccagcgcttgtgaccaagtgagcacctcggtgcattcttattctggggtgagcagtttggacaaagacctctctgagccggtgccaaagggtctgtgggtgggagccggccagtccctccccagctcgcaggcctactcccacggtgggctgatggccgaccacttgccaggaaggatgcggcccaacaccagctgcccggtaccaatcaaagtctgccctcgctcaccccccttggagaccaggaccaggacttccagctcctgctcttcctattcctacgcggaggacgggagcgggggctcaccctgcagcctccctctctgtgagttctcctcctcgccctgttcccagggagccagattccttgccacagaacatcaggaaccaggcctgatgggagatggaatgtacaaccaagtgcggccccaaattaaatgtgagcagtcttatggaaccaactccagtgacgaatccggatcgttctcggaagcagacagtgagtcgtgtcctgtgcaggacaggggccaggaggtaaaacttccttttcctgtagatcaaatcacagatcttccaaggaacgatttccagatgatgattaaaatgcacaagctaacctcagaacagttagagtttattcatgatgtccgacggcgcagcaagaaccgcatcgcggcccagcgctgccgcaaaaggaaactggactgtattcagaatttagaatgtgaaatccgcaaattggtgtgtgagaaagagaaactgttgtcagagaggaatcaactgaaagcatgcatgggggaactgttggacaacttctcctgcctttcccaggaagtttgccgagacatccagagccccgagcagatccaggccctgcatcggtattgccctgtcctcagacccatggacttgcccacggcctccagtattaaccctgcgcccttgggtgctgagcagaacattgcggcctcccaatgcgcagtgggggaaaacgtgccctgctgcttggagccaggcgcggctccccccggacccccctgggcacccagcaacacctccgagaattgtacctctgggaggagactagaaggcactgacccgggaaccttctcagagagaggacctcctcttgaacccaggagccaaacagtgaccgtggacttctgccaggaaatgactgataagtgtacaactgacgaacagcccaggaaagattatacctagtgactcggctctgcctcccagtccgcacacctctcccatccaggcgttcttcagtcagcctgtggcactgttcatctgctgtcccgaagaaaccgagaacacatttggtgcacactacagcggtcttagcagcaatactgttccgaagtatcctctcctcttctcgagcaggagtgatagttaccttcacaatggtgctaccccttgcccaggcaaggaaagacagcagtgatgacactgtctgtctgtggctcaatttcagtcttcacagggatagactacaacacctctaggccccaaccacggattttttttctcagtggcccatgtcacaaaccctatctcaggaatttcttctgaatgttcaatttttttcattgaagacagcttctatacacatcaaagttttatagctagactgtacatattatatataatatatatataaaatatatatatatatatatatatatccatatgcaaaagtcctgcatgcctcaactttctcatcctaaaactggaaacttatttctcatttagaaacaggttccaacattcctcttcttttgtctctgatgctagaactagtttggtaactgttaacatggtcatttttcttgcttcacagttcaattttcaattcgtacttatttatggacaaaattcagtgttggaagctttttcccaaggttttatttcagatttctttttcgtttggtttggttttggcacctccaagtggtgtcatttgagcattgtaggtttgttttttgtttgtttggggggttttgtttgtttttgtttttgtttttgttttccttgcagatactgtacagtaatggtcaactttgccacttgcactgagttttgggtcaaacctattttcttaaatgaagttgtaacttcggtataactcaagtata

SEQ ID NO: 2022 - DNA, 395 bp, Homo sapiens
  source 1..395: mol_type = unassigned DNA; mol_type = unassigned DNA
gcctgactcccccatgtatgtgtatgagtccacagtccactgcaccaacatcctcctgggcctcaatgaccagcggaaaaaggatattctctgtgacgtgactttgatcgtggagaggaaggagttccgggcccaccgggctgtgctggccgcatgcagtgaatatttttggcaggcgctggttggacagacaaaaaatgatttggtggtcagcttgcctgaggagatggtgtaaggatcactagatttcccttgagagtaaaagatcgaaagcattcacagcaccttctttgcttgggggaaaaataaaagcaactagtaattttcaccattaattcagtaagattctaagaagtgtaaacttgcttttctcaccgttgttgaaaacagcccac

SEQ ID NO: 2023 - DNA, 780 bp, Homo sapiens
  source 1..780: mol_type = unassigned DNA; mol_type = unassigned DNA
gcggccgccgccctcgccaccccgcctgcccactcccgccgccgccccgctctcgctttccccccggcctcccctcgccccttcccctcccccttcccggcgcactcggggggctgggaacgagctgccatgtgatgcgcgtcccctccgcgagctttcggtgacccacgaactgcccacctcgccggctgccgggagggggctgcgagccgggaagacgcggggaagaggaggcggaaaaggacgcaaagttctccggcgagtgcagctgtctgcttcagaaagtgagggctccaggaatgaggagaatcttcaagaacttcctcgcactgtgacatgtctgatcccttgctcccatccctgcagcatgaacaaggtggacactcactgacctgtcacaaggttgccccacaaaactttggggtccatgtctgaatggattgccagagccttctcatctctcccttcgcccagttccctgcatcctaagactcgaaggcagcacaggacctggaaaaattacatggtgtgaacggcatgtctgtggatgagaagcctgactcccccatgtatgtgtatgagtccacagtccactgcaccaacatcctcctgggcctcaatgaccagcggaaaaaggatattctctgtgacgtgactttgatcgtggagaggaaggagttccgggcccaccgggctgtgctggccgcatgcagtgaatatttttggcaggcgctggttggacagacaaaaaatgatttggtggtcagcttgcctgaggag

SEQ ID NO: 2024 - DNA, 868 bp, Homo sapiens
  source 1..868: mol_type = unassigned DNA; mol_type = unassigned DNA
gcggccgccgccctcgccaccccgcctgcccactcccgccgccgccccgctctcgctttccccccggcctcccctcgccccttcccctcccccttcccggcgcactcggggggctgggaacgagctgccatgtgatgcgcgtcccctccgcgagctttcggtgacccacgaactgcccacctcgccggctgccgggagggggctgcgagccgggaagacgcggggaagaggaggcggaaaaggacgcaaagttctccggcgagcgcgttcgttcacatagctcccagttttaacatttcgccacctactgaagacatcatttgggaccaagctgatgagcccttgaagcacagcagctgtctgcttcagaaagtgagggctccaggaatgaggagaatcttcaagaacttcctcgcactgtgacatgtctgatcccttgctcccatccctgcagcatgaacaaggtggacactcactgacctgtcacaaggttgccccacaaaactttggggtccatgtctgaatggattgccagagccttctcatctctcccttcgcccagttccctgcatcctaagactcgaaggcagcacaggacctggaaaaattacatggtgtgaacggcatgtctgtggatgagaagcctgactcccccatgtatgtgtatgagtccacagtccactgcaccaacatcctcctgggcctcaatgaccagcggaaaaaggatattctctgtgacgtgactttgatcgtggagaggaaggagttccgggcccaccgggctgtgctggccgcatgcagtgaatatttttggcaggcgctggttggacagacaaaaaatgatttggtggtcagcttgcctgaggag

SEQ ID NO: 2025 - DNA, 618 bp, Homo sapiens
  source 1..618: mol_type = unassigned DNA; mol_type = unassigned DNA
gcggccgccgccctcgccaccccgcctgcccactcccgccgccgccccgctctcgctttccccccggcctcccctcgccccttcccctcccccttcccggcgcactcggggggctgggaacgagctgccatgtgatgcgcgtcccctccgcgagctttcggtgacccacgaactgcccacctcgccggctgccgggagggggctgcgagccgggaagacgcggggaagaggaggcggaaaaggacgcaaagttctccggcgagcgcgttcgttcacatagctcccagttttaacatttcgccacctactgaagacatcatttgggaccaagctgatgagcccttgaagcacagcagtgcagctgtctgcttcagaaagtgagggctccaggaatgaggagaatcttcaagaacttcctcgcactgtgacatgtctgatcccttgctcccatccctgcagcatgaacaaggtggacactcactgacctgtcacaaggttgccccacaaaactttggggtccatgtctgaatggattgccagagccttctcatctctcccttcgcccagttccctgcatcctaagactcgaaggcagcacaggacctggaaaaattacat

SEQ ID NO: 2026 - DNA, 436 bp, Homo sapiens
  source 1..436: mol_type = unassigned DNA; mol_type = unassigned DNA
ccaaacaaagaccacactgttgacagcgttgggttccagtagcggtaaactaccaaggggctggtttacagaaaatgagtttgctctgtgatgtcatacaagtttgctttgtcctgacgccaacatgacactgaggcagcagaggagggagaacaggaaaattggaaccgtactcttagttaatggtttccagagattatttagcaggacttgaacagagggaggaaaatattgtgaaggattgctgcgaggtgtaccataattgcgtgcagctgtctgcttcagaaagtgagggctccaggaatgaggagaatcttcaagaacttcctcgcactgtgacatgtctgatcccttgctcccatccctgcagcatgaacaaggtggacactcactgacctgtcacaaggttgccccacaaaactttggggtccatgtc

SEQ ID NO: 2027 - DNA, 498 bp, Homo sapiens
  source 1..498: mol_type = unassigned DNA; mol_type = unassigned DNA
gcggccgccgccctcgccaccccgcctgcccactcccgccgccgccccgctctcgctttccccccggcctcccctcgccccttcccctcccccttcccggcgcactcggggggctgggaacgagctgccatgtgatgcgcgtcccctccgcgagctttcggtgacccacgaactgcccacctcgccggctgccgggagggggctgcgagccgggaagacgcggggaagaggaggcggaaaaggacgcaaagttctccggcgagataagagtgttgctgttgatcatctttgcctgggaagttgaatgataaagccagaagaaagcatgctttctgatcatttgcagctgtctgcttcagaaagtgagggctccaggaatgaggagaatcttcaagaacttcctcgcactgtgacatgtctgatcccttgctcccatccctgcagcatgaacaaggtggacactcactgacctgtcacaaggttgccccacaaaacttt

SEQ ID NO: 2028 - DNA, 540 bp, Homo sapiens
  source 1..540: mol_type = unassigned DNA; mol_type = unassigned DNA
gcggccgccgccctcgccaccccgcctgcccactcccgccgccgccccgctctcgctttccccccggcctcccctcgccccttcccctcccccttcccggcgcactcggggggctgggaacgagctgccatgtgatgcgcgtcccctccgcgagctttcggtgacccacgaactgcccacctcgccggctgccgggagggggctgcgagccgggaagacgcggggaagaggaggcggaaaaggacgcaaagttctccggcgagcgcgttcgttcacatagctcccagttttaacatttcgccacctactgaagacatcatttgggaccaagctgatgagcccttgaagcacagcagtgcagctgtctgcttcagaaagtgagggctccaggaatgaggagaatcttcaagaacttcctcgcactgtgacatgtctgatcccttgctcccatccctgcagcatgaacaagaaaccgctcctgcctcaactccaagggccagagcgagttggcacaccctccaagaggagcacctcgcttct

SEQ ID NO: 2029 - DNA, 9108 bp, Homo sapiens
  source 1..9108: mol_type = unassigned DNA; mol_type = unassigned DNA
gtcaacaatgtagcgattgagagtgtgggcgttccggggagagcgcaagccgcgcggcgcggagcaaacagcgccgagccgccgccgcctcagcagcagcagcagcagcagcagcggcagcagcggccgtgcacgcccgggctgcggtcgcacagcgctaacgtgagcggccgccgccctcgccaccccgcctgcccactcccgccgccgccccgctctcgctttccccccggcctcccctcgccccttcccctcccccttcccggcgcactcggggggctgggaacgagctgccatgtgatgcgcgtcccctccgcgagctttcggtgacccacgaactgcccacctcgccggctgccgggagggggctgcgagccgggaagacgcggggaagaggaggcggaaaaggacgcaaagttctccggcgagtgcagctgtctgcttcagaaagtgagggctccaggaatgaggagaatcttcaagaacttcctcgcactgtgacatgtctgatcccttgctcccatccctgcagcatgaacaaggtggacactcactgacctgtcacaaggttgccccacaaaactttggggtccatgtctgaatggattgccagagccttctcatctctcccttcgcccagttccctgcatcctaagactcgaaggcagcacaggacctggaaaaattacatggtgtgaacggcatgtctgtggatgagaagcctgactcccccatgtatgtgtatgagtccacagtccactgcaccaacatcctcctgggcctcaatgaccagcggaaaaaggatattctctgtgacgtgactttgatcgtggagaggaaggagttccgggcccaccgggctgtgctggccgcatgcagtgaatatttttggcaggcgctggttggacagacaaaaaatgatttggtggtcagcttgcctgaggaggtcacagccaggggctttgggccgctgttacagtttgcctacactgccaagctgttactcagcagagaaaacatccgcgaggtcatccgctgtgctgagttcctgcgcatgcacaacctggaggactcctgcttcagcttcctgcagacccagctcctgaacagtgaggatggcctgtttgtgtgccggaaggatgctgcgtgccagcgcccacacgaggactgcgagaactctgcaggagaggaggaggatgaagaggaggagacgatggattcagagacggccaagatggcttgccccagggaccagatgcttccagagcccatcagctttgaggccgccgccatccccgtagcagagaaggaagaagccctgctgcccgagcctgacgtgcccacagacaccaaggagagctcagaaaaggacgcgttaacgcagtaccccagatacaagaaataccagcttgcatgtaccaagaatgtctataatgcatcatcacacagtacctcaggttttgcaagcacattccgggaagataactctagcaacagcctcaagccggggcttgccagggggcagattaaaagtgagccgcccagtgaagagaatgaggaagagagcatcacgctctgcctgtctggagatgagcctgacgccaaggacagagcgggggatgtcgagatggaccggaaacagcccagccctgcccctacccccacggccccagctggggccgcctgcctggagagatccaggagcgtggcctcgccctcctgcttaaggtctctgttcagcataacgaaaagtgtggagctgtctggcctgcccagtacatctcagcagcactttgccaggagtccagcctgcccttttgacaaggggatcactcagggtgaccttaaaactgactacacccctttcacagggaattatggacagccccacgtgggccagaaggaggtgtccaacttcaccatggggtcgcccctcagggggcctgggttggaggctctctgtaaacaggagggagagctggaccggaggagcgtgatcttctcctccagcgcttgtgaccaagtgagcacctcggtgcattcttattctggggtgagcagtttggacaaagacctctctgagccggtgccaaagggtctgtgggtgggagccggccagtccctccccagctcgcaggcctactcccacggtgggctgatggccgaccacttgccaggaaggatgcggcccaacaccagctgcccggtaccaatcaaagtctgccctcgctcaccccccttggagaccaggaccaggacttccagctcctgctcttcctattcctacgcggaggacgggagcgggggctcaccctgcagcctccctctctgtgagttctcctcctcgccctgttcccagggagccagattccttgccacagaacatcaggaaccaggcctgatgggagatggaatgtacaaccaagtgcggccccaaattaaatgtgagcagtcttatggaaccaactccagtgacgaatccggatcgttctcggaagcagacagtgagtcgtgtcctgtgcaggacaggggccaggaggtaaaacttccttttcctgtagatcaaatcacagatcttccaaggaacgatttccagatgatgattaaaatgcacaagctaacctcagaacagttagagtttattcatgatgtccgacggcgcagcaagaaccgcatcgcggcccagcgctgccgcaaaaggaaactggactgtattcagaatttagaatgtgaaatccgcaaattggtgtgtgagaaagagaaactgttgtcagagaggaatcaactgaaagcatgcatgggggaactgttggacaacttctcctgcctttcccaggaagtttgccgagacatccagagccccgagcagatccaggccctgcatcggtattgccctgtcctcagacccatggacttgcccacggcctccagtattaaccctgcgcccttgggtgctgagcagaacattgcggcctcccaatgcgcagtgggggaaaacgtgccctgctgcttggagccaggcgcggctccccccggacccccctgggcacccagcaacacctccgagaattgtacctctgggaggagactagaaggcactgacccgggaaccttctcagagagaggacctcctcttgaacccaggagccaaacagtgaccgtggacttctgccaggaaatgactgataagtgtacaactgacgaacagcccaggaaagattatacctagtgactcggctctgcctcccagtccgcacacctctcccatccaggcgttcttcagtcagcctgtggcactgttcatctgctgtcccgaagaaaccgagaacacatttggtgcacactacagcggtcttagcagcaatactgttccgaagtatcctctcctcttctcgagcaggagtgatagttaccttcacaatggtgctaccccttgcccaggcaaggaaagacagcagtgatgacactgtctgtctgtggctcaatttcagtcttcacagggatagactacaacacctctaggccccaaccacggattttttttctcagtggcccatgtcacaaaccctatctcaggaatttcttctgaatgttcaatttttttcattgaagacagcttctatacacatcaaagttttatagctagactgtacatattatatataatatatatataaaatatatatatatatatatatatatccatatgcaaaagtcctgcatgcctcaactttctcatcctaaaactggaaacttatttctcatttagaaacaggttccaacattcctcttcttttgtctctgatgctagaactagtttggtaactgttaacatggtcatttttcttgcttcacagttcaattttcaattcgtacttatttatggacaaaattcagtgttggaagctttttcccaaggttttatttcagatttctttttcgtttggtttggttttggcacctccaagtggtgtcatttgagcattgtaggtttgttttttgtttgtttggggggttttgtttgtttttgtttttgtttttgttttccttgcagatactgtacagtaatggtcaactttgccacttgcactgagttttgggtcaaacctattttcttaaatgaagttgtaacttcggtataactcaagtatactgtatattctttgcttttagttaaaaaagtaaaacattttagctaattaaaaagcactcaggtgataattatgtaggaaaaacaatcttgccaaataatgaattcatcctaggatgtgtagacaataatctgcttgaatatttttatatttcacctcctccccacctttccctaagcaaagtttaaacgcagatagagagttcagagttgatgctggatgttcagattcctaagtggggagagagtttggacatctcactcaaaagtacatcagaaaaacaggaatccgtgattttataccagaactcagcaggcattggctcctagaaatcaagttagaaagttttcacccagggagtaagtcccattcatttcaacacgtcctgaggcctcggcttgctcttggaagtgttgtgcagtaggacctgctcccctgaaggacggggccaaccagccactggctttcctgcccaggcttggcctcccaggacatctggcctgaggggatttgaatcacagccccgaaggtcctgccttcaccccattgggagagagcagggcatcctggcatctgcgatccatccctgacacaggctgacacattctttctcctttccttctccaaaggcttggagttttcttctgaggtttttctgccagtgtcttgtctgaaggcagacttcattctgaggctttggacaagctatcaccgggaaccctccctgtccccttcccgaatcacacacataccctaccctcacctgatgataattttctcttcttgctgcaaaactggttggcttgcaacccagagagagcagcttcccttggctctggggccgtgttggccccagccacgtttacaggaaggtgtgccccagaggaggaggaatcagctccctcgctccagtggccttgggtccgggtctcactgagcagcccgagggccactccagcccggctggggaagagagtcctgaacggtttgatgtggggatggggtggtgggcagtggggaatagatggttgactttgtttctttatttgtgccattgtttggacaatattaaagctgcatgtaaaaggggaaattagtatatgatgtaggctaaaagtgaaatcatagtaacatatgttttagtattattaacttttttctgtacaaatattagcactaaatgtttaaatatgtatgaatgccagaaatttgtcagttcatgcagtaggataaaaaaaaaaaaaaaaaaaaaaaaaaggcttttctttttaaacagttccacttttaaaacctgcctctgggtttttgttttttcttgtttgtgtgtgtgtgtgtgtgtgtgtgtgtgtgtgtgtgtgtgtgtgtgtgtgtctgaaacagatcttgataaagctctgtgttggagctgctggtttttgttatggttgttggaatttcttggcctactaggacagttctgtgcttcaccatgaggtttgcctttgtggaaaactggtgacagtgagaatataaactcaatgtgaatcacgtgatacttcgcaggcgtgtgttacagtggagtcagctgacagtattttgctttttaactctattgttgcctttccaagtgacctctcctcttcttttaaaaaaagaacactttctgctcatatcataaccaggtccaacccagcttcttggcatgaggtttaccctggtaacaactcatgtgcaactggtagtcttgaccacattccatccatttcctcaggtttctgtggttcagtagcccagacctgtttggcagccatttctagcaggggcggggcctctttatttctctccaccctaactcagacctcaccttcctcccacccacccctgccttgcttttcttcctcttcccccaacctaacttctgccatgggaactggttaaaaacactgctctaaaaaccatcttccaatttcatagagatttctcacaagttatttcattcataatccaccatgaacagtgactagcttcgtgcagttgttcatgtgatgtgtgtgtgtcttttcctattcagaactatgtgcttgtcaaaattatttctgggttgattcaaagggaggacttgctggggaccagaatccaaacggcctcaagtggaattttaaaacctagcctgtctcttttccctgggatccctctgtcaaccccacgccttttaggaaaaagaaaagtgagtgaacagcaaggaagagtgtttgcacagtacagtaacatttggttgttcttaaggctcttttcttacaaaaataagagaccctccaaccacgggctgtttaggaggatgcctgcttgggtctccaaatggctggggtaggaatggttgttggggcagagccagtggaggtgagtgaccctgagactaatgaacatcccacctaaatccagtcctccccttggatctgcctttgtcctgcttgtgtatccaggcaacctcttttcaagttggtcaggctttggacaggtgagtgatttgctgtatgtgtttgtttctctgcgttacctgggggtgccttgattaaaatcgaactttattacatactgattctggaacaaaacagttagaaaaactttaaaaaaaaaaaaaccgacaaagttacgaggccatcctgctatttatcttctgagttcccagcaatgactcaggcatcagagatgatgctgcagtggaaaacctgactctgtgtgtctgcaactgaatgttgtgcgagtaatttattaactgtctttctaaaggtttgctgcttttaagatgcactataattcgggatgtaatccttacattgcttttccaaggaagggaacaaaagtctagtgattagtatgccaactgccactactccttcaaaaggagccaggaccagcgacaagactcatgagaggactggctaaagtgaagtgtgcacagtgtgaagtttaatgctgttgtcaagaggcctaaacccacattttctcttttaatattttatgattgccatcaaagaagaagaaaaagaaggaacagacaaaggtttgaaaatgataagcctgttaagacaccaaaaactcctgtcccgtgaagctgcttgacatcctgtggagtagcataatcctctcaaaatgaggaagagctgcctgcaaagctttctcaagtccctatttggctacctacttctctacattatgccccatttaaactaggagctgtcttagaaatgacttcaaactgcttcactattgcttacagtttaggaggagtctcagatccagaaggagcaagaatcaagtttggtcctcaaatgactgtaaatagactaaagaacaaggtgttttttgtttttgtttttgttttctaagaataaagctgttcgttgtatcatgagttagtgtttcttccccaaactgaagactgtgttggaagtgcaatttctggtgagtcagtccacaatacaatgccctgtgtggagttggtattcatacaggaaatctgtgtgcacgaggcattgtgtgttgaaagtgtatgtttatagtactgcctgagccatctcatgaccccagcgtccaaaaccgatgctgtagaacagaacatatctgtacacaaatagtgtgtgcaaatagcatttgtacatagaaaagtctcattgtggcagattgagcataaattattcaactgacggtgcaaaaacattacttgcaaagaaaagtttatagtattttcctacactccaccctgggagatgatatttctatcaaatgaatatcagtgcattttaaatgtaatatgaaaacgatgctgccattttgtgaagaatacccacttggttgcagaggccaactttcatagctttgatttaatgttgtgacacggtgtatgcattttgctgtcaagcaatggataaacagctctgactttcattctcattccagtttattgacctcagataaaacactggcccttcttagaagcagaagtgtgcaccaagaccattcatttcaggtagactcacattcagtgccaagtgctcccatgggaataatcagacgcatatgttgcgaaagagtgaagggacttggacaaagaggggttttcctacagatggatgctcagtcttctaccaaaacatgtttggaggcagaactatgacctccccttaagtcctaacaatgtattttgtgtgtgcaaatcctgggatgcccgtttcacgctctgacataaagacatggcacctctagtgagtgatcaggaagattccatatgcatttgggagcttcaggtgcttgttagacacagtgagccattcaaggcaagcaccacctttgctagtgaggccaagagagcctgtgacaatttgacaatttgttccagaaccagtctgatgcaagtgcacctctaatatatgccttacaaactccagaggccatattcaaaacagggtcttctcagtgtatgcaaggggctgcagcccctcttctcttcctccccaggttgaacaatacggacagttttcacacatatctacctgtataaccctctgtacctctcataactggtcaacgactgtaacaggttacatcaggtgtttttctacatactttttacacagattctatgcgattaatgtaatttaattcaatgcatcattttattgtactagttcttaggcttgtccttatttttttctaagtgattgtggtttttctcgtggtttttattgtaaaaaatgaaaggctgttgatgcttattctctgtaactaagaatttttaccttttgggggaaaaaagcattgctatgaactaatgaattgaaacttcatttactcattgtaaatacactattgtgcaaaaaaagttttcactcaattgaattgctagtgttaactgaattttgtctagacaccatttctgttgatgaaataaagacatatcattatgcattgtaaactg

SEQ ID NO: 2030 - DNA, 1157 bp, Homo sapiens
  source 1..1157: mol_type = unassigned DNA; mol_type = unassigned DNA
gggcttggggtgagacctgtgcgccgtcaccacgggcggggcggggcctgggtccaccggggttctgaggggagactgaggtcctgagccgacagcctcagctccctgccaggccagacccggcagacagatgagggcccaggaggcctggcgggcctgggggcgctacggtgggagaggaagccaggggtacctgcctctgccttccagggccaccgttggccccagctgtgccttgactacgtaacatcttgtcctcacagcccagagcatgttccagatcccagagtttgagccgagtgagcaggaagactccagctctgcagagaggggcctgggccccagccccgcaggggacgggccctcaggctccggcaagcatcatcgccaggccccaggcctcctgtgggacgccagtcaccagcaggagcagccaaccagcagcagccatcatggaggcgctggggctgtggagatccggagtcgccacagctcctaccccgcggggacggaggacgacgaagggatgggggaggagcccagcccctttcggggccgctcgcgctcggcgccccccaacctctgggcagcacagcgctatggccgcgagctccggaggatgagtgacgagtttgtggactcctttaagaagggacttcctcgcccgaagagcgcgggcacagcaacgcagatgcggcaaagctccagctggacgcgagtcttccagtcctggtgggatcggaacttgggcaggggaagctccgccccctcccagtgaccttcgctccacatcccgaaactccacccgttcccactgccctgggcagccatcttgaatatgggcggaagtacttccctcaggcctatgcaaaaagaggatccgtgctgtctcctttggagggagggctgacccagattcccttccggtgcgtgtgaagccacggaaggcttggtcccatcggaagttttgggttttccgcccacagccgccggaagtggctccgtggccccgccctcaggctccgggctttcccccaggcgcctgcgctaagtcgcgagccaggtttaaccgttgcgtcaccgggacccgagcccccgcgatgccctgggggccgtgctcactaccaaatgttaataaagcccgcgtctgtgccgcc

SEQ ID NO: 2031 - DNA, 929 bp, Homo sapiens
  source 1..929: mol_type = unassigned DNA; mol_type = unassigned DNA
cggcaggcccgggtcaggggcctcgagatcgggcttgggcccagagcatgttccagatcccagagtttgagccgagtgagcaggaagactccagctctgcagagaggggcctgggccccagccccgcaggggacgggccctcaggctccggcaagcatcatcgccaggccccaggcctcctgtgggacgccagtcaccagcaggagcagccaaccagcagcagccatcatggaggcgctggggctgtggagatccggagtcgccacagctcctaccccgcggggacggaggacgacgaagggatgggggaggagcccagcccctttcggggccgctcgcgctcggcgccccccaacctctgggcagcacagcgctatggccgcgagctccggaggatgagtgacgagtttgtggactcctttaagaagggacttcctcgcccgaagagcgcgggcacagcaacgcagatgcggcaaagctccagctggacgcgagtcttccagtcctggtgggatcggaacttgggcaggggaagctccgccccctcccagtgaccttcgctccacatcccgaaactccacccgttcccactgccctgggcagccatcttgaatatgggcggaagtacttccctcaggcctatgcaaaaagaggatccgtgctgtctcctttggagggagggctgacccagattcccttccggtgcgtgtgaagccacggaaggcttggtcccatcggaagttttgggttttccgcccacagccgccggaagtggctccgtggccccgccctcaggctccgggctttcccccaggcgcctgcgctaagtcgcgagccaggtttaaccgttgcgtcaccgggacccgagcccccgcgatgccctgggggccgtgctcactaccaaatgttaataaagcccgcgtctgtgc

SEQ ID NO: 2032 - DNA, 525 bp, Homo sapiens
  source 1..525: mol_type = unassigned DNA; mol_type = unassigned DNA
catgttccagatcccagagtttgagccgagtgagcaggaagactccagctctgcagagaggggcctgggccccagccccgcaggggacgggccctcaggctccggcaagcatcatcgccaggccccaggcctcctgtgggacgccagtcaccagcaggagcagccaaccagcagcagccatcatggagaagggacttcctcgcccgaagagcgcgggcacagcaacgcagatgcggcaaagctccagctggacgcgagtcttccagtcctggtgggatcggaacttgggcaggggaagctccgccccctcccagtgaccttcgctccacatcccgaaactccacccgttcccactgccctgggcagccatcttgaatatgggcggaagtacttccctcaggcctatgcaaaaagaggatccgtgctgtctcctttggagggagggctgacccagattcccttccggtgcgtgtgaagccacggaaggcttggtcccatcggaagttttgggttttccgcccacag

SEQ ID NO: 2033 - DNA, 631 bp, Homo sapiens
  source 1..631: mol_type = unassigned DNA; mol_type = unassigned DNA
ggggcctcgagatcgggcttgggcccagagcatgttccagatcccagagtttgagccgagtgagcaggaagactccagctctgcagagaggggcctgggccccagccccgcaggggacgggccctcaggctccggcaagcatcatcgccaggccccaggcctcctgtgggacgccagtcaccagcaggagcagccaaccagcagcagccatcatggagggagaacttcgtattctccttcttgggaatctgaggactctgaaaatcccagtgcagggatgctcgcggaagcatcagcagggatgtccgccccagccgctgactcagaagcccaacacgcagagaatgtaaagctagaggcgctggggctgtggagatccggagtcgccacagctcctaccccgcggggacggaggacgacgaagggatgggggaggagcccagcccctttcggggccgctcgcgctcggcgccccccaacctctgggcagcacagcgctatggccgcgagctccggaggatgagtgacgagtttgtggactcctttaagaagggacttcctcgcccgaagagcgcgggcacagcaacgcagatgcggcaaagctccagctggacgcgagtcttccagtcct

SEQ ID NO: 2034 - DNA, 325 bp, Homo sapiens
  source 1..325: mol_type = unassigned DNA; mol_type = unassigned DNA
ggcagggccaggggcttagaggagctgagattaacgtcgcccccctacccactgaccctctgcaggcgctggggctgtggagatccggagtcgccacagctcctaccccgcggggacggaggacgacgaagggatgggggaggagcccagcccctttcggggccgctcgcgctcggcgccccccaacctctgggcagcacagcgctatggccgcgagctccggaggatgagtgacgagtttgtggactcctttaagaagggacttcctcgcccgaagagcgcgggcacagcaacgcagatgcggcaaagctccagctggacgcga

SEQ ID NO: 2035 - DNA, 359 bp, Homo sapiens
  source 1..359: mol_type = unassigned DNA; mol_type = unassigned DNA
ggacacaggctaagagagtcgaaggctggctagacaaggggagagacacagagctccgctgatcatcactggactctggattccaccaaacctttggaaccttccagcctcaggcctccacagcttcacagaaactgggcgctggggctgtggagatccggagtcgccacagctcctaccccgcggggacggaggacgacgaagggatgggggaggagcccagcccctttcggggccgctcgcgctcggcgccccccaacctctgggcagcacagcgctatggccgcgagctccggaggatgagtgacgagtttgtggactcctttaagaagggacttcctcgcccgaagagcgcgggc

SEQ ID NO: 2036 - DNA, 552 bp, Homo sapiens
  source 1..552: mol_type = unassigned DNA; mol_type = unassigned DNA
aactagggcccggagcccggggtgctggagggaggcggcaggcccgggtcaggggcctcgagatcgggcttgggcccagagcatgttccagatcccagagtttgagccgagtgagcaggaagactccagctctgcagagaggggcctgggccccagccccgcaggggacgggccctcaggctccggcaagcatcatcgccaggccccaggcctcctgtgggacgccagtcaccagcaggagcagccaaccagcagcagccatcatggagggagaacttcgtattctccttcttgggaatctgaggactctgaaaatcccagtgcagggatgctcgcggaagcatcagcagggatgtccgccccagccgctgactcagaagcccaacacgcagagaatgtaaagctagaggtgccatgctggggcctggggcacttctagccacagccactaccctccacttccacacccagctccgggccaggctctaggcggatggcaagagtgggcaggcctgggcacccacccacgttcacacccaaggaggagccaca

SEQ ID NO: 2037 - DNA, 2571 bp, Homo sapiens
  source 1..2571: mol_type = unassigned DNA; mol_type = unassigned DNA
gcggagctccgcatccaaccccgggccgcggccaacttctctggactggaccagaagtttctagccggccagttgctacctccctttatctcctccttcccctctggcagcgaggaggctatttccagacacttccacccctctctggccacgtcacccccgcctttaattcataaaggtgcccggcgccggcttcccggacacgtcggcggcggagaggggcccacggcggcggcccggccagagactcggcgcccggagccagcgccccgcacccgcgccccagcgggcagaccccaacccagcatgagcgccgccacccactcgcccatgatgcaggtggcgtccggcaacggtgaccgcgaccctttgccccccggatgggagatcaagatcgacccgcagaccggctggcccttcttcgtggaccacaacagccgcaccactacgtggaacgacccgcgcgtgccctctgagggccccaaggagactccatcctctgccaatggcccttcccgggagggctctaggctgccgcctgctagggaaggccaccctgtgtacccccagctccgaccaggctacattcccattcctgtgctccatgaaggcgctgagaaccggcaggtgcaccctttccatgtctatccccagcctgggatgcagcgattccgaactgaggcggcagcagcggctcctcagaggtcccagtcacctctgcggggcatgccagaaaccactcagccagataaacagtgtggacaggtggcagcggcggcggcagcccagcccccagcctcccacggacctgagcggtcccagtctccagctgcctctgactgctcatcctcatcctcctcggccagcctgccttcctccggcaggagcagcctgggcagtcaccagctcccgcgggggtacatctccattccggtgatacacgagcagaacgttacccggccagcagcccagccctccttccaccaagcccagaagacgcactacccagcgcagcagggggagtaccagacccaccagcctgtgtaccacaagatccagggggatgactgggagccccggcccctgcgggcggcatccccgttcaggtcatctgtccagggtgcatcgagccgggagggctcaccagccaggagcagcacgccactccactccccctcgcccatccgtgtgcacaccgtggtcgacaggcctcagcagcccatgacccatcgagaaactgcacctgtttcccagcctgaaaacaaaccagaaagtaagccaggcccagttggaccagaactccctcctggacacatcccaattcaagtgatccgcaaagaggtggattctaaacctgtttcccagaagcccccacctccctctgagaaggtagaggtgaaagttccccctgctccagttccttgtcctcctcccagccctggcccttctgctgtcccctcttcccccaagagtgtggctacagaagagagggcagcccccagcactgcccctgcagaagctacacctccaaaaccaggagaagccgaggctcccccaaaacatccaggagtgctgaaagtggaagccatcctggagaaggtacaggggctggagcaggctgtagacaactttgaaggcaagaagactgacaaaaagtacctgatgatcgaagagtatttgaccaaagagctgctggccctggattcagtggaccccgagggacgagccgatgtgcgtcaggccaggagagacggtgtcaggaaggttcagaccatcttggaaaaacttgaacagaaagccattgatgtcccaggtcaagtccaggtctatgaactccagcccagcaaccttgaagcagatcagccactgcaggcaatcatggagatgggtgccgtggcagcagacaagggcaagaaaaatgctggaaatgcagaagatccccacacagaaacccagcagccagaagccacagcagcagcgacttcaaaccccagcagcatgacagacacccctggtaacccagcagcaccgtagcctctgccctgtaaaaatcagactcggaaccgatgtgtgctttagggaattttaagttgcatgcatttcagagactttaagtcagttggtttttattagctgcttggtatgcagtaacttgggtggaggcaaaacactaataaaagggctaaaaaggaaaatgatgcttttcttctatattcttactctgtacaaataaagaagttgcttgttgtttgagaagtttaaccccgttgcttgttgttctgcagccctgtctacttgggcacccccaccacctgttagctgtggttgtgcactgtcttttgtagctctggactggaggggtagatggggagtcaattacccatcacataaatatgaaacatttatcagaaatgttgccattttaatgagatgattttcttcatctcataattaaaatacctgactttagagagagtaaaatgtgccaggagccataggaatatctgtatgttggatgactttaatgctacattttaaaaaaagaaaataaagtaataatataactcaaaa

SEQ ID NO: 2038 - DNA, 1146 bp, Homo sapiens
  source 1..1146: mol_type = unassigned DNA; mol_type = unassigned DNA
tcatgtggcacatgtgataccatgtgaggtatctggtgttactaagtcgtcacgtatttcgatgaagggtccacaggctcagaaaagatggaacgagtgactgtggagaagggtagaacatgggcctgcccagagcgcgaaggcagatacagaagagctgcccgtgaaggatgcaggagactccatcctctgccaatggcccttcccgggagggctctaggctgccgcctgctagggaaggccaccctgtgtacccccagctccgaccaggctacattcccattcctgtgctccatgaaggcgctgagaaccggcaggtgcaccctttccatgtctatccccagcctgggatgcagcgattccgaactgaggcggcagcagcggctcctcagaggtcccagtcacctctgcggggcatgccagaaaccactcagccagataaacagtgtggacaggtggcagcggcggcggcagcccagcccccagcctcccacggacctgagcggtcccagtctccagctgcctctgactgctcatcctcatcctcctcggccagcctgccttcctccggcaggagcagcctgggcagtcaccagctcccgcgggggtacatctccattccggtgatacacgagcagaacgttacccggccagcagcccagccctccttccaccaagcccagaagacgcactacccagcgcagcagggggagtaccagacccaccagcctgtgtaccacaagatccagggggatgactgggagccccggcccctgcgggcggcatccccgttcaggtcatctgtccagggtgcatcgagccgggagggctcaccagccaggagcagcacgccactccactccccctcgcccatccgtgtgcacaccgtggtcgacaggcctcagcccatgacccatcgagaaactgcacctgtttcccagcctgaaaacaaaccagaaagtaagccaggcccagttggaccagaactccctcctggacacatcccaattcaagtgatccgcaaagaggtggattctaaacctgtttcccagaagcccccacctccctctgagaaggtagaggtgaaagttccccctgctccagttccttgtcctcctcccagccctggcccttctgctgtcccct

SEQ ID NO: 2039 - DNA, 1939 bp, Homo sapiens
  source 1..1939: mol_type = unassigned DNA; mol_type = unassigned DNA
aaggtggccgccgccggacgccgggctctgtggttcgggtccgctttcgtctccgtcctgctgccgttaccgccgctgctgccgccgcttgcgtcccccgctccggtctgtggtgcagccgggacccaggaccatgtctctgtctcgctcagaggagatgcaccggctcacggaaaatgtctataagaccatcatggagcagttcaaccctagcctccggaacttcatcgccatggggaagaattacgagaaggcactggcaggtgtgacgtatgcagccaaaggctactttgacgccctggtgaagatgggggagctggccagcgagagccagggctccaaagaactcggagacgttctcttccagatggctgaagtccacaggcagatccagaatcagctggaagaaatgctgaagtcttttcacaacgagctgcttacgcagctggagcagaaggtggagctggactccaggtatctgagtgctgcgctgaagaaataccagactgagcaaaggagcaaaggcgacgccctggacaagtgtcaggctgagctgaagaagcttcggaagaagagccagggcagcaagaatcctcagaagtactcggacaaggagctgcagtacatcgacgccatcagcaacaagcagggcgagctggagaattacgtgtccgacggctacaagaccgcactgacagaggagcgcaggcgcttctgcttcctggtggagaagcagtgcgccgtggccaagaactccgcggcctaccactccaagggcaaggagctgctggcgcagaagctgccgctgtggcaacaggcctgtgccgaccccagcaagatcccggagcgcgcggtgcagctcatgcagcaggtggccagcaacggcgccaccctccccagcgccctgtcggcctccaagtccaacctggtcatttccgaccccattccgggggccaagcccctgccggtgccccccgagctggcaccgttcgtggggcggatgtctgcccaggagagcacacccatcatgaacggcgtcacaggcccggatggcgaggactacagcccgtgggctgaccgcaaggctgcccagcccaaatccctgtctcctccgcagtctcagagcaagctcagcgactcctactccaacacactccccgtgcgcaagagcgtgaccccaaaaaacagctatgccaccaccgagaacaagactctgcctcgctcgagctccatggcagccggcctggagcgcaatggccgtatgcgggtgaaggccatcttctcccacgctgctggggacaacagcaccctcctgagcttcaaggagggtgacctcattaccctgctggtgcctgaggcccgcgatggctggcactacggagagagtgagaagaccaagatgcggggctggtttcccttctcctacacccgggtcttggacagcgatggcagtgacaggctgcacatgagcctgcagcaagggaagagcagcagcacgggcaacctcctggacaaggacgacctggccatcccaccccccgattacggcgccgcctcccgggccttccccgcccagacggccagcggcttcaagcagaggccctacagtgtggccgtgcccgccttctcccagggcctggatgactatggagcgcggtccatgagcagtggcagcggcacgctggtgtccacagtgtgaggacgctgaccccgggcagccgctgctctgaagagcttccgcgccttccccctggtctcgtccgttttcctcctcagctctcgctggtttgttcttgggttgtttttcttttccacctgccccatgccttttggttggtgaccccagactctgtgatcccccagggtccatggtgctgctccatccgccccccctcccctgtgtttacgcgccccatcctgtgtgtcccagccttttgag

SEQ ID NO: 2040 - DNA, 593 bp, Homo sapiens
  source 1..593: mol_type = unassigned DNA; mol_type = unassigned DNA
tctgtggttcgggtccgctttcgtctccgtcctgctgccgttaccgccgctgctgccgccgcttgcgtcccccgctccggtctgtggtgcagccgggacccaggaccatgtctctgtctcgctcagaggagatgcaccggctcacggaaaatgtctataagaccatcatggagcagttcaaccctagcctccggaacttcatcgccatggggaagaattacgagaaggcactggcaggtgtgacgtatgcagccaaaggctactttgacgccctggtgaagatgggggagctggccagcgagagccagggctccaaagaactcggagacgttctcttccagatggctgaagtccacaggcagatccagaatcagctggaagaaatggtgagtccacccccagcgtggccctgcgaggaggggcaggtgcgacgggagagctggcgccacaccttggccgtgtgtccacttgggaacagtcccagttgtccagccacactcggaggcagggagggaccctggctcagcacacaagccacactcgaaggaggacgtcggagaaaagggcacaggccagaccgcggccgcatgttt

SEQ ID NO: 2041 - DNA, 584 bp, Homo sapiens
  source 1..584: mol_type = unassigned DNA; mol_type = unassigned DNA
tgtggttcgggtccgctttcgtctccgtcctgctgccgttaccgccgctgctgccgccgcttgcgtcccccgctccggtctgtggtgcagccgggacccaggaccatgtctctgtctcgctcagaggagatgcaccggctcacggaaaatgtctataagaccatcatggagcagttcaaccctagcctccggaacttcatcgccatggggaagaattacgagaaggcactggcaggtgtgacgtatgcagccaaaggctactttgacgccctggtgaagatgggggagctggccagcgagagccagggctccaaagaactcggagacgttctcttccagatggctgaagtccacaggcagatccagaatcagctggaagaaatgccctgccctgcctcctgttccgggtccatgtgttggagctgacggctgatgtgttttctctccatgtccagctgaagtcttttcacaacgagctgcttacgcagctggagcagaaggtggagctggactccaggtatctgagtgctgcgctgaagaaataccagactgagcaaaggagcaaaggcgacgccctggacaag

SEQ ID NO: 2042 - DNA, 559 bp, Homo sapiens
  source 1..559: mol_type = unassigned DNA; mol_type = unassigned DNA
gtggttcgggtccgctttcgtctccgtcctgctgccgttaccgccgctgctgccgccgcttgcgtcccccgctccggtctgtggtgcagccgggacccaggaccatgtctctgtctcgctcagaggagatgcaccggctcacggaaaatgtctataagaccatcatggagcagttcaaccctagcctccggaacttcatcgccatggggaagaattacgagaaggcactggcaggtgtgacgtatgcagccaaaggctactttgacgccctggtgaagatgggggagctggccagcgagagccagggctccaaagaactcggtctagcctggggcagacaggagatggcagatggacacctgggaggggctcactgagctccgcctctccatcaacggaggccccgtctaggttgtggaggatgcttgagagagccctgatgttctgacctcccaaaaggtcaagggtgctggcagccggtgagacgccgcagtttgctctgctccccggggctgtgcttgccaggagacatttcggctataagcaggcgagaatacct

SEQ ID NO: 2043 - DNA, 565 bp, Homo sapiens
  source 1..565: mol_type = unassigned DNA; mol_type = unassigned DNA
gtggttcgggtccgctttcgtctccgtcctgctgccgttaccgccgctgctgccgccgcttgcgtcccccgctccggtctgtggtgcagccgggacccaggaccatgtctctgtctcgctcagaggagatgcaccggctcacggaaaatgtctataagaccatcatggagcagttcaaccctagcctccggaacttcatcgccatggggaagaattacgagaaggcactggcaggtggaactgcgcccgggccccgtggggtgggagctgcctcctgagctggtgtgacgtatgcagccaaaggctactttgacgccctggtgaagatgggggagctggccagcgagagccagggctccaaagaactcggagacgttctcttccagatggctgaagtccacaggcagatccagaatcagctggaagaaatgctgaagtcttttcacaacgagctgcttacgcagctggagcagaaggtggagctggactccaggtatctgagtgctgcgctgaagaaataccagactgagcaaaggagcaaaggcgacgccctggacaagtgtca

SEQ ID NO: 2044 - DNA, 2133 bp, Homo sapiens
  source 1..2133: mol_type = unassigned DNA; mol_type = unassigned DNA
gtggttcgggtccgctttcgtctccgtcctgctgccgttaccgccgctgctgccgccgcttgcgtcccccgctccggtctgtggtgcagccgggacccaggaccatgtctctgtctcgctcagaggagatgcaccggctcacggaaaatgtctataagagggtggaagagaagtaccagcggaacctttttcctattttttctccttctgcgctgaaaccagaaagcaggaactttcgtggtgagagttggcaggggaccatcatggagcagttcaaccctagcctccggaacttcatcgccatggggaagaattacgagaaggcactggcaggtgtgacgtatgcagccaaaggctactttgacgccctggtgaagatgggggagctggccagcgagagccagggctccaaagaactcggagacgttctcttccagatggctgaagtccacaggcagatccagaatcagctggaagaaatgctgaagtcttttcacaacgagctgcttacgcagctggagcagaaggtggagctggactccaggctgcgctgaagaaataccagactgagcaaaggagcaaaggcgacgccctggacaagtgtcaggctgagctgaagaagcttcggaagaagagccagggcagcaagaatcctcagaagtactcggacaaggagctgcagtacatcgacgccatcagcaacaagcagggcgagctggagaattacgtgtccgacggctacaagaccgcactgacagaggagcgcaggcgcttctgcttcctggtggagaagcagtgcgccgtggccaagaactccgcggcctaccactccaagggcaaggagctgctggcgcagaagctgccgctgtggcaacaggcctgtgccgaccccagcaagatcccggagcgcgcggtgcagctcatgcagcaggtggccagcaacggcgccaccctccccagcgccctgtcggcctccaagtccaacctggtcatttccgaccccattccgggggccaagcccctgccggtgccccccgagctggcaccgttcgtggggcggatgtctgcccaggagagcacacccatcatgaacggcgtcacaggcccggatggcgaggactacagcccgtgggctgaccgcaaggctgcccagcccaaatccctgtctcctccgcagtctcagagcaagctcagcgactcctactccaacacactccccgtgcgcaagagcgtgaccccaaaaaacagctatgccaccaccgagaacaagactctgcctcgctcgagctccatggcagccggcctggagcgcaatggccgtatgcgggtgaaggccatcttctcccacgctgctggggacaacagcaccctcctgagcttcaaggagggtgacctcattaccctgctggtgcctgaggcccgcgatggctggcactacggagagagtgagaagaccaagatgcggggctggtttcccttctcctacacccgggtcttggacagcgatggcagtgacaggctgcacatgagcctgcagcaagggaagagcagcagcacgggcaacctcctggacaaggacgacctggccatcccaccccccgattacggcgccgcctcccgggccttccccgcccagacggccagcggcttcaagcagaggccctacagtgtggccgtgcccgccttctcccagggcctggatgactatggagcgcggtccatgagcagtggcagcggcacgctggtgtccacagtgtgaggacgctgaccccgggcagccgctgctctgaagagcttccgcgccttccccctggtctcgtccgttttcctcctcagctctcgctggtttgttcttgggttgtttttcttttccacctgccccatgccttttggttggtgaccccagactctgtgatcccccagggtccatggtgctgctccatccgccccccctcccctgtgtttacgcgccccatcctgtgtgtcccagccttttgagcagaaactgccaggcaggacctgctgggccgtgcggggcaccctcggcctcaccctgcagtgtctgtggcactcactgcttttctaaggctcgccgtgagccaggtctaaagtttgaagaaaaagaaaaatctt

SEQ ID NO: 2045 - DNA, 2095 bp, Homo sapiens
  source 1..2095: mol_type = unassigned DNA; mol_type = unassigned DNA
gtggttcgggtccgctttcgtctccgtcctgctgccgttaccgccgctgctgccgccgcttgcgtcccccgctccggtctgtggtgcagccgggacccaggaccatgtctctgtctcgctcagaggagatgcaccggctcacggaaaatgtctataagaccatcatggagcagttcaaccctagcctccggaacttcatcgccatggggaagaattacgagaaggcactggcaggtgtgacgtatgcagccaaaggctactttgacgccctggtgaagatgggggagctggccagcgagagccagggctccaaagaactcggagacgttctcttccagatggctgaagtccacaggcagatccagaatcagctggaagaaatgctgaagtcttttcacaacgagctgcttacgcagctggagcagaaggtggagctggactccaggtatctgagtgctgcgctgaagaaataccagactgagcaaaggagcaaaggcgacgccctggacaagtgtcaggctgagctgaagaagcttcggaagaagagccagggcagcaagaatcctcagaagtactcggacaaggagctgcagtacatcgacgccatcagcaacaagcagggcgagctggagaattacgtgtccgacggctacaagaccgcactgacagaggagcgcaggcgcttctgcttcctggtggagaagcagtgcgccgtggccaagaactccgcggcctaccactccaagggcaaggagctgctggcgcagaagctgccgctgtggcaacaggcctgtgccgaccccagcaagatcccggagcgcgcggtgcagctcatgcagcaggtggccagcaacggcgccaccctccccagcgccctgtcggcctccaagtccaacctggtcatttccgaccccattccgggggccaagcccctgccggtgccccccgagctggcaccgttcgtggggcggatgtctgcccaggagagcacacccatcatgaacggcgtcacaggcccggatggcgaggactacagcccgtgggctgaccgcaaggctgcccagcccaaatccctgtctcctccgcagtctcagagcaagctcagcgactcctactccaacacactccccgtgcgcaagagcgtgaccccaaaaaacagctatgccaccaccgagaacaagactctgcctcgctcgagctccatggcagccggcctggagcgcaatggccgtatgcgggtgaaggccatcttctcccacgctgctggggacaacagcaccctcctgagcttcaaggagggtgacctcattaccctgctggtgcctgaggcccgcgatggctggcactacggagagagtgagaagaccaagatgcggggctggtttcccttctcctacacccgggtcttggacagcgatggcagtgacaggctgcacatgagcctgcagcaagggaagagcagcagcacgggcaacctcctggacaaggacgacctggccatcccaccccccgattacggcgccgcctcccgggccttccccgcccagacggccagcggcttcaagcagaggccctacagtgtggccgtgcccgccttctcccagggcctggatgactatggagcgcggtccatgagcaggaatccctttgcccacgtccagctgaagccgacagtgaccaacgacaggtctgcccccctcctcagctgatggccacatctgcagtgctgcccatctggtggcttcccccgcccttcccatgtagcctgttctgtcatcatctgtgcgttcctgtgtagagaacatccaggccccggctgcctggtcttgccccacttgagtctggcctggactggatcccagctgttctaggcagggccgggcagagtggggcgcaggcccctgaagggcgagacccagtggctgggctgcccagggctgaggggccgcctcttgagggtacacgcctctggtcacatggccatggagccttgggtacccctgagttaagggaggacatttggccagctggtggctgggaggggagcctggctgccctgctgcttctcctgcctaataaacaggcttctcctgca

SEQ ID NO: 2046 - DNA, 2512 bp, Homo sapiens
  source 1..2512: mol_type = unassigned DNA; mol_type = unassigned DNA
tcgggtccgctttcgtctccgtcctgctgccgttaccgccgctgctgccgccgcttgcgtcccccgctccggtctgtggtgcagccgggacccaggaccatgtctctgtctcgctcagaggagatgcaccggctcacggaaaatgtctataagaccatcatggagcagttcaaccctagcctccggaacttcatcgccatggggaagaattacgagaaggcactggcaggtgtgacgtatgcagccaaaggctactttgacgccctggtgaagatgggggagctggccagcgagagccagggctccaaagaactcggagacgttctcttccagatggctgaagtccacaggcagatccagaatcagctggaagaaatgctgaagtcttttcacaacgagctgcttacgcagctggagcagaaggtggagctggactccaggtatctgagtgctgcgctgaagaaataccagactgagcaaaggagcaaaggcgacgccctggacaagtgtcaggctgagctgaagaagcttcggaagaagagccagggcagcaagaatcctcagaagtactcggacaaggagctgcagtacatcgacgccatcagcaacaagcagggcgagctggagaattacgtgtccgacggctacaagaccgcactgacagaggagcgcaggcgcttctgcttcctggtggagaagcagtgcgccgtggccaagaactccgcggcctaccactccaagggcaaggagctgctggcgcagaagctgccgctgtggcaacaggcctgtgccgaccccagcaagatcccggagcgcgcggtgcagctcatgcagcaggtggccagcaacggcgccaccctccccagcgccctgtcggcctccaagtccaacctggtcatttccgaccccattccgggggccaagcccctgccggtgccccccgagctggcaccgttcgtggggcggatgtctgcccaggagagcacacccatcatgaacggcgtcacaggcccggatggcgaggactacagcccgtgggctgaccgcaaggctgcccagcccaaatccctgtctcctccgcagtctcagagcaagctcagcgactcctactccaacacactccccgtgcgcaagagcgtgaccccaaaaaacagctatgccaccaccgagaacaagactctgcctcgctcgagctccatggcagccggcctggagcgcaatggccgtatgcgggtgaaggccatcttctcccacgctgctggggacaacagcaccctcctgagcttcaaggagggtgacctcattaccctgctggtgcctgaggcccgcgatggctggcactacggagagagtgagaagaccaagatgcggggctggtttcccttctcctacacccgggtcttggacagcgatggcagtgacaggctgcacatgagcctgcagcaagggaagagcagcagcacgggcaacctcctggacaaggacgacctggccatcccaccccccgattacggcgccgcctcccgggccttccccgcccagacggccagcggcttcaagcagaggccctacagtgtggccgtgcccgccttctcccagggcctggatgactatggagcgcggtccatgagcaggtaaggggactttcagacctgtctttgggaccgtgggtgggtgtgaagaggccgggtggggcaggtccctctgctaggacctggggccacctcttttcctttagggcccagcctggcccttcacccctgtcagagccggggatgtcccttagggcgtcctgctttctccgagtgacacgggaacccccctgggccctgcccctctttcatcgcatctggccggccccatccatccctgtcaggcaaggttggggagggtagctgaggctggcatccatggctggggctgcagcctcctctgccccaatctgtgctccgcccttgtcctgggtcttcctggagggtcaggaggccaacgggagctgctgaaaggggcattgctcggtgctggcggactcgccgcctgtggctgggcagcgtcgtgcagccaggcagccgtcctgtgctttgtttcacagtggcagcggcacgctggtgtccacagtgtgaggacgctgaccccgggcagccgctgctctgaagagcttccgcgccttccccctggtctcgtccgttttcctcctcagctctcgctggtttgttcttgggttgtttttcttttccacctgccccatgccttttggttggtgaccccagactctgtgatcccccagggtccatggtgctgctccatccgccccccctcccctgtgtttacgcgccccatcctgtgtgtcccagccttttgagcagaaactgccaggcaggacctgctgggccgtgcggggcaccctcggcctcaccctgcagtgtctgtggcactcactgcttttctaaggctcgccgtgagccaggtctaaagtttgaagaaaaagaaaaatcttaaaaaaaaaaaaaaa

SEQ ID NO: 2047 - DNA, 2229 bp, Homo sapiens
  source 1..2229: mol_type = unassigned DNA; mol_type = unassigned DNA
gggtccgctttcgtctccgtcctgctgccgttaccgccgctgctgccgccgcttgcgtcccccgctccggtctgtggtgcagccgggacccaggaccatgtctctgtctcgctcagaggagatgcaccggctcacggaaaatgtctataagagggtggaagagaagtaccagcggaacctttttcctattttttctccttctgcgctgaaaccagaaagcaggaactttcgtggtgagagttggcaggggaccatcatggagcagttcaaccctagcctccggaacttcatcgccatggggaagaattacgagaaggcactggcaggtgtgacgtatgcagccaaaggctactttgacgccctggtgaagatgggggagctggccagcgagagccagggctccaaagaactcggagacgttctcttccagatggctgaagtccacaggcagatccagaatcagctggaagaaatgctgaagtcttttcacaacgagctgcttacgcagctggagcagaaggtggagctggactccaggtatctgagtgctgcgctgaagaaataccagactgagcaaaggagcaaaggcgacgccctggacaagtgtcaggctgagctgaagaagcttcggaagaagagccagggcagcaagaatcctcagaagtactcggacaaggagctgcagtacatcgacgccatcagcaacaagcagggcgagctggagaattacgtgtccgacggctacaagaccgcactgacagaggagcgcaggcgcttctgcttcctggtggagaagcagtgcgccgtggccaagaactccgcggcctaccactccaagggcaaggagctgctggcgcagaagctgccgctgtggcaacaggcctgtgccgaccccagcaagatcccggagcgcgcggtgcagctcatgcagcaggtggccagcaacggcgccaccctccccagcgccctgtcggcctccaagtccaacctggtcatttccgaccccattccgggggccaagcccctgccggtgccccccgagctggcaccgttcgtggggcggatgtctgcccaggagagcacacccatcatgaacggcgtcacaggcccggatggcgaggactacagcccgtgggctgaccgcaaggctgcccagcccaaatccctgtctcctccgcagtctcagagcaagctcagcgactcctactccaacacactccccgtgcgcaagagcgtgaccccaaaaaacagctatgccaccaccgagaacaagactctgcctcgctcgagctccatggcagccggcctggagcgcaatggccgtatgcgggtgaaggccatcttctcccacgctgctggggacaacagcaccctcctgagcttcaaggagggtgacctcattaccctgctggtgcctgaggcccgcgatggctggcactacggagagagtgagaagaccaagatgcggggctggtttcccttctcctacacccgggtcttggacagcgatggcagtgacaggctgcacatgagcctgcagcaagggaagagcagcagcacgggcaacctcctggacaaggacgacctggccatcccaccccccgattacggcgccgcctcccgggccttccccgcccagacggccagcggcttcaagcagaggccctacagtgtggccgtgcccgccttctcccagggcctggatgactatggagcgcggtccatgagcagcgccgatgtggaagtggccagattctgagccgcctgactagagaatccctttgcccacgtccagctgaagccgacagtgaccaacgacaggtctgcccccctcctcagctgatggccacatctgcagtgctgcccatctggtggcttcccccgcccttcccatgtagcctgttctgtcatcatctgtgcgttcctgtgtagagaacatccaggccccggctgcctggtcttgccccacttgagtctggcctggactggatcccagctgttctaggcagggccgggcagagtggggcgcaggcccctgaagggcgagacccagtggctgggctgcccagggctgaggggccgcctcttgagggtacacgcctctggtcacatggccatggagccttgggtacccctgagttaagggaggacatttggccagctggtggctgggaggggagcctggctgccctgctgcttctcctgcctaataaacaggcttctcctgca

SEQ ID NO: 2048 - DNA, 2129 bp, Homo sapiens
  source 1..2129: mol_type = unassigned DNA; mol_type = unassigned DNA
ccgctttcgtctccgtcctgctgccgttaccgccgctgctgccgccgcttgcgtcccccgctccggtctgtggtgcagccgggacccaggaccatgtctctgtctcgctcagaggagatgcaccggctcacggaaaatgtctataagaccatcatggagcagttcaaccctagcctccggaacttcatcgccatggggaagaattacgagaaggcactggcaggtgtgacgtatgcagccaaaggctactttgacgccctggtgaagatgggggagctggccagcgagagccagggctccaaagaactcggagacgttctcttccagatggctgaagtccacaggcagatccagaatcagctggaagaaatgctgaagtcttttcacaacgagctgcttacgcagctggagcagaaggtggagctggactccaggtatctgagtgctgcgctgaagaaataccagactgagcaaaggagcaaaggcgacgccctggacaagtgtcaggctgagctgaagaagcttcggaagaagagccagggcagcaagaatcctcagaagtactcggacaaggagctgcagtacatcgacgccatcagcaacaagcagggcgagctggagaattacgtgtccgacggctacaagaccgcactgacagaggagcgcaggcgcttctgcttcctggtggagaagcagtgcgccgtggccaagaactccgcggcctaccactccaagggcaaggagctgctggcgcagaagctgccgctgtggcaacaggcctgtgccgaccccagcaagatcccggagcgcgcggtgcagctcatgcagcaggtggccagcaacggcgccaccctccccagcgccctgtcggcctccaagtccaacctggtcatttccgaccccattccgggggccaagcccctgccggtgccccccgagctggcaccgttcgtggggcggatgtctgcccaggagagcacacccatcatgaacggcgtcacaggcccggatggcgaggactacagcccgtgggctgaccgcaaggctgcccagcccaaatccctgtctcctccgcagtctcagagcaagctcagcgactcctactccaacacactccccgtgcgcaagagcgtgaccccaaaaaacagctatgccaccaccgagaacaagactctgcctcgctcgagctccatggcagccggcctggagcgcaatggccgtatgcgggtgaaggccatcttctcccacgctgctggggacaacagcaccctcctgagcttcaaggagggtgacctcattaccctgctggtgcctgaggcccgcgatggctggcactacggagagagtgagaagaccaagatgcggggctggtttcccttctcctacacccgggtcttggacagcgatggcagtgacaggctgcacatgagcctgcagcaagggaagagcagcagcacgggcaacctcctggacaaggacgacctggccatcccaccccccgattacggcgccgcctcccgggccttccccgcccagacggccagcggcttcaagcagaggccctacagtgtggccgtgcccgccttctcccagggcctggatgactatggagcgcggtccatgagcagcgccgatgtggaagtggccagattctgagccgcctgactagagttagaatccctttgcccacgtccagctgaagccgacagtgaccaacgacaggtctgcccccctcctcagctgatggccacatctgcagtgctgcccatctggtggcttcccccgcccttcccatgtagcctgttctgtcatcatctgtgcgttcctgtgtagagaacatccaggccccggctgcctggtcttgccccacttgagtctggcctggactggatcccagctgttctaggcagggccgggcagagtggggcgcaggcccctgaagggcgagacccagtggctgggctgcccagggctgaggggccgcctcttgagggtacacgcctctggtcacatggccatggagccttgggtacccctgagttaagggaggacatttggccagctggtggctgggaggggagcctggctgccctgctgcttctcctgcctaataaacaggcttctcctgc

SEQ ID NO: 2049 - DNA, 2879 bp, Homo sapiens
  source 1..2879: mol_type = unassigned DNA; mol_type = unassigned DNA
ccgctttcgtctccgtcctgctgccgttaccgccgctgctgccgccgcttgcgtcccccgctccggtctgtggtgcagccgggacccaggaccatgtctctgtctcgctcagaggagatgcaccggctcacggaaaatgtctataagaccatcatggagcagttcaaccctagcctccggaacttcatcgccatggggaagaattacgagaaggcactggcaggtgtgacgtatgcagccaaaggctactttgacgccctggtgaagatgggggagctggccagcgagagccagggctccaaagaactcggagacgttctcttccagatggctgaagtccacaggcagatccagaatcagctggaagaaatgctgaagtcttttcacaacgagctgcttacgcagctggagcagaaggtggagctggactccaggtatctgagtgctgcgctgaagaaataccagactgagcaaaggagcaaaggcgacgccctggacaagtgtcaggctgagctgaagaagcttcggaagaagagccagggcagcaagaatcctcagaagtactcggacaaggagctgcagtacatcgacgccatcagcaacaagcagggcgagctggagaattacgtgtccgacggctacaagaccgcactgacagaggagcgcaggcgcttctgcttcctggtggagaagcagtgcgccgtggccaagaactccgcggcctaccactccaagggcaaggagctgctggcgcagaagctgccgctgtggcaacaggcctgtgccgaccccagcaagatcccggagcgcgcggtgcagctcatgcagcaggtggccagcaacggcgccaccctccccagcgccctgtcggcctccaagtccaacctggtcatttccgaccccattccgggggccaagcccctgccggtgccccccgagctggcaccgttcgtggggcggatgtctgcccaggagagcacacccatcatgaacggcgtcacaggcccggatggcgaggactacagcccgtgggctgaccgcaaggctgcccagcccaaatccctgtctcctccgcagtctcagagcaagctcagcgactcctactccaacacactccccgtgcgcaagagcgtgaccccaaaaaacagctatgccaccaccgagaacaagactctgcctcgctcgagctccatggcagccggcctggagcgcaatggccgtatgcgggtgaaggccatcttctcccacgctgctggggacaacagcaccctcctgagcttcaaggagggtgacctcattaccctgctggtgcctgaggcccgcgatggctggcactacggagagagtgagaagaccaagatgcggggctggtttcccttctcctacacccgggtcttggacagcgatggcagtgacaggctgcacatgagcctgcagcaagggaagagcagcagcacgggcaacctcctggacaaggacgacctggccatcccaccccccgattacggcgccgcctcccgggccttccccgcccagacggccagcggcttcaagcagaggccctacagtgtggccgtgcccgccttctcccagggcctggatgactatggagcgcggtccatgagcaggaatccctttgcccacgtccagctgaagccgacagtgaccaacgacaggtgtgatctgtccgcccaagggccagaaggccgggagcacggggatgggagcgcccgcaccctggctggaagatgaacttcccgtaagcacgtaattccctgcaggtccggcagctacacctggagtgtggggcctggtccctccccatgcccctcggtggggctctcctgggcccctcactcccactggcaatgtcacaagggcctccccaggcccctcctgcctcgggcaggccccagccctcctccttacccaacctcccatccagaaccttgctgccagggcctcccagctcgctcctgcggccaaaggccagctgtcaggtgctatgcggggtcaccagcagagtgcccgctggcaggtgggggcttccccgcttccggggtctgccccaggactcctgggtggacctcccccccccacctccgctgactcctgcaggcactggggagctctgctggaattgggggttttaaaacttcattagcagatttgtgctcttccatactgtttgtttgtttgttaggtgaaatacagtgtggtgagctgcactggtgacaacagcccttacctggctggggaggtgtctccagcagagctcactcccgcctacagccactcacaccccggggacaggaagctgtagagttggcgggccaggagggcagttgagagctggccagcggagggtgcagggaagcccagctgtgctcaactctcctgcctccgccttccaccctgggcccagggacagacagacattgccctcagaagggcagggaggaggctgtcctggagaggcctgtaggtccattcttcacccgtccctaccaggccaactcggcctgcaggaagggagacctgcagggcgctacccctgcgcccccacacacagtagggccagaacaccatcccctccaccggggtgtgccgaggacagtggggaggagaggagaggggcagcttcctcctggccccaggaagggctggcatcgggttcctggcacagcccctcctgtccaggactttatcatcggcagacctcagaagacaacacacaaaggtttcttttgtcttagcttcatttctcttaaaaaacaaggaacaagaaaacattgcaccagcgttctaagcctcaaacaaaacacaaaacaaatccccctgcgaagcaacaataaactttacatctctttggcaacaat

SEQ ID NO: 2050 - DNA, 657 bp, Homo sapiens
  source 1..657: mol_type = unassigned DNA; mol_type = unassigned DNA
gtcctgctgccgttaccgccgctgctgccgccgcttgcgtcccccgctccggtctgtggtgcagccgggacccaggaccatgtctctgtctcgctcagaggagatgcaccggctcacggaaaatgtctataagaccatcatggagcagttcaaccctagcctccggaacttcatcgccatggggaagaattacgagaaggcactggcaggtgtgacgtatgcagccaaaggctactttgacgccctggtgaagatgggggagctggccagcgagagccagggctccaaagaactcggagacgttctcttccagatggctgaagtccacaggcagatccagaatcagctggaagaaatgctgaagtcttttcacaacgagctgcttacgcagctggagcagaaggtggagctggactccaggtatctgagtgctgcgctgaagaaataccagactgagcaaaggagcaaaggcgacgccctggacaagtgtcaggctgagctgaagaagcttcggaagaagagccagggcagcaagaatcctcagaagtactcggacaaggagctgcagggctggccactcgagggaaggtggtacttcaggttcctcgagggagcggcttcggtgttgtttctctcaccgtcccgccggcgtcaccg

SEQ ID NO: 2051 - DNA, 581 bp, Homo sapiens
  source 1..581: mol_type = unassigned DNA; mol_type = unassigned DNA
ctttgcttcagatgtgttaagagtggcatccacgttctcgtctgcgaaatgacagagggtggaagagaagtaccagcggaacctttttcctattttttctccttctgcgctgaaaccagaaagcaggaactttcgtggtgagagttggcaggggaccatcatggagcagttcaaccctagcctccggaacttcatcgccatggggaagaattacgagaaggcactggcaggtgtgacgtatgcagccaaaggctactttgacgccctggtgaagatgggggagctggccagcgagagccagggctccaaagaactcggagacgttctcttccagatggctgaagtccacaggcagatccagaatcagctggaagaaatgctgaagtcttttcacaacgagctgcttacgcagctggagcagaaggtggagctggactccaggtatctgagtgctgcgctgaagaaataccagactgagcaaaggagcaaaggcgacgccctggacaagtgtcaggctgagctgaagaagcttcggaagaagagccagggcagcaagaatcctcagaagtactcggacaagg

SEQ ID NO: 2052 - DNA, 574 bp, Homo sapiens
  source 1..574: mol_type = unassigned DNA; mol_type = unassigned DNA
agttgtattctgcctgctgcaccatgcaaatgcgctccttcagcccgcagacactcctctgcggccgggtttcttcttaccccctttgcacagaccatcatggagcagttcaaccctagcctccggaacttcatcgccatggggaagaattacgagaaggcactggtgtgacgtatgcagccaaaggctactttgacgccctggtgaagatgggggagctggccagcgagagccagggctccaaagaactcggagacgttctcttccagatggctgaagtccacaggcagatccagaatcagctggaagaaatgctgaagtcttttcacaacgagctgcttacgcagctggagcagaaggtggagctggactccaggtatctgagtgctgcgctgaagaaataccagactgagcaaaggagcaaaggcgacgccctggacaagtgtcaggctgagctgaagaagcttcggaagaagagccagggcagcaagaatcctcagaagtactcggacaaggagctgcagtacatcgacgccatcagcaacaagcagggcgagctggagaattacgtgtc

SEQ ID NO: 2053 - DNA, 626 bp, Homo sapiens
  source 1..626: mol_type = unassigned DNA; mol_type = unassigned DNA
agttgtattctgcctgctgcaccatgcaaatgcgctccttcagcccgcagacactcctctgcggccgggtttcttcttaccccctttgcacagaccatcatggagcagttcaaccctagcctccggaacttcatcgccatggggaagaattacgagaaggcactggcaggtgtgacgtatgcagccaaaggctactttgacgccctggtgaagatgggggagctggccagcgagagccagggctccaaagaactcggagacgttctcttccagatggctgaagtccacaggcagatccagaatcagctggaagaaatgctgaagtcttttcacaacgagctgcttacgcagctggagcagaaggtggagctggactccaggtatctgagtgctgcgctgaagaaataccagactgagcaaaggagcaaaggcgacgccctggacaagtgtcaggctgagctgaagaagcttcggaagaagagccagggcagcaagaatcctcagaagtactcggacaaggagctgcagtacatcgacgccatcagcaacaagcagggcgagctggagaattacgtgtccgacggctacaagaccgcactgacagaggagcgcaggcgcttctgctt

SEQ ID NO: 2054 - DNA, 567 bp, Homo sapiens
  source 1..567: mol_type = unassigned DNA; mol_type = unassigned DNA
gtcttgcacattgcagactgacgatggcttcctttttccagagccactcgtctgtgggacacttggtgacctcatctacggtagagtcttccgtagccctcacgtggctctccgaggtgtgacgtatgcagccaaaggctactttgacgccctggtgaagatgggggagctggccagcgagagccagggctccaaagaactcggagacgttctcttccagatggctgaagtccacaggcagatccagaatcagctggaagaaatgctgaagtcttttcacaacgagctgcttacgcagctggagcagaaggtggagctggactccaggtatctgagtgctgcgctgaagaaataccagactgagcaaaggagcaaaggcgacgccctggacaagtgtcaggctgagctgaagaagcttcggaagaagagccagggcagcaagaatcctcagaagtactcggacaaggagctgcagtacatcgacgccatcagcaacaagcagggcgagctggagaattacgtgtccgacggctacaagaccgcactgacagaggagcgcaggcgctt

SEQ ID NO: 2055 - DNA, 578 bp, Homo sapiens
  source 1..578: mol_type = unassigned DNA; mol_type = unassigned DNA
gagatgctgggaggcccctcaggcggcggcaataccaagtaatgcctttagcctcctttgatcagctgtgacgggcgtcctggtctgagactgtgaagcaattggaaatagttctcccactccaggctcagcttggggatctgtggggaaatggcttcctactgcccagctctgcagtttccttgcccagggtgtgacgtatgcagccaaaggctactttgacgccctggtgaagatgggggagctggccagcgagagccagggctccaaagaactcggagacgttctcttccagatggctgaagtccacaggcagatccagaatcagctggaagaaatgctgaagtcttttcacaacgagctgcttacgcagctggagcagaaggtggagctggactccaggtatctgagtgctgcgctgaagaaataccagactgagcaaaggagcaaaggcgacgccctggacaagtgtcaggctgagctgaagaagcttcggaagaagagccagggcagcaagaatcctcagaagtactcggacaaggagctgcagtacatcgacgccatcagcaacaagcagg

SEQ ID NO: 2056 - DNA, 782 bp, Homo sapiens
  source 1..782: mol_type = unassigned DNA; mol_type = unassigned DNA
gcaatttgacttgaatagctcaggacctgaactggtgtgacgtatgcagccaaaggctactttgacgccctggtgaagatgggggagctggccagcgagagccagggctccaaagaactcggagacgttctcttccagatggctgaagtccacaggcagatccagaatcagctggaagaaatgctgaagtcttttcacaacgagctgcttacgcagctggagcagaaggtggagctggactccaggtatctgagtgctgcgctgaagaaataccagactgagcaaaggagcaaaggcgacgccctggacaagtgtcaggctgagctgaagaagcttcggaagaagagccagggcagcaagaatcctcagaagtactcggacaaggagctgcagtacatcgacgccatcagcaacaagcagggcgagctggagaattacgtgtccgacggctacaagaccgcactgacagaggagcgcaggcgcttctgcttcctggtggagaagcagtgcgccgtggccaagaactccgcggcctaccactccaagggcaaggagctgctggcgcagaagctgccgctgtggcaacaggcctgtgccgaccccagcaagatcccggagcgcgcggtgcagctcatgcagcaggtggccagcaacggcgccaccctccccagcgccctgtcggcctccaagtccaacctggtcatttccgaccccattccgggggccaagcccctgccggtgccccccgagctggcaccgttcgtggggcggatgtctgccca

SEQ ID NO: 2057 - DNA, 646 bp, Homo sapiens
  source 1..646: mol_type = unassigned DNA; mol_type = unassigned DNA
agaaatcacagcgagtcgagtattctcccagcttgtctgggcaggagacagggttgggcctgtgtgacgtatgcagccaaaggctactttgacgccctggtgaagatgggggagctggccagcgagagccagggctccaaagaactcggagacgttctcttccagatggctgaagtccacaggcagatccagaatcagctggaagaaatgctgaagtcttttcacaacgagctgcttacgcagctggagcagaaggtggagctggactccaggtatctgagtgctgcgctgaagaaataccagactgagcaaaggagcaaaggcgacgccctggacaagtgtcaggctgagctgaagaagcttcggaagaagagccagggcagcaagaatcctcagaagtactcggacaaggagctgcagtacatcgacgccatcagcaacaagcagggcgagctggagaattacgtgtccgacggctacaagaccgcactgacagaggagcgcaggcgcttctgcttcctggtggagaagcagtgcgccgtggccaagaactccgcggcctaccactccaagggcaaggagctgctggcgcagaagctgccgctgtggcaacaggcctgtgccgaccccagcaagatcccggagc

SEQ ID NO: 2058 - DNA, 631 bp, Homo sapiens
  source 1..631: mol_type = unassigned DNA; mol_type = unassigned DNA
gcgagtcgagtattctcccagcttgtctgggcaggagacagggttgggcctgtgtgacgtatgcagccaaaggctactttgacgccctggtgaagatgggggagctggccagcgagagccagggctccaaagaactcggagacgttctcttccagatggctgaagtccacaggcagatccagaatcagctggaagaaatgctgaagtcttttcacaacgagctgcttacgcagctggagcagaaggtggagctggactccaggctgcgctgaagaaataccagactgagcaaaggagcaaaggcgacgccctggacaagtgtcaggctgagctgaagaagcttcggaagaagagccagggcagcaagaatcctcagaagtactcggacaaggagctgcagtacatcgacgccatcagcaacaagcagggcgagctggagaattacgtgtccgacggctacaagaccgcactgacagaggagcgcaggcgcttctgcttcctggtggagaagcagtgcgccgtggccaagaactccgcggcctaccactccaagggcaaggagctgctggcgcagaagctgccgctgtggcaacaggcctgtgccgaccccagcaagatcccggagcgcgcg

SEQ ID NO: 2059 - DNA, 542 bp, Homo sapiens
  source 1..542: mol_type = unassigned DNA; mol_type = unassigned DNA
tttggttgggtgttgagtttgtttcctgttcttcctcttcagccccggggacgttgctcatttctggtcaccttctcctccagctgtccttgctgccccaggatgggaggatggaaggagacgttctcttccagatggctgaagtccacaggcagatccagaatcagctggaagaaatgctgaagtcttttcacaacgagctgcttacgcagctggagcagaaggtggagctggactccaggtatctgagtgctgcgctgaagaaataccagactgagcaaaggagcaaaggcgacgccctggacaagtgtcaggctgagctgaagaagcttcggaagaagagccagggcagcaagaatcctcagaagtactcggacaaggagctgcagtacatcgacgccatcagcaacaagcagggcgagctggagaattacgtgtccgacggctacaagaccgcactgacagaggagcgcaggcgcttctgcttcctggtggagaagcagtgcgccgtggccaagaactccgcggcctaccactccaag

SEQ ID NO: 2060 - DNA, 575 bp, Homo sapiens
  source 1..575: mol_type = unassigned DNA; mol_type = unassigned DNA
agtgctcagagggtctgtggtcatggtgagaagaaccccgcagctcctggaagggcgagaggacccggagaggcttcctctgccagactcagctgtgctttgaggaggggaagtgacccaaggccagcccagccgtggtcctgggaggcagcatcgcccggttagggcttcctgcgtgtcaccgggggccttgctctggtttctggctgaacttgttgggcactgggcgatcctagtgggggttctgctcgctggagcgagaggaccctctggggcgtgggaccggcggtggcctggacgtcagcagaggaggaaagtcctgcttcaggcagccattcagggagggacaggaatcacccgagagtgacctgccagcagcaggggcggccctcctgctctgtttgtgtccgcagcacgtggagacgttctcttccagatggctgaagtccacaggcagatccagaatcagctggaagaaatgctgaagtcttttcacaacgagctgcttacgcagctggagcagaaggtggagctggactccaggtatctgagtgctgcgctgaagaaataccaga

SEQ ID NO: 2061 - DNA, 1014 bp, Homo sapiens
  source 1..1014: mol_type = unassigned DNA; mol_type = unassigned DNA
aggacagccctgaggggctgtggcatgcttctgtcccatgtggtgctgatggggggtgggtctcgggctctgctgatgagtatcagggctgggtcctggaacccaggctggctgcactctgggggcgcttctggggacggctagccagccccctgggctgatggtgtggtcgcacctgctggccttggcggtcatgtctcaaatgggatcacagctccgagggagctttggcagaggaaggtgggaaacatctgggtgaaaaggaagtgggccgtgctcctgtgtcttcgaggcctcggcccctcagctcctctctctgtgcccctctctttggtggaagcaggagacgttctcttccagatggctgaagtccacaggcagatccagaatcagctggaagaaatgctgaagtcttttcacaacgagctgcttacgcagctggagcagaaggtggagctggactccaggtatctgagtgctgcgctgaagaaataccagactgagcaaaggagcaaaggcgacgccctggacaagtgtcaggctgagctgaagaagcttcggaagaagagccagggcagcaagaatcctcagaagtactcggacaaggagctgcagtacatcgacgccatcagcaacaagcagggcgagctggagaattacgtgtccgacggctacaagaccgcactgacagaggagcgcaggcgcttctgcttcctggtggagaagcagtgcgccgtggccaagaactccgcggcctaccactccaagggcaaggagctgctggcgcagaagctgccgctgtggcaacaggcctgtgccgaccccagcaagatcccggagcgcgcggtgcagctcatgcagcaggtggccagcaacggcgccaccctccccagcgccctgtcggcctccaagtccaacctggtcatttccgaccccattccgggggccaagcccctgccggtgccccccgagctggcaccgttcgtgggggtgagtctgtggcctctggaaagc

SEQ ID NO: 2062 - DNA, 2316 bp, Homo sapiens
  source 1..2316: mol_type = unassigned DNA; mol_type = unassigned DNA
atgtttcactggctgcagtggcagccatgacacgctgggctccagggagagtcctgatcgcagccccagccagaccccactcctggggttcacaaggttgcaaggcacacttcccctggcctctccgactgtaggcagaggcagaccccacacaaccagagcacgttgctggcggctggtttgcagcatcctgtctaaagccaggggtctgaccctggtgtcagttcaggcccatgggccctgcgacctctcagcctgtgtcgcagtgatccccagcatgggacagcagaggaaggaggggatggccgtttgtttcccttgtggctgtttggaggcgagattgtccgacgttccagactcctgttcagcactcgctcctggctccagagggtgcacacgggcatgcggggccacagctcatcagtcagggggagggggcccctcctgcacagccgggacacccggtgtctcgtgcccatccgctctagccctgccctgcctcctgttccgggtccatgtgttggagctgacggctgatgtgttttctctccatgtccagctgaagtcttttcacaacgagctgcttacgcagctggagcagaaggtggagctggactccaggtatctgagtgctgcgctgaagaaataccagactgagcaaaggagcaaaggcgacgccctggacaagtgtcaggctgagctgaagaagcttcggaagaagagccagggcagcaagaatcctcagaagtactcggacaaggagctgcagtacatcgacgccatcagcaacaagcagggcgagctggagaattacgtgtccgacggctacaagaccgcactgacagaggagcgcaggcgcttctgcttcctggtggagaagcagtgcgccgtggccaagaactccgcggcctaccactccaagggcaaggagctgctggcgcagaagctgccgctgtggcaacaggcctgtgccgaccccagcaagatcccggagcgcgcggtgcagctcatgcagcaggtggccagcaacggcgccaccctccccagcgccctgtcggcctccaagtccaacctggtcatttccgaccccattccgggggccaagcccctgccggtgccccccgagctggcaccgttcgtggggcggatgtctgcccaggagagcacacccatcatgaacggcgtcacaggcccggatggcgaggactacagcccgtgggctgaccgcaaggctgcccagcccaaatccctgtctcctccgcagtctcagagcaagctcagcgactcctactccaacacactccccgtgcgcaagagcgtgaccccaaaaaacagctatgccaccaccgagaacaagactctgcctcgctcgagctccatggcagccggcctggagcgcaatggccgtatgcgggtgaaggccatcttctcccacgctgctggggacaacagcaccctcctgagcttcaaggagggtgacctcattaccctgctggtgcctgaggcccgcgatggctggcactacggagagagtgagaagaccaagatgcggggctggtttcccttctcctacacccgggtcttggacagcgatggcagtgacaggctgcacatgagcctgcagcaagggaagagcagcagcacgggcaacctcctggacaaggacgacctggccatcccaccccccgattacggcgccgcctcccgggccttccccgcccagacggccagcggcttcaagcagaggccctacagtgtggccgtgcccgccttctcccagggcctggatgactatggagcgcggtccatgagcagcgccgatgtggaagtggccagattctgagccgcctgactagagttagaatccctttgcccacgtccagctgaagccgacagtgaccaacgacaggtctgcccccctcctcagctgatggccacatctgcagtgctgcccatctggtggcttcccccgcccttcccatgtagcctgttctgtcatcatctgtgcgttcctgtgtagagaacatccaggccccggctgcctggtcttgccccacttgagtctggcctggactggatcccagctgttctaggcagggccgggcagagtggggcgcaggcccctgaagggcgagacccagtggctgggctgcccagggctgaggggccgcctcttgagggtacacgcctctggtcacatggccatggagccttgggtacccctgagttaagggaggacatttggccagctggtggctgggaggggagcctggctgccctgctgcttctcctgcctaataaacaggcttctcctgc

SEQ ID NO: 2063 - DNA, 509 bp, Homo sapiens
  source 1..509: mol_type = unassigned DNA; mol_type = unassigned DNA
cagactgagcaaaggagcaaaggcgacgccctggacaagtgtcaggctgagctgaagaagcttcggaagaagagccagggcagcaagaatcctcagaagtactcggacaaggagctgcagtacatcgacgccatcagcaacaagcagggcgagctggagaattacgtgtccgacggctacaagaccgcactgacagaggagcgcaggcgcttctgcttcctggtggagaagcagtgcgccgtggccaagaactccgcggcctaccactccaagggcggaccgggccctgtgtagagacccttccgcgccggcgttcccgctccgctaaagatttcaaatccaggggattccatgctcaatggatgaatgtagacacaaaacagcaacacttgtatgaagatgtaaagtgctgaacatatttttttcctgtttcctttccttttttttaaaaaatctgaattgtgccctgtactgcagttacttgtttgaataaaagttttatttattgc

SEQ ID NO: 2064 - DNA, 604 bp, Homo sapiens
  source 1..604: mol_type = unassigned DNA; mol_type = unassigned DNA
gtgcccccgctccctgcttaactgcagggaagccaagcaggtctgcccacaccctgcagaccaagccagaagatttccagtgtggggtcgcctggtggagctggatcggccccaaaggagaggacgggactaggccaggggcagatgagaaggataagtgagagtctgtggaaacagccatacgggggagctgggggtccctcgggtgcccgctgctgtttgcagcctcccactcaggcatgcttggtgcacagttgcagggacgcaactcaggccgttctctagggtgccctgccctctccagccacctcttcccgtgtccccagcctttgttttgatcctgtttttcactccagtacatcgacgccatcagcaacaagcagggcgagctggagaattacgtgtccgacggctacaagaccgcactgacagaggagcgcaggcgcttctgcttcctggtggagaagcagtgcgccgtggccaagaactccgcggcctaccactccaagggcaaggagctgctggcgcagaagctgccgctgtggcaacaggcctgtgccgaccccagcaagatcccggagcgcgcggtgcagctcatgcagca

SEQ ID NO: 2065 - DNA, 748 bp, Homo sapiens
  source 1..748: mol_type = unassigned DNA; mol_type = unassigned DNA
gcatcttcttaagagccgattctgaactgaccactccttgacgggcaatcccggtggacggggggtctgagtcctgctgtggagggtctgcctgaggccggtaggggctcagcccaagtacatcgacgccatcagcaacaagcagggcgagctggagaattacgtgtccgacggctacaagaccgcactgacagaggagcgcaggcgcttctgcttcctggtggagaagcagtgcgccgtggccaagaactccgcggcctaccactccaagggcaaggagctgctggcgcagaagctgccgctgtggcaacaggcctgtgccgaccccagcaagatcccggagcgcgcggtgcagctcatgcagcaggtggccagcaacggcgccaccctccccagcgccctgtcggcctccaagtccaacctggtcatttccgaccccattccgggggccaagcccctgccggtgccccccgagctggcaccgttcgtggggcggatgtctgcccaggagagcacacccatcatgaacggcgtcacaggcccggatggcgaggactacagcccgtgggctgaccgcaaggctgcccagcccaaatccctgtctcctccgcagtctcagagcaagctcagcgactcctactccaacacactccccgtgcgcaagagcgtgaccccaaaaaacagctatgccaccaccgagaacaagactctgcctcgctcgagctccatggcagccggcctggagcgc

SEQ ID NO: 2066 - DNA, 1442 bp, Homo sapiens
  source 1..1442: mol_type = unassigned DNA; mol_type = unassigned DNA
atgctcctcccagagggacagaggcagagagccctggggtttggaactgtcacttccacctacagccctgttggtcagtacatcgacgccatcagcaacaagcagggcgagctggagaattacgtgtccgacggctacaagaccgcactgacagaggagcgcaggcgcttctgcttcctggtggagaagcagtgcgccgtggccaagaactccgcggcctaccactccaagggcaaggagctgctggcgcagaagctgccgctgtggcaacaggcctgtgccgaccccagcaagatcccggagcgcgcggtgcagctcatgcagcaggtggccagcaacggcgccaccctccccagcgccctgtcggcctccaagtccaacctggtcatttccgaccccattccgggggccaagcccctgccggtgccccccgagctggcaccgttcgtggggcggatgtctgcccaggagagcacacccatcatgaacggcgtcacaggcccggatggcgaggactacagcccgtgggctgaccgcaaggctgcccagcccaaatccctgtctcctccgcagtctcagagcaagctcagcgactcctactccaacacactccccgtgcgcaagagcgtgaccccaaaaaacagctatgccaccaccgagaacaagactctgcctcgctcgagctccatggcagccggcctggagcgcaatggccgtatgcgggtgaaggccatcttctcccacgctgctggggacaacagcaccctcctgagcttcaaggagggtgacctcattaccctgctggtgcctgaggcccgcgatggctggcactacggagagagtgagaagaccaagatgcggggctggtttcccttctcctacacccgggtcttggacagcgatggcagtgacaggctgcacatgagcctgcagcaagggaagagcagcagcacgggcaacctcctggacaaggacgacctggccatcccaccccccgattacggcgccgcctcccgggccttccccgcccagacggccagcggcttcaagcagaggccctacagtgtggccgtgcccgccttctcccagggcctggatgactatggagcgcggtccatgagcaggtaaggggactttcagacctgtctttgggaccgtgggtgggtgtgaagaggccgggtggggcaggtccctctgctaggacctggggccacctcttttcctttagggcccagcctggcccttcacccctgtcagagccggggatgtcccttagggcgtcctgctttctccgagtgacacgggaacccccctgggccctgcccctctttcatcgcatctggccggccccatccatccctgtcaggcaaggttggggagggtagctgaggctggcatccatggctggggctgcagcctcctctgccccaatctgtgctccg

SEQ ID NO: 2067 - DNA, 858 bp, Homo sapiens
  source 1..858: mol_type = unassigned DNA; mol_type = unassigned DNA
gcccaaatccctgtctcctccgcagtctcagagcaagctcagcgactcctactccaacacactccccgtgcgcaagagcgtgaccccaaaaaacagctatgccaccacagccgagaacaagactctgcctcgctcgagctccatggcagccggcctggagcgcaatggccgtatgcgggtgaaggccatcttctcccacgctgctggggacaacagcaccctcctgagcttcaaggagggtgacctcattaccctgctggtgcctgaggcccgcgatggctggcactacggagagagtgagaagaccaagatgcggggctggtttcccttctcctacacccgggtcttggacagcgatggcagtgacaggctgcacatgagcctgcagcaagggaagagcagcagcacgggcaacctcctggacaaggacgacctggccatcccaccccccgattacggcgccgcctcccgggccttccccgcccagacggccagcggcttcaagcagaggccctacagtgtggccgtgcccgccttctcccagggcctggatgactatggagcgcggtccatgagcaggaatccctttgcccacgtccagctgaagccgacagtgaccaacgacaggtctgcccccctcctcagctgatggccacatctgcagtgctgcccatctggtggcttcccccgcccttcccatgtagcctgttctgtcatcatctgtgcgttcctgtgtagagaacatccaggccccggctgcctggtcttgccccacttgagtctggcctggactggatcccagctgttctaggcagggccgggcagagtggggcgcaggcccctgaagggcgagaccca

SEQ ID NO: 2068 - DNA, 3689 bp, Homo sapiens
  source 1..3689: mol_type = unassigned DNA; mol_type = unassigned DNA
ccccagcggcaggggtctccccccagtggcaggggtctgccccatggcaggggtctttccccacggcaggggtctccccccaatggcaggggtctccccccaatggctcgggtctcccccacatggctgttgtcttcccccatggctggggtctttcaccacagagtctagtgaccaccttgctccatcgcctccctgtgccactcagattgccgcagggtgtggcatcccacacgtgtacacactcagcacgtccagccgaagccctgtggtgggcatcagtttcccacagttcgcaggtgcagagcagggcttggccatcctgagaccgcaggctttctgtggctttcagctcttccacatgccagacgggctctccagtttggagttctagaagtcacctatggagtcagatgggccacacctcctcagtttactgaatgctgttgcagagaggctgggccagggtgccaccctcgctggacctgggggctgcattcccagggctgtgtttgtgcgggtgtgtctcttggcaagatgggaaaaggccctgacatttgtgccttcctaagcttggccttgcagccatcactctgaggagggggccgagggcagggggtctcccaggaggctgctccatctttcttccagtggccactccaatcttggtgccatccgtggcttagcgtgacactggggctgcgaggcaggagcaactgctctgcccgggctctggggccttgcagttgggtctggtggggccggcagctcccaccaggttgaggacagcccgggccaccttgcccttgaggctgagcacacagtgggagcgggctgcggtctttgtctccctggagcactgtctctgttgctccagagacagccgcgcagccatgctggggagctagagggacttgtgcatggatggtggtcggtgggggatggggagcctctgggctgagcgtggctcttacctggggcctctcttccaggcggggctggtttcccttctcctacacccgggtcttggacagcgatggcagtgacaggctgcacatgagcctgcagcaagggaagagcagcagcacgggcaacctcctggacaaggacgacctggccatcccaccccccgattacggcgccgcctcccgggccttccccgcccagacggccagcggcttcaagcagaggccctacagtgtggccgtgcccgccttctcccaggtcagtgggcggggccggggctgggaggggcccgcaggtggaacagtgggctcagcctgcagtcccccgttggagcctccgctgaggggcggggcgcctgggggtctgggtctttggacagccctggggtgaaggctgcatgatttgggaatgtgtacacacccctgcttcggcctcaggctgcccgcctcgccgcagcaggctccctgtgtcggcatgctggggctggggtcagcctgtccctcatggtgccctcagccagccacgggcaactcactgctctgtccaagggggcagcgtctgggctgggaagtggctggcctagaggtgggcctggacgccgccgccttttgggagagccaggggggcaggatctcttccgtgagaaccacggggctccctcagtcacatccatgagatgggagtgcttgctgctcagccctggcatgtggctggaccccttccagtcagtgtgaccctggatttgggccatctggtgccgggaggccagaggtggaggatcagggcctgggtcctaggccctggtgtgggttctcggaaacccgggatcatggcggtcctggtatctaggctggggcagggtgtgagcgtgcatctcaacttgccgggttccagcccgctccgtccagggaggctcctggggttggagagttggagacccctgtctgtctggggctcctcagccagaggtccagtttgtgggatattggctgggctagcagctttgttcccggggccggtctccagggctgggcctcaggcagtgagtagagagaagaagagaacccacctttttccgagataacaggtagcctgggtgactactcagctattgacccacaagtgaggagtccctagattgacagcctgagctgaggccgcaggaggcaacctggagaggtttgggctctgggccgtgggtgttccacaggtcagcctctggggtgggctcagtgctgggagagccaaggaggggtctgcatctgccctaggccgcgggccaggccatgctggcagatgaagggcacagccagccccagcgccacacctgggcgctcctcccaggcagtgtcaccctcccaggggccgggatggtacatgtgacaagtttccaggaaactgcagctggggtctgggtctggtcctgggtcctacaagcaggcggaggagtcccaggggcccgcccaggcatgggtgaggtgctgcaggtgccctgcgggggcctcggctccctgggggcaggaggaggggtctcaggcggccagtcttgcatctgtttgggagtgtgcaacaagcacacaaattgaggtggccgctggctggaggaggtatcccctttaatttgggcagtcattactttaccactgggaccagggctccaggcaggtctctgagtgctgcagccaggagatggggagccttccaaaggaacacggtttgaaccttgtccaggcaggatcaccatttgtgggtgtgtacaggcagcgggtgggggtgaccacaggccccgtcacccggcctgacatgtttctgcctctgcccccagggcctggatgactatggagcgcggtccatgagcaggtaaggggactttcagacctgtctttgggaccgtgggtgggtgtgaagaggccgggtggggcaggtccctctgctaggacctggggccacctcttttcctttagggcccagcctggcccttcacccctgtcagagccggggatgtcccttagggcgtcctgctttctccgagtgacacgggaacccccctgggccctgcccctctttcatcgcatctggccggccccatccatccctgtcaggcaaggttggggagggtagctgaggctggcatccatggctggggctgcagcctcctctgccccaatctgtgctccgcccttgtcctgggtcttcctggagggtcaggaggccaacgggagctgctgaaaggggcattgctcggtgctggcggactcgccgcctgtggctgggcagcgtcgtgcagccaggcagccgtcctgtgctttgtttcacagtggcagcggcacgctggtgtccacagtgtgaggacgctgaccccgggcagccgctgctctgaagagcttccgcgccttccccctggtctcgtccgttttcctcctcagctctcgctggtttgttcttgggttgtttttcttttccacctgccccatgccttttggttggtgaccccagactctgtgatcccccagggtccatggtgctgctccatccgccccccctcccctgtgtttacgcgccccatcctgtgtgtcccagccttttgagcagaaactgccaggcaggacctgctgggccgtgcggggcaccctcggcctcaccctgcagtgtctgtggcactcactgcttttctaaggctcgccgtgagccaggtctaaagtttgaagaaaaagaaaaatctt

SEQ ID NO: 2069 - DNA, 1877 bp, Homo sapiens
  source 1..1877: mol_type = unassigned DNA; mol_type = unassigned DNA
cgccgctcggagccgccgggcaggtcccccagcgctcgcgtctgggcccgccccccgctgcggggcggattgacaggagcccggcggccaatcggacgccgtggggcggggcgaggcggggcggtgcaggccggctcccggcgcggggcgctatttacggcgcggagccggagagacctgggctggcgcgggcgggagctgcggcggatacccttgcgtgctgtggagaccctactctcttcgctgagaacggccgctagcggggactgaaggccgggagcccactcccgacccggggctagcgtgcgtccctagagtcgagcggggcaagggagccagtggccgccgacgggggaccgggaaacttttctgggctcctgggcgcgccctgtagccgcgctccatgctccggcagcggcccgaaacccagccccgccgctgacggcgcccgccgctccgggcagggcccatgccctgcgcgctccgggggtcgtaggctgccgccgagccggggctccggaagccggcgggggcgccgcggccgtgcggggcgtcaatggatcgccactccagctacatcttcatctggctgcagctggagctctgcgccatggccgtgctgctcaccaaaggtgaaattcgatgctactgtgatgctgcccactgtgtagccactggttatatgtgtaaatctgagctcagcgcctgcttctctagacttcttgatcctcagaactcaaattccccactcacccatggctgcctggactctcttgcaagcacgacagacatctgccaagccaaacaggcccgaaaccactctggcaccaccatacccacattggaatgctgtcatgaagacatgtgcaattacagagggctgcacgatgttctctctcctcccaggggtgaggcctcaggacaaggaaacaggtatcagcatgatggtagcagaaaccttatcaccaaggtgcaggagctgacttcttccaaagagttgtggttccgggcagcggtcattgccgtgcccattgctggagggctgattttagtgttgcttattatgttggccctgaggatgcttcgaagtgaaaataagaggctgcaggatcagcggcaacagatgctctcccgtttgcactacagctttcacggacaccattccaaaaaggggcaggttgcaaagttagacttggaatgcatggtgccggtcagtgggcacgagaactgctgtctgacctgtgataaaatgagacaagcagacctcagcaacgataagatcctctcgcttgttcactggggcatgtacagtgggcacgggaagctggaattcgtatgacggagtcttatctgaactacacttactgaacagcttgaaggccttttgagttctgctggacaggagcactttatctgaagacaaactcatttaatcatctttgagagacaaaatgacctctgcaaacagaatcttggatatttcttctgaaggattatttgcacagacttaaatacagttaaatgtgttatttgcttttaaaattataaaaagcaaagagaagactttgtacacactgtcaccagggttatttgcatccaagggagctggaattgagtacctaaataaacaaaaatgtgccctatgtaagcttctacatcttgatttattgtaaagatttaaaagaaatatatatattttgtctgaaatttaatagtgtctttcataaatttaactgggaaacgtgagacagtacatgttaattatacaaatggccatttgctgttaataatttgttctcaactctaggatgtggcttggtttttttttttctcttttcttttttaaacaagaccaagatcttgcttattcttccatg

SEQ ID NO: 2070 - DNA, 1884 bp, Homo sapiens
  source 1..1884: mol_type = unassigned DNA; mol_type = unassigned DNA
cggagagacctgggctggcgcgggcgggagctgcggcggatacccttgcgtgctgtggagaccctactctcttcgctgagaacggccgctagcggggactgaaggccgggagcccactcccgacccggggctagcgtgcgtccctagagtcgagcggggcaagggagccagtggccgccgacgggggaccgggaaacttttctgggctcctgggcgcgccctgtagccgcgctccatgctccggcagcggcccgaaacccagccccgccgctgacggcgcccgccgctccgggcagggcccatgccctgcgcgctccgggggtcgtaggctgccgccgagccggggctccggaagccggcgggggcgccgcggccgtgcggggcgtcaatggatcgccactccagctacatcttcatctggctgcagctggagctctgcgccatggccgtgctgctcaccaaaggtgaaattcgatgctactgtgatgctgcccactgtgtagccactggttatatgtgtaaatctgagctcagcgcctgcttctctagacttcttgatcctcagaactcaaattccccactcacccatggctgcctggactctcttgcaagcacgacagacatctgccaagccaaacaggcccgaaaccactctggcaccaccatacccacattggaatgctgtcatgaagacatgtgcaattacagagggctgcacgatgttctctctcctcccaggggtgaggcctcaggtaggtggaagccgtttctaaccagaatgcctgcctgatctatagacttgtgacagccacgactttgtatgtctgctattgattttgttgttaatgtaattagagacaccagagggagaagcctggctggatgcaaagatgcatcttgattgagtggcttttatgtctgagcattagatgtctgtctacataataggttttgcctgttttttcaacattttgaagacattaaaaggccattacatctcagtaatgacagtctgtaaacaaatgcgtttgtaagcttcttcagatagttttgcaatgttttctaaatatcgttgatttaattgtaagcttctttttaatggaattcttggttaaaatgaattgatgattatgaatatccctaggaggagttagcatggagtttgatcattttctttgtactcctttaggacaaggaaacaggtatcagcatgatggtagcagaaaccttatcaccaaggtgcaggagctgacttcttccaaagagttgtggttccgggcagcggtcattgccgtgcccattgctggagggctgattttagtgttgcttattatgttggccctgaggatgcttcgaagtgaaaataagaggctgcaggatcagcggcaacagatgctctcccgtttgcactacagctttcacggacaccattccaaaaaggggcaggttgcaaagttagacttggaatgcatggtgccggtcagtgggcacgagaactgctgtctgacctgtgataaaatgagacaagcagacctcagcaacgataagatcctctcgcttgttcactggggcatgtacagtgggcacgggaagctggaattcgtatgacggagtcttatctgaactacacttactgaacagcttgaaggccttttgagttctgctggacaggagcactttatctgaagacaaactcatttaatcatctttgagagacaaaatgacctctgcaaacagaatcttggatatttcttctgaaggattatttgcacagacttaaatacagttaaatgtgttatttgcttttaaaattataaaaagcaaagagaagactttgtacacactgtcaccagggttatttgcatccaagggagctggaattga

SEQ ID NO: 2071 - DNA, 2341 bp, Homo sapiens
  source 1..2341: mol_type = unassigned DNA; mol_type = unassigned DNA
acggtgctgacgggcccccggagcggcgagggcgcggagagaggacctccccggccaggtggagagtcatgagccgcgggcagccgccgccgctctccgcggtgctgatgccgccaggtgcgctcctttccgcccgctgctagcgcggcccgggcccgcagctatctgcggtgctgacctggccaccctcagccaccacttgcctggaagaagcgtgcggtttggatttttaaaacgccattctttatttagattccaacatcctcgcgtttcttctgtgccaagggggccctcgggccgtccgtctccccctttgctctccccaacttggcgcgccctccctcccattcctccctgacactcccaccaccccccctcggctcggcggctcggcgcgatgctgcagaagacgcactgagcccttttggatctaatgcgcagaggaggttggcccagagctcccgggctcccccaaggctgaactccgtccaaggtgcccgcaggctccctgcccgccttccccatgccagcccgcagctaggggcaggggcagcggcggctggggttgggggtgggtggggagcttttggggaggacaggtcgcagcttggctatggaaggctccaatggctttgggatcgactccattctctcccaccgcgcgggcagccccgcccttcccaagggggaccccttgctcggggactgccgttcgcccctggagctgagtccacgctcagagagcagcagcgactgctcttcgccagcctctccaggaagggactgtttggagacggggaccccacggcctggcggggcatccggcccaggtttggactcccacctgcagcccgggcagctctcagccccggcccagtcgcgcaccgtcacctcctcctttctgatcagggacatccttgccgactgcaaaccactcgcggcctgtgcaccctactctagcagcgggcagccggcagcccctgagcctgggggccgccttgcggccaaggccgcggaggactttagagacaagctggacaaaagtggcagcaacgcctcatcggactctgagtataaagtgaaggaggagggcgaccgcgagatctccagctccagggacagtcccccggtgcgcctgaaaaagccacgcaaggcgcgcacggccttcaccgaccatcagctggcgcagctggagcgcagcttcgagcggcagaagtacctgagcgtgcaggaccgcatggagctcgccgcctcgctcaacctcaccgacacgcaggtcaagacctggtaccagaaccgcaggactaaatggaagcgacagacggccgtcgggttggagctgctggcggaggcaggcaattactcagcgctccagcggatgttcccgtcgccttatttctacccgcagagtctggtttccaacctggaccccggcgcggcgctctacctgtaccgcggccccagcgcgccgccgcctgctctccagagacctctggtgccccgcatcctcatccacggactccagggcgccagcgagccgcccccgccgctgccccccctggccggcgtcctcccacgcgccgcgcagcctcggtgaggcgcccgtcggctccggggcctcctcccgcgggctcggcgtggccccttccgcccgcctttctgagggcgcaggttcgacgccctttcccgggagggggccctgcccggccctccctggcgccccagcccagtgccccccgaagggccaaatgccaagtccactgaggcccggaccccggactgcgtctccccagcccccctcggcgtcctctctcgcggccgctctgtccgggagccatccccacccgccgggtgtacatacgcgtctctgccactccccacccccagcctctgccggctcccctaggcaacccctttctccccaggagcgggtgcggctgattcccaggcttcgctctctcccacgccccttctacgctccaggtggagaacagcccctctccccgcgcccccgccagggagagaaggggagtgcggagccccgtctccctacccctcgagcacctgggccagcggctgagctgtacataccgtgtgcaaagtgtatatgaagttatttattcgtgacccatgagcccgtgaccgtgtccgtggattagtgagtctgtggcctgtgccctccccactcccaggcggggcaggaaggggccaagggggcttgcccacccaccccgaccccagcccccagcctcagccccggtccgggggcagccaggcctctcgggttctctcttttttaaatgtcgaaataaacttcttacaaatgaccaggcgcctgtcc

SEQ ID NO: 2072 - DNA, 1197 bp, Homo sapiens
  source 1..1197: mol_type = unassigned DNA; mol_type = unassigned DNA
aggctgaactccgtccaaggagcttttggggaggacaggtcgcagcttggctatggaaggctccaatggctttgggatcgactccattctctcccaccgcgcgggcagccccgcccttcccaagggggaccccttgctcggggactgccgttcgcccctggagctgagtccacgctcagagagcagcagcgactgctcttcgccagcctctccaggaagggactgtttggagacggggaccccacggcctggcggggcatccggcccaggtttggactcccacctgcagcccgggcagctctcagccccggcccagtcgcgcaccgtcacctcctcctttctgatcagggacatccttgccgactgcaaaccactcgcggcctgtgcaccctactctagcagcgggcagccggcagcccctgagcctgggggccgccttgcggccaaggccgcggaggactttagagacaagctggacaaaagtggcagcaacgcctcatcggactctgagtataaagtgaaggaggagggcgaccgcgagatctccagctccagggacagtcccccggtgcgcctgaaaaagccacgcaaggcgcgcacggccttcaccgaccatcagctggcgcagctggagcgcagcttcgagcggcagaagtacctgagcgtgcaggaccgcatggagctcgccgcctcgctcaacctcaccgacacgcaggtcaagacctggtaccagaaccgcaggactaaatggaagcgacagacggccgtcgggttggagctgctggcggaggcaggcaattactcagcgctccagcggatgttcccgtcgccttatttctacccgcagagtctggtttccaacctggaccccggcgcggcgctctacctgtaccgcggccccagcgcgccgccgcctgctctccagagacctctggtgccccgcatcctcatccacggactccagggcgccagcgagccgcccccgccgctgccccccctggccggcgtcctcccacgcgccgcgcagcctcggtgaggcgcccgtcggctccggggcctcctcccgcgggctcggcgtggccccttccgcccgcctttctgagggcgcaggttcgacgccctttcccgggagggggccctgcccggccctccctggcgccccagcccagtgccccccgaagggccaaatgccaagtc

SEQ ID NO: 2073 - DNA, 1979 bp, Homo sapiens
  source 1..1979: mol_type = unassigned DNA; mol_type = unassigned DNA
ggcggctgctgaacggcggagtggcgtggacctcatgtagcaatgacaatggaaggggccagcgggtcgagttttggaatagacacgattttgtccagtgccagttcaggcagcccaggcatgatgaatggagatttccgcccgctcggtgaggccaggaccgcggattttaggagtcaggccaccccatctccctgttcggagattgataccgtagggacggcgccttcttctcctatctcagtcaccatggagcccccggagccgcatctggtagcagacgcgacccagcatcatcaccacctccaccacagccagcagccgccgccgccggccgcggccccgacgcaaagtttgcagcctttgccccaacagcagcagccgctgccgccacagcagccgccgccgccgcccccccagcagctgggctcggccgcctcggcccccaggacttccacgtcttcttttttaattaaggacatcttgggcgacagcaaacctctggcggcatgtgcaccctacagcaccagcgtatcctctccccaccacaccccgaagcaggagagcaacgcagtgcacgagagcttcaggccaaagctcgagcaggaggacagcaagaccaaactcgacaagcgggaggattcccagagcgacatcaaatgccacgggacaaaggaggaaggagaccgggagattacgagtagccgtgagagtccccctgtgagagccaagaagcctcgaaaagcaaggacagctttttccgaccaccagctcaatcaactggagcgtagctttgagcggcagaagtacctgagcgtgcaggatcgcatggacctggctgcagcgctcaacctcactgacacccaagtcaagacctggtaccagaaccgcaggaccaagtggaagcggcagacagcggtgggcctggagttgctggccgaggcagggaactactcggcgctgcagaggatgtttccatcgccttatttctatcacccaagcctgctgggcagcatggacagcactacggcggcggcggctgccgctgccatgtacagcagcatgtaccggactcctccagcaccccatccccagctgcagcggcccctggtgccccgtgtgctcatccacggcctagggcctgggggacagccagcccttaatccattgtccagccccatcccaggcaccccacacccccggtgaaaacattgcagcgaaggcactgcaatcccttccccatatccctgcccaacccggactgctgcccgtcctctccctgctccaggccactaggcctcccttgcagccaactctggaaggcagaggagtaagagaggaagatgcttaccagtgggcaggggacccccaaagaggagccagccctctgctctccatctccccacccctagaaacagggctggaaatctcccccacagcagtgtgactggtgaaaatgctgaccccacacagagtgcaaccagtaagtgaaaacatcaacaaaaacaaaacctcaaattctttttcaaaaatgactttagggacaagcaggagggagggaggggggagggctaaggagggaagaaagaagggcacggagcggaaacagcacaggcagagtgaactatatatggacagcctcaagtgctgaggcaaagggcgttgccgaggacattccgtctgccccagagaaaagaggagggtaactgagaactttgcactgatttctcatgaccttttttcttttggaaaagtggcatgctccataatatgaaaaaaatgtacatttgaaagactgagtgataagtgatatatcatatttattatatgttgtccaaaaagagtcacttatatacgttagtaaaaacatgatttttcttttcatgtcttttcgattcagtaaaataaatgcttagacaaaaatatagatttttttgtgattgaaaattacaaaaataaagtttatctttttttaacaa

SEQ ID NO: 2074 - DNA, 401 bp, Homo sapiens
  source 1..401: mol_type = unassigned DNA; mol_type = unassigned DNA
tgtttggcatcccactgaccccacatctgtttcgctgctaatgctctgctgccagaactatccaagctgcctccctctgggcccagggactattgctgaagagatgacatctctgtatgttacccaggctggactggaactctgggctcaagccatcctcctgcctcacctcctgaagtgttgggattacaggaaagggtcccaatccagaccccaagggaggattcttggatctcatgcaagaaagaattcaggaactccaagatgggaggcaagctcagcaagaagaagaagggctacaatgtgaacgacgagaaagccaaggagaaagacaagaaggccgagggcgcggcgacggaagaggaggggaccccgaaggagagtgagccccaggcggccgc

SEQ ID NO: 2075 - DNA, 1878 bp, Homo sapiens
  source 1..1878: mol_type = unassigned DNA; mol_type = unassigned DNA
gggcactgggcaggaaggggagggggagcgagcgcgagaaatgcagaggctgcagcggcggcggcggcggcagtagcggcagcggcgacgacggcggcggcagcgctccaactggctcctcgctccgggctccgccgtcgagccgggagagagcctccgccagcggccaggcaccagccagacgacgccagcgaccccggcctctcggcggcaccgcgctaactcaggggctgcataggcacccagagccgaactccaagatgggaggcaagctcagcaagaagaagaagggctacaatgtgaacgacgagaaagccaaggagaaagacaagaaggccgagggcgcggcgacggaagaggaggggaccccgaaggagagtgagccccaggcggccgcagagcccgccgaggccaaggagggcaaggagaagcccgaccaggacgccgagggcaaggccgaggagaaggagggcgagaaggacgcggcggctgccaaggaggaggccccgaaggcggagcccgagaagacggagggcgcggcagaggccaaggctgagcccccgaaggcgcccgagcaggagcaggcggcccccggccccgctgcgggcggcgaggcccccaaagctgctgaggccgccgcggccccggccgagagcgcggcccctgccgccggggaggagcccagcaaggaggaaggggaacccaaaaagactgaggcgcccgcagctcctgccgcccaggagaccaaaagtgacggggccccagcttcagactcaaaacccggcagctcggaggctgccccctcttccaaggagacccccgcagccacggaagcgcctagttccacacccaaggcccagggccccgcagcctctgcagaagagcccaagccggtggaggccccggcagctaattccgaccaaaccgtaaccgtgaaagagtgacaaggacagcctataggaaaaacaataccacttaaaacaatctcctctctctctctctctctctctctctatctctctctctatctcctctctctctctcctctcctatctctcctctctctctctcctatactaacttgtttcaaattggaagtaatgatatgtattgcccaaggaaaaatacaggatgttgtcccatcaagggagggagggggtgggagaatccaaatagtatttttgtggggaaatatctaatataccttcagtcaactttaccaagaagtcctggatttccaagatccgcgtctgaaagtgcagtacatcgtttgtacctgaaactgccgccacatgcactcctccaccgctgagagttgaatagcttttcttctgcaatgggagttgggagtgatgcgtttgattctgcccacagggcctgtgccaaggcaatcagatctttatgagagcagtattttctgtgttttctttttaatttacagcctttcttattttgatatttttttaatgttgtggatgaatgccagctttcagacagagcccacttagcttgtccacatggatctcaatgccaatcctccattcttcctctccagatatttttgggagtgacaaacattctctcatcctacttagcctacctagatttctcatgacgagttaatgcatgtccgtggttgggtgcacctgtagttctgtttattggtcagtggaaatgaaaaaaaaaaaaaaaaaaagtctgcgttcattgcagttccagtttctcttccattctgtgtcacagacaccaacacaccactcattggaaaatggaaaaaaaaaacaaaaaaaaaacaaaaaaatgtacaatggatgcattgaaattatatgtaattgtataaatggtgcaacagtaataaagttaaacaattaaaaagaa

SEQ ID NO: 2076 - DNA, 1711 bp, Homo sapiens
  source 1..1711: mol_type = unassigned DNA; mol_type = unassigned DNA
gcgcaactcgtttgcagcggcgcagcccagacgcgcctgcagctggggctcaccccaacctcgctgccagccgagaactccaagatgggaggcaagctcagcaagaagaagaagggctacaatgtgaacgacgagaaagccaaggagaaagacaagaaggccgagggcgcggcgacggaagaggaggggaccccgaaggagagtgagccccaggcggccgcagagcccgccgaggccaaggagggcaaggagaagcccgaccaggacgccgagggcaaggccgaggagaaggagggcgagaaggacgcggcggctgccaaggaggaggccccgaaggcggagcccgagaagacggagggcgcggcagaggccaaggctgagcccccgaaggcgcccgagcaggagcaggcggcccccggccccgctgcgggcggcgaggcccccaaagctgctgaggccgccgcggccccggccgagagcgcggcccctgccgccggggaggagcccagcaaggaggaaggggaacccaaaaagactgaggcgcccgcagctcctgccgcccaggagaccaaaagtgacggggccccagcttcagactcaaaacccggcagctcggaggctgccccctcttccaaggagacccccgcagccacggaagcgcctagttccacacccaaggcccagggccccgcagcctctgcagaagagcccaagccggtggaggccccggcagctaattccgaccaaaccgtaaccgtgaaagagtgacaaggacagcctataggaaaaacaataccacttaaaacaatctcctctctctctctctctctctctctctatctctctctctatctcctctctctctctcctctcctatctctcctctctctctctcctatactaacttgtttcaaattggaagtaatgatatgtattgcccaaggaaaaatacaggatgttgtcccatcaagggagggagggggtgggagaatccaaatagtatttttgtggggaaatatctaatataccttcagtcaactttaccaagaagtcctggatttccaagatccgcgtctgaaagtgcagtacatcgtttgtacctgaaactgccgccacatgcactcctccaccgctgagagttgaatagcttttcttctgcaatgggagttgggagtgatgcgtttgattctgcccacagggcctgtgccaaggcaatcagatctttatgagagcagtattttctgtgttttctttttaatttacagcctttcttattttgatatttttttaatgttgtggatgaatgccagctttcagacagagcccacttagcttgtccacatggatctcaatgccaatcctccattcttcctctccagatatttttgggagtgacaaacattctctcatcctacttagcctacctagatttctcatgacgagttaatgcatgtccgtggttgggtgcacctgtagttctgtttattggtcagtggaaatgaaaaaaaaaaaaaaaaaaagtctgcgttcattgcagttccagtttctcttccattctgtgtcacagacaccaacacaccactcattggaaaatggaaaaaaaaaacaaaaaaaaaacaaaaaaatgtacaatggatgcattgaaattatatgtaattgtataaatggtgcaacagtaataaagttaaacaattaaaaagaagtaataaag

SEQ ID NO: 2077 - DNA, 395 bp, Homo sapiens
  source 1..395: mol_type = unassigned DNA; mol_type = unassigned DNA
gaaaacaatgaagagtcgttatatggaactctatgaccttaatagagacttgctaaatggatataaaattcgctgtaacaatcacacagagctgttgggaaacctcaaagcagtaaatcaagcaattcaaagagcaggtcgtctgcgggttggaaaaccaaagaaccaggtgatcactgcttgtcgggatgcaattcgaagcaataacatcaacacactgttcaaaatcatgcgagtggggacagcttcttcctagtctttacctggtgaaaggacacaggagatacttcaaagaaaaccagtttgttccacgaagggataagagacttgacaatctgcttcggctgaaagtgttctgcaccaggaaagaacacatcaataaattatcattaacc

SEQ ID NO: 2078 - DNA, 641 bp, Homo sapiens
  source 1..641: mol_type = unassigned DNA; mol_type = unassigned DNA
cttcaagtagaagcggattttcctgtctattttgaggaattacgaaaggtgctagttaaggtggatgaatatcattcagtgcatcagaagctcagtgctgatatggctgatcattctaatttgatccgaagtttgctggtcggagctgaggatgctcgtctgatgagggacatgaaaacaatgaagagtcgttatatggaactctatgaccttaatagagacttgctaaatggatataaaattcgctgtaacaatcacacagagctgttgggaaacctcaaagcagtaaatcaagcaattcaaagagcaggtcgtctgcgggttggaaaaccaaagaaccaggtgatcactgcttgtcgggatgcaattcgaagcaataacatcaacacactgttcaaaatcatgcgagtggggacagcttcttcctaggggccaagaaatgaagcttcaggcctgtgaagttggagagcagcaagaatagtgcctcagagcgaaataacttcatgcactccttcaatatctcaggaagcttactctcctcagctttctcataaaacctgaaaaacagcaatgtcaagttgttcatcaaagccacagatgtaaaatgactcacagaataaaagctgatcgttagctttgta

SEQ ID NO: 2079 - DNA, 2623 bp, Homo sapiens
  source 1..2623: mol_type = unassigned DNA; mol_type = unassigned DNA
gccgccgcaggaggagcaggcggtacctggacgggttcgtcccgggctgtttcgcgtccggcctgaggcggctggggccgcgcaggtagtgtccctgcacttcttgcccgggcgcgtgaggccagctccgctgcgcttgtctccagcttccagccctcctcccctaagccgccgccatcatgctgctgcctgtgttcaccctgaaactgcgccacaaaatcagcccccgaatggtggccatagggcgctacgacgggactcacccgtgcctggcggccgccacccaaacgggcaaggtttttattcataatcctcatacacggaaccagcatgtcagtgcatccagggtcttccagagccccctggaatctgatgtttctcttctcagcattaaccaggcagtcagctgtctgactgcaggcgtattgaaccctgagcttggctatgatgcccttttagtggggacacagactaatcttttggcttatgatgtctacaataattcggatttgttctacagagaggtagcagatggggcaaatgcaattgtgctggggacattgggagacatttcttcccctcttgcgattattggtggcaattgtgctctgcaaggtttcaatcatgaaggaagtgatctcttttggacggttactggagacaatgttaattccttggccttgtgtgactttgatggtgatggaaagaaagagcttcttgttggatctgaggattttgatatccgagtttttaaggaagatgagattgtggcagaaatgacagaaacagagatagtcacctctctttgtcccatgtatggcagtcgatttggttatgccctttccaatggcacagttggagtttatgacaaaacatcccgatactggagaattaaatcgaaaaatcatgccatgagcattcatgcttttgaccttaattctgatggagtgaatgaactgataactggttggtccaatgggaaggttgatgctcgaagtgaccgaactggggaggtcatctttaaggacaatttttcttctgcaattgccggtgtggtagagggagattaccggatggatggccacatacagttaatctgctgctcagtggatggggaaatccggggctacctgcctggcacggctgagatgaggggcaacctcatggacaccagtgcagagcaggacctgatccgagagctgagtcagaagaagcagaatctgttgctggaactccgtaactatgaggaaaatgccaaggctgaattggccagtccactgaacgaggctgatgggcatcggggcataatcccagccaataccaggctccacaccacgctctcagtcagcctggggaatgagacccaaactgctcatacagaattacgcatttccacttctaatgacaccatcatccgagcagtattgatttttgcagaaggaatttttacaggtgaaagccacgtggtacatcccagcattcacaacctctccagttccatctgcatccctattgtgcctcccaaagatgtccctgtggatctgcacttgaaggcattcgtgggttacagaagcagcacccagtttcatgtatttgaatcgacaagacagctccctcgattctccatgtatgcgctgaccagcctggaccctgccagtgagccaatcagttatgttaactttaccattgcagaacgggcacagagggttgttgtatggctcggtcagaactttctgttaccagaagacactcacattcagaatgctccatttcaagtgtgtttcacatctttacggaatggcggccacctgcatataaaaataaaacttagtggagaggtggatgaatatcattcagtgcatcagaagctcagtgctgatatggctgatcattctaatttgatccgaagtttgctggtcggagctgaggatgctcgtctgatgagggacatgaaaacaatgaagagtcgttatatggaactctatgaccttaatagagacttgctaaatggatataaaattcgctgtaacaatcacacagagctgttgggaaacctcaaagcagtaaatcaagcaattcaaagagcaggtcgtctgcgggttggaaaaccaaagaaccaggtgatcactgcttgtcgggatgcaattcgaagcaataacatcaacacactgttcaaaatcatgcgagtggggacagcttcttcctaggtgaggaaaatacaggtcatgaagttcctggcaaagattttctgttaaaaacctatgctggtttgctttggatcacaccctggtgaaccccgggtgctaagaatgaaaataaccttggtgagttgtacaaattaaagacaaagaactacatgtgaagatagacttgctttctatttttaaatcagtagtagtactgttgctgaataatactaggtttttatggaataggatgaatgcttttgaagtattagggcttcagagtccaattttgcttatttatggtatataaatacatatttttttcttgaaattgcaattgagtttgtacttttcaaatagattatctactttttcattaaaatgtaaagatgttaaactttgtgttgattgattataaaatcaccaccaaatcagaa

SEQ ID NO: 2080 - DNA, 6073 bp, Homo sapiens
  source 1..6073: mol_type = unassigned DNA; mol_type = unassigned DNA
cgccgaggctccaccgcgcagccgcaaaaagagcggacgggtctgcgccgccgcaggaggagcaggcggtacctggacgggttcgtcccgggctgtttcgcgtccggcctgaggcggctggggccgcgcaggtttttattcataatcctcatacacggaaccagcatgtcagtgcatccagggtcttccagagccccctggaatctgatgtttctcttctcagcattaaccaggcagtcagctgtctgactgcaggcgtattgaaccctgagcttggctatgatgcccttttagtggggacacagactaatcttttggcttatgatgtctacaataattcggatttgttctacagagaggtagcagatggggcaaatgcaattgtgctggggacattgggagacatttcttcccctcttgcgattattggtggcaattgtgctctgcaaggtttcaatcatgaaggaagtgatctcttttggacggttactggagacaatgttaattccttggccttgtgtgactttgatggtgatggaaagaaagagcttcttgttggatctgaggattttgatatccgagtttttaaggaagatgagattgtggcagaaatgacagaaacagagatagtcacctctctttgtcccatgtatggcagtcgatttggttatgccctttccaatggcacagttggagtttatgacaaaacatcccgatactggagaattaaatcgaaaaatcatgccatgagcattcatgcttttgaccttaattctgatggagtgaatgaactgataactggttggtccaatgggaaggttgatgctcgaagtgaccgaactggggaggtcatctttaaggacaatttttcttctgcaattgccggtgtggtagagggagattaccggatggatggccacatacagttaatctgctgctcagtggatggggaaagtaaattgggatgagaaaaatccttaaaaagtcacgttttccatttgattgggtcaaaatatcaggaaatttcacctgaagtatttgtaccgagatcctgtagttctaataaattcaccaaagttggggagaacttaggtttttgtttttaagagcaggtaattgatgacctaaaagtatacctggttatacttgcggttttttccttctgttcagtccggggctacctgcctggcacggctgagatgaggggcaacctcatggacaccagtgcagagcaggacctgatccgagagctgagtcagaagaagcagaatctgttgctggaactccgtaactatgaggaaaatgccaaggtaggtgtaggtcctaatgtgaccaggtaatggaggctgaaatgttgagactgaccgggaggatcagcaaatatggaagaatgagagtgtcattgccagggtgtggcctttttgccattgtcagaattgagaggggatatatgctttcgtcttgaaatttcatttccaggtagttaaactgtagaaatgttttcctgattgtttaaggacatttcctgcagcactatttatttatagcagtgaaaacagctggaagaaacttagatgttcgtcagcagtagggagtatgtgctaaggaatattaagcagctcaaagaatgaatacttggactgatatggaaggatatctgtcgtcttaccaagtgacaaaaggcaagaacaatatagaatgtcttttatctttttcaaaaacaaacatgttaaaaacagacaactgtaaaaactgtgtgtgtgcatacagcaaactggctgaaatattcctttaatttgtcctgtaatgcattactgtatttgaatttgatgtaacaagggaatttgtttgcttactttaaaagaacaatacttcaaaaatgttaaagtcatgatgggatacagtggaccatacccatagaaagatgcaagggtattttcccacagggccagatagagcaagggagcactaatgaggtgagttctctgaattctaaagaatcagattactataataataataatatgctggaggctctgtcttttgaagctgaatagcaatattatttaaaattgatattagttcagtgttttggtgactgagtaggaaatgggtggggtgttttgcaggctgaattggccagtccactgaacgaggctgatgggcatcggggcataatcccagccaataccaggctccacaccacgctctcagtcagcctggggaatgagacccaaactgctcatacagaattacgcatttccacttctaatggtaagacagtactcacagctggtatttagaggcacctgtgccatcttggagtcattcttttttttttttttgagacagagtcttcctctgtcttggctcactgcaagctctgcctcccgggttcatgccattctcctgtctcagcctcccaagtagctgggactacaggcgcccaccaccacgcccagctaattttttgtatttttagtagagatagggtttcaccgtgttagccaagatggtctcgacctcctgacctcgtgatctgcccacctcagcttcccaaagttggagttgttcttaaactgtttttactcttccctgcagacaccatcatccgagcagtattgatttttgcagaaggaatttttacaggtgaaagccacgtggtacatcccagcattcacaacctctccagttccatctgcatccctattgtgcctcccaaagatgtccctgtggatctgcacttgaaggcattcgtgggttacagaagcaggtgaccctttgcaagtcacagttcatttcaggacagcacttagaggagggcaagatgtataaattttccatatgcccagtggattcttgggggcctgagaaaccatttaatggttctgtctacccaaagtttctcatgaccttttatttcctcagtttgaaacctgtaaaaagaaaatggaaaaactgatatgtaagtttaagatggttctttttttttttttttttttgagacagattctagctttgtcacccaggctggagtacagtggggcaatctcagttcactgcaacctctacctcctgggttcaagcaattcttctgcctcagcctcctgagtactgggaccacaggtgcccaccaccacgcccagctaatttttgtatttttagtagagacaggagttcaccatgttggccaggctggtcttgaactcctgacctcaggtgatccacccgccttggcttccgaaagtgctgggattacaggcatgagccaccacgcctggctaagatcattattttctgtttttagtcaggtgatctcataatcaaaaaatgtttaattgatgatttgtcaatttgtagttttggccactaaaactacaagagttaggatgcacctttatattacagtcatacataacctcagctagtgaagaaaaactgctctatttgtggaagataagatactttttacatcccctttatgatattttaaacccttagtgcatgcaggtatatatgtagactcatgctgtctttaaatcccaaacctaatatattactgtagtactttaaccctcaagtgttttgggggttccttcttaagtgaaacccttaaatatcaattgatgacccagaagtggctttattttctgggccttgcattttgaaagaacattctatacaaaacaattctcttgtgtttcattgattggccatagcacccagtttcatgtatttgaatcgacaagacagctccctcgattctccatgtatgcgctgaccagcctggaccctgccagtgagccaatcagttatgttaactttaccattgcagaacgggcacagagggtgagtatctcgcttttctctttcaatgcttttacacagtagaatcctttagatgttatttcatagaaagggaaaattacattaatgtgttatattggtagcagtaaatatgatatgaaagaattctctaacttgggggtggcttgtaacctgtaataaaaatattgctaaaataccttctctcactttgaaaaagcatctgagcaatcctcagttattggtgaattcttaccagtgtttaattcctctctttccgttatggtcttagtgtggttgtcctggtgtagtatttcaagaggaacctgcagcaagatgaaaagagagtgggacttggagctaagaacgtttttggctttaagtgctacgttaactcattaaattcttagtgatcttggggaagtcccctcaccagtgtgagcctcagttttcttatctaataagtaaggataatcttacccaccttattgcgggggcccgaggattacatgattggtgtaacagtagcaccttgtacatttgaaaggactaataccagtggactttaaccttggctgggctttggaattcttggtgggactttttaatcatgtagattctcaggcccctgcctggcctgtggaaccacagactctataggtgggcccttccagaaggcctcatgggtggttctcatgtggaacctgtgttgcaagccactgcatggtgttactgctattaacattaaaacttatattttccttattgtgtggatatatctgtggtgtttgcccatgtatacttcattttacatttcttaaagaatagaatggaatggttttaagcacgctacattgtccaggttatacccacagaagagctgttgtgtaacagaatcagcatcatacctgaatcatttgtacattgcatataagactatgtctaagtagaagatgctatgaaatcatgtctgctgtggggccaggcataattatgaatgttacttaagagcataggtgaggtgagaaaagggaatgtgactagtgttttagtattttcttggtgtgggatgaagtataattcttttttttttttctcaacaaagcagtaaaactagaaagaaggagaactcttccctcaagaatggctgtaccttcatatctagaggcacattaaaaaaaagaacgtctgtaccttaaaaatggaggtcatttcattgtgttcattttcaaggttgttgtatggctcggtcagaactttctgttaccagaagacactcacattcagaatgctccatttcaagtgtgtttcacatctttacggaatggcggccacctgcatataaaaataaaacttagtggagagatcactataaatactgatgatattgatttggctggtgatatcatccagtcaatggcatcattttttgctattgaagaccttcaagtagaagcggattttcctgtctattttgaggaattacgaaaggtgctagttaaggtggatgaatatcattcagtgcatcagaagctcagtgctgatatggctgatcattctaatttgatccgaagtttgctggtcggagctgaggatgctcgtctgatgagggacatgaaaacaatgaagagtcgttatatggaactctatgaccttaatagagacttgctaaatggatataaaattcgctgtaacaatcacacagagctgttgggaaacctcaaagcagtaaatcaagcaattcaaagagcaggtcgtctgcgggttggaaaaccaaagaaccaggtgatcactgcttgtcgggatgcaattcgaagcaataacatcaacacactgttcaaaatcatgcgagtggggacagcttcttcctaggtgaggaaaatacaggtcatgaagttcctggcaaagattttctgttaaaaacctatgctggtttgctttggatcacaccctggtgaaccccgggtgctaagaatgaaaataaccttggtgagttgtacaaattaaagacaaagaactacatgtgaagatagacttgctttctatttttaaatcagtagtagtactgttgctgaataatactaggtttttatggaataggatgaatgcttttgaagtattagggcttcagagtccaattttgcttatttatggtatataaatacatatttttttcttgaaattgcaattgagtttgtacttttcaaatagattatctactttttcattaaaatgtaaagatgttaaa

SEQ ID NO: 2081 - DNA, 2963 bp, Homo sapiens
  source 1..2963: mol_type = unassigned DNA; mol_type = unassigned DNA
tgtcaagtttgcagggtgcagcttggatgtggtgctagaaggggaagcctctgggctgagcatgtaggctcgtcagtagagttcaacccgcaggagtaaattactgcagtgggaaacaaccgcacccgcggcccagcaggggttccactgcgcagccgcaaaaggcgccgaggctccactgcgcagccacagaaggcgccgaggctccaccgcgcagccgcaaaaagagcggacgggtctgcgccgccgcaggaggagcaggcggtacctggacgggttcgtcccgggctgtttcgcgtccggcctgaggcggctggggccgcgcaggtagtgtccctgcacttcttgcccgggcgcgtgaggccagctccgctgcgcttgtctccagcttccagccctcctcccctaagccgccgccatcatgctgctgcctgtgttcaccctgaaactgcgccacaaaatcagcccccgaatggtggccatagggcgctacgacgggactcacccgtgcctggcggccgccacccaaacgggcaaggtttttattcataatcctcatacacggaaccagcatgtcagtgcatccagggtcttccagagccccctggaatctgatgtttctcttctcagcattaaccaggcagtcagctgtctgactgcaggcgtattgaaccctgagcttggctatgatgcccttttagtggggacacagactaatcttttggcttatgatgtctacaataattcggatttgttctacagagaggtagcagatggggcaaatgcaattgtgctggggacattgggagacatttcttcccctcttgcgattattggtggcaattgtgctctgcaaggtttcaatcatgaaggaagtgatctcttttggacggttactggagacaatgttaattccttggccttgtgtgactttgatggtgatggaaagaaagagcttcttgttggatctgaggattttgatatccgagtttttaaggaagatgagattgtggcagaaatgacagaaacagagatagtcacctctctttgtcccatgtatggcagtcgatttggttatgccctttccaatggcacagttggagtttatgacaaaacatcccgatactggagaattaaatcgaaaaatcatgccatgagcattcatgcttttgaccttaattctgatggagtgaatgaactgataactggttggtccaatgggaaggttgatgctcgaagtgaccgaactggggaggtcatctttaaggacaatttttcttctgcaattgccggtgtggtagagggagattaccggatggatggccacatacagttaatctgctgctcagtggatggggaaatccggggctacctgcctggcacggctgagatgaggggcaacctcatggacaccagtgcagagcaggacctgatccgagagctgagtcagaagaagcagaatctgttgctggaactccgtaactatgaggaaaatgccaaggctgaattggccagtccactgaacgaggctgatgggcatcggggcataatcccagccaataccaggctccacaccacgctctcagtcagcctggggaatgagacccaaactgctcatacagaattacgcatttccacttctaatgacaccatcatccgagcagtattgatttttgcagaaggaatttttacaggtgaaagccacgtggtacatcccagcattcacaacctctccagttccatctgcatccctattgtgcctcccaaagatgtccctgtggatctgcacttgaaggcattcgtgggttacagaagcagcacccagtttcatgtatttgaatcgacaagacagctccctcgattctccatgtatgcgctgaccagcctggaccctgccagtgagccaatcagttatgttaactttaccattgcagaacgggcacagagggttgttgtatggctcggtcagaactttctgttaccagaagacactcacattcagaatgctccatttcaagtgtgtttcacatctttacggaatggcggccacctgcatataaaaataaaacttagtggagagatcactataaatactgatgatattgatttggctggtgatatcatccagtcaatggcatcattttttgctattgaagaccttcaagtagaagcggattttcctgtctattttgaggaattacgaaaggtgctagttaaggtggatgaatatcattcagtgcatcagaagctcagtgctgatatggctgatcattctaatttgatccgaagtttgctggtcggagctgaggatgctcgtctgatgagggacatgaaaacaatgaagagtcgttatatggaactctatgaccttaatagagacttgctaaatggatataaaattcgctgtaacaatcacacagagctgttgggaaacctcaaagcagtaaatcaagcaattcaaagagcaggtcgtctgcgggttggaaaaccaaagaaccaggtgatcactgcttgtcgggatgcaattcgaagcaataacatcaacacactgttcaaaatcatgcgagtggggacagcttcttcctaggtgaggaaaatacaggtcatgaagttcctggcaaagattttctgttaaaaacctatgctggtttgctttggatcacaccctggtgaaccccgggtgctaagaatgaaaataaccttggtgagttgtacaaattaaagacaaagaactacatgtgaagatagacttgctttctatttttaaatcagtagtagtactgttgctgaataatactaggtttttatggaataggatgaatgcttttgaagtattagggcttcagagtccaattttgcttatttatggtatataaatacatatttttttcttgaaattgcaattgagtttgtacttttcaaatagattatctactttttcattaaaatgtaaagatgttaaa

SEQ ID NO: 2082 - DNA, 4026 bp, Homo sapiens
  source 1..4026: mol_type = unassigned DNA; mol_type = unassigned DNA
tattgtgcctcccaaagatgtccctgtggatctgcacttgaaggcattcgtgggttacagaagcaggtgaccctttgcaagtcacagttcatttcaggacagcacttagaggagggcaagatgtataaattttccatatgcccagtggattcttgggggcctgagaaaccatttaatggttctgtctacccaaagtttctcatgaccttttatttcctcagtttgaaacctgtaaaaagaaaatggaaaaactgatatgtaagtttaagatggttctttttttttttttttttttgagacagattctagctttgtcacccaggctggagtacagtggggcaatctcagttcactgcaacctctacctcctgggttcaagcaattcttctgcctcagcctcctgagtactgggaccacaggtgcccaccaccacgcccagctaatttttgtatttttagtagagacaggagttcaccatgttggccaggctggtcttgaactcctgacctcaggtgatccacccgccttggcttccgaaagtgctgggattacaggcatgagccaccacgcctggctaagatcattattttctgtttttagtcaggtgatctcataatcaaaaaatgtttaattgatgatttgtcaatttgtagttttggccactaaaactacaagagttaggatgcacctttatattacagtcatacataacctcagctagtgaagaaaaactgctctatttgtggaagataagatactttttacatcccctttatgatattttaaacccttagtgcatgcaggtatatatgtagactcatgctgtctttaaatcccaaacctaatatattactgtagtactttaaccctcaagtgttttgggggttccttcttaagtgaaacccttaaatatcaattgatgacccagaagtggctttattttctgggccttgcattttgaaagaacattctatacaaaacaattctcttgtgtttcattgattggccatagcacccagtttcatgtatttgaatcgacaagacagctccctcgattctccatgtatgcgctgaccagcctggaccctgccagtgagccaatcagttatgttaactttaccattgcagaacgggcacagagggtgagtatctcgcttttctctttcaatgcttttacacagtagaatcctttagatgttatttcatagaaagggaaaattacattaatgtgttatattggtagcagtaaatatgatatgaaagaattctctaacttgggggtggcttgtaacctgtaataaaaatattgctaaaataccttctctcactttgaaaaagcatctgagcaatcctcagttattggtgaattcttaccagtgtttaattcctctctttccgttatggtcttagtgtggttgtcctggtgtagtatttcaagaggaacctgcagcaagatgaaaagagagtgggacttggagctaagaacgtttttggctttaagtgctacgttaactcattaaattcttagtgatcttggggaagtcccctcaccagtgtgagcctcagttttcttatctaataagtaaggataatcttacccaccttattgcgggggcccgaggattacatgattggtgtaacagtagcaccttgtacatttgaaaggactaataccagtggactttaaccttggctgggctttggaattcttggtgggactttttaatcatgtagattctcaggcccctgcctggcctgtggaaccacagactctataggtgggcccttccagaaggcctcatgggtggttctcatgtggaacctgtgttgcaagccactgcatggtgttactgctattaacattaaaacttatattttccttattgtgtggatatatctgtggtgtttgcccatgtatacttcattttacatttcttaaagaatagaatggaatggttttaagcacgctacattgtccaggttatacccacagaagagctgttgtgtaacagaatcagcatcatacctgaatcatttgtacattgcatataagactatgtctaagtagaagatgctatgaaatcatgtctgctgtggggccaggcataattatgaatgttacttaagagcataggtgaggtgagaaaagggaatgtgactagtgttttagtattttcttggtgtgggatgaagtataattcttttttttttttctcaacaaagcagtaaaactagaaagaaggagaactcttccctcaagaatggctgtaccttcatatctagaggcacattaaaaaaaagaacgtctgtaccttaaaaatggaggtcatttcattgtgttcattttcaaggttgttgtatggctcggtcagaactttctgttaccagaagacactcacattcagaatgctccatttcaagtgtgtttcacatctttacggaatggcggccacctgcatataaaaataaaacttagtggagagatcactataaatactgatgatattgatttggctggtgatatcatccagtcaatggcatcattttttgctattgaagaccttcaagtagaagcggattttcctgtctattttgaggaattacgaaaggtgctagttaaggtgagggaatgcggtagatgcatttgtgagaatgtggtagtctaataatatttgaggagattaatggtactacaaatgtacttatgttatagtgatgttttcaagaatttttgcaattcttgaagtaaaaattgaactagtattggagagtttactacttaaggatttattttataaaaggaagtgtttagctcctgagcaccatgcttgctttgtttggtttaaagtgatgcatttaaatattaacattttcctttgttagctcttcatcttatttgtagtatctgctttggtcttcttcagtttgggtctttccaaaaacccaaattcaagataaaagagcaaaataaagatgattctgattggccccaaagtatacaatattcccactgcaaatccctaaaatattaatatgtgtgttgtgggggctcctggtgctaaagcatggggaagattcacatggagtgtcgtgttgaaattggaggcagcacagatgagttaacttgttgagacagagatgaaataacgggaagtagcttaattggtataagcgaacaggggaaagaagggggtctctgtatctggtaaatagtgtcttttcatttgtctgggttcaagaagtttgtgaggcctttttcattcctgagtgttcatggtctccaggtggatgaatatcattcagtgcatcagaagctcagtgctgatatggctgatcattctaatttgatccgaagtttgctggtcggagctgaggatgctcgtctgatgagggacatgaaaacaatgaagagtcgttatatggaactctatgaccttaatagagacttgctaaatggatataaaattcgctgtaacaatcacacagagctgttgggaaacctcaaagcagtaaatcaagcaattcaaagagcaggtcgtctgcgggttggaaaaccaaagaaccaggtgatcactgcttgtcgggatgcaattcgaagcaataacatcaacacactgttcaaaatcatgcgagtggggacagcttcttcctaggtgaggaaaatacaggtcatgaagttcctggcaaagattttctgttaaaaacctatgctggtttgctttggatcacaccctggtgaaccccgggtgctaagaatgaaaataaccttggtgagttgtacaaattaaagacaaagaactacatgtgaagatagacttgctttctatttttaaatcagtagtagtactgttgctgaataatactaggtttttatggaataggatgaatgcttttgaagtattagggcttcagagtccaattttgcttatttatggtatataaatacatatttttttcttgaaattgcaattgagtttgtacttttcaaatagattatctactttttcattaaaatgtaaagatgtt

SEQ ID NO: 2083 - DNA, 716 bp, Homo sapiens
  source 1..716: mol_type = unassigned DNA; mol_type = unassigned DNA
ttctgggccttgcattttgaaagaacattctatacaaaacaattctcttgtgtttcattgattggccatagcacccagtttcatgtatttgaatcgacaagacagctccctcgattctccatgtatgcgctgaccagcctggaccctgccagtgagccaatcagttatgttaactttaccattgcagaacgggcacagagggttgttgtatggctcggtcagaactttctgttaccagaagacactcacattcagaatgctccatttcaagtgtgtttcacatctttacggaatggcggccacctgcatataaaaataaaacttagtggagagatcactataaatactgatgatattgatttggctggtgatatcatccagtcaatggcatcattttttgctattgaagaccttcaagtagaagcggattttcctgtctattttgaggaattacgaaaggtgctagttaaggtggatgaatatcattcagtgcatcagaagctcagtgctgatatggctgatcattctaatttgatccgaagtttgctggtcggagctgaggatgctcgtctgatgagggacatgaaaacaatgaagagtcgttatatggaactctatgaccttaatagagacttgctaaatggatataaaattcgctgtaacaatcacacagagctgttgggaaacctcaaagcagtaaatcaagcaattcaaag

SEQ ID NO: 2084 - DNA, 766 bp, Homo sapiens
  source 1..766: mol_type = unassigned DNA; mol_type = unassigned DNA
ggctctgtcttttgaagctgaatagcaatattatttaaaattgatattagttcagtgttttggtgactgagtaggaaatgggtggggtgttttgcaggctgaattggccagtccactgaacgaggctgatgggcatcggggcataatcccagccaataccaggctccacaccacgctctcagtcagcctggggaatgagacccaaactgctcatacagaattacgcatttccacttctaatggtgaaagccacgtggtacatcccagcattcacaacctctccagttccatctgcatccctattgtgcctcccaaagatgtccctgtggatctgcacttgaaggcattcgtgggttacagaagcagcacccagtttcatgtatttgaatcgacaagacagctccctcgattctccatgtatgcgctgaccagcctggaccctgccagtgagccaatcagttatgttaactttaccattgcagaacgggcacagagggttgttgtatggctcggtcagaactttctgttaccagaagacactcacattcagaatgctccatttcaagtgtgtttcacatctttacggaatggcggccacctgcatataaaaataaaacttagtggagagatcactataaatactgatgatattgatttggctggtgatatcatccagtcaatggcatcattttttgctattgaagaccttcaagtagaagcggattttcctgtctattttgaggaattacgaaaggtgctagttaag

SEQ ID NO: 2085 - DNA, 588 bp, Homo sapiens
  source 1..588: mol_type = unassigned DNA; mol_type = unassigned DNA
caacctctccagttccatctgcatccctattgtgcctcccaaagatgtccctgtggatctgcacttgaaggcattcgtgggttacagaagcagcacccagtttcatgtatttgaatcgacaagacagctccctcgattctccatgtatgcgctgaccagcctggaccctgccagtgagccaatcagttatgttaactttaccattgcagaacgggcacagaggcagtaaaactagaaagaaggagaactcttccctcaagaatggctgtaccttcatatctagaggcacattaaaaaaaagaacgtctgtaccttaaaaatggaggtcatttcattgtgttcattttcaaggttgttgtatggctcggtcagaactttctgttaccagaagacactcacattcagaatgctccatttcaagtgtgtttcacatctttacggaatggcggccacctgcatataaaaataaaacttagtggagagatcactataaatactgatgatattgatttggctggtgatatcatccagtcaatggcatcattttttgctattgaagaccttcaagtagaagcggattttcctgtc

SEQ ID NO: 2086 - DNA, 350 bp, Homo sapiens
  source 1..350: mol_type = unassigned DNA; mol_type = unassigned DNA
cattgattggccatagcacccagtttcatgtatttgaatcgacaagacagctccctcgattctccatgtatgcgctgaccagcctggaccctgccagtgagccaatcagttatgttaactttaccattgcagaacgggcacagaggtaaaactagaaagaaggagaactcttccctcaagaatggctgtaccttcatatctagaggcacattaaaaaaaagaacgtctgtaccttaaaaatggaggtcatttcattgtgttcattttcaaggttgttgtatggctcggtcagaactttctgttaccagaagacactcacattcagaatgctccatttcaagtgtgtttca

SEQ ID NO: 2087 - DNA, 299 bp, Homo sapiens
  source 1..299: mol_type = unassigned DNA; mol_type = unassigned DNA
aacctctccagttccatctgcatccctattgtgcctcccaaagatgtccctgtggatctgcacttgaaggcattcgtgggttacagaagcagcacccagtttcatgtatttgaatcgacaagacagctccctcgattctccatgtatgcgctgaccagcctggaccctgccagtgagccaatcagttatgttaactttaccattgcagaacgggcacagagggtgagtatctcgcttttctctttcaatgcttttacacagtagaatcctttagatgttatttcatagaaagggaaaat

SEQ ID NO: 2088 - DNA, 445 bp, Homo sapiens
  source 1..445: mol_type = unassigned DNA; mol_type = unassigned DNA
caccacgcccagctaattttttgtatttttagtagagatagggtttcaccgtgttagccaagatggtctcgacctcctgacctcgtgatctgcccacctcagcttcccaaagttggagttgttcttaaactgtttttactcttccctgcagacaccatcatccgagcagtattgatttttgcagaaggaatttttacaggtgaaagccacgtggtacatcccagcattcacaacctctccagttccatctgcatccctattgtgcctcccaaagatgtccctgtggatctgcacttgaaggcattcgtgggttacagaagcagcacccagtttcatgtatttgaatcgacaagacagctccctcgattctccatgtatgcgctgaccagcctggaccctgccagtgagccaatcagttatgttaactttaccattgcagaacggg

SEQ ID NO: 2089 - DNA, 865 bp, Homo sapiens
  source 1..865: mol_type = unassigned DNA; mol_type = unassigned DNA
gatgagattgtggcagaaatgacagaaacagagatagtcacctctctttgtcccatgtatggcagtcgatttggttatgccctttccaatggcacagttggagtttatgacaaaacatcccgatactggagaattaaatcgaaaaatcatgccatgagcattcatgcttttgaccttaattctgatggagtgaatgaactgataactggttggtccaatgggaaggttgatgctcgaagtgaccgaactggggaggtcatctttaaggacaatttttcttctgcaattgccggtgtggtagagggagattaccggatggatggccacatacatccggggctacctgcctggcacggctgagatgaggggcaacctcatggacaccagtgcagagcaggacctgatccgagagctgagtcagaagaagcagaatctgttgctggaactccgtaactatgaggaaaatgccaaggctgaattggccagtccactgaacgaggctgatgggcatcggggcataatcccagccaataccaggctccacaccacgctctcagtcagcctggggaatgagacccaaactgctcatacagaattacgcatttccacttctaatgacaccatcatccgagcagtattgatttttgcagaaggaatttttacaggtgaaagccacgtggtacatcccagcattcacaacctctccagttccatctgcatccctattgtgcctcccaaagatgtccctgtggatctgcacttgaaggcattcgtgggttacagaagcagcacccagtttcatgtatttgaatcgacaagacagctccctcgattctccatgtatgcgctgaccagcctggaccct

SEQ ID NO: 2090 - DNA, 598 bp, Homo sapiens
  source 1..598: mol_type = unassigned DNA; mol_type = unassigned DNA
ttgaatttgatgtaacaagggaatttgtttgcttactttaaaagaacaatacttcaaaaatgttaaagtcatgatgggatacagtggaccatacccatagaaagatgcaagggtattttcccacagggccagatagagcaagggagcactaatgaggtgagttctctgaattctaaagaatcagattactataataataataatatgctggaggctctgtcttttgaagctgaatagcaatattatttaaaattgatattagttcagtgttttggtgactgagtaggaaatgggtggggtgttttgcaggctgaattggccagtccactgaacgaggctgatgggcatcggggcataatcccagccaataccaggctccacaccacgctctcagtcagcctggggaatgagacccaaactgctcatacagaattacgcatttccacttctaatgacaccatcatccgagcagtattgatttttgcagaaggaatttttacaggtgaaagccacgtggtacatcccagcattcacaacctctccagttccatctgcatccctattgtgcctcccaaagatgtccctgtggatctgcact

SEQ ID NO: 2091 - DNA, 1525 bp, Homo sapiens
  source 1..1525: mol_type = unassigned DNA; mol_type = unassigned DNA
gctgtttcgcgtccggcctgaggcggctggggccgcgcaggtagtgtccctgcacttcttgcccgggcgcgtgaggccagctccgctgcgcttgtctccagcttccagccctcctcccctaagccgccgccatcatgctgctgcctgtgttcaccctgaaactgcgccacaaaatcagcccccgaatggtggccatagggcgctacgacgggactcacccgtgcctggcggccgccacccaaacgggcaaggtttttattcataatcctcatacacggaaccagcatgtcagtgcatccagggtcttccagagccccctggaatctgatgtttctcttctcagcattaaccaggcagtcagctgtctgactgcaggcgtattgaaccctgagcttggctatgatgcccttttagtggggacacagactaatcttttggcttatgatgtctacaataattcggatttgttctacagagaggtagcagatggggcaaatgcaattgtgctggggacattgggagacatttcttcccctcttgcgattattggtggcaattgtgctctgcaaggtttcaatcatgaaggaagtgatctcttttggacggttactggagacaatgttaattccttggccttgtgtgactttgatggtgatggaaagaaagagcttcttgttggatctgaggattttgatatccgagtttttaaggaagatgagattgtggcagaaatgacagaaacagagatagtcacctctctttgtcccatgtatggcagtcgatttggttatgccctttccaatggcacagttggagtttatgacaaaacatcccgatactggagaattaaatcgaaaaatcatgccatgagcattcatgcttttgaccttaattctgatggagtgaatgaactgataactggttggtccaatgggaaggttgatgctcgaagtgaccgaactggggaggtcatctttaaggacaatttttcttctgcaattgccggtgtggtagagggagattaccggatggatggccacatacagttaatctgctgctcagtggatggggaaagtaaattgggatgagaaaaatccttaaaaagtcacgttttccatttgattgggtcaaaatatcaggaaatttcacctgaagtatttgtaccgagatcctgtagttctaataaattcaccaaagttggggagaacttaggtttttgtttttaagagcaggtaattgatgacctaaaagtatacctggttatacttgcggttttttccttctgttcagtccggggctacctgcctggcacggctgagatgaggggcaacctcatggacaccagtgcagagcaggacctgatccgagagctgagtcagaagaagcagaatctgttgctggaactccgtaactatgaggaaaatgccaaggctgaattggccagtccactgaacgaggctgatgggcatcggggcataatcccagccaataccaggctccacaccacgctctcagtcagcctggg

SEQ ID NO: 2092 - DNA, 845 bp, Homo sapiens
  source 1..845: mol_type = unassigned DNA; mol_type = unassigned DNA
gatggggcaaatgcaattgtgctggggacattgggagacatttcttcccctcttgcgattattggtggcaattgtgctctgcaaggtttcaatcatgaaggaagtgatctcttttggacggttactggagacaatgttaattccttggccttgtgtgactttgatggtgatggaaagaaagagcttcttgttggatctgaggattttgatatccgagtttttaaggaagatgagattgtggcagaaatgacagaaacagagatagtcacctctctttgtcccatgtatggcagtcgatttggttatgccctttccaatggcacagttggagtttatgacaaaacatcccgatactggagaattaaatcgaaaaatcatgccatgagcattcatgcttttgaccttaattctgatggagtgaatgaactgataactggttggtccaatgggaaggttgatgctcgaagtgaccgaactggggaggtcatctttaaggacaatttttcttctgcaattgccggtgtggtagagggagattaccggatggatggccacatacagttaatctgctgctcagtggatggggaaatccggggctacctgcctggcacggctgagatgaggggcaacctcatggacaccagtgcagagcaggacctgatccgagagctgagtcagaagaagcagaatctgttgctggaactccgtaactatgaggaaaatgccaagaacaatacttcaaaaatgttaaagtcatgatgggatacagtggaccatacccatagaaagatgcaagggtattttcccacagggccagatagagcaagggagcactaatgaggtga

SEQ ID NO: 2093 - DNA, 473 bp, Homo sapiens
  source 1..473: mol_type = unassigned DNA; mol_type = unassigned DNA
cagttggagtttatgacaaaacatcccgatactggagaattaaatcgaaaaatcatgccatgagcattcatgcttttgaccttaattctgatggagtgaatgaactgataactggttggtccaatgggaaggttgatgctcgaagtgaccgaactggggaggtcatctttaaggacaatttttcttctgcaattgccggtgtggtagagggagattaccggatggatggccacatacatccggggctacctgcctggcacggctgagatgaggggcaacctcatggacaccagtgcagagcaggacctgatccgagagctgagtcagaagaagcagaatctgttgctggaactccgtaactatgaggaaaatgccaaggtaggtgtaggtcctaatgtgaccaggtaatggaggctgaaatgttgagactgaccgggaggatcagcaaatatggaagaatgagagtgtcattg

SEQ ID NO: 2094 - DNA, 775 bp, Homo sapiens
  source 1..775: mol_type = unassigned DNA; mol_type = unassigned DNA
cagaaacagaggtaagaagctccacctcgaactatggtaaccttgagcaagatagatcagtactgtcagatgaaacatcaagtgagagtgctggggcatctccaaacccaggtggttttaggataaaagcttggggagggggtcagacagagctgtatgttatggtaagaaaagcaataaaaatcctaattaagatatattttgaaaagactgattaaatagagaaaaattattgcatatagttgaatacataaaggcatttcttttaatgagttaatacatgcaaataataataatggcaatcatttattatgtacctattgtatgccaggtagtgctctaagtactttatatgaagtaacatattgaatccttacaacaaccctaataggaagataaattattattatttctatagatgaggaaaatggtgttctggttttttgtttgtttgtttgtttgttttgaggcagagttttactccatcacccaggctggagtgcggtggtgcgatctcggcttactgcaagctccacctcccaagttcaagtgattcgcatgcctcagcctcctgagtagctgggactacaggcacgcaccaccacgcctggatagtcacctctctttgtcccatgtatggcagtcgatttggttatgccctttccaatggcacagttggagtttatgacaaaacatcccgatactggagaattaaatcgaaaaatcatgccatgagcattcatgcttttgaccttaattctgatggagtgaatga

SEQ ID NO: 2095 - DNA, 564 bp, Homo sapiens
  source 1..564: mol_type = unassigned DNA; mol_type = unassigned DNA
actgggggaaagtctgactcctgagatccttgttgctcttgacaaaaattgcaaactctttccattccggtttttattcataatcctcatacacggaaccagcatgtcagtgcatccagggtcttccagagccccctggaatctgatgtttctcttctcagcattaaccaggcagtcagctgtctgactgcaggcgtattgaaccctgagcttggctatgatgcccttttagtggggacacagactaatcttttggcttatgatgtctacaataattcggatttgttctacagagaggtagcagatggggcaaatgcaattgtgctggggacattgggagacatttcttcccctcttgcgattattggtggcaattgtgctctgcaaggtttcaatcatgaaggaagtgatctcttttggacggttactggagacaatgttaattccttggccttgtgtgactttgatggtgatggaaagaaagagcttcttgttggatctgaggattttgatatccgagtttttaaggaagatgagattgtggcagaaatgacagaaacagag

SEQ ID NO: 2096 - DNA, 578 bp, Homo sapiens
  source 1..578: mol_type = unassigned DNA; mol_type = unassigned DNA
ggcgagcaccttgtggctccatcctgcagaggacagtggggtcttagaggaagagcttttctgagaagttgacgttttcttgtcatcaggcacttggagtcaggcgaggtttttattcataatcctcatacacggaaccagcatgtcagtgcatccagggtcttccagagccccctggaatctgatgtttctcttctcagcattaaccaggcagtcagctgtctgactgcaggcgtattgaaccctgagcttggctatgatgcccttttagtggggacacagactaatcttttggcttatgatgtctacaataattcggatttgttctacagagaggtagcagatggggcaaatgcaattgtgctggggacattgggagacatttcttcccctcttgcgattattggtggcaattgtgctctgcaaggtttcaatcatgaaggaagtgatctcttttggacggttactggagacaatgttaattccttggccttgtgtgactttgatggtgatggaaagaaagagcttcttgttggatctgaggattttgatatccgagtttttaaggaagatgagat

SEQ ID NO: 2097 - DNA, 574 bp, Homo sapiens
  source 1..574: mol_type = unassigned DNA; mol_type = unassigned DNA
agcggacgggtctgcgccgccgcaggaggagcaggcggtacctggacgggttcgtcccgggctgtttcgcgtccggcctgaggcggctggggccgcgcaggtttttattcataatcctcatacacggaaccagcatgtcagtgcatccagggtcttccagagccccctggaatctgatgtttctcttctcagcattaaccaggcagtcagctgtctgactgcaggcgtattgaaccctgagcttggctatgatgcccttttagtggggacacagactaatcttttggcttatgatgtctacaataattcggatttgttctacagagaggtagcagatggggcaaatgcaattgtgctggggacattgggagacatttcttcccctcttgcgattattggtggcaattgtgctctgcaaggtttcaatcatgaaggaagtgatctcttttggacggtatgaagaagaaaacattctttttggttactggagacaatgttaattccttggccttgtgtgactttgatggtgatggaaagaaagagcttcttgttggatctgaggattttgatatcc

SEQ ID NO: 2098 - DNA, 4064 bp, Homo sapiens
  source 1..4064: mol_type = unassigned DNA; mol_type = unassigned DNA
tttgcctgccaggagtgggtgagggaggagcagccgccgccttcacagacacctggtagtgtcaggagagggcatgcactgccctggtgaggctcctctggctgcccccaggcccacacccaaggatccctgcctcagaaacgtgctggccaaagcgctctatgacaatgtggccgagtccccggatgagctctccttccgcaagggtgacatcatgacggtgctggagcaggacacgcagggcctggacggctggtggctctgctcgctgcatgggcgccagggcatcgtgcctgggaaccgcctcaagatcttggtgggcatgtatgataagaagccagcagggcctggccccggccctcccgccaccccggcccagcctcagcctggcctccatgccccagcgcctccggcctcccagtacacgcccatgctccccaacacctaccagccccagccagacagcgtctacctggtgcccactcccagcaaggctcagcaaggcctctaccaagtcccgggtcccagccctcagttccagtctcccccagccaagcagacatccaccttctcgaagcagacaccccatcacccgtttcccagcccggccacagacctgtaccaggtgcccccagggcctggaggccctgcccaggatatttaccaggtgccaccttctgccgggatggggcatgacatctaccaggtccccccgtccatggacacacgcagctgggagggcacgaagcccccggcaaaggtggtggtgcccacccgcgtggggcagggctatgtatacgaggccgcccagccggagcaggacgagtacgacatcccgcgacacctgctggccccggggccacaggacatctatgatgtgcccccggttcgggggctgcttcccagccagtatggccaggaggtgtatgacacaccccccatggctgtcaagggtcccaatggccgagacccgttgctggaggtgtatgacgtgccccccagtgtggagaagggcctgccaccgtccaaccaccacgcagtctacgacgttcctccatcggtgagcaaggatgtgcccgatggcccactgctgcgtgaggagacctacgatgtgccccccgccttcgccaaggccaagccctttgacccggcccgcaccccactggtactggctgcgccccctccagactccccgccggccgaggacgtgtatgacgtgccgcccccggctcctgacctctacgacgtgccccctggcttgcggcggcctggcccgggcaccctgtacgatgtgccccgtgaacgggtgcttcctcctgaggtggctgatggtggcgtggtcgacagtggtgtgtatgcggtgcctcccccagctgaacgtgaagccccggcagagggcaagcgcctgtcggcctccagcaccggcagcacacgcagcagccagtctgcgtcctccttggaggtggcagggccgggccgggaacccctggagctggaagttgctgtggaggccctggcacggctgcagcagggtgtgagcgccaccgttgcccaccttctggacctggcaggcagcgccggtgcgactgggagctggcgtagcccctctgagccacaggagccgctggtgcaggacctgcaggctgctgtggccgctgtccagagtgccgtccacgagctgttggagtttgcccgcagcgcggtgggcaatgctgcccacacatctgaccgtgccctgcatgccaagcttagccggcagctgcagaagatggaggacgtgcaccagacgctggtggcacatggtcaggccctcgacgctggccggggaggctctggagccacccttgaggacctggaccggctggtggcctgctcgcgggctgtgcccgaggacgccaagcagctggcctccttcctgcacggcaatgcctcactgctcttcagacggaccaaggccactgccccggggcctgaggggggtggcaccctgcaccccaaccccactgacaagaccagcagcatccagtcacgacccctgccctcaccccctaagttcacctcccaggactcgccagatgggcagtacgagaacagcgaggggggctggatggaggactatgactacgtccacctacaggggaaggaggagtttgagaagacccagaaggagctgctggaaaagggcagcatcacgcggcagggcaagagccagctggagttgcagcagctgaagcagtttgaacgactggaacaggaggtgtcacggcccatagaccacgacctggccaactggacgccagcccaacccctggccccggggcgaacaggcggcctggggccctcggaccggcagctgctgctcttctacctggagcagtgtgaggccaacctgaccacactgaccaacgccgtggacgccttctttaccgccgtggccaccaaccagccgcccaagatctttgtggcgcacagcaagttcgtcatcctcagcgcccacaagctggtgttcatcggggacacactgtcacggcaggccaaggctgctgacgtgcgcagccaggtgacccactacagcaacctgctgtgcgacctcctgcgcggcatcgtggccaccaccaaggccgctgccttgcagtacccatcgccttccgcggcccaggacatggtggagagggtcaaggagctgggccacagcacccagcagttccgccgcgtcctaggccagctggcagccgcctgagggtggtgaccccaggagggaggcaggggaggggtgcggcggtcccagctccctggctcccatgtcaagagtcgctgtgccacaggcttagggacaggaccccagctctgcgtcggtcctggtgccctggatgcccaggaatctgtatatatttatggccgggcagggtgtggggccatgcctcctcaggagccgaagcccaggggccggccagtggccttccccagcatgcaccacgggcccgggttgggtcaccagacggggctggagtgtgagggtcctgcagcctgcaggacctcgtgccaccccgagggctgagcctggtcccacgagggtgccgtgtcccctgacagggccagtgcagtttggtgtgtcctccgccttaccaggagaagaacctgaagaactatttttcgttattggttttccaatcatttgactaagagtctccatttaaataaagtttttaaaaggaagagcagctgcctgagggtggcagatgagagcagcccggggtgggtgacggttctggggaaggcacccgggggcaagggccatgcgtggcatctcccgggagggcagaggaggagtgggtctctctagaagaaaaccaaggaacgccgaggctgggtgtctcctggaggcggggtgaggcctgcagctggccacaaggccctgggagccagggcagagcctgggcccaagaaagggggcagtttcagagctgcagggtctggggcccagaaagcacagcctgggcatggcccctgcaaccctagggagctgccacagtgagcacctgcccatgcccacagctggcatctggagtgagggcagattggggcaggaacagctgcacaaggggacgggttcctgtgagccgagggcaccgctgggggctgcatccagagctctgcttaaaagaatctcatcccagcctgcggaactcccgaagtgcacatggaattatacctggacctggcatctgagttgggagggaggggcttggagaagacccttgccctgggcaagtgtgtcccccttcgtggctcccccacccagcagcccgcagcccagatggaagcttcagggtgcttggaacccctggtgctgctcccagccctgaccgttctgcatatgaacatgggccttggtttccccatctgtatgaagaagggagtagggctgggtgattcgcaagccctcctgatcttacctctacagaggttgtccccgtgacagcatctgtccccccacctcagccacatcatgctcagcccacctgccttggtgaggacacagaggtaaaggtgtatgcagttgc

SEQ ID NO: 2099 - DNA, 3221 bp, Homo sapiens
  source 1..3221: mol_type = unassigned DNA; mol_type = unassigned DNA
ggccgaggcggcagctgcgcggcggcaccggggcggctgcggcgcgctcggagccccgagggcacgcggcccgggcagctcggtgtgcgcccccgcgagagccggggccccaggcccgccggacaccatgaaccacctgaacgtgctggccaaagcgctctatgacaatgtggccgagtccccggatgagctctccttccgcaagggtgacatcatgacggtgctggagcaggacacgcagggcctggacggctggtggctctgctcgctgcatgggcgccagggcatcgtgcctgggaaccgcctcaagatcttggtgggcatgtatgataagaagccagcagggcctggccccggccctcccgccaccccggcccagcctcagcctggcctccatgccccagcgcctccggcctcccagtacacgcccatgctccccaacacctaccagccccagccagacagcgtctacctggtgcccactcccagcaaggctcagcaaggcctctaccaagtcccgggtcccagccctcagttccagtctcccccagccaagcagacatccaccttctcgaagcagacaccccatcacccgtttcccagcccggccacagacctgtaccaggtgcccccagggcctggaggccctgcccaggatatttaccaggtgccaccttctgccgggatggggcatgacatctaccaggtccccccgtccatggacacacgcagctgggagggcacgaagcccccggcaaaggtggtggtgcccacccgcgtggggcagggctatgtatacgaggccgcccagccggagcaggacgagtacgacatcccgcgacacctgctggccccggggccacaggacatctatgatgtgcccccggttcgggggctgcttcccagccagtatggccaggaggtgtatgacacaccccccatggctgtcaagggtcccaatggccgagacccgttgctggaggtgtatgacgtgccccccagtgtggagaagggcctgccaccgtccaaccaccacgcagtctacgacgttcctccatcggtgagcaaggatgtgcccgatggcccactgctgcgtgaggagacctacgatgtgccccccgccttcgccaaggccaagccctttgacccggcccgcaccccactggtactggctgcgccccctccagactccccgccggccgaggacgtgtatgacgtgccgcccccggctcctgacctctacgacgtgccccctggcttgcggcggcctggcccgggcaccctgtacgatgtgccccgtgaacgggtgcttcctcctgaggtggctgatggtggcgtggtcgacagtggtgtgtatgcggtgcctcccccagctgaacgtgaagccccggcagagggcaagcgcctgtcggcctccagcaccggcagcacacgcagcagccagtctgcgtcctccttggaggtggcagggccgggccgggaacccctggagctggaagttgctgtggaggccctggcacggctgcagcagggtgtgagcgccaccgttgcccaccttctggacctggcaggcagcgccggtgcgactgggagctggcgtagcccctctgagccacaggagccgctggtgcaggacctgcaggctgctgtggccgctgtccagagtgccgtccacgagctgttggagtttgcccgcagcgcggtgggcaatgctgcccacacatctgaccgtgccctgcatgccaagcttagccggcagctgcagaagatggaggacgtgcaccagacgctggtggcacatggtcaggccctcgacgctggccggggaggctctggagccacccttgaggacctggaccggctggtggcctgctcgcgggctgtgcccgaggacgccaagcagctggcctccttcctgcacggcaatgcctcactgctcttcagacggaccaaggccactgccccggggcctgaggggggtggcaccctgcaccccaaccccactgacaagaccagcagcatccagtcacgacccctgccctcaccccctaagttcacctcccaggactcgccagatgggcagtacgagaacagcgaggggggctggatggaggactatgactacgtccacctacaggggaaggaggagtttgagaagacccagaaggagctgctggaaaagggcagcatcacgcggcagggcaagagccagctggagttgcagcagctgaagcagtttgaacgactggaacaggaggtgtcacggcccatagaccacgacctggccaactggacgccagcccaacccctggccccggggcgaacaggcggcctggggccctcggaccggcagctgctgctcttctacctggagcagtgtgaggccaacctgaccacactgaccaacgccgtggacgccttctttaccgccgtggccaccaaccagccgcccaagatctttgtggcgcacagcaagttcgtcatcctcagcgcccacaagctggtgttcatcggggacacactgtcacggcaggccaaggctgctgacgtgcgcagccaggtgacccactacagcaacctgctgtgcgacctcctgcgcggcatcgtggccaccaccaaggccgctgccttgcagtacccatcgccttccgcggcccaggacatggtggagagggtcaaggagctgggccacagcacccagcagttccgccgcgtcctaggccagctggcagccgcctgagggtggtgaccccaggagggaggcaggggaggggtgcggcggtcccagctccctggctcccatgtcaagagtcgctgtgccacaggcttagggacaggaccccagctctgcgtcggtcctggtgccctggatgcccaggaatctgtatatatttatggccgggcagggtgtggggccatgcctcctcaggagccgaagcccaggggccggccagtggccttccccagcatgcaccacgggcccgggttgggtcaccagacggggctggagtgtgagggtcctgcagcctgcaggacctcgtgccaccccgagggctgagcctggtcccacgagggtgccgtgtcccctgacagggccagtgcagtttggtgtgtcctccgccttaccaggagaagaacctgaagaactatttttcgttattggttttccaatcatttgactaagagtctccatttaaataaagtttttaaaaggaagagca

SEQ ID NO: 2100 - DNA, 4659 bp, Homo sapiens
  source 1..4659: mol_type = unassigned DNA; mol_type = unassigned DNA
actttcctgggaagttttcctctcgctgcggaacccccggggccctgactggccgcttcctccccgctggccgtagggagttttctgtccgacaccccctcttcctggccgggcagcctggcttcggcagacccccgggccatgtttccacacttgggcactggcatctctgagcatctcagtctcacctcctgagaacagcaagtgatcctggctaccccgggtaaccaggcctcaggtgcaggccccacatgacagatggacagactgaagtgggaggtgggaggcggacaccccggcgtcctgccaggaagggacaccatctgcacctggcgagctgtggcctccagccatcgtttccctgcctagttaggggcttttccctccagagccctgtccactctggccttgtttctggaactgctcctcacccggaggaccccatcctttccgtgaagcaggcagtgggggctttctggcaagtggcctcttcattaactatcccagagtgagtgcagatgaccagagggaagctggccaagtgcaaagcattgttattgtggaattaaagagcccgctcctgctcgcctccagaagtggtaatgtatttacagatgaaaaaatgagggcttccagactgtgctgatgtgagccccgccatccgttctggttcagagcataatcgtctcgtcttcagaaagaaggaagacagaacatgcctgccaagcccttcctctcttctgttctgctctcctggaaagttctggacttctctggcccagggcctcaggggactggccagccctgctcctgtgggcactgggcagagggacaaggcggaccacctgagcctgctggagggccggtatcccagggcagtagtgattagggaatgtcactctggccacatcccagcctgggcgggcctctatggggaggtccccgtttgatttggtttggttgtccacagtcagagccaagctctgggcatggagtctgggatggcaccctgaccccttgccttacaggactttgggcagccttctttggcactgtgcctcatctgtaacaagagaggaacagcgggctgggtaggacttggacagataggcactgtcgtggggacctgcagcctggccacaccatcacgggctctgagtcatctcctaccctctcccttgtagtcacagcccaggagaattctgctgggggtgggcagaggtctttgccatctgccccctacgtggctggctggcagatcaccgtggctctctctcctgggaccttgggcagtgtgtgaggtggtggggccaagaggagaattcatttttggaacagtcttgaagtgttcggaaaattgctttcatgtgctgaggaggccctgcggaggcttccagactgagctgcctgctcaagccctgcccttggaacccagagtggcgactgctcagggacacgtctgggttttaagcacacccatccatttgggcagtcttttcctagatgggctgacgcagcaggcactttggcccacagaaattataagatgcttcagaaggggatgggaggggaagcaggaacgtgctggccaaagcgctctatgacaatgtggccgagtccccggatgagctctccttccgcaagggtgacatcatgacggtgctggagcaggacacgcagggcctggacggctggtggctctgctcgctgcatgggcgccagggcatcgtgcctgggaaccgcctcaagatcttggtgggcatgtatgataagaagccagcagggcctggccccggccctcccgccaccccggcccagcctcagcctggcctccatgccccagcgcctccggcctcccagtacacgcccatgctccccaacacctaccagccccagccagacagcgtctacctggtgcccactcccagcaaggctcagcaaggcctctaccaagtcccgggtcccagccctcagttccagtctcccccagccaagcagacatccaccttctcgaagcagacaccccatcacccgtttcccagcccggccacagacctgtaccaggtgcccccagggcctggaggccctgcccaggatatttaccaggtgccaccttctgccgggatggggcatgacatctaccaggtccccccgtccatggacacacgcagctgggagggcacgaagcccccggcaaaggtggtggtgcccacccgcgtggggcagggctatgtatacgaggccgcccagccggagcaggacgagtacgacatcccgcgacacctgctggccccggggccacaggacatctatgatgtgcccccggttcgggggctgcttcccagccagtatggccaggaggtgtatgacacaccccccatggctgtcaagggtcccaatggccgagacccgttgctggaggtgtatgacgtgccccccagtgtggagaagggcctgccaccgtccaaccaccacgcagtctacgacgttcctccatcggtgagcaaggatgtgcccgatggcccactgctgcgtgaggagacctacgatgtgccccccgccttcgccaaggccaagccctttgacccggcccgcaccccactggtactggctgcgccccctccagactccccgccggccgaggacgtgtatgacgtgccgcccccggctcctgacctctacgacgtgccccctggcttgcggcggcctggcccgggcaccctgtacgatgtgccccgtgaacgggtgcttcctcctgaggtggctgatggtggcgtggtcgacagtggtgtgtatgcggtgcctcccccagctgaacgtgaagccccggcagagggcaagcgcctgtcggcctccagcaccggcagcacacgcagcagccagtctgcgtcctccttggaggtggcagggccgggccgggaacccctggagctggaagttgctgtggaggccctggcacggctgcagcagggtgtgagcgccaccgttgcccaccttctggacctggcaggcagcgccggtgcgactgggagctggcgtagcccctctgagccacaggagccgctggtgcaggacctgcaggctgctgtggccgctgtccagagtgccgtccacgagctgttggagtttgcccgcagcgcggtgggcaatgctgcccacacatctgaccgtgccctgcatgccaagcttagccggcagctgcagaagatggaggacgtgcaccagacgctggtggcacatggtcaggccctcgacgctggccggggaggctctggagccacccttgaggacctggaccggctggtggcctgctcgcgggctgtgcccgaggacgccaagcagctggcctccttcctgcacggcaatgcctcactgctcttcagacggaccaaggccactgccccggggcctgaggggggtggcaccctgcaccccaaccccactgacaagaccagcagcatccagtcacgacccctgccctcaccccctaagttcacctcccaggactcgccagatgggcagtacgagaacagcgaggggggctggatggaggactatgactacgtccacctacaggggaaggaggagtttgagaagacccagaaggagctgctggaaaagggcagcatcacgcggcagggcaagagccagctggagttgcagcagctgaagcagtttgaacgactggaacaggaggtgtcacggcccatagaccacgacctggccaactggacgccagcccaacccctggccccggggcgaacaggcggcctggggccctcggaccggcagctgctgctcttctacctggagcagtgtgaggccaacctgaccacactgaccaacgccgtggacgccttctttaccgccgtggccaccaaccagccgcccaagatctttgtggcgcacagcaagttcgtcatcctcagcgcccacaagctggtgttcatcggggacacactgtcacggcaggccaaggctgctgacgtgcgcagccaggtgacccactacagcaacctgctgtgcgacctcctgcgcggcatcgtggccaccaccaaggccgctgccttgcagtacccatcgccttccgcggcccaggacatggtggagagggtcaaggagctgggccacagcacccagcagttccgccgcgtcctaggccagctggcagccgcctgagggtggtgaccccaggagggaggcaggggaggggtgcggcggtcccagctccctggctcccatgtcaagagtcgctgtgccacaggcttagggacaggaccccagctctgcgtcggtcctggtgccctggatgcccaggaatctgtatatatttatggccgggcagggtgtggggccatgcctcctcaggagccgaagcccaggggccggccagtggccttccccagcatgcaccacgggcccgggttgggtcaccagacggggctggagtgtgagggtcctgcagcctgcaggacctcgtgccaccccgagggctgagcctggtcccacgagggtgccgtgtcccctgacagggccagtgcagtttggtgtgtcctccgccttaccaggagaagaacctgaagaactatttttcgttattggttttccaatcatttgactaagagtctccatttaaataaagtttttaaaaggaagagc

SEQ ID NO: 2101 - DNA, 2692 bp, Homo sapiens
  source 1..2692: mol_type = unassigned DNA; mol_type = unassigned DNA
cacagagctcagtcgcacacctgctgcagagtagaaagttcacacgtggtggtggtgctgggtggtaacagtgatggtggtgatgaggtggcagcggcggtgatggtgatgaaatcatgatatgatggtggtggcagtggcagtatcacagctaacctttcagtgagtgtctgcagtgacacaattatgtgaattaacacatgcaattctttgggaggaagctctcccaccttcaggcacaggggtggtcacctggctccagagccggctcgtcccagagctgtcatggataggaattgtgaaggatgtgtgtgctagggctgcgagtgtgtgtgcgcgtgtgtgtgcctgtgtgcgtgcctctgcatttgtatgtgtgcctgtgtgtgtgcgcgtgcctctgtgtgtgtgtctgtatgtgtgtacgtgtgtgtgtgtgtgtggctgggtgctgcccccagtccctggggtgggcagatggacagatggacagtcttgaccaccgcttgtcccccaggtctacgacgttcctccatcggtgagcaaggatgtgcccgatggcccactgctgcgtgaggagacctacgatgtgccccccgccttcgccaaggccaagccctttgacccggcccgcaccccactggtactggctgcgccccctccagactccccgccggccgaggacgtgtatgacgtgccgcccccggctcctgacctctacgacgtgccccctggcttgcggcggcctggcccgggcaccctgtacgatgtgccccgtgaacgggtgcttcctcctgaggtggctgatggtggcgtggtcgacagtggtgtgtatgcggtgcctcccccagctgaacgtgaagccccggcagagggcaagcgcctgtcggcctccagcaccggcagcacacgcagcagccagtctgcgtcctccttggaggtggcagggccgggccgggaacccctggagctggaagttgctgtggaggccctggcacggctgcagcagggtgtgagcgccaccgttgcccaccttctggacctggcaggcagcgccggtgcgactgggagctggcgtagcccctctgagccacaggagccgctggtgcaggacctgcaggctgctgtggccgctgtccagagtgccgtccacgagctgttggagtttgcccgcagcgcggtgggcaatgctgcccacacatctgaccgtgccctgcatgccaagcttagccggcagctgcagaagatggaggacgtgcaccagacgctggtggcacatggtcaggccctcgacgctggccggggaggctctggagccacccttgaggacctggaccggctggtggcctgctcgcgggctgtgcccgaggacgccaagcagctggcctccttcctgcacggcaatgcctcactgctcttcagacggaccaaggccactgccccggggcctgaggggggtggcaccctgcaccccaaccccactgacaagaccagcagcatccagtcacgacccctgccctcaccccctaagttcacctcccaggactcgccagatgggcagtacgagaacagcgaggggggctggatggaggactatgactacgtccacctacaggggaaggaggagtttgagaagacccagaaggagctgctggaaaagggcagcatcacgcggcagggcaagagccagctggagttgcagcagctgaagcagtttgaacgactggaacaggaggtgtcacggcccatagaccacgacctggccaactggacgccagcccaacccctggccccggggcgaacaggcggcctggggccctcggaccggcagctgctgctcttctacctggagcagtgtgaggccaacctgaccacactgaccaacgccgtggacgccttctttaccgccgtggccaccaaccagccgcccaagatctttgtggcgcacagcaagttcgtcatcctcagcgcccacaagctggtgttcatcggggacacactgtcacggcaggccaaggctgctgacgtgcgcagccaggtgacccactacagcaacctgctgtgcgacctcctgcgcggcatcgtggccaccaccaaggccgctgccttgcagtacccatcgccttccgcggcccaggacatggtggagagggtcaaggagctgggccacagcacccagcagttccgccgcgtcctaggccagctggcagccgcctgagggtggtgaccccaggagggaggcaggggaggggtgcggcggtcccagctccctggctcccatgtcaagagtcgctgtgccacaggcttagggacaggaccccagctctgcgtcggtcctggtgccctggatgcccaggaatctgtatatatttatggccgggcagggtgtggggccatgcctcctcaggagccgaagcccaggggccggccagtggccttccccagcatgcaccacgggcccgggttgggtcaccagacggggctggagtgtgagggtcctgcagcctgcaggacctcgtgccaccccgagggctgagcctggtcccacgagggtgccgtgtcccctgacagggccagtgcagtttggtgtgtcctccgccttaccaggagaagaacctgaagaactatttttcgttattggttttccaatcatttgactaagagtctccatttaaataaagtttttaaaagg

SEQ ID NO: 2102 - DNA, 3024 bp, Homo sapiens
  source 1..3024: mol_type = unassigned DNA; mol_type = unassigned DNA
agccgggactctgctaccaggcgtgctggagacctagtgggcccagttctgctgcgctgcggggggctctgccaggcctgcggctgctggggggtgctggcgcctctgccacccccatgctcagcgcccccctcacagcaccctcagcaagcagggctggctgcctgcctgcattgggagggcctctaggggttcaggggcactgggcccgggggaggggctgctttggcgctgctgccctgggggatgtgcggggaggccctgagtcaaccctgtcccagacatcccctttgatgaaggaacaaaaggtctttcagtggagagagctgaacagggagcctggtggtggaggcgtgtgggcgcagtgtgcccgggggctggagaatcccaccagggaggccttgacctccccaaggcagggagaccttcagggaaggaggctgcctggcatggcccctacccgcttcaggctggtgctggtgaggggtcctgtggccctgggcaggccattgtgctgcctgcctcttcacccactgtgcgggccttggcttccctgggctctgggtcatggtggtggtgcccacccgcgtggggcagggctatgtatacgaggccgcccagccggagcaggacgagtacgacatcccgcgacacctgctggccccggggccacaggacatctatgatgtgcccccggttcgggggctgcttcccagccagtatggccaggaggtgtatgacacaccccccatggctgtcaagggtcccaatggccgagacccgttgctggaggtgtatgacgtgccccccagtgtggagaagggcctgccaccgtccaaccaccacgcagtctacgacgttcctccatcggtgagcaaggatgtgcccgatggcccactgctgcgtgaggagacctacgatgtgccccccgccttcgccaaggccaagccctttgacccggcccgcaccccactggtactggctgcgccccctccagactccccgccggccgaggacgtgtatgacgtgccgcccccggctcctgacctctacgacgtgccccctggcttgcggcggcctggcccgggcaccctgtacgatgtgccccgtgaacgggtgcttcctcctgaggtggctgatggtggcgtggtcgacagtggtgtgtatgcggtgcctcccccagctgaacgtgaagccccggcagagggcaagcgcctgtcggcctccagcaccggcagcacacgcagcagccagtctgcgtcctccttggaggtggcagggccgggccgggaacccctggagctggaagttgctgtggaggccctggcacggctgcagcagggtgtgagcgccaccgttgcccaccttctggacctggcaggcagcgccggtgcgactgggagctggcgtagcccctctgagccacaggagccgctggtgcaggacctgcaggctgctgtggccgctgtccagagtgccgtccacgagctgttggagtttgcccgcagcgcggtgggcaatgctgcccacacatctgaccgtgccctgcatgccaagcttagccggcagctgcagaagatggaggacgtgcaccagacgctggtggcacatggtcaggccctcgacgctggccggggaggctctggagccacccttgaggacctggaccggctggtggcctgctcgcgggctgtgcccgaggacgccaagcagctggcctccttcctgcacggcaatgcctcactgctcttcagacggaccaaggccactgccccggggcctgaggggggtggcaccctgcaccccaaccccactgacaagaccagcagcatccagtcacgacccctgccctcaccccctaagttcacctcccaggactcgccagatgggcagtacgagaacagcgaggggggctggatggaggactatgactacgtccacctacaggggaaggaggagtttgagaagacccagaaggagctgctggaaaagggcagcatcacgcggcagggcaagagccagctggagttgcagcagctgaagcagtttgaacgactggaacaggaggtgtcacggcccatagaccacgacctggccaactggacgccagcccaacccctggccccggggcgaacaggcggcctggggccctcggaccggcagctgctgctcttctacctggagcagtgtgaggccaacctgaccacactgaccaacgccgtggacgccttctttaccgccgtggccaccaaccagccgcccaagatctttgtggcgcacagcaagttcgtcatcctcagcgcccacaagctggtgttcatcggggacacactgtcacggcaggccaaggctgctgacgtgcgcagccaggtgacccactacagcaacctgctgtgcgacctcctgcgcggcatcgtggccaccaccaaggccgctgccttgcagtacccatcgccttccgcggcccaggacatggtggagagggtcaaggagctgggccacagcacccagcagttccgccgcgtcctaggccagctggcagccgcctgagggtggtgaccccaggagggaggcaggggaggggtgcggcggtcccagctccctggctcccatgtcaagagtcgctgtgccacaggcttagggacaggaccccagctctgcgtcggtcctggtgccctggatgcccaggaatctgtatatatttatggccgggcagggtgtggggccatgcctcctcaggagccgaagcccaggggccggccagtggccttccccagcatgcaccacgggcccgggttgggtcaccagacggggctggagtgtgagggtcctgcagcctgcaggacctcgtgccaccccgagggctgagcctggtcccacgagggtgccgtgtcccctgacagggccagtgcagtttggtgtgtcctccgccttaccaggagaagaacctgaagaactatttttcgttattggttttccaatcatttgactaagagtctccatttaaataaagtttttaaaagg

SEQ ID NO: 2103 - DNA, 2894 bp, Homo sapiens
  source 1..2894: mol_type = unassigned DNA; mol_type = unassigned DNA
aggagccggaaagcgccgggacccctcgcggggcctctgagcggcgcgggcggacccgagcccccagcccgctggcgccgctgcccgccaggccccgggggcggcggccaagatgtccgtgccttgccgctctcctaccccatgtcgctgaagcagatgagttggagcaggactcaggagggtactaggcccaggttttaggctgaacctaggaatgagtaatgagaggaggcagatcagctggaggaccagcccgagtccccagatgtcggcacaatgcaggggaagaacgtgctggccaaagcgctctatgacaatgtggccgagtccccggatgagctctccttccgcaagggtgacatcatgacggtgctggagcaggacacgcagggcctggacggctggtggctctgctcgctgcatgggcgccagggcatcgtgcctgggaaccgcctcaagatcttggtggtggtgcccacccgcgtggggcagggctatgtatacgaggccgcccagccggagcaggacgagtacgacatcccgcgacacctgctggccccggggccacaggacatctatgatgtgcccccggttcgggggctgcttcccagccagtatggccaggaggtgtatgacacaccccccatggctgtcaagggtcccaatggccgagacccgttgctggaggtgtatgacgtgccccccagtgtggagaagggcctgccaccgtccaaccaccacgcagtctacgacgttcctccatcggtgagcaaggatgtgcccgatggcccactgctgcgtgaggagacctacgatgtgccccccgccttcgccaaggccaagccctttgacccggcccgcaccccactggtactggctgcgccccctccagactccccgccggccgaggacgtgtatgacgtgccgcccccggctcctgacctctacgacgtgccccctggcttgcggcggcctggcccgggcaccctgtacgatgtgccccgtgaacgggtgcttcctcctgaggtggctgatggtggcgtggtcgacagtggtgtgtatgcggtgcctcccccagctgaacgtgaagccccggcagagggcaagcgcctgtcggcctccagcaccggcagcacacgcagcagccagtctgcgtcctccttggaggtggcagggccgggccgggaacccctggagctggaagttgctgtggaggccctggcacggctgcagcagggtgtgagcgccaccgttgcccaccttctggacctggcaggcagcgccggtgcgactgggagctggcgtagcccctctgagccacaggagccgctggtgcaggacctgcaggctgctgtggccgctgtccagagtgccgtccacgagctgttggagtttgcccgcagcgcggtgggcaatgctgcccacacatctgaccgtgccctgcatgccaagcttagccggcagctgcagaagatggaggacgtgcaccagacgctggtggcacatggtcaggccctcgacgctggccggggaggctctggagccacccttgaggacctggaccggctggtggcctgctcgcgggctgtgcccgaggacgccaagcagctggcctccttcctgcacggcaatgcctcactgctcttcagacggaccaaggccactgccccggggcctgaggggggtggcaccctgcaccccaaccccactgacaagaccagcagcatccagtcacgacccctgccctcaccccctaagttcacctcccaggactcgccagatgggcagtacgagaacagcgaggggggctggatggaggactatgactacgtccacctacaggggaaggaggagtttgagaagacccagaaggagctgctggaaaagggcagcatcacgcggcagggcaagagccagctggagttgcagcagctgaagcagtttgaacgactggaacaggaggtgtcacggcccatagaccacgacctggccaactggacgccagcccaacccctggccccggggcgaacaggcggcctggggccctcggaccggcagctgctgctcttctacctggagcagtgtgaggccaacctgaccacactgaccaacgccgtggacgccttctttaccgccgtggccaccaaccagccgcccaagatctttgtggcgcacagcaagttcgtcatcctcagcgcccacaagctggtgttcatcggggacacactgtcacggcaggccaaggctgctgacgtgcgcagccaggtgacccactacagcaacctgctgtgcgacctcctgcgcggcatcgtggccaccaccaaggccgctgccttgcagtacccatcgccttccgcggcccaggacatggtggagagggtcaaggagctgggccacagcacccagcagttccgccgcgtcctaggccagctggcagccgcctgagggtggtgaccccaggagggaggcaggggaggggtgcggcggtcccagctccctggctcccatgtcaagagtcgctgtgccacaggcttagggacaggaccccagctctgcgtcggtcctggtgccctggatgcccaggaatctgtatatatttatggccgggcagggtgtggggccatgcctcctcaggagccgaagcccaggggccggccagtggccttccccagcatgcaccacgggcccgggttgggtcaccagacggggctggagtgtgagggtcctgcagcctgcaggacctcgtgccaccccgagggctgagcctggtcccacgagggtgccgtgtcccctgacagggccagtgcagtttggtgtgtcctccgccttaccaggagaagaacctgaagaactatttttcgttattggttttccaatcatttgactaagagtct

SEQ ID NO: 2104 - DNA, 3192 bp, Homo sapiens
  source 1..3192: mol_type = unassigned DNA; mol_type = unassigned DNA
atgcgcggcgcggctggagcggccggacagtccggcgtccgggaacgctcaggagccggaggagccggaaagcgccgggacccctcgcggggcctctgagcggcgcgggcggacccgagcccccagcccgctggcgccgctgcccgccaggccccgggggcggcggccaagatgtccgtgcctaacgtgctggccaaagcgctctatgacaatgtggccgagtccccggatgagctctccttccgcaagggtgacatcatgacggtgctggagcaggacacgcagggcctggacggctggtggctctgctcgctgcatgggcgccagggcatcgtgcctgggaaccgcctcaagatcttggtgggcatgtatgataagaagccagcagggcctggccccggccctcccgccaccccggcccagcctcagcctggcctccatgccccagcgcctccggcctcccagtacacgcccatgctccccaacacctaccagccccagccagacagcgtctacctggtgcccactcccagcaaggctcagcaaggcctctaccaagtcccgggtcccagccctcagttccagtctcccccagccaagcagacatccaccttctcgaagcagacaccccatcacccgtttcccagcccggccacagacctgtaccaggtgcccccagggcctggaggccctgcccaggatatttaccaggtgccaccttctgccgggatggggcatgacatctaccaggtccccccgtccatggacacacgcagctgggagggcacgaagcccccggcaaaggtggtggtgcccacccgcgtggggcagggctatgtatacgaggccgcccagccggagcaggacgagtacgacatcccgcgacacctgctggccccggggccacaggacatctatgatgtgcccccggttcgggggctgcttcccagccagtatggccaggaggtgtatgacacaccccccatggctgtcaagggtcccaatggccgagacccgttgctggaggtgtatgacgtgccccccagtgtggagaagggcctgccaccgtccaaccaccacgcagtctacgacgttcctccatcggtgagcaaggatgtgcccgatggcccactgctgcgtgaggagacctacgatgtgccccccgccttcgccaaggccaagccctttgacccggcccgcaccccactggtactggctgcgccccctccagactccccgccggccgaggacgtgtatgacgtgccgcccccggctcctgacctctacgacgtgccccctggcttgcggcggcctggcccgggcaccctgtacgatgtgccccgtgaacgggtgcttcctcctgaggtggctgatggtggcgtggtcgacagtggtgtgtatgcggtgcctcccccagctgaacgtgaagccccggcagagggcaagcgcctgtcggcctccagcaccggcagcacacgcagcagccagtctgcgtcctccttggaggtggcagggccgggccgggaacccctggagctggaagttgctgtggaggccctggcacggctgcagcagggtgtgagcgccaccgttgcccaccttctggacctggcaggcagcgccggtgcgactgggagctggcgtagcccctctgagccacaggagccgctggtgcaggacctgcaggctgctgtggccgctgtccagagtgccgtccacgagctgttggagtttgcccgcagcgcggtgggcaatgctgcccacacatctgaccgtgccctgcatgccaagcttagccggcagctgcagaagatggaggacgtgcaccagacgctggtggcacatggtcaggccctcgacgctggccggggaggctctggagccacccttgaggacctggaccggctggtggcctgctcgcgggctgtgcccgaggacgccaagcagctggcctccttcctgcacggcaatgcctcactgctcttcagacggaccaaggccactgccccggggcctgaggggggtggcaccctgcaccccaaccccactgacaagaccagcagcatccagtcacgacccctgccctcaccccctaagttcacctcccaggactcgccagatgggcagtacgagaacagcgaggggggctggatggaggactatgactacgtccacctacaggggaaggaggagtttgagaagacccagaaggagctgctggaaaagggcagcatcacgcggcagggcaagagccagctggagttgcagcagctgaagcagtttgaacgactggaacaggaggtgtcacggcccatagaccacgacctggccaactggacgccagcccaacccctggccccggggcgaacaggcggcctggggccctcggaccggcagctgctgctcttctacctggagcagtgtgaggccaacctgaccacactgaccaacgccgtggacgccttctttaccgccgtggccaccaaccagccgcccaagatctttgtggcgcacagcaagttcgtcatcctcagcgcccacaagctggtgttcatcggggacacactgtcacggcaggccaaggctgctgacgtgcgcagccaggtgacccactacagcaacctgctgtgcgacctcctgcgcggcatcgtggccaccaccaaggccgctgccttgcagtacccatcgccttccgcggcccaggacatggtggagagggtcaaggagctgggccacagcacccagcagttccgccgcgtcctaggccagctggcagccgcctgagggtggtgaccccaggagggaggcaggggaggggtgcggcggtcccagctccctggctcccatgtcaagagtcgctgtgccacaggcttagggacaggaccccagctctgcgtcggtcctggtgccctggatgcccaggaatctgtatatatttatggccgggcagggtgtggggccatgcctcctcaggagccgaagcccaggggccggccagtggccttccccagcatgcaccacgggcccgggttgggtcaccagacggggctggagtgtgagggtcctgcagcctgcaggacctcgtgccaccccgagggctgagcctggtcccacgagggtgccgtgtcccctgacagggccagtgcagtttggtgtgtcctccgccttaccaggagaagaacctgaagaact

SEQ ID NO: 2105 - DNA, 3387 bp, Homo sapiens
  source 1..3387: mol_type = unassigned DNA; mol_type = unassigned DNA
atgcgcggcgcggctggagcggccggacagtccggcgtccgggaacgctcaggagccggaggagccggaaagcgccgggacccctcgcggggcctctgagcggcgcgggcggacccgagcccccagcccgctggcgccgctgcccgccaggccccgggggcggcggccaagatgtccgtgcctatgaaaaaatgagggcttccagactgtgctgatgtgagccccgccatccgttctggttcagagcataatcgtctcgtcttcagaaagaaggaagacagaacatgcctgccaagcccttcctctcttctgttctgctctcctggaaagttctggacttctctggcccagggcctcaggggactggccagccctgctcctgtgggcactgggcagagggacaaggcggaccacctgagcctgctggagggccgaacgtgctggccaaagcgctctatgacaatgtggccgagtccccggatgagctctccttccgcaagggtgacatcatgacggtgctggagcaggacacgcagggcctggacggctggtggctctgctcgctgcatgggcgccagggcatcgtgcctgggaaccgcctcaagatcttggtgggcatgtatgataagaagccagcagggcctggccccggccctcccgccaccccggcccagcctcagcctggcctccatgccccagcgcctccggcctcccagtacacgcccatgctccccaacacctaccagccccagccagacagcgtctacctggtgcccactcccagcaaggctcagcaaggcctctaccaagtcccgggtcccagccctcagttccagtctcccccagccaagcagacatccaccttctcgaagcagacaccccatcacccgtttcccagcccggccacagacctgtaccaggtgcccccagggcctggaggccctgcccaggatatttaccaggtgccaccttctgccgggatggggcatgacatctaccaggtccccccgtccatggacacacgcagctgggagggcacgaagcccccggcaaaggtggtggtgcccacccgcgtggggcagggctatgtatacgaggccgcccagccggagcaggacgagtacgacatcccgcgacacctgctggccccggggccacaggacatctatgatgtgcccccggttcgggggctgcttcccagccagtatggccaggaggtgtatgacacaccccccatggctgtcaagggtcccaatggccgagacccgttgctggaggtgtatgacgtgccccccagtgtggagaagggcctgccaccgtccaaccaccacgcagtctacgacgttcctccatcggtgagcaaggatgtgcccgatggcccactgctgcgtgaggagacctacgatgtgccccccgccttcgccaaggccaagccctttgacccggcccgcaccccactggtactggctgcgccccctccagactccccgccggccgaggacgtgtatgacgtgccgcccccggctcctgacctctacgacgtgccccctggcttgcggcggcctggcccgggcaccctgtacgatgtgccccgtgaacgggtgcttcctcctgaggtggctgatggtggcgtggtcgacagtggtgtgtatgcggtgcctcccccagctgaacgtgaagccccggcagagggcaagcgcctgtcggcctccagcaccggcagcacacgcagcagccagtctgcgtcctccttggaggtggcagggccgggccgggaacccctggagctggaagttgctgtggaggccctggcacggctgcagcagggtgtgagcgccaccgttgcccaccttctggacctggcaggcagcgccggtgcgactgggagctggcgtagcccctctgagccacaggagccgctggtgcaggacctgcaggctgctgtggccgctgtccagagtgccgtccacgagctgttggagtttgcccgcagcgcggtgggcaatgctgcccacacatctgaccgtgccctgcatgccaagcttagccggcagctgcagaagatggaggacgtgcaccagacgctggtggcacatggtcaggccctcgacgctggccggggaggctctggagccacccttgaggacctggaccggctggtggcctgctcgcgggctgtgcccgaggacgccaagcagctggcctccttcctgcacggcaatgcctcactgctcttcagacggaccaaggccactgccccggggcctgaggggggtggcaccctgcaccccaaccccactgacaagaccagcagcatccagtcacgacccctgccctcaccccctaagttcacctcccaggactcgccagatgggcagtacgagaacagcgaggggggctggatggaggactatgactacgtccacctacaggggaaggaggagtttgagaagacccagaaggagctgctggaaaagggcagcatcacgcggcagggcaagagccagctggagttgcagcagctgaagcagtttgaacgactggaacaggaggtgtcacggcccatagaccacgacctggccaactggacgccagcccaacccctggccccggggcgaacaggcggcctggggccctcggaccggcagctgctgctcttctacctggagcagtgtgaggccaacctgaccacactgaccaacgccgtggacgccttctttaccgccgtggccaccaaccagccgcccaagatctttgtggcgcacagcaagttcgtcatcctcagcgcccacaagctggtgttcatcggggacacactgtcacggcaggccaaggctgctgacgtgcgcagccaggtgacccactacagcaacctgctgtgcgacctcctgcgcggcatcgtggccaccaccaaggccgctgccttgcagtacccatcgccttccgcggcccaggacatggtggagagggtcaaggagctgggccacagcacccagcagttccgccgcgtcctaggccagctggcagccgcctgagggtggtgaccccaggagggaggcaggggaggggtgcggcggtcccagctccctggctcccatgtcaagagtcgctgtgccacaggcttagggacaggaccccagctctgcgtcggtcctggtgccctggatgcccaggaatctgtatatatttatggccgggcagggtgtggggccatgcctcctcaggagccgaagcccaggggccggccagtggccttccccagcatgcaccacgggcccgggttgggtcaccagacggggctggagtgtgagggtcctgcagcctgcaggacctcgtgccaccccgagggctgagcctggtcccacgagggtgccgtgtcccctgaca

SEQ ID NO: 2106 - DNA, 2846 bp, Homo sapiens
  source 1..2846: mol_type = unassigned DNA; mol_type = unassigned DNA
aaaggcctgtgacatttcctctggtggtttccacgaacccaggcgtcacccctcggtggagataaagtggagccacccagctccaccgtgtctcagcctggggtcggcctctgctgcttctggactcagtgaccctgggctgtcagggagcttctgagccttggttttcctgtctagtaagatggagaacgtgctggccaaagcgctctatgacaatgtggccgagtccccggatgagctctccttccgcaagggtgacatcatgacggtgctggagcaggacacgcagggcctggacggctggtggctctgctcgctgcatgggcgccagggcatcgtgcctgggaaccgcctcaagatcttggtgggcatgtatgataagaagccagcagggcctggccccggccctcccgccaccccggcccagcctcagcctggcctccatgccccagcgcctccggcctcccagtacacgcccatgctccccaacacctaccagccccagccagacagcgtctacctggtgcccactcccagcaaggctcagcaaggcctctaccaagtcccgggtcccagccctcagttccagtctcccccagccaagcagacatccaccttctcgaagcagacaccccatcacccgtttcccagcccggccacagacctgtaccaggtgcccccagggcctggaggccctgcccaggatatttaccaggtgccaccttctgccgggatggggcatgacatctaccaggtccccccgtccatggacacacgcagctgggagggcacgaagcccccggcaaaggtggtggtgcccacccgcgtggggcagggctatgtatacgaggccgcccagccggagcaggacgagtacgacatcccgcgacacctgctggccccggggccacaggacatctatgatgtgcccccggttcgggggctgcttcccagccagtatggccaggaggtgtatgacacaccccccatggctgtcaagggtcccaatggccgagacccgttgctggaggtgtatgacgtgccccccagtgtggagaagggcctgccaccgtccaaccaccacgcagtctacgacgttcctccatcggtgagcaaggatgtgcccgatggcccactgctgcgtgaggagacctacgatgtgccccccgccttcgccaaggccaagccctttgacccggcccgcaccccactggtactggctgcgccccctccagactccccgccggccgaggacgtgtatgacgtgccgcccccggctcctgacctctacgacgtgccccctggcttgcggcggcctggcccgggcaccctgtacgatgtgccccgtgaacgggtgcttcctcctgaggtggctgatggtggcgtggtcgacagtggtgtgtatgcggtgcctcccccagctgaacgtgaagccccggcagagggcaagcgcctgtcggcctccagcaccggcagcacacgcagcagccagtctgcgtcctccttggaggtggcagggccgggccgggaacccctggagctggaagttgctgtggaggccctggcacggctgcagcagggtgtgagcgccaccgttgcccaccttctggacctggcaggcagcgccggtgcgactgggagctggcgtagcccctctgagccacaggagccgctggtgcaggacctgcaggctgctgtggccgctgtccagagtgccgtccacgagctgttggagtttgcccgcagcgcggtgggcaatgctgcccacacatctgaccgtgccctgcatgccaagcttagccggcagctgcagaagatggaggacgtgcaccagacgctggtggcacatggtcaggccctcgacgctggccggggaggctctggagccacccttgaggacctggaccggctggtggcctgctcgcgggctgtgcccgaggacgccaagcagctggcctccttcctgcacggcaatgcctcactgctcttcagacggaccaaggccactgccccggggcctgaggggggtggcaccctgcaccccaaccccactgacaagaccagcagcatccagtcacgacccctgccctcaccccctaagttcacctcccaggactcgccagatgggcagtacgagaacagcgaggggggctggatggaggactatgactacgtccacctacaggggaaggaggagtttgagaagacccagaaggagctgctggaaaagggcagcatcacgcggcagggcaagagccagctggagttgcagcagctgaagcagtttgaacgactggaacaggaggtgtcacggcccatagaccacgacctggccaactggacgccagcccaacccctggccccggggcgaacaggcggcctggggccctcggaccggcagctgctgctcttctacctggagcagtgtgaggccaacctgaccacactgaccaacgccgtggacgccttctttaccgccgtggccaccaaccagccgcccaagatctttgtggcgcacagcaagttcgtcatcctcagcgcccacaagctggtgttcatcggggacacactgtcacggcaggccaaggctgctgacgtgcgcagccaggtgacccactacagcaacctgctgtgcgacctcctgcgcggcatcgtggccaccaccaaggccgctgccttgcagtacccatcgccttccgcggcccaggacatggtggagagggtcaaggagctgggccacagcacccagcagttccgccgcgtcctaggccagctggcagccgcctgagggtggtgaccccaggagggaggcaggggaggggtgcggcggtcccagctccctggct

SEQ ID NO: 2107 - DNA, 2725 bp, Homo sapiens
  source 1..2725: mol_type = unassigned DNA; mol_type = unassigned DNA
agatgctcacccaccgtccccaggaagcagaacagaggggtcggacccctggtccttcctttgagtggaacgtgctggccaaagcgctctatgacaatgtggccgagtccccggatgagctctccttccgcaagggtgacatcatgacggtgctggagcaggacacgcagggcctggacggctggtggctctgctcgctgcatgggcgccagggcatcgtgcctgggaaccgcctcaagatcttggtgggcatgtatgataagaagccagcagggcctggccccggccctcccgccaccccggcccagcctcagcctggcctccatgccccagcgcctccggcctcccagtacacgcccatgctccccaacacctaccagccccagccagacagcgtctacctggtgcccactcccagcaaggctcagcaaggcctctaccaagtcccgggtcccagccctcagttccagtctcccccagccaagcagacatccaccttctcgaagcagacaccccatcacccgtttcccagcccggccacagacctgtaccaggtgcccccagggcctggaggccctgcccaggatatttaccaggtgccaccttctgccgggatggggcatgacatctaccaggtccccccgtccatggacacacgcagctgggagggcacgaagcccccggcaaaggtggtggtgcccacccgcgtggggcagggctatgtatacgaggccgcccagccggagcaggacgagtacgacatcccgcgacacctgctggccccggggccacaggacatctatgatgtgcccccggttcgggggctgcttcccagccagtatggccaggaggtgtatgacacaccccccatggctgtcaagggtcccaatggccgagacccgttgctggaggtgtatgacgtgccccccagtgtggagaagggcctgccaccgtccaaccaccacgcagtctacgacgttcctccatcggtgagcaaggatgtgcccgatggcccactgctgcgtgaggagacctacgatgtgccccccgccttcgccaaggccaagccctttgacccggcccgcaccccactggtactggctgcgccccctccagactccccgccggccgaggacgtgtatgacgtgccgcccccggctcctgacctctacgacgtgccccctggcttgcggcggcctggcccgggcaccctgtacgatgtgccccgtgaacgggtgcttcctcctgaggtggctgatggtggcgtggtcgacagtggtgtgtatgcggtgcctcccccagctgaacgtgaagccccggcagagggcaagcgcctgtcggcctccagcaccggcagcacacgcagcagccagtctgcgtcctccttggaggtggcagggccgggccgggaacccctggagctggaagttgctgtggaggccctggcacggctgcagcagggtgtgagcgccaccgttgcccaccttctggacctggcaggcagcgccggtgcgactgggagctggcgtagcccctctgagccacaggagccgctggtgcaggacctgcaggctgctgtggccgctgtccagagtgccgtccacgagctgttggagtttgcccgcagcgcggtgggcaatgctgcccacacatctgaccgtgccctgcatgccaagcttagccggcagctgcagaagatggaggacgtgcaccagacgctggtggcacatggtcaggccctcgacgctggccggggaggctctggagccacccttgaggacctggaccggctggtggcctgctcgcgggctgtgcccgaggacgccaagcagctggcctccttcctgcacggcaatgcctcactgctcttcagacggaccaaggccactgccccggggcctgaggggggtggcaccctgcaccccaaccccactgacaagaccagcagcatccagtcacgacccctgccctcaccccctaagttcacctcccaggactcgccagatgggcagtacgagaacagcgaggggggctggatggaggactatgactacgtccacctacaggggaaggaggagtttgagaagacccagaaggagctgctggaaaagggcagcatcacgcggcagggcaagagccagctggagttgcagcagctgaagcagtttgaacgactggaacaggaggtgtcacggcccatagaccacgacctggccaactggacgccagcccaacccctggccccggggcgaacaggcggcctggggccctcggaccggcagctgctgctcttctacctggagcagtgtgaggccaacctgaccacactgaccaacgccgtggacgccttctttaccgccgtggccaccaaccagccgcccaagatctttgtggcgcacagcaagttcgtcatcctcagcgcccacaagctggtgttcatcggggacacactgtcacggcaggccaaggctgctgacgtgcgcagccaggtgacccactacagcaacctgctgtgcgacctcctgcgcggcatcgtggccaccaccaaggccgctgccttgcagtacccatcgccttccgcggcccaggacatggtggagagggtcaaggagctgggccacagcacccagcagttccgccgcgtcctaggccagctggcagccgcctgagggtggtgaccccaggagggaggcaggggaggggtgcggcggtcccagctccctgg

SEQ ID NO: 2108 - DNA, 2667 bp, Homo sapiens
  source 1..2667: mol_type = unassigned DNA; mol_type = unassigned DNA
atgaaccacctgaacgtgctggccaaagcgctctatgacaatgtggccgagtccccggatgagctctccttccgcaagggtgacatcatgacggtgctggagcaggacacgcagggcctggacggctggtggctctgctcgctgcatgggcgccagggcatcgtgcctgggaaccgcctcaagatcttggtgggcatgtatgataagaagccagcagggcctggccccggccctcccgccaccccggcccagcctcagcctggcctccatgccccagcgcctccggcctcccagtacacgcccatgctccccaacacctaccagccccagccagacagcgtctacctggtgcccactcccagcaaggctcagcaaggcctctaccaagtcccgggtcccagccctcagttccagtctcccccagccaagcagacatccaccttctcgaagcagacaccccatcacccgtttcccagcccggccacagacctgtaccaggtgcccccagggcctggaggccctgcccaggatatttaccaggtgccaccttctgccgggatggggcatgacatctaccaggtccccccgtccatggacacacgcagctgggagggcacgaagcccccggcaaaggtggtggtgcccacccgcgtggggcagggctatgtatacgaggccgcccagccggagcaggacgagtacgacatcccgcgacacctgctggccccggggccacaggacatctatgatgtgcccccggttcgggggctgcttcccagccagtatggccaggaggtgtatgacacaccccccatggctgtcaagggtcccaatggccgagacccgttgctggaggtgtatgacgtgccccccagtgtggagaagggcctgccaccgtccaaccaccacgcagtgagcaaatgccagggcaatgccagggccaggctgaggctgtggggtgtctgggtctacgacgttcctccatcggtgagcaaggatgtgcccgatggcccactgctgcgtgaggagacctacgatgtgccccccgccttcgccaaggccaagccctttgacccggcccgcaccccactggtactggctgcgccccctccagactccccgccggccgaggacgtgtatgacgtgccgcccccggctcctgacctctacgacgtgccccctggcttgcggcggcctggcccgggcaccctgtacgatgtgccccgtgaacgggtgcttcctcctgaggtggctgatggtggcgtggtcgacagtggtgtgtatgcggtgcctcccccagctgaacgtgaagccccggcagagggcaagcgcctgtcggcctccagcaccggcagcacacgcagcagccagtctgcgtcctccttggaggtggcagggccgggccgggaacccctggagctggaagttgctgtggaggccctggcacggctgcagcagggtgtgagcgccaccgttgcccaccttctggacctggcaggcagcgccggtgcgactgggagctggcgtagcccctctgagccacaggagccgctggtgcaggacctgcaggctgctgtggccgctgtccagagtgccgtccacgagctgttggagtttgcccgcagcgcggtgggcaatgctgcccacacatctgaccgtgccctgcatgccaagcttagccggcagctgcagaagatggaggacgtgcaccagacgctggtggcacatggtcaggccctcgacgctggccggggaggctctggagccacccttgaggacctggaccggctggtggcctgctcgcgggctgtgcccgaggacgccaagcagctggcctccttcctgcacggcaatgcctcactgctcttcagacggaccaaggccactgccccggggcctgaggggggtggcaccctgcaccccaaccccactgacaagaccagcagcatccagtcacgacccctgccctcaccccctaagttcacctcccaggactcgccagatgggcagtacgagaacagcgaggggggctggatggaggactatgactacgtccacctacaggggaaggaggagtttgagaagacccagaaggagctgctggaaaagggcagcatcacgcggcagggcaagagccagctggagttgcagcagctgaagcagtttgaacgactggaacaggaggtgtcacggcccatagaccacgacctggccaactggacgccagcccaacccctggccccggggcgaacaggcggcctggggccctcggaccggcagctgctgctcttctacctggagcagtgtgaggccaacctgaccacactgaccaacgccgtggacgccttctttaccgccgtggccaccaaccagccgcccaagatctttgtggcgcacagcaagttcgtcatcctcagcgcccacaagctggtgttcatcggggacacactgtcacggcaggccaaggctgctgacgtgcgcagccaggtgacccactacagcaacctgctgtgcgacctcctgcgcggcatcgtggccaccaccaaggccgctgccttgcagtacccatcgccttccgcggcccaggacatggtggagagggtcaaggagctgggccacagcacccagcagttccgccgcgtcctaggccagctggcagccgcctga

SEQ ID NO: 2109 - DNA, 714 bp, Homo sapiens
  source 1..714: mol_type = unassigned DNA; mol_type = unassigned DNA
gccctcagttccagtctcccccagccaagcagacatccaccttctcgaagcagacaccccatcacccgtttcccagcccggccacagacctgtaccaggtgcccccagggcctggaggccctgcccaggatatttaccaggtgccaccttctgccgggatggggcatgacatctaccaggtccccccgtccatggacacacgcagctgggagggcacgaagcccccggcaaaggtggtggtgcccacccgcgtggggcagggctatgtatacgaggccgcccagccggagcaggacgagtacgacatcccgcgacacctgctggccccggggccacaggacatctatgatgtgcccccggttcgggggctgcttcccagccagtatggccaggaggtctacgacgttcctccatcggtgagcaaggatgtgcccgatggcccactgctgcgtgaggagacctacgatgtgccccccgccttcgccaaggccaagccctttgacccggcccgcaccccactggtactggctgcgccccctccagactccccgccggccgaggacgtgtatgacgtgccgcccccggctcctgacctctacgacgtgccccctggcttgcggcggcctggcccgggcaccctgtacgatgtgccccgtgaacgggtgcttcctcctgaggtggctgatggtggcgtggtcgacagtggtgtgtatg

SEQ ID NO: 2110 - DNA, 552 bp, Homo sapiens
  source 1..552: mol_type = unassigned DNA; mol_type = unassigned DNA
cctaaaaggacgtggctcccaggtgtgagtggagcctccctaagggctggtttgagggcagcagtgaagtcggctctctgcccccaggtggtggtgcccacccgcgtggggcagggctatgtatacgaggccgcccagccggagcaggacgagtacgacatcccgcgacacctgctggccccggggccacaggacatctatgatgtgcccccggttcgggggctgcttcccagccagtatggccaggaggtgtatgacacaccccccatggctgtcaagggtcccaatggccgagacccgttgctggaggtgtatgacgtgccccccagtgtggagaagggcctgccaccgtccaaccaccacgcagtgagcaaatgccagggcaatgccagggccaggctgaggctgtggggtgtctgggtgtgtgcacaggggtgctgaccagtgtctgcagggctgggggtggcgggcaggaagagactggctccagaccctggttctggatggttgacagatgaggaaatcaagctgtcttctgagcctcaggttctt

SEQ ID NO: 2111 - DNA, 556 bp, Homo sapiens
  source 1..556: mol_type = unassigned DNA; mol_type = unassigned DNA
cagccctgctcctgtgggcactgggcagagggacaaggcggaccacctgagcctgctggagggccggtatcccaggaacgtgctggccaaagcgctctatgacaatgtggccgagtccccggatgagctctccttccgcaagggtgacatcatgacggtgctggagcaggacacgcagggcctggacggctggtggctctgctcgctgcatgggcgccagggcatcgtgcctgggaaccgcctcaagatcttggtgggcatgtatgataagaagccagcagggcctggccccggccctcccgccaccccggcccagcctcagcctggcctccatgccccagcgcctccggcctcccagtacacgcccatgctccccaacacctaccagccccagccagacagcgtctacctggtgcccactcccagcaaggctcagcaaggcctctaccaagtcccgggtcccagccctcagttccagtctcccccagccaagcagacatccaccttctcgaagcagacaccccatcacccgtttcccagcccggccacagacctg

SEQ ID NO: 2112 - DNA, 558 bp, Homo sapiens
  source 1..558: mol_type = unassigned DNA; mol_type = unassigned DNA
gtgcatttgttggagagcggtgtcctgcgccctaggctggaagcctggcctcgggcaggggcctggagcctcggggttggagaacgtgctggccaaagcgctctatgacaatgtggccgagtccccggatgagctctccttccgcaagggtgacatcatgacggtgctggagcaggacacgcagggcctggacggctggtggctctgctcgctgcatgggcgccagggcatcgtgcctgggaaccgcctcaagatcttggtgggcatgtatgataagaagccagcagggcctggccccggccctcccgccaccccggcccagcctcagcctggcctccatgccccagcgcctccggcctcccagtacacgcccatgctccccaacacctaccagccccagccagacagcgtctacctggtgcccactcccagcaaggctcagcaaggcctctaccaagtcccgggtcccagccctcagttccagtctcccccagccaagcagacatccaccttctcgaagcagacaccccatcacccgtttcccagcccggccacaga

SEQ ID NO: 2113 - DNA, 547 bp, Homo sapiens
  source 1..547: mol_type = unassigned DNA; mol_type = unassigned DNA
ataaaggcatctgctgtggtgctgcagccaaggccaggctgtgctctgtgcttgtgtcggggagcccttggcagtggccaccccacagaacgtgctggccaaagcgctctatgacaatgtggccgagtccccggatgagctctccttccgcaagggtgacatcatgacggtgctggagcaggacacgcagggcctggacggctggtggctctgctcgctgcatgggcgccagggcatcgtgcctgggaaccgcctcaagatcttggtgggcatgtatgataagaagccagcagggcctggccccggccctcccgccaccccggcccagcctcagcctggcctccatgccccagcgcctccggcctcccagtacacgcccatgctccccaacacctaccagccccagccagacagcgtctacctggtgcccactcccagcaaggctcagcaaggcctctaccaagtcccgggtcccagccctcagttccagtctcccccagccaagcagacatccaccttctcgaagcagacaccccatcacccgttt

SEQ ID NO: 2114 - DNA, 574 bp, Homo sapiens
  source 1..574: mol_type = unassigned DNA; mol_type = unassigned DNA
agtcctgagtgcatgctctgcggtctggggtcacctggggtgcttaccagtaggcacacgcctgggttatgaggtggaaggtgcgagctctgctggccatgggagctgcgtggggcattgcccctctctctgcctccagaacgtgctggccaaagcgctctatgacaatgtggccgagtccccggatgagctctccttccgcaagggtgacatcatgacggtgctggagcaggacacgcagggcctggacggctggtggctctgctcgctgcatgggcgccagggcatcgtgcctgggaaccgcctcaagatcttggtgggcatgtatgataagaagccagcagggcctggccccggccctcccgccaccccggcccagcctcagcctggcctccatgccccagcgcctccggcctcccagtacacgcccatgctccccaacacctaccagccccagccagacagcgtctacctggtgcccactcccagcaaggctcagcaaggcctctaccaagtcccgggtcccagccctcagttccagtctcccccagccaagcagacatccaccttctcg

SEQ ID NO: 2115 - DNA, 594 bp, Homo sapiens
  source 1..594: mol_type = unassigned DNA; mol_type = unassigned DNA
aatgattcactccggccgccggcgcggggttccgggagcggagcgggagtgggggcgggcgcgccgcgggctttgcagccccgcacgccgagcgccggtggaagccgggtcctggccacaggagtcctagccgcacgcgagtgtcgcgggagggggccagggccgggttctgcagtgtggacatgaaggctttggagtccatggttgggggacccgcaagagctagagcagggtcggagctccctctcgagggtccgagaggctgatcgctggaccgagaacgtgctggccaaagcgctctatgacaatgtggccgagtccccggatgagctctccttccgcaagggtgacatcatgacggtgctggagcaggacacgcagggcctggacggctggtggctctgctcgctgcatgggcgccagggcatcgtgcctgggaaccgcctcaagatcttggtgggcatgtatgataagaagccagcagggcctggccccggccctcccgccaccccggcccagcctcagcctggcctccatgccccagcgcctccggcctcccagtacacgcccatgctccccaacacctaccagccc

SEQ ID NO: 2116 - DNA, 558 bp, Homo sapiens
  source 1..558: mol_type = unassigned DNA; mol_type = unassigned DNA
tccggggtggggagctcctcttccctgggggtctcggggctcgctctcagctgggggagggcagaggggctccgggaggcctgctatgctgccccgcgatcaccttccgccggccgagccctcccggtctgcgcccggacacagggcctaggagcccggccagggccacagggcagtgtagtgttgggggaggggactggttgggcgacccagagctggtgcgactggaggtggcccgcgagggatcggcgaggagcggaggagaccgcgcctccccgccgcgttgggccgacagaaaaaggcctagaacgtgctggccaaagcgctctatgacaatgtggccgagtccccggatgagctctccttccgcaagggtgacatcatgacggtgctggagcaggacacgcagggcctggacggctggtggctctgctcgctgcatgggcgccagggcatcgtgcctgggaaccgcctcaagatcttggtgggcatgtatgataagaagccagcagggcctggccccggccctcccgccaccccggcccagcctcagcctgg

SEQ ID NO: 2117 - DNA, 581 bp, Homo sapiens
  source 1..581: mol_type = unassigned DNA; mol_type = unassigned DNA
gcagatggggacactgaggtacagagagacagtcagttgtcctcagaattggatccagaacctcgtcttctggcatggccccccagtgcagcaccacatgtggcctccgaattcccagtctgggattgggggagctctggtccttgggggaccaccatgctcttttggagttgtcaacttggtaggaaccctctggttccaacgctgtgcctttgcggccctctcctggcatctgctgtccctttaggaggtcctaccacccttttcttctgagcctggacaactccttcccttgcccccaggagcccacagccggctaaaccaactggtcagctagaaccaaccagcaggggagaacgtgctggccaaagcgctctatgacaatgtggccgagtccccggatgagctctccttccgcaagggtgacatcatgacggtgctggagcaggacacgcagggcctggacggctggtggctctgctcgctgcatgggcgccagggcatcgtgcctgggaaccgcctcaagatcttggtgggcatgtatgataagaagccagcagggcctggccccggccctcccg

SEQ ID NO: 2118 - DNA, 576 bp, Homo sapiens
  source 1..576: mol_type = unassigned DNA; mol_type = unassigned DNA
gtgagcactgtgtactggtaccatggccccaggtctaggcgagggatggaaataaggacagtgccactagggcctcctgtctgtacaggaggggccctgagacagctcctcaaacccctttcccattatacggatggtgcagatggggacactgaggtacagagagacagtcagttgtcctcagaattggatccagaacctcgtcttctggcatggccccccagtgcagcaccacatgtggcctccgaattcccagtctgggattgggggagctctggtccttgggggaccaccatgctcttttggagttgtcaacttggtaggaaccctctggttccaacgctgtgcctttgcggccctctcctggcatctgctgtccctttaggaggtcctaccacccttttcttctgagcctggacaactccttcccttgcccccaggagcccacagccggctaaaccaactggtcagctagaaccaaccagcaggggaggtgcgctccaggggggcttctaagaggaggcagttttggagtcagagaacgtgctggccaaagcgctctatgacaatgtggcc

SEQ ID NO: 2119 - DNA, 1340 bp, Homo sapiens
  source 1..1340: mol_type = unassigned DNA; mol_type = unassigned DNA
actttcctgggaagttttcctctcgctgcggaacccccggggccctgactggccgcttcctccccgctggccgtagggagttttctgtccgacaccccctcttcctggccgggcagcctggcttcggcagacccccgggccatgtttccacacttgggcactggcatctctgagcatctcagtctcacctcctgagaacagcaagtgatcctggctaccccgggtaaccaggcctcaggtgcaggccccacatgacagatggacagactgaagtgggaggtgggaggcggacaccccggcgtcctgccaggaagggacaccatctgcacctggcgagctgtggcctccagccatcgtttccctgcctagttaggggcttttccctccagagccctgtccactctggccttgtttctggaactgctcctcacccggaggaccccatcctttccgtgaagcaggcagtgggggctttctggcaagtggcctcttcattaactatcccagagtgagtgcagatgaccagagggaagctggccaagtgcaaagcattgttattgtggaattaaagagcccgctcctgctcgcctccagaagtggtaatgtatttacagatgaaaaaatgagggcttccagactgtgctgatgtgagccccgccatccgttctggttcagagcataatcgtctcgtcttcagaaagaaggaagacagaacatgcctgccaagcccttcctctcttctgttctgctctcctggaaagttctggacttctctggcccagggcctcaggggactggccagccctgctcctgtgggcactgggcagagggacaaggcggaccacctgagcctgctggagggccggtatcccagggcagtagtgattagggaatgtcactctggccacatcccagcctgggcgggcctctatggggaggtccccgtttgatttggtttggttgtccacagtcagagccaagctctgggcatggagtctgggatggcaccctgaccccttgccttacaggactttgggcagccttctttggcactgtgcctcatctgtaacaagagaggaacagcgggctgggtaggacttggacagataggcactgtcgtggggacctgcagcctggccacaccatcacgggctctgagtcatctcctaccctctcccttgtagtcacagcccaggagaattctgctgggggtgggcagaggtctttgccatctgccccctacgtggctggctggcagatcaccgtggctctctctcctgggaccttgggcagtgtgtgaggtggtggggccaagaggagaattcatttttggaacagtc

SEQ ID NO: 2120 - DNA, 6112 bp, Homo sapiens
  source 1..6112: mol_type = unassigned DNA; mol_type = unassigned DNA
acacttccggtggcagctggaccggggcaggacacagataaaaccccagggcacgccccggcccaagacaaggtcctctctgccgccagggatcccacgcttctcccacctgagacagggggagcaggaggagaagctccctccaagcccaaggactccagcttttttgacaaattcttcaagctggacaagggacaggaaaaggtgccaggtgacagccaacaggaagccaagagggcagagcatcaagacaaggtggatgaggttcctggcttatcagggcagtccgatgatgtccctgcagggaaggacatagttgacggcaaggaaaaagaaggacaagaacttggaactgcggattgctctgtccctggggacccagaaggactggagactgcaaaggacgattcccaggcagcagctatagcagagaataataattccatcatgagtttctttaaaactctggtttcacctaacaaagctgaaacaaaaaaggacccagaagacacggcatcgaaagcagaaagtgtctgtgatggacaagctggtcagaagacatccgagatccaggctagaggcaccaagaaaaagcacctggatagccccaggctaggactcgcctttagaaaattctttaggcataagggtgctgaaaagtcacccaccacttcagctgaccttaagtcagacaaagccaactttacatcccaggagacccaaggggctggcaagaattccaaaggatgcaacccatcggggcacacacagtccgtgacaacccctgaacctgcgaaggaaggcaccaaggagaaatcaggacccacctctctgcctctgggcaaactgttttggaaaaaggtggtgtgtgagtcaccagtagagattataaagtccaaggaagtagaatcagccttacaaacagtggacctcaacgaaggagatgctgcacctgaacccacagaagcgaaactcaaaagagaagaaagcaaaccaagaacctctctgatggcgtttctcagacaaatgacatcagactccacagaaaagactatcacaccgccagagcctgaaccaacaggagcaccacagaagggtaaagagggctcctcgaaggacaagaagtcagcagccgagatgaacaagcagaagagcaacaagcaggaagccaaagaaccagcccagtgcacagagcaggccacggtggacacgaactcactgcagaatggggacaagctccaaaagagacctgagaagcggcagcagtcccttgggggcttctttaaaggcctgggaccaaagcggatgttggatgctcaagtgcaaacagacccagtatccatcggaccagttggcaaatccaagtacacagggaagtgtgtcttctcccatgtcaagaagaagtggcctttccaggaatggagctattgagctgaaatggctgccactgcgcgtacacacacacacgcgcacacacacacacacacacacacctcccttccagttccagctgacggtgactttttgactggtaaccataaaagaattcattcaaaagggcagttgttcccagcagccagtgaggtccttcctgcattcgttgtcttggagaaggaggcacataacaaaatagaaaccaaaatgggaaggaaaagagaaagaaagtgaaattcctggtctttgttgtatgtatccccttgctttttagataaattatcaggggtttaaacacacactctctcccctccctcctcccacttcacacacactagattgttcttgtctgtttgcaaacagtccagaagcactggggtctcattaaattagattctaagtgtcttaaagaattagatttcaagaaaccaagaatctgtgtcctttcccttctcagagtgcctggaagggtgcagatttctccaatctgaatctgacaatgttatttcttatgtcagataatcccaagtagatcttataccttaaaaaaataaaatcagctacactacctaccttacagggaaggaaaaagaactaattccaattattaactaacccaagatacaaacacaggggaaactagggaatgtgctttgcagcaatgtaagattataggggttggttttaaccatcctttgaatgtccctctttaagcctttttaaagggcaattttgcacggtgagtagaattaggcttctccgtggtcaagattttgttcactctatcagtgcaaattaagtggcaccggcccactggaaattatagtctccattaggaagaaaagaaattacttaccgagcagcaaattctctaaatttgtaattcagatctttagtgcagaatgccggtcaggatccagccctttgcataaattggttttctggggagtttaaccccttagcctctgttgcccttttcttgaatggcattcacgcaaccctctccatctcctggccctttaactggccccggcagaagttgcagtccacaatttcacagaagtaaggataatacattatcacacattaccgtttataaagtgctctgggtacaatctgtaatttaaagctgtatttccctcactgaacttaagtgcttcctttgttacatttcattaccgggggactggcatgcacctgtatagattttttttttttttttcattttttgttttgttttgtttttccaaataagcacttcttgacaaaatggcccccagctgcacttctgctaatgacagccatggaagggctggttccttacgtgatctactctctcagaagcttgcttttgtcaaaatgcagccacgtgggggagctgcaggacctggggttttacaatgcctagccctttttccctgattgcctaaccgggaaactgggccaaagcagcctgagagtgtatttgttgattaacttctagaaagcagtcaagtttaattaggagaactagaacgagaaagctgaactgggcaagtcagttgccttctatgattctcagtcctccaaatgaagataaggttggttggtttgtgtttccatccttatctgctctatcttggaagaagctcaaggaagattgtgtgattgcaaaacgtttcagttggtgtcattgcaatgcatttaagtaatccttactggcccatcctgctccacaaagcagccttacctctcatcttctccactcccaactaaagagcaagtgatttaaactctgagtgtcctccctcaacaatgggctaataatagagcctactcgtggagttgctgccagcatgcagtgagatggtgcataccaaacatttagtgcagtggctggcacattgtaagcacttaggaaaggcaagctattctatcatggggaacttttagcaccaagtaacagaaaacccctacttgaattggcagataatcgtaacaataagggtatttatcatttcatataataggtgttgtataacatctttggctttgattctctgagactctcttccagctaacaacgataatgaggaaatgtatcgtttcatataactggtgttaagtctcatagcctggctctggttctctgacactccattctgccatgttccatgggttgacttcatcctaaaactgtgctgaatgatggatgcagttccaggcaaggggattatgggaataccataatcagtttcaatgaatcattttggtgaaatcatgttgagaaggcaatacaatgatacagtagacagtaaagccattattggtatcagtggctttaaggctaaccattccccaaactaactgtgtcccttcaattcacacccatgggatttgtgtaatgacggcccccaccttccaaagcagtgccactagaatgtgaacttatcaagatctgaaccttcttgtcttgctcattcattgttctattgtcagtgtctagcacaatgcctggacatggtagatactcaacaaatattggttgaatggataaattgctaaacaaatatcctgtggccacacccattgtggattgccttatcctctagtgtgaatttgttttagctctgaatgtctgatcaccctaaccagacatctacccttcccaggtaaccagcccagtggttctaaaagtacagtcccaggaccagcagcctcagcaccacctgagaacatgttaggaatgcaaactctcaagccccactccatacccgcagaatcaaaaactcttggggtgggacccagtaacctgtgttttagcagcctctcaggaggttccaatgaaggagaaaatttgaaaaccactggtccaggtagagctaccacttcactgagcatcaacagcatgtttggtccaaagactggccctgaagatgcttagataaaaaaagctaacattgaacctcactatatgccaggtattgtgtgtcacatgacttaactttgttcactgcttatttggcagctgaggaaactaaggctcacagagaaaaaaacaactttgcccaagaacacacatggcagagccaaggttgaaatccaacctaagtacataaaagcttgctttcatgtctgtgggagagacaggcaggcaaaaagataataataatacaatgtaagagaagcaaatgcagggtgtcatgggactcaggggaaggcactggcgcaagaccacagtgggtggaggttggccactttggggaggtgacagttgagttaactcacacagaatgaataagcgttggacaaaagggctcccagaagaacagcaagtgcaagagcccagggtccacagagagaatggcaggtagcttagcatggctgaagtgagactgtgaggagaacggataagaggatggaagctggggaggtggcacagatggatctcaaggacttggagtaaaaagtccatagtaacgagtttaaattgtctcttgacggcaatggggagccatggaagatatttgagctggagggtaacatagatttatattttggctgcaggtaggatctaatacaaaagcaattcaactaatattcactaagtgacctgagttatctgtgagatatttattataaggtgttaaacttctttgaagattgtaagaaagagataaaacctctaaatggttttgacccttcaaaggacatttaaatggttatttctaagtgtcataaacatggacttgggatttggcctcatcattcacccagatgattcatacccatgatcccaggctgtgaggtcttgagcaaattacttcttctcagagccttagtttgttcctctgtggaatgggaatgctaacagcacttacctcggaaagttgctgagaataaacgagaccgtgcatttagagcatgtaggcaccgtgtctggcaggtaatgagtgctcagtcagcttattgatgaggatgcagatgacctcagcctgagatagaacagatgtgttctctttcatggactgaaggccacccagactttgcgacatccttaaactttgccccagtttctccttatcctcataagcagttggctggctggcttatctagaaaaaagaaaggagggaggagaaaaagcaaagaaaaatgttcattttccctgctgttcaccccattctaaagtaaggcagaatttctggagagggggctcaggtccacccttggctatccttggttgtacagttgcatctacttataacggtggccaagtcgccatggcagtaggtgctgtggctgccctgccccatcgtcttcagactacccgagtttacctgcagcactgacagcttcccaccccaaaactcctcgttctttgcttttcctctcggtggctttctccaggggctgtaggagcttgtttagcccacctgcatggcattttgaaaatacctgaaattttatgccccgaaggacaattctcaatcagtgaaagatgggagaggaaaggtaaacacctcagctgccccatctctcagtgggacaatgttgaggggtcgtctttgtgttctctcaagggtcctcagcaagaccgagccacccgtcacccacagcagtaacatactcatgagcacgcccccccaccccaccttttgtgcttcctgggatcacttcccaaataaactacttgcacct

SEQ ID NO: 2121 - DNA, 3020 bp, Homo sapiens
  source 1..3020: mol_type = unassigned DNA; mol_type = unassigned DNA
gctccaccgacagccaggcactgggcagcacgcactggagacccaggaccctgtgcaggagcagctccgggtgacacgaggggactgaagatactcccacaggggctcagcaggagcaatgggtaaccaaatgagtgttccccaaagagttgaagaccaagagaatgaaccagaagcagagacttaccaggacaacgcgtctgctctgaacggggttccagtggtggtgtcgacccacacagttcagcacttagaggaagtcgacttgggaataagtgtcaagacggataatgtggccacttcttcccccgagacaacggagataagtgctgttgcggatgccaacggaaagaatcttgggaaagaggccaaacccgaggcaccagctgctaaatctcgttttttcttgatgctctctcggcctgtaccaggacgtaccggagaccaagccgcagattcatcccttggatcagtgaagcttgatgtcagctccaataaagctccagcgaacaaagacccaagtgagagctggacacttccggtggcagctggaccggggcaggacacagataaaaccccagggcacgccccggcccaagacaaggtcctctctgccgccagggatcccacgcttctcccacctgagacagggggagcaggaggagaagctccctccaagcccaaggactccagcttttttgacaaattcttcaagctggacaagggacaggaaaaggtgccaggtgacagccaacaggaagccaagagggcagagcatcaagacaaggtggatgaggttcctggcttatcagggcagtccgatgatgtccctgcagggaaggacatagttgacggcaaggaaaaagaaggacaagaacttggaactgcggattgctctgtccctggggacccagaaggactggagactgcaaaggacgattcccaggcagcagctatagcagagaataataattccatcatgagtttctttaaaactctggtttcacctaacaaagctgaaacaaaaaaggacccagaagacacgggtgctgaaaagtcacccaccacttcagctgaccttaagtcagacaaagccaactttacatcccaggagacccaaggggctggcaagaattccaaaggatgcaacccatcggggcacacacagtccgtgacaacccctgaacctgcgaaggaaggcaccaaggagaaatcaggacccacctctctgcctctgggcaaactgttttggaaaaagtcagttaaagaggactcagtccccacaggtgcggaggagaatacatcagactccacagaaaagactatcacaccgccagagcctgaaccaacaggagcaccacagaagggtaaagagggctcctcgaaggacaagaagtcagcagccgagatgaacaagcagaagagcaacaagcaggaagccaaagaaccagcccagtgcacagagcaggccacggtggacacgaactcactgcagaatggggacaagctccaaaagagacctgagaagcggcagcagtcccttgggggcttctttaaaggcctgggaccaaagcggatgttggatgctcaagtgcaaacagacccagtatccatcggaccagttggcaaatccaagtaaacaaatcagcacggttcccaccaggttctcctgccaccaagatgtgttctccttactccatctcctccccaaacacgctccatgtatatattcttctgatggccagcaaatgaaattctgcctagaaattaagcccgagctgttgtatattgaggtgtattatttacgtctctggtccagtcttttctggcaaataacagtaaagatggtttagcaggtcacctagttgggtcagaagagtcgatgatcaccaagcaggaaagggagggaatagaggaatgtgttcgggttaagtgatgaaaatggcagtggtggccgggcgtggtggctctcgcctgtaatctcagcactttgggaggccgaggcaggtggatcacctgaggtcaggagttcaagactagcctggccaacatcatgaaaccccgtctctactaaaaatacaaaaattagccaggcatggtggcacacacctgtagtcccagctactcgggagcccaacgcacgagaaccgcttgtacccaggaggtggaggttgcagtgagccgaagttgcaccattgcactccaccctgggcgacagagcaagattctatcaaaaaaaaaaaaaggcagtggcaagtaagttatagaagagaaatgctgctagaaggaattaagcgttgtagtaaatgcgtgcttatcctctaagcttgaagaagggagacgaaaatccatttgtttaaattcacatctcaaggagggagaacccgggctgtgttgggtggttgccaatttcctagaacggaatgtgtggggtatagaaaaaggaatgaataagcgttgtttttcaaatagggtccttgtaagttattgatgagagggaaaagattgactggggagggcttaaaatgatttgggaaaacaattgcttttgaggctcagtgacaacggcaaagattacaacttaaaaaaaaaaaataaataaaaaataaaggaagttgcacggttattttgcaacacaagggggcggcaaggtccccatttttatcctgtaatactgtatccctaacaaagatttggtctctgctatcttacattattaatgtttctcagatggctgaggggctcgcttcatctgttccgtctgacacttatctcaagtgtgtctgtcattcctaatgttctcaggatgtgctctgataaaaccctccccataacctcagttaataaaaatttacagaagacttctcaaatacctgagttgtttttaatacctgtacaaaggagtaaataggaccctgagtctattaaaatgtaattcaaagtagcatatgattgactgacagtcatgtaaactgtatctttctttttctgatttaataaaaaatacatttacttctaaa

SEQ ID NO: 2122 - DNA, 3303 bp, Homo sapiens
  source 1..3303: mol_type = unassigned DNA; mol_type = unassigned DNA
gtattcagccagcaggctctgcacaaggaagcaaagtgcagggagccaggctccaccgacagccaggcactgggcagcacgcactggagacccaggaccctgtgcaggagcagctccgggtgacacgaggggactgaagatactcccacaggggctcagcaggagcaatgggtaaccaaatgagtgttccccaaagagttgaagaccaagagaatgaaccagaagcagagacttaccaggacaacgcgtctgctctgaacggggttccagtggtggtgtcgacccacacagttcagcacttagaggaagtcgacttgggaataagtgtcaagacggataatgtggccacttcttcccccgagacaacggagataagtgctgttgcggatgccaacggaaagaatcttgggaaagaggccaaacccgaggcaccagctgctaaatctcgttttttcttgatgctctctcggcctgtaccaggacgtaccggagaccaagccgcagattcatcccttggatcagtgaagcttgatgtcagctccaataaagctccagcgaacaaagacccaagtgagagctggacacttccggtggcagctggaccggggcaggacacagataaaaccccagggcacgccccggcccaagacaaggtcctctctgccgccagggatcccacgcttctcccacctgagacagggggagcaggaggagaagctccctccaagcccaaggactccagcttttttgacaaattcttcaagctggacaagggacaggaaaaggtgccaggtgacagccaacaggaagccaagagggcagagcatcaagacaaggtggatgaggttcctggcttatcagggcagtccgatgatgtccctgcagggaaggacatagttgacggcaaggaaaaagaaggacaagaacttggaactgcggattgctctgtccctggggacccagaaggactggagactgcaaaggacgattcccaggcagcagctatagcagagaataataattccatcatgagtttctttaaaactctggtttcacctaacaaagctgaaacaaaaaaggacccagaagacacgggtgctgaaaagtcacccaccacttcagctgaccttaagtcagacaaagccaactttacatcccaggagacccaaggggctggcaagaattccaaaggatgcaacccatcggggcacacacagtccgtgacaacccctgaacctgcgaaggaaggcaccaaggagaaatcaggacccacctctctgcctctgggcaaactgttttggaaaaagtcagttaaagaggactcagtccccacaggtgcggaggagaatgtggtgtgtgagtcaccagtagagattataaagtccaaggaagtagaatcagccttacaaacagtggacctcaacgaaggagatgctgcacctgaacccacagaagcgaaactcaaaagagaagaaagcaaaccaagaacctctctgatggcgtttctcagacaaatgtcagtgaaaggggatggagggatcacccactcagaagaaataaatgggaaagactccagctgccaaacatcagactccacagaaaagactatcacaccgccagagcctgaaccaacaggagcaccacagaagggtaaagagggctcctcgaaggacaagaagtcagcagccgagatgaacaagcagaagagcaacaagcaggaagccaaagaaccagcccagtgcacagagcaggccacggtggacacgaactcactgcagaatggggacaagctccaaaagagacctgagaagcggcagcagtcccttgggggcttctttaaaggcctgggaccaaagcggatgttggatgctcaagtgcaaacagacccagtatccatcggaccagttggcaaatccaagtaaacaaatcagcacggttcccaccaggttctcctgccaccaagatgtgttctccttactccatctcctccccaaacacgctccatgtatatattcttctgatggccagcaaatgaaattctgcctagaaattaagcccgagctgttgtatattgaggtgtattatttacgtctctggtccagtcttttctggcaaataacagtaaagatggtttagcaggtcacctagttgggtcagaagagtcgatgatcaccaagcaggaaagggagggaatagaggaatgtgttcgggttaagtgatgaaaatggcagtggtggccgggcgtggtggctctcgcctgtaatctcagcactttgggaggccgaggcaggtggatcacctgaggtcaggagttcaagactagcctggccaacatcatgaaaccccgtctctactaaaaatacaaaaattagccaggcatggtggcacacacctgtagtcccagctactcgggagcccaacgcacgagaaccgcttgtacccaggaggtggaggttgcagtgagccgaagttgcaccattgcactccaccctgggcgacagagcaagattctatcaaaaaaaaaaaaaggcagtggcaagtaagttatagaagagaaatgctgctagaaggaattaagcgttgtagtaaatgcgtgcttatcctctaagcttgaagaagggagacgaaaatccatttgtttaaattcacatctcaaggagggagaacccgggctgtgttgggtggttgccaatttcctagaacggaatgtgtggggtatagaaaaaggaatgaataagcgttgtttttcaaatagggtccttgtaagttattgatgagagggaaaagattgactggggagggcttaaaatgatttgggaaaacaattgcttttgaggctcagtgacaacggcaaagattacaacttaaaaaaaaaaaataaataaaaaataaaggaagttgcacggttattttgcaacacaagggggcggcaaggtccccatttttatcctgtaatactgtatccctaacaaagatttggtctctgctatcttacattattaatgtttctcagatggctgaggggctcgcttcatctgttccgtctgacacttatctcaagtgtgtctgtcattcctaatgttctcaggatgtgctctgataaaaccctccccataacctcagttaataaaaatttacagaagacttctcaaatacctgagttgtttttaatacctgtacaaaggagtaaataggaccctgagtctattaaaatgtaattcaaagtagcatatgattgactgacagtcatgtaaactgtatctttctttttctgatttaataaaaaatacatttacttctaaa

SEQ ID NO: 2123 - DNA, 882 bp, Homo sapiens
  source 1..882: mol_type = unassigned DNA; mol_type = unassigned DNA
agaataataattccatcatgagtttctttaaaactctggtttcacctaacaaagctgaaacaaaaaaggacccagaagacacgggtgctgaaaagtcacccaccacttcagctgaccttaagtcagacaaagccaactttacatcccaggagacccaaggggctggcaagaattccaaaggatgcaacccatcggggcacacacagtccgtgacaacccctgaacctgcgaaggaaggcaccaaggagaaatcaggacccacctctctgcctctgggcaaactgttttggaaaaagtcagttaaagaggactcagtccccacaggtgcggaggagaattcagtgaaaggggatggagggatcacccactcagaagaaataaatgggaaagactccagctgccaaacatcagactccacagaaaagactatcacaccgccagagcctgaaccaacaggagcaccacagaagggtaaagagggctcctcgaaggacaagaagtcagcagccgagatgaacaagcagaagagcaacaagcaggaagccaaagaaccagcccagtgcacagagcaggccacggtggacacgaactcactgcagaatggggacaagctccaaaagagacctgagaagcggcagcagtcccttgggggcttctttaaaggcctgggaccaaagcggatgttggatgctcaagtgcaaacagacccagtatccatcggaccagttggcaaatccaagtaaacaaatcagcacggttcccaccaggttctcctgccaccaagatgtgttctccttactccatctcctccccaaacacgctccatgtatatattcttctgatggccagcaaatgaaattctgcctagaaattaagcccgag

SEQ ID NO: 2124 - DNA, 1299 bp, Homo sapiens
  source 1..1299: mol_type = unassigned DNA; mol_type = unassigned DNA
tgagtttacgcagacgcagaaaacgcaggcaaacctgaggtcctcagaatggcgggcacaggtttggtggctggagaggttgtggtggatgcgctgccgtattttgatcaaggttatgaagcccctggtgtgcgggaagcggctgcagcgctggtggaggaggaaactcgcagataccgacctactaagaactacctgagctacctgacagccccggattattctgcctttgaaactgacataatgagaaatgaatttgaaagactggctgctcgacaaccaattgaattgctcagtatgaaacgatatgagcttccagccccctcctctggtcaaaaaaatgacattactgcatggcaagaatgtgtaaacaattctatggcccagttagagcatcaagcagttagaattgagaatctggaactaatgtcacagcatggatgtaatgcctggaaagtatacaatgaaaatctagttcatatgattgaacacgcacagaaggaacttcagaagttaagaaaacatattcaagatttaaactggcagagaaagaacatgcaactcacagctggatctaaattgagagaaatggagtcaaattgggtatccctggtcagtaagaattatgagattgaacggactattgttcagctagaaaatgaaatctatcaaattaagcagcaacatggagaggcaaacaaagaaaacatccggcaagacttctgaaaagacaatttagcaggtagaagaaaagttgggctttcacaaaaggcatctgaacttttaatgaactttgaaggacaacagcatcttcccaaaaccattgatgtttaagtgtttagaaatcatagaaggtgtaggctgctgtggtaattctatttgtatatctcaacagaattaaaatgtctagcttggtggtatttttatagccataaaagaaaatctttaggctttcaaaataaggatgactttagaataatattgtgtcatagaattaattttcagccatgtggaccatattttgtatccaaggatccttatttaaagctttcaacatgtacaggaagttggaaatttttggtttatgactttgtctaataaagagatagttctaaacacattcttgatcaccaaacaacttcagaaagacagtgactgtacagttatcattatcatcatcatcgtcatcatcataggtaacagttatatcaagcttaatatgtgctgaacattgttctgaacactttaggtagatgaactagatgtatgtgaataaaaattatttggtcctcacaaaaa

SEQ ID NO: 2125 - DNA, 891 bp, Homo sapiens
  source 1..891: mol_type = unassigned DNA; mol_type = unassigned DNA
cagacgcagaaaacgcaggcaaacctgaggtcctcagaatggcgggcacaggtttggtggctggagaggttgtggtggatgcgctgccgtattttgatcaaggttatgaagcccctggtgtgcgggaagcggctgcagcgctggtggaggaggaaactcgcagataccgacctactaagaactacctgagctacctgacagccccggattattctgcctttgaaatatgagcttccagccccctcctctggtcaaaaaaatgacattactgcatggcaagaatgtgtaaacaattctatggcccagttagagcatcaagcagttagaattgagaatctggaactaatgtcacagcatggatgtaatgcctggaaagtatacaatgaaaatctagttcatatgattgaacacgcacagaaggaacttcagaagttaagaaaacatattcaagatttaaactggcagagaaagaacatgcaactcacagctggatctaaattgagagaaatggagtcaaattgggtatccctggtcagtaagaattatgagattgaacggactattgttcagctagaaaatgaaatctatcaaattaagcagcaacatggagaggcaaacaaagaaaacatccggcaagacttctgaaaagacaatttagcaggtagaagaaaagttgggctttcacaaaaggcatctgaacttttaatgaactttgaaggacaacagcatcttcccaaaaccattgatgtttaagtgtttagaaatcatagaaggtgtaggctgctgtggtaattctatttgtatatctcaacagaattaaaatgtctagcttggtggtatttttatagccataaaagaaaatctttaggctttcaaaataaggatgacttt

SEQ ID NO: 2126 - DNA, 2454 bp, Homo sapiens
  source 1..2454: mol_type = unassigned DNA; mol_type = unassigned DNA
gagctttgtcagtaacagttgattgttacattcagtaacactgaatgtcagtgcagtccaatttacaggctggagcagcagctgcatcctgcatttccccgaagtattacatgattttcactccttgcaaactttgccatctttgttgcagagaatcggaaatcaatatgcatagcaaagtcacaatcatatgcatcagatttctcttttggtttcttttgctctgcatgcttattgggaagtcacatactgaagatgacatcataattgcaacaaagaatggaaaagtcagagggatgaacttgacagtttttggtggcacggtaacagcctttcttggaattccctatgcacagccacctcttggtagacttcgattcaaaaagccacagtctctgaccaagtggtctgatatttggaatgccacaaaatatgcaaattcttgctgtcagaacatagatcaaagttttccaggcttccatggatcagagatgtggaacccaaacactgacctcagtgaagactgtttatatctaaatgtatggattccagcacctaaaccaaaaaatgccactgtattgatatggatttatggtggtggttttcaaactggaacatcatctttacatgtttatgatggcaagtttctggctcgggttgaaagagttattgtagtgtcaatgaactatagggtgggtgccctaggattcttagctttgccaggaaatcctgaggctccagggaacatgggtttatttgatcaacagttggctcttcagtgggttcaaaaaaatatagcagcctttggtggaaatcctaaaagtgtaactctctttggagaaagtgcaggagcagcttcagttagcctgcatttgctttctcctggaagccattcattgttcaccagagccattctgcaaagtggatcctttaatgctccttgggcggtaacatctctttatgaagctaggaacagaacgttgaacttagctaaattgactggttgctctagagagaatgagactgaaataatcaagtgtcttagaaataaagatccccaagaaattcttctgaatgaagcatttgttgtcccctatgggactcctttgtcagtaaactttggtccgaccgtggatggtgattttctcactgacatgccagacatattacttgaacttggacaatttaaaaaaacccagattttggtgggtgttaataaagatgaagggacagcttttttagtctatggtgctcctggcttcagcaaagataacaatagtatcataactagaaaagaatttcaggaaggtttaaaaatattttttccaggagtgagtgagtttggaaaggaatccatcctttttcattacacagactgggtagatgatcagagacctgaaaactaccgtgaggccttgggtgatgttgttggggattataatttcatatgccctgccttggagttcaccaagaagttctcagaatggggaaataatgcctttttctactattttgaacaccgatcctccaaacttccgtggccagaatggatgggagtgatgcatggctatgaaattgaatttgtctttggtttacctctggaaagaagagataattacacaaaagccgaggaaattttgagtagatccatagtgaaacggtgggcaaattttgcaaaatatgggaatccaaatgagactcagaacaatagcacaagctggcctgtcttcaaaagcactgaacaaaaatatctaaccttgaatacagagtcaacaagaataatgacgaaactacgtgctcaacaatgtcgattctggacatcattttttccaaaagtcttggaaatgacaggaaatattgatgaagcagaatgggagtggaaagcaggattccatcgctggaacaattacatgatggactggaaaaatcaatttaacgattacactagcaagaaagaaagttgtgtgggtctctaattaatagatttaccctttatagaacatattttcctttagatcaaggcaaaaatatcaggagcttttttacacacctactaaaaaagttattatgtagctgaaacaaaaatgccagaaggataatattgattcctcacatctttaacttagtattttacctagcatttcaaaacccaaatggctagaacgtgtttaattaaatttcacaatataaagttctacagttaattatgtgcatattaaaacaatggcctggttcaatttctttctttccttaataaatttaagtttttccccccaaaattatcagtgctctgcttttagtcacgtgtattttcattaccactcgtaaaaaggtatcttttttaaatgaattaaatattgaaacactgtacaccatagtttacaatattatgtttcctaattaaaataagaattgaatgtcaatatgagatattaaaataagcacagaaaatca

SEQ ID NO: 2127 - DNA, 2522 bp, Homo sapiens
  source 1..2522: mol_type = unassigned DNA; mol_type = unassigned DNA
agtaacagttgattgttacattcagtaacactgaatgtcagtgcagtccaatttacaggctggagcagcagctgcatcctgcatttccccgaagtattacatgattttcactccttgcaaactttgccatctttgttgcagagaatcggaaatcaatatgcatagcaaagtcacaatcatatgcatcagatttctcttttggtttcttttgctctgcatgcttattgggaagtcacatactgaagatgacatcataattgcaacaaagaatggaaaagtcagagggatgaacttgacagtttttggtggcacggtaacagcctttcttggaattccctatgcacagccacctcttggtagacttcgattcaaaaagccacagtctctgaccaagtggtctgatatttggaatgccacaaaatatgcaaattcttgctgtcagaacatagatcaaagttttccaggcttccatggatcagagatgtggaacccaaacactgacctcagtgaagactgtttatatctaaatgtatggattccagcacctaaaccaaaaaatgccactgtattgatatggatttatggtggtggttttcaaactggaacatcatctttacatgtttatgatggcaagtttctggctcgggttgaaagagttattgtagtgtcaatgaactatagggtgggtgccctaggattcttagctttgccaggaaatcctgaggctccagggaacatgggtttatttgatcaacagttggctcttcagtgggttcaaaaaaatatagcagcctttggtggaaatcctaaaagtgtaactctctttggagaaagtgcaggagcagcttcagttagcctgcatttgctttctcctggaagccattcattgttcaccagagccattctgcaaagtggatcctttaatgctccttgggcggtaacatctctttatgaagctaggaacagaacgttgaacttagctaaattgactggttgctctagagagaatgagactgaaataatcaagtgtcttagaaataaagatccccaagaaattcttctgaatgaagcatttgttgtcccctatgggactcctttgtcagtaaactttggtccgaccgtggatggtgattttctcactgacatgccagacatattacttgaacttggacaatttaaaaaaacccagattttggtgggtgttaataaagatgaagggacagcttttttagtctatggtgctcctggcttcagcaaagataacaatagtatcataactagaaaagaatttcaggaaggtttaaaaatattttttccaggagtgagtgagtttggaaaggaatccatcctttttcattacacagactgggtagatgatcagagacctgaaaactaccgtgaggccttgggtgatgttgttggggattataatttcatatgccctgccttggagttcaccaagaagttctcagaatggggaaataatgcctttttctactattttgaacaccgatcctccaaacttccgtggccagaatggatgggagtgatgcatggctatgaaattgaatttgtctttggtttacctctggaaagaagagataattacacaaaagccgaggaaattttgagtagatccatagtgaaacggtgggcaaattttgcaaaatatgggaatccaaatgagactcagaacaatagcacaagctggcctgtcttcaaaagcactgaacaaaaatatctaaccttgaatacagagtcaacaagaataatgacgaaactacgtgctcaacaatgtcgattctggacatcattttttccaaaagtcttggaaatgacaggctgaggagtaggaggaggggaaaaggagctgttggtctcgctgtctctggattgacagaggtggaagaaaatccacatgaaatattgatgaagcagaatgggagtggaaagcaggattccatcgctggaacaattacatgatggactggaaaaatcaatttaacgattacactagcaagaaagaaagttgtgtgggtctctaattaatagatttaccctttatagaacatattttcctttagatcaaggcaaaaatatcaggagcttttttacacacctactaaaaaagttattatgtagctgaaacaaaaatgccagaaggataatattgattcctcacatctttaacttagtattttacctagcatttcaaaacccaaatggctagaacgtgtttaattaaatttcacaatataaagttctacagttaattatgtgcatattaaaacaatggcctggttcaatttctttctttccttaataaatttaagtttttccccccaaaattatcagtgctctgcttttagtcacgtgtattttcattaccactcgtaaaaaggtatcttttttaaatgaattaaatattgaaacactgtacaccatagtttacaatattatgtttcctaattaaaataagaattgaatgtcaatatgagatattaaaataagcacagaaaatc

SEQ ID NO: 2128 - DNA, 2527 bp, Homo sapiens
  source 1..2527: mol_type = unassigned DNA; mol_type = unassigned DNA
agtaacagttgattgttacattcagtaacactgaatgtcagtgcagtccaatttacaggctggagcagcagctgcatcctgcatttccccgaagtattacatgattttcactccttgcaaactttgccatctttgttgcagagaatcggaaatcaatatgcatagcaaagtcacaatcatatgcatcagatttctcttttggtttcttttgctctgcatgcttattgggaagtcacatactgaagatgacatcataattgcaacaaagaatggaaaagtcagagggatgaacttgacagtttttggtggcacggtaacagcctttcttggaattccctatgcacagccacctcttggtagacttcgattcaaaaagccacagtctctgaccaagtggtctgatatttggaatgccacaaaatatgcaaattcttgctgtcagaacatagatcaaagttttccaggcttccatggatcagagatgtggaacccaaacactgacctcagtgaagactgtttatatctaaatgtatggattccagcacctaaaccaaaaaatgccactgtattgatatggatttatggtggtggttttcaaactggaacatcatctttacatgtttatgatggcaagtttctggctcgggttgaaagagttattgtagtgtcaatgaactatagggtgggtgccctaggattcttagctttgccaggaaatcctgaggctccagggaacatgggtttatttgatcaacagttggctcttcagtgggttcaaaaaaatatagcagcctttggtggaaatcctaaaagtgtaactctctttggagaaagtgcaggagcagcttcagttagcctgcatttgctttctcctggaagccattcattgttcaccagagccattctgcaaagtggatcctttaatgctccttgggcggtaacatctctttatgaagctaggaacagaacgttgaacttagctaaattgactggttgctctagagagaatgagactgaaataatcaagtgtcttagaaataaagatccccaagaaattcttctgaatgaagcatttgttgtcccctatgggactcctttgtcagtaaactttggtccgaccgtggatggtgattttctcactgacatgccagacatattacttgaacttggacaatttaaaaaaacccagattttggtgggtgttaataaagatgaagggacagcttttttagtctatggtgctcctggcttcagcaaagataacaatagtatcataactagaaaagaatttcaggaaggtttaaaaatattttttccaggagtgagtgagtttggaaaggaatccatcctttttcattacacagactgggtagatgatcagagacctgaaaactaccgtgaggccttgggtgatgttgttggggattataatttcatatgccctgccttggagttcaccaagaagttctcagaatggggaaataatgcctttttctactattttgaacaccgatcctccaaacttccgtggccagaatggatgggagtgatgcatggctatgaaattgaatttgtctttggtttacctctggaaagaagagataattacacaaaagccgaggaaattttgagtagatccatagtgaaacggtgggcaaattttgcaaaatatggctgttcttcctcaaccatactaaactacgttcttgaaacagaacctgtggttttgatttgatattcattgaagtactatgatgggaatccaaatgagactcagaacaatagcacaagctggcctgtcttcaaaagcactgaacaaaaatatctaaccttgaatacagagtcaacaagaataatgacgaaactacgtgctcaacaatgtcgattctggacatcattttttccaaaagtcttggaaatgacaggaaatattgatgaagcagaatgggagtggaaagcaggattccatcgctggaacaattacatgatggactggaaaaatcaatttaacgattacactagcaagaaagaaagttgtgtgggtctctaattaatagatttaccctttatagaacatattttcctttagatcaaggcaaaaatatcaggagcttttttacacacctactaaaaaagttattatgtagctgaaacaaaaatgccagaaggataatattgattcctcacatctttaacttagtattttacctagcatttcaaaacccaaatggctagaacgtgtttaattaaatttcacaatataaagttctacagttaattatgtgcatattaaaacaatggcctggttcaatttctttctttccttaataaatttaagtttttccccccaaaattatcagtgctctgcttttagtcacgtgtattttcattaccactcgtaaaaaggtatcttttttaaatgaattaaatattgaaacactgtacaccatagtttacaatattatgtttcctaattaaaataagaattgaatgtcaatatgagatattaaaataagcacagaaaatc

SEQ ID NO: 2129 - DNA, 702 bp, Homo sapiens
  source 1..702: mol_type = unassigned DNA; mol_type = unassigned DNA
gcagtccaatttacaggctggagcagcagctgcatcctgcatttccccgaagtattacatgattttcactccttgcaaactttgccatctttgttgcagagaatcgggaatccaaatgagactcagaacaatagcacaagctggcctgtcttcaaaagcactgaacaaaaatatctaaccttgaatacagagtcaacaagaataatgacgaaactacgtgctcaacaatgtcgattctggacatcattttttccaaaagtcttggaaatgacaggaaatattgatgaagcagaatgggagtggaaagcaggattccatcgctggaacaattacatgatggactggaaaaatcaatttaacgattacactagcaagaaagaaagttgtgtgggtctctaattaatagatttaccctttatagaacatattttcctttagatcaaggcaaaaatatcaggagcttttttacacacctactaaaaaagttattatgtagctgaaacaaaaatgccagaaggataatattgattcctcacatctttaacttagtattttacctagcatttcaaaacccaaatggctagaacgtgtttaattaaatttcacaatataaagttctacagttaattatgtgcatattaaaacaatggcctggttcaatttctttctttccttaataaatttaagtttttccccccaaaa

SEQ ID NO: 2130 - DNA, 739 bp, Homo sapiens
  source 1..739: mol_type = unassigned DNA; mol_type = unassigned DNA
gcagtccaatttacaggctggagcagcagctgcatcctgcatttccccgaagtattacatgattttcactccttgcaaactttgccatctttgttgcagagaatcgggaatccaaatgagactcagaacaatagcacaagctggcctgtcttcaaaagcactgaacaaaaatatctaaccttgaatacagagtcaacaagaataatgacgaaactacgtgctcaacaatgtcgattctggacatcattttttccaaaagtcttggaaatgacagagcctatatgctgctactgtgagccaggaactgcactagcagctagagctgcacagatgaaaatgacagggtctgcttactcacagtgaagtggagtcagggcccaggaccatggaaagcttttaagaagagaagatacctgcactgaatctcaatgtgaaggcaaagtggagagaagccagataagcaggaaccagagatgaagtgtcttgtgcatcatgctaaagaatttaaattatattctgagtaaagccatttagtaattttaaatgagaaactgatatgttctggttattgattcataaatgtataatcttttactatattcacgagttattcttttttacctttgtcttcttagagtctagattgtaagaatattatatggcatcaacataataatttcatttctgaggtagggtctttcttccaaatagctgcttttgtttgctggttcattcgcat

SEQ ID NO: 2131 - DNA, 3959 bp, Homo sapiens
  source 1..3959: mol_type = unassigned DNA; mol_type = unassigned DNA
tttttttttttttttttgcttaaaaaaaagccatgacggctctcccacaattcatcttccctgcgccatctttgtattatttctaatttattttggatgtcaaaaggcactgatgaagatattttctctggagtctccttctttctaacccggctctcccgatgtgaaccgagccgtcgtccgcccgccgccgccgccgccgccgccgccgcccgccccgcagcccaccatgtctcgccgcaagcaaggcaaaccccagcacttaagcaaacgggaattctcgcccgagcctcttgaagccattcttacagatgatgaaccagaccacggcccgttgggagctccagaaggggatcatgacctcctcacctgtgggcagtgccagatgaacttcccattgggggacattcttatttttatcgagcacaaacggaaacaatgcaatggcagcctctgcttagaaaaagctgtggataagccaccttccccttcaccaatcgagatgaaaaaagcatccaatcccgtggaggttggcatccaggtcacgccagaggatgacgattgtttatcaacgtcatctagaggaatttgccccaaacaggaacacatagcagataaacttctgcactggaggggcctctcctcccctcgttctgcacatggagctctaatccccacgcctgggatgagtgcagaatatgccccgcagggtatttgtaaagatgagcccagcagctacacatgtacaacttgcaaacagccattcaccagtgcatggtttctcttgcaacacgcacagaacactcatggattaagaatctacttagaaagcgaacacggaagtcccctgaccccgcgggttggtatcccttcaggactaggtgcagaatgtccttcccagccacctctccatgggattcatattgcagacaataacccctttaacctgctaagaataccaggatcagtatcgagagaggcttccggcctggcagaagggcgctttccacccactccccccctgtttagtccaccaccgagacatcacttggacccccaccgcatagagcgcctgggggcggaagagatggccctggccacccatcacccgagtgcctttgacagggtgctgcggttgaatccaatggctatggagcctcccgccatggatttctctaggagacttagagagctggcagggaacacgtctagcccaccgctgtccccaggccggcccagccctatgcaaaggttactgcaaccattccagccaggtagcaagccgcccttcctggcgacgccccccctccctcctctgcaatccgcccctcctccctcccagcccccggtcaagtccaagtcatgcgagttctgcggcaagacgttcaaatttcagagcaacctggtggtgcaccggcgcagccacacgggcgagaagccctacaagtgcaacctgtgcgaccacgcgtgcacccaggccagcaagctgaagcgccacatgaagacgcacatgcacaaatcgtcccccatgacggtcaagtccgacgacggtctctccaccgccagctccccggaacccggcaccagcgacttggtgggcagcgccagcagcgcgctcaagtccgtggtggccaagttcaagagcgagaacgaccccaacctgatcccggagaacggggacgaggaggaagaggaggacgacgaggaagaggaagaagaggaggaagaggaggaggaggagctgacggagagcgagagggtggactacggcttcgggctgagcctggaggcggcgcgccaccacgagaacagctcgcggggcgcggtcgtgggcgtgggcgacgagagccgcgccctgcccgacgtcatgcagggcatggtgctcagctccatgcagcacttcagcgaggccttccaccaggtcctgggcgagaagcataagcgcggccacctggccgaggccgagggccacagggacacttgcgacgaagactcggtggccggcgagtcggaccgcatagacgatggcactgttaatggccgcggctgctccccgggcgagtcggcctcggggggcctgtccaaaaagctgctgctgggcagccccagctcgctgagccccttctctaagcgcatcaagctcgagaaggagttcgacctgcccccggccgcgatgcccaacacggagaacgtgtactcgcagtggctcgccggctacgcggcctccaggcagctcaaagatcccttccttagcttcggagactccagacaatcgccttttgcctcctcgtcggagcactcctcggagaacgggagtttgcgcttctccacaccgcccggggagctggacggagggatctcggggcgcagcggcacgggaagtggagggagcacgccccatattagtggtccgggcccgggcaggcccagctcaaaagagggcagacgcagcgacacttgttcttcacacacccccattcggcgtagtacccagagagctcaagatgtgtggcagttttcggatggaagctcgagagcccttaagttctgagaaaatttgaagcccccaggggtggggtggacgcgtgccgcccagtcgacgtcagcgtggtctgtcatcctgctagtttgtgatgttttctgacagtagcctccaagaagccgttgtgcgaagacagagtcctgcagagtccttccagcctaggcctgcagcgccattttatttatattttttaataaaaagtaaaaacaaaaaaacagacccacattggaacagtgaatcagtcccatagagagggcccgtggaccatcgctgtcatgagtgatgccctggcccttctgaaaccagccaacctaattacctgtattgtggaaatgcgcatgagtccccaaccccttgtttctatacattctatgttgtcttttaaaaagtgtgcttaacattgacacaataaatgttggagctttaggtggtgtttgcttgttctttaatttttaatgcttataagacaatgaggctgcttatgattttgtacttctgtacctgtttcctacagacacccatcgggtgggtaggaggaacagatttgagaaatgggcaggagatgtaggaggggaactaggttaccgcttatcagatggcataaattttcaaggagaatcaaaatgcaaaacttgggaataaatcatagcaatatcataattaatgtagtagtaatattgctgtttattaatgctgaagtgtggttttcctaactgtctgacttataatttgcataccattaaataatgcataatatggcacgccgaatcctgtttttcaaatatatgcttttggtggctaccatgcaggatttgaatttgtcttttaatttagcttaggaaagaacatcactgggcgagcggtaaatcctaaagaaggtgataaatgtcagtagtttcttattaaatattctaattttaggttcccaaaccttcaggaaatatatcttaatgcagacaaacaaacataaaacttctttagtacttacatcaggaaatttggggcagattttagaggggggaaattataggaggaaagaagttcacatcagaacagacaatcacagcaatgctctattccttagaaattagtgccacaaataagttacatctacaaacaggtggtaaaaattctttctggcccagttaatttgcacagaacttttctcagtttggtattttttactgcttggagatccagaagagaattagaaacaacatagcaaattaaaataggtttgtcaataatagagctcagacacctgtgtgctgtagattcacatacaggccgtgaacctaagtggggaaaatcctacctatccaccttctggctagattacctagcttagtgaaaagatagccaaataattggcatgtgaattatttcctgcttattcataataaataatgactgtcta

SEQ ID NO: 2132 - DNA, 2427 bp, Homo sapiens
  source 1..2427: mol_type = unassigned DNA; mol_type = unassigned DNA
tttttttcatctctctctctctctctccctctatctctcttctctctctctccctctttttttttttttttttttttttttttttgcttaaaaaaaagccatgacggctctcccacaattcatcttccctgcgccatctttgtattatttctaatttattttggatgtcaaaaggcactgatgaagatattttctctggagtctccttctttctaacccggctctcccgatgtgaaccgagccgtcgtccgcccgccgccgccgccgccgccgccgccgcccgccccgcagcccaccatgtctcgccgcaagcaaggcaaaccccagcacttaagcaaacgggaattctcgcccgagcctcttgaagccattcttacagatgatgaaccagaccacggcccgttgggagctccagaaggggatcatgacctcctcacctgtgggcagtgccagatgaacttcccattgggggacattcttatttttatcgagcacaaacggaaacaatgcaatggcagcctctgcttagaaaaagctgtggataagccaccttccccttcaccaatcgagatgaaaaaagcatccaatcccgtggaggttggcatccaggtcacgccagaggatgacgattgtttatcaacgtcatctagaggaatttgccccaaacaggaacacatagcagataaacttctgcactggaggggcctctcctcccctcgttctgcacatggagctctaatccccacgcctgggatgagtgcagaatatgccccgcagggtatttgtaaagatgagcccagcagctacacatgtacaacttgcaaacagccattcaccagtgcatggtttctcttgcaacacgcacagaacactcatggattaagaatctacttagaaagcgaacacggaagtcccctgaccccgcgggttcttcacacacccccattcggcgtagtacccagagagctcaagatgtgtggcagttttcggatggaagctcgagagcccttaagttctgagaaaatttgaagcccccaggggtggggtggacgcgtgccgcccagtcgacgtcagcgtggtctgtcatcctgctagtttgtgatgttttctgacagtagcctccaagaagccgttgtgcgaagacagagtcctgcagagtccttccagcctaggcctgcagcgccattttatttatattttttaataaaaagtaaaaacaaaaaaacagacccacattggaacagtgaatcagtcccatagagagggcccgtggaccatcgctgtcatgagtgatgccctggcccttctgaaaccagccaacctaattacctgtattgtggaaatgcgcatgagtccccaaccccttgtttctatacattctatgttgtcttttaaaaagtgtgcttaacattgacacaataaatgttggagctttaggtggtgtttgcttgttctttaatttttaatgcttataagacaatgaggctgcttatgattttgtacttctgtacctgtttcctacagacacccatcgggtgggtaggaggaacagatttgagaaatgggcaggagatgtaggaggggaactaggttaccgcttatcagatggcataaattttcaaggagaatcaaaatgcaaaacttgggaataaatcatagcaatatcataattaatgtagtagtaatattgctgtttattaatgctgaagtgtggttttcctaactgtctgacttataatttgcataccattaaataatgcataatatggcacgccgaatcctgtttttcaaatatatgcttttggtggctaccatgcaggatttgaatttgtcttttaatttagcttaggaaagaacatcactgggcgagcggtaaatcctaaagaaggtgataaatgtcagtagtttcttattaaatattctaattttaggttcccaaaccttcaggaaatatatcttaatgcagacaaacaaacataaaacttctttagtacttacatcaggaaatttggggcagattttagaggggggaaattataggaggaaagaagttcacatcagaacagacaatcacagcaatgctctattccttagaaattagtgccacaaataagttacatctacaaacaggtggtaaaaattctttctggcccagttaatttgcacagaacttttctcagtttggtattttttactgcttggagatccagaagagaattagaaacaacatagcaaattaaaataggtttgtcaataatagagctcagacacctgtgtgctgtagattcacatacaggccgtgaacctaagtggggaaaatcctacctatccaccttctggctagattacctagcttagtgaaaagatagccaaataattggcatgtgaattatttcctgcttattcataataaataatgactgtcta

SEQ ID NO: 2133 - DNA, 1508 bp, Homo sapiens
  source 1..1508: mol_type = unassigned DNA; mol_type = unassigned DNA
gcggatcagacgcggcgcgcggcggtgtgaagttacagcccggccagccgagcctcttgaagccattcttacagatgatgaaccagaccacggcccgttgggagctccagaaggggatcatgacctcctcacctgtgggcagtgccagatgaacttcccattgggggacattcttatttttatcgagcacaaacggaaacaatgcaatggcagcctctgcttagaaaaagctgtggataagccaccttccccttcaccaatcgagatgaaaaaagcatccaatcccgtggaggttggcatccaggtcacgccagaggatgacgattgtttatcaacgtcatctagaggaatttgccccaaacaggaacacatagcagataaacttctgcactggaggggcctctcctcccctcgttctgcacatggagctctaatccccacgcctgggatgagtgcagaatatgccccgcagggtatttgtaaagatgagcccagcagctacacatgtacaacttgcaaacagccattcaccagtgcatggtttctcttgcaacacgcacagaacactcatggattaagaatctacttagaaagcgaacacggaagtcccctgaccccgcgggttcttcacacacccccattcggcgtagtacccagagagctcaagatgtgtggcagttttcggatggaagctcgagagcccttaagttctgagaaaatttgaagcccccaggggtggggtggacgcgtgccgcccagtcgacgtcagcgtggtctgtcatcctgctagtttgtgatgttttctgacagtagcctccaagaagccgttgtgcgaagacagagtcctgcagagtccttccagcctaggcctgcagcgccattttatttatattttttaataaaaagtaaaaacaaaaaaacagacccacattggaacagtgaatcagtcccatagagagggcccgtggaccatcgctgtcatgagtgatgccctggcccttctgaaaccagccaacctaattacctgtattgtggaaatgcgcatgagtccccaaccccttgtttctatacattctatgttgtcttttaaaaagtgtgcttaacattgacacaataaatgttggagctttaggtggtgtttgcttgttctttaatttttaatgcttataagacaatgaggctgcttatgattttgtacttctgtacctgtttcctacagacacccatcgggtgggtaggaggaacagatttgagaaatgggcaggagatgtaggaggggaactaggttaccgcttatcagatggcataaattttcaaggagaatcaaaatgcaaaacttgggaataaatcatagcaatatcataattaatgtagtagtaatattgctgtttattaatgctgaagtgtggttttcctaactgtctgacttataatttgcataccattaaataatgcataatatggcacgccgaatcctgtttttcaaatatatgcttttggtggctacc

SEQ ID NO: 2134 - DNA, 567 bp, Homo sapiens
  source 1..567: mol_type = unassigned DNA; mol_type = unassigned DNA
gaaaaaatggcacagtgatcgagtgttgaataatgatataaaaactgaatagaggttcttcacacacccccattcggcgtagtacccagagagctcaagatgtgtggcagttttcggatggaagctcgagagcccttaagttctgagaaaatttgaagcccccaggggtggggtggacgcgtgccgcccagtcgacgtcagcgtggtctgtcatcctgctagtttgtgatgttttctgacagtagcctccaagaagccgttgtgcgaagacagagtcctgcagagtccttccagcctaggcctgcagcgccattttatttatattttttaataaaaagtaaaaacaaaaaaacagacccacattggaacagtgaatcagtcccatagagagggcccgtggaccatcgctgtcatgagtgatgccctggcccttctgaaaccagccaacctaattacctgtattgtggaaatgcgcatgagtccccaaccccttgtttctatacattctatgttgtcttttaaaaagtgtgcttaacattgacacaataaatgttggagctttaggtg

SEQ ID NO: 2135 - DNA, 2316 bp, Homo sapiens
  source 1..2316: mol_type = unassigned DNA; mol_type = unassigned DNA
tttttttttttttttttttttttttgcttaaaaaaaagccatgacggctctcccacaattcatcttccctgcgccatctttgtattatttctaatttattttggatgtcaaaaggcactgatgaagatattttctctggagtctccttctttctaacccggctctcccgatgtgaaccgagccgtcgtccgcccgccgccgccgccgccgccgccgccgcccgccccgcagcccaccatgtctcgccgcaagcaaggcaaaccccagcacttaagcaaacgggaattctcgcccgagcctcttgaagccattcttacagatgatgaaccagaccacggcccgttgggagctccagaaggggatcatgacctcctcacctgtgggcagtgccagatgaacttcccattgggggacattcttatttttatcgagcacaaacggaaacaatgcaatggcagcctctgcttagaaaaagctgtggataagccaccttccccttcaccaatcgagatgaaaaaagcatccaatcccgtggaggttggcatccaggtcacgccagaggatgacgattgtttatcaacgtcatctagaggaatttgccccaaacaggaacacatagcaggtaacccaagggggagctcagagaagagtccaggctgccagtgcaaaggtccagccctgtcgccaaggagaccctcagggaaatgcacaggcctccagctattcccacggcccctgtagctgagcgccagcttcttcctgggccaagctgaggctgtttcctgccgtgtccattctcctagcaacgcttctctttggccagtttgccatagtacctgagataaacttctgcactggaggggcctctcctcccctcgttctgcacatggagctctaatccccacgcctgggatgagtgcagaatatgccccgcagggtatttgtaaagatgagcccagcagctacacatgtacaacttgcaaacagccattcaccagtgcatggtttctcttgcaacacgcacagaacactcatggattaagaatctacttagaaagcgaacacggaagtcccctgaccccgcggagcaacctggtggtgcaccggcgcagccacacgggcgagaagccctacaagtgcaacctgtgcgaccacgcgtgcacccaggccagcaagctgaagcgccacatgaagacgcacatgcacaaatcgtcccccatgacggtcaagtccgacgacggtctctccaccgccagctccccggaacccggcaccagcgacttggtgggcagcgccagcagcgcgctcaagtccgtggtggccaagttcaagagcgagaacgaccccaacctgatcccggagaacggggacgaggaggaagaggaggacgacgaggaagaggaagaagaggaggaagaggaggaggaggagctgacggagagcgagagggtggactacggcttcgggctgagcctggaggcggcgcgccaccacgagaacagctcgcggggcgcggtcgtgggcgtgggcgacgagagccgcgccctgcccgacgtcatgcagggcatggtgctcagctccatgcagcacttcagcgaggccttccaccaggtcctgggcgagaagcataagcgcggccacctggccgaggccgagggccacagggacacttgcgacgaagactcggtggccggcgagtcggaccgcatagacgatggcactgttaatggccgcggctgctccccgggcgagtcggcctcggggggcctgtccaaaaagctgctgctgggcagccccagctcgctgagccccttctctaagcgcatcaagctcgagaaggagttcgacctgcccccggccgcgatgcccaacacggagaacgtgtactcgcagtggctcgccggctacgcggcctccaggcagctcaaagatcccttccttagcttcggagactccagacaatcgccttttgcctcctcgtcggagcactcctcggagaacgggagtttgcgcttctccacaccgcccggggagctggacggagggatctcggggcgcagcggcacgggaagtggagggagcacgccccatattagtggtccgggcccgggcaggcccagctcaaaagagggcagacgcagcgacacttgttcttcacacacccccattcggcgtagtacccagagagctcaagatgtgtggcagttttcggatggaagctcgagagcccttaagttctgagaaaatttgaagcccccaggggtggggtggacgcgtgccgcccagtcgacgtcagcgtggtctgtcatcctgcta

SEQ ID NO: 2136 - DNA, 562 bp, Homo sapiens
  source 1..562: mol_type = unassigned DNA; mol_type = unassigned DNA
ttttcaatcttctgggaaagagaagaatgttcccctccagttctgggcatattgaaggagcacggagctgttgggaaaagttgcaatgctaacatagacctccactgagagaatttcagaatcatttggtagttgagaagcgcctacttcatgcggaggccccgtgggaggagtggaagagttggcctcagcactggcgagtatcggatgggagctctgctcacttgataaacttctgcactggaggggcctctcctcccctcgttctgcacatggagctctaatccccacgcctgggatgagtgcagaatatgccccgcagggtatttgtaaagatgagcccagcagctacacatgtacaacttgcaaacagccattcaccagtgcatggtttctcttgcaacacgcacagaacactcatggattaagaatctacttagaaagcgaacacggaagtcccctgaccccgcgggttcttcacacacccccattcggcgtagtacccagagagctcaagatgtgtggcagttttcggatggaagctcgagagcccttaagttct

SEQ ID NO: 2137 - DNA, 5942 bp, Homo sapiens
  source 1..5942: mol_type = unassigned DNA; mol_type = unassigned DNA
ttttttttttttttttgcttaaaaaaaagccatgacggctctcccacaattcatcttccctgcgccatctttgtattatttctaatttattttggatgtcaaaaggcactgatgaagatattttctctggagtctccttctttctaacccggctctcccgatgtgaaccgagccgtcgtccgcccgccgccgccgccgccgccgccgccgcccgccccgcagcccaccatgtctcgccgcaagcaaggcaaaccccagcacttaagcaaacgggaattctcgcccgagcctcttgaagccattcttacagatgatgaaccagaccacggcccgttgggagctccagaaggggatcatgacctcctcacctgtgggcagtgccagatgaacttcccattgggggacattcttatttttatcgagcacaaacggaaacaatgcaatggcagcctctgcttagaaaaagctgtggataagccaccttccccttcaccaatcgagatgaaaaaagcatccaatcccgtggaggttggcatccaggtcacgccagaggatgacgattgtttatcaacgtcatctagaggaatttgccccaaacaggaacacatagcagataaacttctgcactggaggggcctctcctcccctcgttctgcacatggagctctaatccccacgcctgggatgagtgcagaatatgccccgcagggtatttgtaaagatgagcccagcagctacacatgtacaacttgcaaacagccattcaccagtgcatggtttctcttgcaacacgcacagaacactcatggattaagaatctacttagaaagcgaacacggaagtcccctgaccccgcgggttggtatcccttcaggactaggtgcagaatgtccttcccagccacctctccatgggattcatattgcagacaataacccctttaacctgctaagaataccaggatcagtatcgagagaggcttccggcctggcagaagggcgctttccacccactccccccctgtttagtccaccaccgagacatcacttggacccccaccgcatagagcgcctgggggcggaagagatggccctggccacccatcacccgagtgcctttgacagggtgctgcggttgaatccaatggctatggagcctcccgccatggatttctctaggagacttagagagctggcagggaacacgtctagcccaccgctgtccccaggccggcccagccctatgcaaaggttactgcaaccattccagccaggtagcaagccgcccttcctggcgacgccccccctccctcctctgcaatccgcccctcctccctcccagcccccggtcaagtccaagtcatgcgagttctgcggcaagacgttcaaatttcagagcaacctggtggtgcaccggcgcagccacacgggcgagaagccctacaagtgcaacctgtgcgaccacgcgtgcacccaggccagcaagctgaagcgccacatgaagacgcacatgcacaaatcgtcccccatgacggtcaagtccgacgacggtctctccaccgccagctccccggaacccggcaccagcgacttggtgggcagcgccagcagcgcgctcaagtccgtggtggccaagttcaagagcgagaacgaccccaacctgatcccggagaacggggacgaggaggaagaggaggacgacgaggaagaggaagaagaggaggaagaggaggaggaggagctgacggagagcgagagggtggactacggcttcgggctgagcctggaggcggcgcgccaccacgagaacagctcgcggggcgcggtcgtgggcgtgggcgacgagagccgcgccctgcccgacgtcatgcagggcatggtgctcagctccatgcagcacttcagcgaggccttccaccaggtcctgggcgagaagcataagcgcggccacctggccgaggccgagggccacagggacacttgcgacgaagactcggtggccggcgagtcggaccgcatagacgatggcactgttaatggccgcggctgctccccgggcgagtcggcctcggggggcctgtccaaaaagctgctgctgggcagccccagctcgctgagccccttctctaagcgcatcaagctcgagaaggagttcgacctgcccccggccgcgatgcccaacacggagaacgtgtactcgcagtggctcgccggctacgcggcctccaggcagctcaaagatcccttccttagcttcggagactccagacaatcgccttttgcctcctcgtcggagcactcctcggagaacgggagtttgcgcttctccacaccgcccggggagctggacggagggatctcggggcgcagcggcacgggaagtggagggagcacgccccatattagtggtccgggcccgggcaggcccagctcaaaagagggcagacgcagcgacacttgtgagtactgtgggaaagtcttcaagaactgtagcaatctcactgtccacaggagaagccacacgggcgaaaggccttataaatgcgagctgtgcaactatgcctgtgcccagagtagcaagctcaccaggcacatgaaaacgcatggccaggtggggaaggacgtttacaaatgtgaaatttgtaagatgccttttagcgtgtacagtaccctggagaaacacatgaaaaaatggcacagtgatcgagtgttgaataatgatataaaaactgaatagaggtatattaatacccctccctcactcccacctgacaccccctttttcaccactccccttccccatcgccctccagccccactccctgtaggatttttttctagtcccatgtgatttaaacaaacaaacaaacaaacagaagtaacgaagctaagaatatgagagtgcttgtcaccagcacacctgttttttttctttttctttttcttttttctttttccttttttttttttttcctttatgttctcaccgtttgaatgcatgatctgtatggggcaatactattgcattttacgcaaactttgagcctttctcttgtgcaataatttacatgttgtgtatgtttttttttaaacttagacagcatgtatggtatgttatggctattttaaattgtccctaattcgttgctgagcaaacatgttgctgtttccagttccgttctgagagaaaaagagagagagagagaaaaagaccatgctgcatacattctgtaatacatatcatgtacagttttattttataacgtgaggaggaaaaacagtctttggattaaccctctatagacagaatagatagcactgaaaaaaaatctctatgagctaaatgtctgtctctaaagggttaaatgtatcaattggaaaggaagaaaaaaggccttgaattgacaaattaacagaaaaacagaacaagtttattctatcatttggttttaaaatatgagtgccttggatctattaaaaccacatcgatggttctttctacttgttataaacttgtagcttaattcagcattgggtgaggtaataaaccttaggaactagcatataattctatattgtatttctcacaacaatggctacctaaaaagatgacccattatgtcctagttaatcatcatttttcctttagtttaattttataaacaaaactgattataccagtataaaagctactttgctcctggtgagagcttaaaagaaatgggctgttttgcccaaagttttattttttttaaacaatgattaaattgaatgtgtaatgtgcaaaagccctggaacgcaattaaatacactagtaaggagttcattttatgaagatatttgctttaataatgtctttttaaaaatactggcaccaaaagaaatagatccagatctacttggttgtcaagtggacaatcaaatgataaactttaagaccttgtataccatattgaaaggaagaggctgacaataaggtttgacagaggggaacagaagaaaataatatgatttattagcacaacgtggtactatttgccatttaaaactagaacaggtatataagctaatattgatacaatgatgattaactatgaattcttaagacttgcatttaaatgtgacattcttaaaaaaagaagagaaagaattttaagagtagcagtatatatgtctgtgctccctaaaagttgtacttcatttcttttccatacactgtgtgctatttgtgttaacatggaagaggattcattgtttttatttttatttttttaattttttcttttttattaagctagcatctgccccagttggtgttcaaatagcacttgactctgcctgtgatatctgtatcttttctctaatcagagatacagaggttgagtataaaataaacctgctcagataggacaattaagtgcactgtacaattttcccagtttacaggtctatacttaagggaaaagttgcaagaatgctgaaaaaaaattgaacacaatctcattgaggagcattttttaaaaactaaaaaaaaaaaaactttgccagccatttacttgactattgagcttacttacttggacgcaacattgcaagcgctgtgaatggaaacagaatacacttaacatagaaatgaatgattgctttcgcttctacagtgcaaggatttttttgtacaaaacttttttaaatataaatgttaagaaaaattttttttaaaaaacacttcattatgtttaggggggaactgcattttagggttccattgtcttggtggtgttacaagacttgttatccatttaaaaatggtagtggaaattctatgccttggatacacaccgctcttcaggttgtaaaaaaaaaaaacatacattggggaaaggtttaagattatatagtacttaaatataggaaaatgcacactcatgttgattcctatgctaaaatacatttatggtcttttttctgtatttctagaatggtatttgaattaaatgttcatctagtgttaggcactatagtatttatattgaagcttgtatttttaactgttgcttgttctcttaaaaggtatcaatgtaccttttttggtagtggaaaaaaaaaagacaggctgccacagtatatttttttaatttggcaggataatatagtgcaaattatttgtatgcttcaaaaaaaaaaaaaagagagaaacaaaaaagtgtgacattacagatgagaagccatataatggcggtttgggggagcctgctagaatgtcacatggatggctgtcataggggttgtacatatccttttttgttcctttttcctgctgccatactgtatgcagtactgcaagctaataacgttggtttgttatgtagtgtgctttttgtccctttccttctatcaccctacattccagcatcttaccttcatatgcagtaaaagaaagaaagaaaaaaaaaggaaaaaaaaaaaaaaaccaatgttttgcagtttttttcattgccaaaaactaaatggtgctttatatttagattggaaagaatttcatatgcaaagcatattaaagagaaagcccgctttagtcaatacttttttgtaaatggcaatgcagaatattttgttattggccttttctattcctgtaatgaaagctgtttgtcgtaacttgaaattttatcttttactatgggagtcactatttattattgcttatgtgccctgttcaaaacagaggcacttaatttgatcttttatttttctttgtttttatttttttttttatttagatgaccaaaggtcattacaacctggctttttattgtatttgtttctggtctttgttaagttctattggaaaaaccactgtctgtgtttttttggcagttgtctgcattaacctgttcatacacccattttgtccctttattgaaaaaataaaaaaaattaaag

SEQ ID NO: 2138 - DNA, 2775 bp, Homo sapiens
  source 1..2775: mol_type = unassigned DNA; mol_type = unassigned DNA
aatattcttcgatagcagttcaaatgaaatccccacagcagagagcttttgggtctagcagtggagcgataaacttctgcactggaggggcctctcctcccctcgttctgcacatggagctctaatccccacgcctgggatgagtgcagaatatgccccgcagggtatttgtaaagatgagcccagcagctacacatgtacaacttgcaaacagccattcaccagtgcatggtttctcttgcaacacgcacagaacactcatggattaagaatctacttagaaagcgaacacggaagtcccctgaccccgcgggttggtatcccttcaggactaggtgcagaatgtccttcccagccacctctccatgggattcatattgcagacaataacccctttaacctgctaagaataccaggatcagtatcgagagaggcttccggcctggcagaagggcgctttccacccactccccccctgtttagtccaccaccgagacatcacttggacccccaccgcatagagcgcctgggggcggaagagatggccctggccacccatcacccgagtgcctttgacagggtgctgcggttgaatccaatggctatggagcctcccgccatggatttctctaggagacttagagagctggcagggaacacgtctagcccaccgctgtccccaggccggcccagccctatgcaaaggttactgcaaccattccagccaggtagcaagccgcccttcctggcgacgccccccctccctcctctgcaatccgcccctcctccctcccagcccccggtcaagtccaagtcatgcgagttctgcggcaagacgttcaaatttcagagcaacctggtggtgcaccggcgcagccacacgggcgagaagccctacaagtgcaacctgtgcgaccacgcgtgcacccaggccagcaagctgaagcgccacatgaagacgcacatgcacaaatcgtcccccatgacggtcaagtccgacgacggtctctccaccgccagctccccggaacccggcaccagcgacttggtgggcagcgccagcagcgcgctcaagtccgtggtggccaagttcaagagcgagaacgaccccaacctgatcccggagaacggggacgaggaggaagaggaggacgacgaggaagaggaagaagaggaggaagaggaggaggaggagctgacggagagcgagagggtggactacggcttcgggctgagcctggaggcggcgcgccaccacgagaacagctcgcggggcgcggtcgtgggcgtgggcgacgagagccgcgccctgcccgacgtcatgcagggcatggtgctcagctccatgcagcacttcagcgaggccttccaccaggtcctgggcgagaagcataagcgcggccacctggccgaggccgagggccacagggacacttgcgacgaagactcggtggccggcgagtcggaccgcatagacgatggcactgttaatggccgcggctgctccccgggcgagtcggcctcggggggcctgtccaaaaagctgctgctgggcagccccagctcgctgagccccttctctaagcgcatcaagctcgagaaggagttcgacctgcccccggccgcgatgcccaacacggagaacgtgtactcgcagtggctcgccggctacgcggcctccaggcagctcaaagatcccttccttagcttcggagactccagacaatcgccttttgcctcctcgtcggagcactcctcggagaacgggagtttgcgcttctccacaccgcccggggagctggacggagggatctcggggcgcagcggcacgggaagtggagggagcacgccccatattagtggtccgggcccgggcaggcccagctcaaaagagggcagacgcagcgacacttgtgagtactgtgggaaagtcttcaagaactgtagcaatctcactgtccacaggagaagccacacgggcgaaaggccttataaatgcgagctgtgcaactatgcctgtgcccagagtagcaagctcaccaggcacatgaaaacgcatggccaggtggggaaggacgtttacaaatgtgaaatttgtaagatgccttttagcgtgtacagtaccctggagaaacacatgaaaaaatggcacagtgatcgagtgttgaataatgatataaaaactgaatagaggtatattaatacccctccctcactcccacctgacaccccctttttcaccactccccttccccatcgccctccagccccactccctgtaggatttttttctagtcccatgtgatttaaacaaacaaacaaacaaacagaagtaacgaagctaagaatatgagagtgcttgtcaccagcacacctgttttttttctttttctttttcttttttctttttccttttttttttttttcctttatgttctcaccgtttgaatgcatgatctgtatggggcaatactattgcattttacgcaaactttgagcctttctcttgtgcaataatttacatgttgtgtatgtttttttttaaacttagacagcatgtatggtatgttatggctattttaaattgtccctaattcgttgctgagcaaacatgttgctgtttccagttccgttctgagagaaaaagagagagagagagaaaaagaccatgctgcatacattctgtaatacatatcatgtacagttttattttataacgtgaggaggaaaaacagtctttggattaaccctctatagacagaatagatagcactg

SEQ ID NO: 2139 - DNA, 2697 bp, Homo sapiens
  source 1..2697: mol_type = unassigned DNA; mol_type = unassigned DNA
tctttgtattatttctaatttattttggatgtcaaaaggcactgatgaagatattttctctggagtctccttctttctaacccggctctcccgatgtgaaccgagccgtcgtccgcccgccgccgccgccgccgccgccgccgcccgccccgcagcccaccatgtctcgccgcaagcaaggcaaaccccagcacttaagcaaacgggaattctcgcccgagcctcttgaagccattcttacagatgatgaaccagaccacggcccgttgggagctccagaaggggatcatgacctcctcacctgtgggcagtgccagatgaacttcccattgggggacattcttatttttatcgagcacaaacggaaacaatgcaatggcagcctctgcttagaaaaagctgtggataagccaccttccccttcaccaatcgagatgaaaaaagcatccaatcccgtggaggttggcatccaggtcacgccagaggatgacgattgtttatcaacgtcatctagaggaatttgccccaaacaggaacacatagcaggtaaagatgagcccagcagctacacatgtacaacttgcaaacagccattcaccagtgcatggtttctcttgcaacacgcacagaacactcatggattaagaatctacttagaaagcgaacacggaagtcccctgaccccgcgggttggtatcccttcaggactaggtgcagaatgtccttcccagccacctctccatgggattcatattgcagacaataacccctttaacctgctaagaataccaggatcagtatcgagagaggcttccggcctggcagaagggcgctttccacccactccccccctgtttagtccaccaccgagacatcacttggacccccaccgcatagagcgcctgggggcggaagagatggccctggccacccatcacccgagtgcctttgacagggtgctgcggttgaatccaatggctatggagcctcccgccatggatttctctaggagacttagagagctggcagggaacacgtctagcccaccgctgtccccaggccggcccagccctatgcaaaggttactgcaaccattccagccaggtagcaagccgcccttcctggcgacgccccccctccctcctctgcaatccgcccctcctccctcccagcccccggtcaagtccaagtcatgcgagttctgcggcaagacgttcaaatttcagagcaacctggtggtgcaccggcgcagccacacgggcgagaagccctacaagtgcaacctgtgcgaccacgcgtgcacccaggccagcaagctgaagcgccacatgaagacgcacatgcacaaatcgtcccccatgacggtcaagtccgacgacggtctctccaccgccagctccccggaacccggcaccagcgacttggtgggcagcgccagcagcgcgctcaagtccgtggtggccaagttcaagagcgagaacgaccccaacctgatcccggagaacggggacgaggaggaagaggaggacgacgaggaagaggaagaagaggaggaagaggaggaggaggagctgacggagagcgagagggtggactacggcttcgggctgagcctggaggcggcgcgccaccacgagaacagctcgcggggcgcggtcgtgggcgtgggcgacgagagccgcgccctgcccgacgtcatgcagggcatggtgctcagctccatgcagcacttcagcgaggccttccaccaggtcctgggcgagaagcataagcgcggccacctggccgaggccgagggccacagggacacttgcgacgaagactcggtggccggcgagtcggaccgcatagacgatggcactgttaatggccgcggctgctccccgggcgagtcggcctcggggggcctgtccaaaaagctgctgctgggcagccccagctcgctgagccccttctctaagcgcatcaagctcgagaaggagttcgacctgcccccggccgcgatgcccaacacggagaacgtgtactcgcagtggctcgccggctacgcggcctccaggcagctcaaagatcccttccttagcttcggagactccagacaatcgccttttgcctcctcgtcggagcactcctcggagaacgggagtttgcgcttctccacaccgcccggggagctggacggagggatctcggggcgcagcggcacgggaagtggagggagcacgccccatattagtggtccgggcccgggcaggcccagctcaaaagagggcagacgcagcgacacttgtgagtactgtgggaaagtcttcaagaactgtagcaatctcactgtccacaggagaagccacacgggcgaaaggccttataaatgcgagctgtgcaactatgcctgtgcccagagtagcaagctcaccaggcacatgaaaacgcatggccaggtggggaaggacgtttacaaatgtgaaatttgtaagatgccttttagcgtgtacagtaccctggagaaacacatgaaaaaatggcacagtgatcgagtgttgaataatgatataaaaactgaatagaggtatattaatacccctccctcactcccacctgacaccccctttttcaccactccccttccccatcgccctccagccccactccctgtaggatttttttctagtcccatgtgatttaaacaaacaaaca

SEQ ID NO: 2140 - DNA, 756 bp, Homo sapiens
  source 1..756: mol_type = unassigned DNA; mol_type = unassigned DNA
ttttttttttttttttttgcttaaaaaaaagccatgacggctctcccacaattcatcttccctgcgccatctttgtattatttctaatttattttggatgtcaaaaggcactgatgaagatattttctctggagtctccttctttctaacccggctctcccgatgtgaaccgagccgtcgtccgcccgccgccgccgccgccgccgccgccgcccgccccgcagcccaccatgtctcgccgcaagcaaggcaaaccccagcacttaagcaaacgggaattctcgcccgagcctcttgaagccattcttacagatgatgaaccagaccacggcccgttgggagctccagaaggggatcatgacctcctcacctgtgggcagtgccagatgaacttcccattgggggacattcttatttttatcgagcacaaacggaaacaatgcaatggcagcctctgcttagaaaaagctgtggataagccaccttccccttcaccaatcgagatgaaaaaagcatccaatcccgtggaggttggcatccaggtcacgccagaggatgacgattgtttatcaacgtcatctagaggaatttgccccaaacaggaacacatagcagctcagactgaactggaggatgtatttgtgtaccttatggtgtaattgtaaatgagactataaattatagtatgctattatgactacttatttttcttttctctttatttatgtgattctgaataaaaacgactgacttctg

SEQ ID NO: 2141 - DNA, 372 bp, Homo sapiens
  source 1..372: mol_type = unassigned DNA; mol_type = unassigned DNA
acattcttatttttatcgagcacaaacggaaacaatgcaatggcagcctctgcttagaaaaagctgtggataagccaccttccccttcaccaatcgagatgaaaaaagcatccaatcccgtggaggttggcatccaggtcacgccagaggatgacgattgtttatcaacgtcatctagaggaatttgccccaaacaggaacacatagcagcaggatgtgggaatgaccatttccatgtgttgtcttgtgactggaaggaaaatgaacagaagtgtaaggcatgattaatgaagcaagagcaggcggaaggggatttgtcgtcttcggagatccaaagccttgctaaatcaccaaatatggagtaacacttgc

SEQ ID NO: 2142 - DNA, 7559 bp, Homo sapiens
  source 1..7559: mol_type = unassigned DNA; mol_type = unassigned DNA
tgccggggcaatgtcccgccgcaaacagggcaacccgcagcacttgtcccagagggagctcatcaccccagaggctgaccatgtggaggccgccatcctcgaagaagacgagggtctggagatagaggagccaagtggcctggggctgatggtgggtggccccgaccctgacctgctcacctgtggccagtgtcaaatgaacttccccttgggggacatcctggtttttatagagcacaaaaggaagcagtgtggcggcagcttgggtgcctgctatgacaaggccctggacaaggacagcccgccaccctcctcacgctccgagctcaggaaagtgtccgagccggtggagatcgggatccaagtcacccccgacgaagatgaccacctgctctcacccacgaaaggcatctgtcccaagcaggagaacattgcagggccgtgcaggcctgcccagctgccagcggtggcccccatagctgcctcctcccaccctcactcatccgtgatcacttcacctctgcgtgccctgggcgctctcccgccctgcctccccctgccgtgctgcagcgcgcgcccggtctcgggtgacgggactcagggtgagggtcagacggaggctccctttggatgccagtgtcagttgtcaggtaaagatgagccttccagctacatttgcacaacatgcaagcagcccttcaacagcgcgtggttcctgctgcagcacgcgcagaacacgcacggcttccgcatctacctggagcccgggccggccagcagctcgctcacgccgcggctcaccatcccgccgccgctcgggccggaggccgtggcgcagtccccgctcatgaatttcctgggcgacagcaaccccttcaacctgctgcgcatgacgggccccatcctgcgggaccacccgggcttcggcgagggccgcctgccgggcacgccgcctctcttcagtcccccgccgcgccaccacctggacccgcaccgcctcagtgccgaggagatggggctcgtcgcccagcaccccagtgccttcgaccgagtcatgcgcctgaaccccatggccatcgactcgcccgccatggacttctcgcggcggctccgcgagctggcgggcaacagctccacgccgccgcccgtgtccccgggccgcggcaaccctatgcaccggctcctgaaccccttccagcccagccccaagtccccgttcctgagcacgccgccgctgccgcccatgccccctggcggcacgccgcccccgcagccgccagccaagagcaagtcgtgcgagttctgcggcaagaccttcaagttccagagcaatctcatcgtgcaccggcgcagtcacacgggcgagaagccctacaagtgccagctgtgcgaccacgcgtgctcgcaggccagcaagctcaagcgccacatgaagacgcacatgcacaaggccggctcgctggccggccgctccgacgacgggctctcggccgccagctcccccgagcccggcaccagcgagctggcgggcgagggcctcaaggcggccgacggtgacttccgccaccacgagagcgacccgtcgctgggccacgagccggaggaggaggacgaggaggaggaggaggaggaggaggagctgctactggagaacgagagccggcccgagtcgagcttcagcatggactcggagctgagccgcaaccgcgagaacggcggtggtggggtgcccggggtcccgggcgcggggggcggcgcggccaaggcgctggctgacgagaaggcgctggtgctgggcaaggtcatggagaacgtgggcctaggcgcactgccgcagtacggcgagctcctggccgacaagcagaagcgcggcgccttcctgaagcgtgcggcgggcggcggggacgcgggcgacgacgacgacgcgggcggctgcggggacgcgggcgcgggcggcgcggtcaacgggcgcgggggcggcttcgcgccaggcaccgagcccttccccgggctcttcccgcgcaagcccgcgccgctgcccagccccgggctcaacagcgccgccaagcgcatcaaggtggagaaggacctggagctgccgcccgccgcgctcatcccgtccgagaacgtgtactcgcagtggctggtgggctacgcggcgtcgcggcacttcatgaaggaccccttcctgggcttcacggacgcacgacagtcgcccttcgccacgtcgtccgagcactcgtccgagaacggcagcctgcgcttctccacgccgcccggggacctgctggacggcggcctctcgggccgcagcggcacggccagcggaggcagcaccccgcacctgggcggcccgggccccgggcggcccagctccaaggagggccgccgcagcgacacgtgcgagtactgcggcaaggtgttcaagaactgcagcaacttgacggtgcaccggcggagccacaccggcgagcggccttacaagtgcgagctgtgcaactacgcgtgcgcgcagagcagcaagctcacgcgccacatgaagacgcacgggcagatcggcaaggaggtgtaccgctgcgacatctgccagatgcccttcagcgtctacagcaccctggagaaacacatgaaaaagtggcacggcgagcacttgctgactaacgacgtcaaaatcgagcaggccgagaggagctaagcgcgcgggccccggcgccccgcacctgtacagtggaaccgttgccaaccgagagaatgctgacctgacttgcctccgtgtcaccgccaccccgcaccccgcgtgtccccggggcccaggggaggcggcactccaacctaacctgtgtctgcgaagtcctatggaaacccgagggttgattaaggcagtacaaattgtggagccttttaactgtgcaataatttctgtatttattgggttttgtaatttttttggcatgtgcaggtactttttattattattttttctgtttgaattcctttaagagattttgttgggtatccatcccttctttgttttttttttaacccggtagtagcctgagcaatgactcgcaagcaatgttagaggggaagcatatcttttaaattataatttggggggaggggtggtgctgcttttttgaaatttaagctaagcatgtgtaatttcttgtgaagaagccaacactcaaatgacttttaaagttgtttactttttcattccttccttttttttgtcctgaaataaaaagtggcatgcagttttttttttaattattttttaattttttttttggtttttgtttttggggtggggggtgtggatgtacagcggataacaatctttcaagtcgtagcactttgtttcagaactggaatggagatgtagcactcatgtcgtcccgagtcaagcggccttttctgtgttgatttcggctttcatattacataagggaaaccttgagtggtggtgctgggggaggcaccccacagactcagcgccgccagagatagggtttttggagggctcctctgggaaatggcccgacagcattctgaggttgtgcatgaccagcagatactatcctgttggtgtgccctggggtgccatggctgctattcgctgtagattaggctacataaaatgggctgagggtacctttttggggagatggggtggcctgcagtgacacagaaaggaagaaactagcggtgttcttttaggcgttttctggcttgacggcttctctctttttttaaatcacccccaccacataaatctcaaatcctatgttgctacaaggggtcatccatcatttcccaagcagacgaatgccctaattaattgaagttagtgttctctcatttaatgcacactgatgatattgtagggatgggtggggtggggatcttgcaaatttctattctcttttactgaaaaagcaggggatgagttccatcagaaggtgcccagcgctacttcccaggtttttattttttttttcctatctcattaggttggaaggtactaaatattgaactgttaagattagacatttgaattctgttgacccgcactttaaagcttttgtttgcatttaaattaaatggcttctaaacaagaaattgcagcatattcttctctttggcccagaggtgggttaaactgtaagggacagctgagattgagtgtcagtattgctaagcgtggcattcacaatactggcactataaagaacaaaataaaataataatttataggacagtttttctactgccattcaatttgatgtgagtgccttgaaaactgatcttcctatttgagtctcttgagacaaatgcaaaactttttttttgaaatgaaaagactttttaaaaaagtaaaacaagaaaagtacattctttagaaactaacaaagccacatttactttaagtaaaaaaaaaaaaaattctggttgaagatagaggatatgaaatgccataagacccaatcaaatgaagaaataaacccagcacaaccttggacatccattagctgaattatcctcagccccttttgtttttgggacaacgctgcttagatatggagtggaggtgatttactgctgaattaaaactcaagtgacacaagttacaagttgatatcgttgaatgaaaagcaaaacaaaaacaattcaggaacaacggctaattttttctaaagttaaatttagtgcactctgtcttaaaaatacgtttacagtattgggtacatacaagggtaaaaaaaaaattgtgtgtatgtgtgttggagcgatctttttttttcaaagtttgcttaataggttatacaaaaatgccacagtggccgcgtgtatattgttttcttttggtgacggggttttagtatatattatatatattaaaatttcttgattactgtaaaagtggaccagtatttgtaataatcgagaatgcctgggcattttacaaaacaagaaaaaaaatacccttttcttttccttgaaaatgttgcagtaaaatttaaatggtgggtctataaatttgttcttgttacagtaactgtaaagtcggagttttagtaaatttttttctgccttgggtgttgaatttttatttcaaaaaaaatgtatagaaacttgtatttggggattcaaaggggattgctacaccatgtagaaaaagtatgtagaaaaaaagtgcttaatattgttattgctttgcagaaaaaaaaaaaatcacatttctgacctgtacttatttttctcttcccgcctccctctggaatggatatattggttggttcatatgatgtaggcacttgctgtatttttactggagctcgtaattttttaactgtaagcttgtccttttaaagggatttaatgtacctttttgttagtgaatttggaaataaaaagaaaaaaaaaacaaaaacaaacaggctgccataatatatttttttaatttggcaggataaaatattgcaaaaaaaacacatttgtatgttaagtcctattgtacaggagaaaaagggttgtttgacaacctttgagaaaaagaaacaaaaggaagtagttaaatgctttggttcacaaatcatttagttgtatatattttttgtcggaattggcctacacagagaaccgttcgtgttgggcttctctctgaacgccccgaaccttgcatcaaggctccttggtgtggccacagcagaccagatgggaaattatttgtgttgagtggaaaaaaatcagtttttgtaaagatgtcagtaacattccacatcgtcctccctttctctaagaggccatctctaagatgtcagatgtagaggagagagagcgagagaacatcttccttctctaccatcactcctgtggcggtcaccaccaccacctctcccgcccttaccagcagaaagcaatgcaaactgagctgctttagtccttgagaaattgtgaaacaaacacaaatatcataaaaggagctggtgattcagctgggtccaggtgaagtgacctgctgttgagaccggtacaaattggatttcaggaaggagactccatcacagccaggacctttcgtgccatggagagtgttggcctcttgtctttcttccctgctttgctgctttgctctctgaaacctacattccgtcagtttccgaatgcgagggcctgggatgaatttggtgcctttccatatctcgttctctctccttcccctgcgtttcctctccatccttcatcctccattggtcctttttttttctttcattttttatttaatttcttttcttcctgtctgttcctcccctaatcctctattttatttttattttttgtaaagccaagtagctttaagataaagtggtggtcttttggatgagggaataatgcatttttaaataaaataccaatatcaggaagccattttttatttcaggaaatgtaagaaaccattatttcaggttatgaaagtataaccaagcatccttttgggcaattccttaccaaatgcagaagcttttctgttcgatgcactctttcctccttgccacttacctttgcaaagttaaaaaaaaggggggagggaatgggagagaaagctgagatttcagtttcctactgcagtttcctacctgcagatccaggggctgctgttgcctttggatgccccactgaggtcctagagtgcctccagggtggtcttcctgtagtcataacagctagccagtgctcaccagcttaccagattgccaggactaagccatcccaaagcacaagcattgtgtgtctctgtgactgcagagaagagagaattttgcttctgttttgtgtttaaaaaaccaacacggaagcagatgatcccgagagagaggcctctagcatgggtgacccagccgacctcaggccggtttccgcactgccacaactttgttcaaagttgcccccaattggaacctgccacttggcattagagggtctttcatggggagagaaggagactgaattactctaagcaaaatgtgaaaagtaaggaaatcagcctttcatcccggtcctaagtaaccgtcagccgaaggtctcgtggaacacaggcaaacccgtgattttggtgctccttgtaactcagccctgcaaagcaaagtcccattgatttaagttgtttgcatttgtactggcaaggcaaaatatttttattaccttttctattacttattgtatgagcttttgttgtttacttggaggttttgtcttttactacaagtttggaactatttattattgcttggtatttgtgctctgtttaagaaacaggcacttttttttattatggataaaatgttgagatgacaggaggtcatttcaatatggcttagtaaaatatttattgttcctttattctctgtacaagattttgggcctctttttttccttaatgtcacaatgttgagttcagcatgtgtctgccatttcatttgtacgcttgttcaaaaccaagtttgttctggtttcaagttataaaaataaattggacatttaacttgatctccaaa

SEQ ID NO: 2143 - DNA, 7603 bp, Homo sapiens
  source 1..7603: mol_type = unassigned DNA; mol_type = unassigned DNA
ttttcttgcttttcttcccttttttttctttttgcaaacaaaacaaaaaacagcatagaagaaagagcaaaataaagaagaagaagaggaggaagagagggaaagagaggaagggaaaaaaaacaccaacccgggcagaggaggaggtgcggcggcggcggcggcggcggcagcggcggcagcggcgcggcggcggctcggaccccctcccccggctccccccatcagtgcagctctccgggcgatgccagaatagatgccggggcaatgtcccgccgcaaacagggcaacccgcagcacttgtcccagagggagctcatcaccccagaggctgaccatgtggaggccgccatcctcgaagaagacgagggtctggagatagaggagccaagtggcctggggctgatggtgggtggccccgaccctgacctgctcacctgtggccagtgtcaaatgaacttccccttgggggacatcctggtttttatagagcacaaaaggaagcagtgtggcggcagcttgggtgcctgctatgacaaggccctggacaaggacagcccgccaccctcctcacgctccgagctcaggaaagtgtccgagccggtggagatcgggatccaagtcacccccgacgaagatgaccacctgctctcacccacgaaaggcatctgtcccaagcaggagaacattgcaggtaaagatgagccttccagctacatttgcacaacatgcaagcagcccttcaacagcgcgtggttcctgctgcagcacgcgcagaacacgcacggcttccgcatctacctggagcccgggccggccagcagctcgctcacgccgcggctcaccatcccgccgccgctcgggccggaggccgtggcgcagtccccgctcatgaatttcctgggcgacagcaaccccttcaacctgctgcgcatgacgggccccatcctgcgggaccacccgggcttcggcgagggccgcctgccgggcacgccgcctctcttcagtcccccgccgcgccaccacctggacccgcaccgcctcagtgccgaggagatggggctcgtcgcccagcaccccagtgccttcgaccgagtcatgcgcctgaaccccatggccatcgactcgcccgccatggacttctcgcggcggctccgcgagctggcgggcaacagctccacgccgccgcccgtgtccccgggccgcggcaaccctatgcaccggctcctgaaccccttccagcccagccccaagtccccgttcctgagcacgccgccgctgccgcccatgccccctggcggcacgccgcccccgcagccgccagccaagagcaagtcgtgcgagttctgcggcaagaccttcaagttccagagcaatctcatcgtgcaccggcgcagtcacacgggcgagaagccctacaagtgccagctgtgcgaccacgcgtgctcgcaggccagcaagctcaagcgccacatgaagacgcacatgcacaaggccggctcgctggccggccgctccgacgacgggctctcggccgccagctcccccgagcccggcaccagcgagctggcgggcgagggcctcaaggcggccgacggtgacttccgccaccacgagagcgacccgtcgctgggccacgagccggaggaggaggacgaggaggaggaggaggaggaggaggagctgctactggagaacgagagccggcccgagtcgagcttcagcatggactcggagctgagccgcaaccgcgagaacggcggtggtggggtgcccggggtcccgggcgcggggggcggcgcggccaaggcgctggctgacgagaaggcgctggtgctgggcaaggtcatggagaacgtgggcctaggcgcactgccgcagtacggcgagctcctggccgacaagcagaagcgcggcgccttcctgaagcgtgcggcgggcggcggggacgcgggcgacgacgacgacgcgggcggctgcggggacgcgggcgcgggcggcgcggtcaacgggcgcgggggcggcttcgcgccaggcaccgagcccttccccgggctcttcccgcgcaagcccgcgccgctgcccagccccgggctcaacagcgccgccaagcgcatcaaggtggagaaggacctggagctgccgcccgccgcgctcatcccgtccgagaacgtgtactcgcagtggctggtgggctacgcggcgtcgcggcacttcatgaaggaccccttcctgggcttcacggacgcacgacagtcgcccttcgccacgtcgtccgagcactcgtccgagaacggcagcctgcgcttctccacgccgcccggggacctgctggacggcggcctctcgggccgcagcggcacggccagcggaggcagcaccccgcacctgggcggcccgggccccgggcggcccagctccaaggagggccgccgcagcgacacgtgcgagtactgcggcaaggtgttcaagaactgcagcaacttgacggtgcaccggcggagccacaccggcgagcggccttacaagtgcgagctgtgcaactacgcgtgcgcgcagagcagcaagctcacgcgccacatgaagacgcacgggcagatcggcaaggaggtgtaccgctgcgacatctgccagatgcccttcagcgtctacagcaccctggagaaacacatgaaaaagtggcacggcgagcacttgctgactaacgacgtcaaaatcgagcaggccgagaggagctaagcgcgcgggccccggcgccccgcacctgtacagtggaaccgttgccaaccgagagaatgctgacctgacttgcctccgtgtcaccgccaccccgcaccccgcgtgtccccggggcccaggggaggcggcactccaacctaacctgtgtctgcgaagtcctatggaaacccgagggttgattaaggcagtacaaattgtggagccttttaactgtgcaataatttctgtatttattgggttttgtaatttttttggcatgtgcaggtactttttattattattttttctgtttgaattcctttaagagattttgttgggtatccatcccttctttgttttttttttaacccggtagtagcctgagcaatgactcgcaagcaatgttagaggggaagcatatcttttaaattataatttggggggaggggtggtgctgcttttttgaaatttaagctaagcatgtgtaatttcttgtgaagaagccaacactcaaatgacttttaaagttgtttactttttcattccttccttttttttgtcctgaaataaaaagtggcatgcagttttttttttaattattttttaattttttttttggtttttgtttttggggtggggggtgtggatgtacagcggataacaatctttcaagtcgtagcactttgtttcagaactggaatggagatgtagcactcatgtcgtcccgagtcaagcggccttttctgtgttgatttcggctttcatattacataagggaaaccttgagtggtggtgctgggggaggcaccccacagactcagcgccgccagagatagggtttttggagggctcctctgggaaatggcccgacagcattctgaggttgtgcatgaccagcagatactatcctgttggtgtgccctggggtgccatggctgctattcgctgtagattaggctacataaaatgggctgagggtacctttttggggagatggggtggcctgcagtgacacagaaaggaagaaactagcggtgttcttttaggcgttttctggcttgacggcttctctctttttttaaatcacccccaccacataaatctcaaatcctatgttgctacaaggggtcatccatcatttcccaagcagacgaatgccctaattaattgaagttagtgttctctcatttaatgcacactgatgatattgtagggatgggtggggtggggatcttgcaaatttctattctcttttactgaaaaagcaggggatgagttccatcagaaggtgcccagcgctacttcccaggtttttattttttttttcctatctcattaggttggaaggtactaaatattgaactgttaagattagacatttgaattctgttgacccgcactttaaagcttttgtttgcatttaaattaaatggcttctaaacaagaaattgcagcatattcttctctttggcccagaggtgggttaaactgtaagggacagctgagattgagtgtcagtattgctaagcgtggcattcacaatactggcactataaagaacaaaataaaataataatttataggacagtttttctactgccattcaatttgatgtgagtgccttgaaaactgatcttcctatttgagtctcttgagacaaatgcaaaactttttttttgaaatgaaaagactttttaaaaaagtaaaacaagaaaagtacattctttagaaactaacaaagccacatttactttaagtaaaaaaaaaaaaaattctggttgaagatagaggatatgaaatgccataagacccaatcaaatgaagaaataaacccagcacaaccttggacatccattagctgaattatcctcagccccttttgtttttgggacaacgctgcttagatatggagtggaggtgatttactgctgaattaaaactcaagtgacacaagttacaagttgatatcgttgaatgaaaagcaaaacaaaaacaattcaggaacaacggctaattttttctaaagttaaatttagtgcactctgtcttaaaaatacgtttacagtattgggtacatacaagggtaaaaaaaaaattgtgtgtatgtgtgttggagcgatctttttttttcaaagtttgcttaataggttatacaaaaatgccacagtggccgcgtgtatattgttttcttttggtgacggggttttagtatatattatatatattaaaatttcttgattactgtaaaagtggaccagtatttgtaataatcgagaatgcctgggcattttacaaaacaagaaaaaaaatacccttttcttttccttgaaaatgttgcagtaaaatttaaatggtgggtctataaatttgttcttgttacagtaactgtaaagtcggagttttagtaaatttttttctgccttgggtgttgaatttttatttcaaaaaaaatgtatagaaacttgtatttggggattcaaaggggattgctacaccatgtagaaaaagtatgtagaaaaaaagtgcttaatattgttattgctttgcagaaaaaaaaaaaatcacatttctgacctgtacttatttttctcttcccgcctccctctggaatggatatattggttggttcatatgatgtaggcacttgctgtatttttactggagctcgtaattttttaactgtaagcttgtccttttaaagggatttaatgtacctttttgttagtgaatttggaaataaaaagaaaaaaaaaacaaaaacaaacaggctgccataatatatttttttaatttggcaggataaaatattgcaaaaaaaacacatttgtatgttaagtcctattgtacaggagaaaaagggttgtttgacaacctttgagaaaaagaaacaaaaggaagtagttaaatgctttggttcacaaatcatttagttgtatatattttttgtcggaattggcctacacagagaaccgttcgtgttgggcttctctctgaacgccccgaaccttgcatcaaggctccttggtgtggccacagcagaccagatgggaaattatttgtgttgagtggaaaaaaatcagtttttgtaaagatgtcagtaacattccacatcgtcctccctttctctaagaggccatctctaagatgtcagatgtagaggagagagagcgagagaacatcttccttctctaccatcactcctgtggcggtcaccaccaccacctctcccgcccttaccagcagaaagcaatgcaaactgagctgctttagtccttgagaaattgtgaaacaaacacaaatatcataaaaggagctggtgattcagctgggtccaggtgaagtgacctgctgttgagaccggtacaaattggatttcaggaaggagactccatcacagccaggacctttcgtgccatggagagtgttggcctcttgtctttcttccctgctttgctgctttgctctctgaaacctacattccgtcagtttccgaatgcgagggcctgggatgaatttggtgcctttccatatctcgttctctctccttcccctgcgtttcctctccatccttcatcctccattggtcctttttttttctttcattttttatttaatttcttttcttcctgtctgttcctcccctaatcctctattttatttttattttttgtaaagccaagtagctttaagataaagtggtggtcttttggatgagggaataatgcatttttaaataaaataccaatatcaggaagccattttttatttcaggaaatgtaagaaaccattatttcaggttatgaaagtataaccaagcatccttttgggcaattccttaccaaatgcagaagcttttctgttcgatgcactctttcctccttgccacttacctttgcaaagttaaaaaaaaggggggagggaatgggagagaaagctgagatttcagtttcctactgcagtttcctacctgcagatccaggggctgctgttgcctttggatgccccactgaggtcctagagtgcctccagggtggtcttcctgtagtcataacagctagccagtgctcaccagcttaccagattgccaggactaagccatcccaaagcacaagcattgtgtgtctctgtgactgcagagaagagagaattttgcttctgttttgtgtttaaaaaaccaacacggaagcagatgatcccgagagagaggcctctagcatgggtgacccagccgacctcaggccggtttccgcactgccacaactttgttcaaagttgcccccaattggaacctgccacttggcattagagggtctttcatggggagagaaggagactgaattactctaagcaaaatgtgaaaagtaaggaaatcagcctttcatcccggtcctaagtaaccgtcagccgaaggtctcgtggaacacaggcaaacccgtgattttggtgctccttgtaactcagccctgcaaagcaaagtcccattgatttaagttgtttgcatttgtactggcaaggcaaaatatttttattaccttttctattacttattgtatgagcttttgttgtttacttggaggttttgtcttttactacaagtttggaactatttattattgcttggtatttgtgctctgtttaagaaacaggcacttttttttattatggataaaatgttgagatgacaggaggtcatttcaatatggcttagtaaaatatttattgttcctttattctctgtacaagattttgggcctctttttttccttaatgtcacaatgttgagttcagcatgtgtctgccatttcatttgtacgcttgttcaaaaccaagtttgttctggtttcaagttataaaaataaattggacatttaacttgatctccaaa

SEQ ID NO: 2144 - DNA, 2599 bp, Homo sapiens
  source 1..2599: mol_type = unassigned DNA; mol_type = unassigned DNA
tttttttttgcctctttttcttattttagatcgagaggtttttcttgcttttcttcccttttttttctttttgcaaacaaaacaaaaaacagcatagaagaaagagcaaaataaagaagaagaagaggaggaagagagggaaagagaggaagggaaaaaaaacaccaacccgggcagaggaggaggtgcggcggcggcggcggcggcggcagcggcggcagcggcgcggcggcggctcggaccccctcccccggctccccccatcagtgcagctctccgggcgatgccagaatagatgccggggcaatgtcccgccgcaaacagggcaacccgcagcacttgtcccagagggagctcatcacccgtaaagatgagccttccagctacatttgcacaacatgcaagcagcccttcaacagcgcgtggttcctgctgcagcacgcgcagaacacgcacggcttccgcatctacctggagcccgggccggccagcagctcgctcacgccgcggctcaccatcccgccgccgctcgggccggaggccgtggcgcagtccccgctcatgaatttcctgggcgacagcaaccccttcaacctgctgcgcatgacgggccccatcctgcgggaccacccgggcttcggcgagggccgcctgccgggcacgccgcctctcttcagtcccccgccgcgccaccacctggacccgcaccgcctcagtgccgaggagatggggctcgtcgcccagcaccccagtgccttcgaccgagtcatgcgcctgaaccccatggccatcgactcgcccgccatggacttctcgcggcggctccgcgagctggcgggcaacagctccacgccgccgcccgtgtccccgggccgcggcaaccctatgcaccggctcctgaaccccttccagcccagccccaagtccccgttcctgagcacgccgccgctgccgcccatgccccctggcggcacgccgcccccgcagccgccagccaagagcaagtcgtgcgagttctgcggcaagaccttcaagttccagagcaatctcatcgtgcaccggcgcagtcacacgggcgagaagccctacaagtgccagctgtgcgaccacgcgtgctcgcaggccagcaagctcaagcgccacatgaagacgcacatgcacaaggccggctcgctggccggccgctccgacgacgggctctcggccgccagctcccccgagcccggcaccagcgagctggcgggcgagggcctcaaggcggccgacggtgacttccgccaccacgagagcgacccgtcgctgggccacgagccggaggaggaggacgaggaggaggaggaggaggaggaggagctgctactggagaacgagagccggcccgagtcgagcttcagcatggactcggagctgagccgcaaccgcgagaacggcggtggtggggtgcccggggtcccgggcgcggggggcggcgcggccaaggcgctggctgacgagaaggcgctggtgctgggcaaggtcatggagaacgtgggcctaggcgcactgccgcagtacggcgagctcctggccgacaagcagaagcgcggcgccttcctgaagcgtgcggcgggcggcggggacgcgggcgacgacgacgacgcgggcggctgcggggacgcgggcgcgggcggcgcggtcaacgggcgcgggggcggcttcgcgccaggcaccgagcccttccccgggctcttcccgcgcaagcccgcgccgctgcccagccccgggctcaacagcgccgccaagcgcatcaaggtggagaaggacctggagctgccgcccgccgcgctcatcccgtccgagaacgtgtactcgcagtggctggtgggctacgcggcgtcgcggcacttcatgaaggaccccttcctgggcttcacggacgcacgacagtcgcccttcgccacgtcgtccgagcactcgtccgagaacggcagcctgcgcttctccacgccgcccggggacctgctggacggcggcctctcgggccgcagcggcacggccagcggaggcagcaccccgcacctgggcggcccgggccccgggcggcccagctccaaggagggccgccgcagcgacacgtgcgagtactgcggcaaggtgttcaagaactgcagcaacttgacggtgcaccggcggagccacaccggcgagcggccttacaagtgcgagctgtgcaactacgcgtgcgcgcagagcagcaagctcacgcgccacatgaagacgcacgggcagatcggcaaggaggtgtaccgctgcgacatctgccagatgcccttcagcgtctacagcaccctggagaaacacatgaaaaagtggcacggcgagcacttgctgactaacgacgtcaaaatcgagcaggccgagaggagctaagcgcgcgggccccggcgccccgcacctgtacagtggaaccgttgccaaccgagagaatgctgacctgacttgcctccgtgtcaccgccaccccgcaccccgcgtgtccccggggcccaggggaggcggcactccaacctaacctgtgtctgcgaagtcctatggaaacccgagggttgattaaggcagta

SEQ ID NO: 2145 - DNA, 7559 bp, Homo sapiens; identical to SEQ ID NO: 2142
  source 1..7559: mol_type = unassigned DNA; mol_type = unassigned DNA

SEQ ID NO: 2146 - DNA, 7603 bp, Homo sapiens; identical to SEQ ID NO: 2143
  source 1..7603: mol_type = unassigned DNA; mol_type = unassigned DNA

SEQ ID NO: 2147 - DNA, 2599 bp, Homo sapiens; identical to SEQ ID NO: 2144
  source 1..2599: mol_type = unassigned DNA; mol_type = unassigned DNA

SEQ ID NO: 2148 - DNA, 4532 bp, Homo sapiens
  source 1..4532: mol_type = unassigned DNA; mol_type = unassigned DNA
gcgcgcgcgcacacacacacacacacacagagagaacatctctagtaaaaagaaaagttgagctttcttagctagatgtgtgtattagccagaaaaagccaaggagtgaagggttttagagaactggaggagataaagtggagtctgcatatgggaggcatttgaaatggacttaaatgtctttttaatgctgactttttcagttttctccttaccagacacattgttttcatgacattagccccaggcatagacacatcattaaaatgaacatgtcaaaaaatgatttctgtttagaaataagcaaaacattttcagttgtgaccacccaggtgtagaataaagaacagtggaattgggagccctgagttctaacataaactttcttcatgacataaggcaagtcttctatggcctttggtttccttacctgtaaaacaggatggctcaatgaaattatctttcttctttgctataatagagtatctctgtgggaagaggaaaaaaaaagtcaatttaaaggctccttatagttccccaactgctgttttattgtgctattcatgcctagacatcacatagctagaaaggcccatcagacccctcaggccactgctgttcctgtcacacattcctgcaaaggaccatgttgctaacttgaaaaaaattactattaattacacttgcagttgttgcttagtaacatttatgattttgtgtttctcgtgacagcatgagcagagatcattaaaaattaaacttacaaagctgctaaagtgggaagaaggagaacttgaagccacaatttttgcacttgcttagaagccatctaatctcagttccaccaggtgagaagagtgatgaccatccttttccttactatggttatttcatactttggttgcatgaaggctgcccccatgaaagaagcaaacatccgaggacaaggtggcttggcctacccaggtgtgcggacccatgggactctggagagcgtgaatgggcccaaggcaggttcaagaggcttgacatcattggctgacactttcgaacacgtgatagaagagctgttggatgaggaccagaaagttcggcccaatgaagaaaacaataaggacgcagacttgtacacgtccagggtgatgctcagtagtcaagtgcctttggagcctcctcttctctttctgctggaggaatacaaaaattacctagatgctgcaaacatgtccatgagggtccggcgccactctgaccctgcccgccgaggggagctgagcgtgtgtgacagtattagtgagtgggtaacggcggcagacaaaaagactgcagtggacatgtcgggcgggacggtcacagtccttgaaaaggtccctgtatcaaaaggccaactgaagcaatacttctacgagaccaagtgcaatcccatgggttacacaaaagaaggctgcaggggcatagacaaaaggcattggaactcccagtgccgaactacccagtcgtacgtgcgggcccttaccatggatagcaaaaagagaattggctggcgattcataaggatagacacttcttgtgtatgtacattgaccattaaaaggggaagatagtggatttatgttgtatagattagattatattgagacaaaaattatctatttgtatatatacataacagggtaaattattcagttaagaaaaaaataattttatgaactgcatgtataaatgaagtttatacagtacagtggttctacaatctatttattggacatgtccatgaccagaagggaaacagtcatttgcgcacaacttaaaaagtctgcattacattccttgataatgttgtggtttgttgccgttgccaagaactgaaaacataaaaagttaaaaaaaataataaattgcatgctgctttaattgtgaattgataataaactgtcctctttcagaaaacagaaaaaaaacacacacacacacaacaaaaatttgaaccaaaacattccgtttacattttagacagtaagtatcttcgttcttgttagtactatatctgttttactgcttttaacttctgatagcgttggaattaaaacaatgtcaaggtgctgttgtcattgctttactggcttaggggatgggggatggggggtatatttttgtttgttttgtgtttttttttcgtttgtttgttttgttttttagttcccacagggagtagagatggggaaagaattcctacaatatatattctggctgataaaagatacatttgtatgttgtgaagatgtttgcaatatcgatcagatgactagaaagtgaataaaaattaaggcaactgaacaaaaaaatgctcacactccacatcccgtgatgcacctcccaggccccgctcattctttgggcgttggtcagagtaagctgcttttgacggaaggacctatgtttgctcagaacacattctttccccccctccccctctggtctcctctttgttttgttttaaggaagaaaaatcagttgcgcgttctgaaatattttaccactgctgtgaacaagtgaacacattgtgtcacatcatgacactcgtataagcatggagaacagtgatttttttttagaacagaaaacaacaaaaaataaccccaaaatgaagattattttttatgaggagtgaacatttgggtaaatcatggctaagcttaaaaaaaactcatggtgaggcttaacaatgtcttgtaagcaaaaggtagagccctgtatcaacccagaaacacctagatcagaacaggaatccacattgccagtgacatgagactgaacagccaaatggaggctatgtggagttggcattgcatttaccggcagtgcgggaggaatttctgagtggccatcccaaggtctaggtggaggtggggcatggtatttgagacattccaaaacgaaggcctctgaaggacccttcagaggtggctctggaatgacatgtgtcaagctgcttggacctcgtgctttaagtgcctacattatctaactgtgctcaagaggttctcgactggaggaccacactcaagccgacttatgcccaccatcccacctctggataattttgcataaaattggattagcctggagcaggttgggagccaaatgtggcatttgtgatcatgagattgatgcaatgagatagaagatgtttgctacctgaacacttattgctttgaaactagacttgaggaaaccagggtttatcttttgagaacttttggtaagggaaaagggaacaggaaaagaaaccccaaactcaggccgaatgatcaaggggacccataggaaatcttgtccagagacaagacttcgggaaggtgtctggacattcagaacaccaagacttgaaggtgccttgctcaatggaagaggccaggacagagctgacaaaattttgctccccagtgaaggccacagcaaccttctgcccatcctgtctgttcatggagagggtccctgcctcacctctgccattttgggttaggagaagtcaagttgggagcctgaaatagtggttcttggaaaaatggatccccagtgaaaactagagctctaagcccattcagcccatttcacacctgaaaatgttagtgatcaccacttggaccagcatccttaagtatcagaaagccccaagcaattgctgcatcttagtagggtgagggataagcaaaagaggatgttcaccataacccaggaatgaagataccatcagcaaagaatttcaatttgttcagtctttcatttagagctagtctttcacagtaccatctgaatacctctttgaaagaaggaagactttacgtagtgtagatttgttttgtgttgtttgaaaatattatctttgtaattatttttaatatgtaaggaatgcttggaatatctgctgtatgtcaactttatgcagcttccttttgagggacaaatttaaaacaaacaaccccccatcacaaacttaaaggattgcaagggccagatctgttaagtggtttcataggagacacatccagcaattgtgtggtcagtggctcttttacccaataagatacatcacagtcacatgcttgatggtttatgttgacctaagatttattttgttaaaatctctctctgttgtgttcgttcttgttctgttttgttttgttttttaaagtcttgctgtggtctctttgtggcagaagtgtttcatgcatggcagcaggcctgttgcttttttatggcgattcccattgaaaatgtaagtaaatgtctgtggccttgttctctctatggtaaagatattattcaccatgtaaaacaaaaaacaatatttattgtattttagtatatttatataattatgttattgaaaaaaattggcattaaaacttaaccgcatcagaagcctattgtaaatacaagttctatttaagtgtactaattaacatataatatatgttttaaatatagaatttttaatgtttttaaatatattttcaaagtacataaaa

SEQ ID NO: 2149 - DNA, 4766 bp, Homo sapiens
  source 1..4766: mol_type = unassigned DNA; mol_type = unassigned DNA
gcgcgcgcgcacacacacacacacacacagagagaacatctctagtaaaaagaaaagttgagctttcttagctagatgtgtgtattagccagaaaaagccaaggagtgaagggttttagagaactggaggagataaagtggagtctgcatatgggaggcatttgaaatggacttaaatgtctttttaatgctgactttttcagttttctccttaccagacacattgttttcatgacattagccccaggcatagacacatcattaaaatgaacatgtcaaaaaatgatttctgtttagaaataagcaaaacattttcagttgtgaccacccaggtgtagaataaagaacagtggaattgggagccctgagttctaacataaactttcttcatgacataaggcaagtcttctatggcctttggtttccttacctgtaaaacaggatggctcaatgaaattatctttcttctttgctataatagagtatctctgtgggaagaggaaaaaaaaagtcaatttaaaggctccttatagttccccaactgctgttttattgtgctattcatgcctagacatcacatagctagaaaggcccatcagacccctcaggccactgctgttcctgtcacacattcctgcaaaggaccatgttgctaacttgaaaaaaattactattaattacacttgcagttgttgcttagtaacatttatgattttgtgtttctcgtgacagcatgagcagagatcattaaaaattaaacttacaaagctgctaaagtgggaagaaggagaacttgaagccacaatttttgcacttgcttagaagccatctaatctcaggtttatatgctagatcttgggggaaacactgcatgtctctggtttatattaaaccacatacagcacactactgacactgatttgtgtctggtgcagctggagtttatcaccaagacataaaaaaaccttgaccctgcagaatggcctggaattacaatcagatgggccacatggcatcccggtgaaagaaagccctaaccagttttctgtcttgtttctgctttctccctacagttccaccaggtgagaagagtgatgaccatccttttccttactatggttatttcatactttggttgcatgaaggctgcccccatgaaagaagcaaacatccgaggacaaggtggcttggcctacccaggtgtgcggacccatgggactctggagagcgtgaatgggcccaaggcaggttcaagaggcttgacatcattggctgacactttcgaacacgtgatagaagagctgttggatgaggaccagaaagttcggcccaatgaagaaaacaataaggacgcagacttgtacacgtccagggtgatgctcagtagtcaagtgcctttggagcctcctcttctctttctgctggaggaatacaaaaattacctagatgctgcaaacatgtccatgagggtccggcgccactctgaccctgcccgccgaggggagctgagcgtgtgtgacagtattagtgagtgggtaacggcggcagacaaaaagactgcagtggacatgtcgggcgggacggtcacagtccttgaaaaggtccctgtatcaaaaggccaactgaagcaatacttctacgagaccaagtgcaatcccatgggttacacaaaagaaggctgcaggggcatagacaaaaggcattggaactcccagtgccgaactacccagtcgtacgtgcgggcccttaccatggatagcaaaaagagaattggctggcgattcataaggatagacacttcttgtgtatgtacattgaccattaaaaggggaagatagtggatttatgttgtatagattagattatattgagacaaaaattatctatttgtatatatacataacagggtaaattattcagttaagaaaaaaataattttatgaactgcatgtataaatgaagtttatacagtacagtggttctacaatctatttattggacatgtccatgaccagaagggaaacagtcatttgcgcacaacttaaaaagtctgcattacattccttgataatgttgtggtttgttgccgttgccaagaactgaaaacataaaaagttaaaaaaaataataaattgcatgctgctttaattgtgaattgataataaactgtcctctttcagaaaacagaaaaaaaacacacacacacacaacaaaaatttgaaccaaaacattccgtttacattttagacagtaagtatcttcgttcttgttagtactatatctgttttactgcttttaacttctgatagcgttggaattaaaacaatgtcaaggtgctgttgtcattgctttactggcttaggggatgggggatggggggtatatttttgtttgttttgtgtttttttttcgtttgtttgttttgttttttagttcccacagggagtagagatggggaaagaattcctacaatatatattctggctgataaaagatacatttgtatgttgtgaagatgtttgcaatatcgatcagatgactagaaagtgaataaaaattaaggcaactgaacaaaaaaatgctcacactccacatcccgtgatgcacctcccaggccccgctcattctttgggcgttggtcagagtaagctgcttttgacggaaggacctatgtttgctcagaacacattctttccccccctccccctctggtctcctctttgttttgttttaaggaagaaaaatcagttgcgcgttctgaaatattttaccactgctgtgaacaagtgaacacattgtgtcacatcatgacactcgtataagcatggagaacagtgatttttttttagaacagaaaacaacaaaaaataaccccaaaatgaagattattttttatgaggagtgaacatttgggtaaatcatggctaagcttaaaaaaaactcatggtgaggcttaacaatgtcttgtaagcaaaaggtagagccctgtatcaacccagaaacacctagatcagaacaggaatccacattgccagtgacatgagactgaacagccaaatggaggctatgtggagttggcattgcatttaccggcagtgcgggaggaatttctgagtggccatcccaaggtctaggtggaggtggggcatggtatttgagacattccaaaacgaaggcctctgaaggacccttcagaggtggctctggaatgacatgtgtcaagctgcttggacctcgtgctttaagtgcctacattatctaactgtgctcaagaggttctcgactggaggaccacactcaagccgacttatgcccaccatcccacctctggataattttgcataaaattggattagcctggagcaggttgggagccaaatgtggcatttgtgatcatgagattgatgcaatgagatagaagatgtttgctacctgaacacttattgctttgaaactagacttgaggaaaccagggtttatcttttgagaacttttggtaagggaaaagggaacaggaaaagaaaccccaaactcaggccgaatgatcaaggggacccataggaaatcttgtccagagacaagacttcgggaaggtgtctggacattcagaacaccaagacttgaaggtgccttgctcaatggaagaggccaggacagagctgacaaaattttgctccccagtgaaggccacagcaaccttctgcccatcctgtctgttcatggagagggtccctgcctcacctctgccattttgggttaggagaagtcaagttgggagcctgaaatagtggttcttggaaaaatggatccccagtgaaaactagagctctaagcccattcagcccatttcacacctgaaaatgttagtgatcaccacttggaccagcatccttaagtatcagaaagccccaagcaattgctgcatcttagtagggtgagggataagcaaaagaggatgttcaccataacccaggaatgaagataccatcagcaaagaatttcaatttgttcagtctttcatttagagctagtctttcacagtaccatctgaatacctctttgaaagaaggaagactttacgtagtgtagatttgttttgtgttgtttgaaaatattatctttgtaattatttttaatatgtaaggaatgcttggaatatctgctgtatgtcaactttatgcagcttccttttgagggacaaatttaaaacaaacaaccccccatcacaaacttaaaggattgcaagggccagatctgttaagtggtttcataggagacacatccagcaattgtgtggtcagtggctcttttacccaataagatacatcacagtcacatgcttgatggtttatgttgacctaagatttattttgttaaaatctctctctgttgtgttcgttcttgttctgttttgttttgttttttaaagtcttgctgtggtctctttgtggcagaagtgtttcatgcatggcagcaggcctgttgcttttttatggcgattcccattgaaaatgtaagtaaatgtctgtggccttgttctctctatggtaaagatattattcaccatgtaaaacaaaaaacaatatttattgtattttagtatatttatataattatgttattgaaaaaaattggcattaaaacttaaccgcatcagaagcctattgtaaatacaagttctatttaagtgtactaattaacatataatatatgttttaaatatagaatttttaatgtttttaaatatattttcaaagtacataaaa

SEQ ID NO: 2150 - DNA, 3979 bp, Homo sapiens
  source 1..3979: mol_type = unassigned DNA; mol_type = unassigned DNA
acacggctacctgctccccaggaattgagactgaagtggacttacaagtccgaagccaatgtagcttggaaaacttgggaggcggaattcctaccgctgggaactgaaagggtctgcgacactctcgggcaggccgaacccacatctctacccatcctgcgcccctcttctgaagcgccctccagggaagttaagagttttgactttcggggagtggttgggatgtacgtgggggattcttgactcgggttagtctctggggatgcagagccgggaagaggaatggttccaccaggtgagaagagtgatgaccatccttttccttactatggttatttcatactttggttgcatgaaggctgcccccatgaaagaagcaaacatccgaggacaaggtggcttggcctacccaggtgtgcggacccatgggactctggagagcgtgaatgggcccaaggcaggttcaagaggcttgacatcattggctgacactttcgaacacgtgatagaagagctgttggatgaggaccagaaagttcggcccaatgaagaaaacaataaggacgcagacttgtacacgtccagggtgatgctcagtagtcaagtgcctttggagcctcctcttctctttctgctggaggaatacaaaaattacctagatgctgcaaacatgtccatgagggtccggcgccactctgaccctgcccgccgaggggagctgagcgtgtgtgacagtattagtgagtgggtaacggcggcagacaaaaagactgcagtggacatgtcgggcgggacggtcacagtccttgaaaaggtccctgtatcaaaaggccaactgaagcaatacttctacgagaccaagtgcaatcccatgggttacacaaaagaaggctgcaggggcatagacaaaaggcattggaactcccagtgccgaactacccagtcgtacgtgcgggcccttaccatggatagcaaaaagagaattggctggcgattcataaggatagacacttcttgtgtatgtacattgaccattaaaaggggaagatagtggatttatgttgtatagattagattatattgagacaaaaattatctatttgtatatatacataacagggtaaattattcagttaagaaaaaaataattttatgaactgcatgtataaatgaagtttatacagtacagtggttctacaatctatttattggacatgtccatgaccagaagggaaacagtcatttgcgcacaacttaaaaagtctgcattacattccttgataatgttgtggtttgttgccgttgccaagaactgaaaacataaaaagttaaaaaaaataataaattgcatgctgctttaattgtgaattgataataaactgtcctctttcagaaaacagaaaaaaaacacacacacacacaacaaaaatttgaaccaaaacattccgtttacattttagacagtaagtatcttcgttcttgttagtactatatctgttttactgcttttaacttctgatagcgttggaattaaaacaatgtcaaggtgctgttgtcattgctttactggcttaggggatgggggatggggggtatatttttgtttgttttgtgtttttttttcgtttgtttgttttgttttttagttcccacagggagtagagatggggaaagaattcctacaatatatattctggctgataaaagatacatttgtatgttgtgaagatgtttgcaatatcgatcagatgactagaaagtgaataaaaattaaggcaactgaacaaaaaaatgctcacactccacatcccgtgatgcacctcccaggccccgctcattctttgggcgttggtcagagtaagctgcttttgacggaaggacctatgtttgctcagaacacattctttccccccctccccctctggtctcctctttgttttgttttaaggaagaaaaatcagttgcgcgttctgaaatattttaccactgctgtgaacaagtgaacacattgtgtcacatcatgacactcgtataagcatggagaacagtgatttttttttagaacagaaaacaacaaaaaataaccccaaaatgaagattattttttatgaggagtgaacatttgggtaaatcatggctaagcttaaaaaaaactcatggtgaggcttaacaatgtcttgtaagcaaaaggtagagccctgtatcaacccagaaacacctagatcagaacaggaatccacattgccagtgacatgagactgaacagccaaatggaggctatgtggagttggcattgcatttaccggcagtgcgggaggaatttctgagtggccatcccaaggtctaggtggaggtggggcatggtatttgagacattccaaaacgaaggcctctgaaggacccttcagaggtggctctggaatgacatgtgtcaagctgcttggacctcgtgctttaagtgcctacattatctaactgtgctcaagaggttctcgactggaggaccacactcaagccgacttatgcccaccatcccacctctggataattttgcataaaattggattagcctggagcaggttgggagccaaatgtggcatttgtgatcatgagattgatgcaatgagatagaagatgtttgctacctgaacacttattgctttgaaactagacttgaggaaaccagggtttatcttttgagaacttttggtaagggaaaagggaacaggaaaagaaaccccaaactcaggccgaatgatcaaggggacccataggaaatcttgtccagagacaagacttcgggaaggtgtctggacattcagaacaccaagacttgaaggtgccttgctcaatggaagaggccaggacagagctgacaaaattttgctccccagtgaaggccacagcaaccttctgcccatcctgtctgttcatggagagggtccctgcctcacctctgccattttgggttaggagaagtcaagttgggagcctgaaatagtggttcttggaaaaatggatccccagtgaaaactagagctctaagcccattcagcccatttcacacctgaaaatgttagtgatcaccacttggaccagcatccttaagtatcagaaagccccaagcaattgctgcatcttagtagggtgagggataagcaaaagaggatgttcaccataacccaggaatgaagataccatcagcaaagaatttcaatttgttcagtctttcatttagagctagtctttcacagtaccatctgaatacctctttgaaagaaggaagactttacgtagtgtagatttgttttgtgttgtttgaaaatattatctttgtaattatttttaatatgtaaggaatgcttggaatatctgctgtatgtcaactttatgcagcttccttttgagggacaaatttaaaacaaacaaccccccatcacaaacttaaaggattgcaagggccagatctgttaagtggtttcataggagacacatccagcaattgtgtggtcagtggctcttttacccaataagatacatcacagtcacatgcttgatggtttatgttgacctaagatttattttgttaaaatctctctctgttgtgttcgttcttgttctgttttgttttgttttttaaagtcttgctgtggtctctttgtggcagaagtgtttcatgcatggcagcaggcctgttgcttttttatggcgattcccattgaaaatgtaagtaaatgtctgtggccttgttctctctatggtaaagatattattcaccatgtaaaacaaaaaacaatatttattgtattttagtatatttatataattatgttattgaaaaaaattggcattaaaacttaaccgcatcagaagcctattgtaaatacaagttctatttaagtgtactaattaacatataatatatgttttaaatatagaatttttaatgtttttaaatatattttcaaagtacataaaa

SEQ ID NO: 2151 - DNA, 3878 bp, Homo sapiens
  source 1..3878: mol_type = unassigned DNA; mol_type = unassigned DNA
acacggctacctgctccccaggaattgagactgaagtggacttacaagtccgaagccaatgtagcttggaaaacttgggaggcggaattcctaccgctgggaactgaaagggtctgcgacactctcgggcaggccgaacccacatctctacccatcctgcgcccctcttctgaagcgccctccagttccaccaggtgagaagagtgatgaccatccttttccttactatggttatttcatactttggttgcatgaaggctgcccccatgaaagaagcaaacatccgaggacaaggtggcttggcctacccaggtgtgcggacccatgggactctggagagcgtgaatgggcccaaggcaggttcaagaggcttgacatcattggctgacactttcgaacacgtgatagaagagctgttggatgaggaccagaaagttcggcccaatgaagaaaacaataaggacgcagacttgtacacgtccagggtgatgctcagtagtcaagtgcctttggagcctcctcttctctttctgctggaggaatacaaaaattacctagatgctgcaaacatgtccatgagggtccggcgccactctgaccctgcccgccgaggggagctgagcgtgtgtgacagtattagtgagtgggtaacggcggcagacaaaaagactgcagtggacatgtcgggcgggacggtcacagtccttgaaaaggtccctgtatcaaaaggccaactgaagcaatacttctacgagaccaagtgcaatcccatgggttacacaaaagaaggctgcaggggcatagacaaaaggcattggaactcccagtgccgaactacccagtcgtacgtgcgggcccttaccatggatagcaaaaagagaattggctggcgattcataaggatagacacttcttgtgtatgtacattgaccattaaaaggggaagatagtggatttatgttgtatagattagattatattgagacaaaaattatctatttgtatatatacataacagggtaaattattcagttaagaaaaaaataattttatgaactgcatgtataaatgaagtttatacagtacagtggttctacaatctatttattggacatgtccatgaccagaagggaaacagtcatttgcgcacaacttaaaaagtctgcattacattccttgataatgttgtggtttgttgccgttgccaagaactgaaaacataaaaagttaaaaaaaataataaattgcatgctgctttaattgtgaattgataataaactgtcctctttcagaaaacagaaaaaaaacacacacacacacaacaaaaatttgaaccaaaacattccgtttacattttagacagtaagtatcttcgttcttgttagtactatatctgttttactgcttttaacttctgatagcgttggaattaaaacaatgtcaaggtgctgttgtcattgctttactggcttaggggatgggggatggggggtatatttttgtttgttttgtgtttttttttcgtttgtttgttttgttttttagttcccacagggagtagagatggggaaagaattcctacaatatatattctggctgataaaagatacatttgtatgttgtgaagatgtttgcaatatcgatcagatgactagaaagtgaataaaaattaaggcaactgaacaaaaaaatgctcacactccacatcccgtgatgcacctcccaggccccgctcattctttgggcgttggtcagagtaagctgcttttgacggaaggacctatgtttgctcagaacacattctttccccccctccccctctggtctcctctttgttttgttttaaggaagaaaaatcagttgcgcgttctgaaatattttaccactgctgtgaacaagtgaacacattgtgtcacatcatgacactcgtataagcatggagaacagtgatttttttttagaacagaaaacaacaaaaaataaccccaaaatgaagattattttttatgaggagtgaacatttgggtaaatcatggctaagcttaaaaaaaactcatggtgaggcttaacaatgtcttgtaagcaaaaggtagagccctgtatcaacccagaaacacctagatcagaacaggaatccacattgccagtgacatgagactgaacagccaaatggaggctatgtggagttggcattgcatttaccggcagtgcgggaggaatttctgagtggccatcccaaggtctaggtggaggtggggcatggtatttgagacattccaaaacgaaggcctctgaaggacccttcagaggtggctctggaatgacatgtgtcaagctgcttggacctcgtgctttaagtgcctacattatctaactgtgctcaagaggttctcgactggaggaccacactcaagccgacttatgcccaccatcccacctctggataattttgcataaaattggattagcctggagcaggttgggagccaaatgtggcatttgtgatcatgagattgatgcaatgagatagaagatgtttgctacctgaacacttattgctttgaaactagacttgaggaaaccagggtttatcttttgagaacttttggtaagggaaaagggaacaggaaaagaaaccccaaactcaggccgaatgatcaaggggacccataggaaatcttgtccagagacaagacttcgggaaggtgtctggacattcagaacaccaagacttgaaggtgccttgctcaatggaagaggccaggacagagctgacaaaattttgctccccagtgaaggccacagcaaccttctgcccatcctgtctgttcatggagagggtccctgcctcacctctgccattttgggttaggagaagtcaagttgggagcctgaaatagtggttcttggaaaaatggatccccagtgaaaactagagctctaagcccattcagcccatttcacacctgaaaatgttagtgatcaccacttggaccagcatccttaagtatcagaaagccccaagcaattgctgcatcttagtagggtgagggataagcaaaagaggatgttcaccataacccaggaatgaagataccatcagcaaagaatttcaatttgttcagtctttcatttagagctagtctttcacagtaccatctgaatacctctttgaaagaaggaagactttacgtagtgtagatttgttttgtgttgtttgaaaatattatctttgtaattatttttaatatgtaaggaatgcttggaatatctgctgtatgtcaactttatgcagcttccttttgagggacaaatttaaaacaaacaaccccccatcacaaacttaaaggattgcaagggccagatctgttaagtggtttcataggagacacatccagcaattgtgtggtcagtggctcttttacccaataagatacatcacagtcacatgcttgatggtttatgttgacctaagatttattttgttaaaatctctctctgttgtgttcgttcttgttctgttttgttttgttttttaaagtcttgctgtggtctctttgtggcagaagtgtttcatgcatggcagcaggcctgttgcttttttatggcgattcccattgaaaatgtaagtaaatgtctgtggccttgttctctctatggtaaagatattattcaccatgtaaaacaaaaaacaatatttattgtattttagtatatttatataattatgttattgaaaaaaattggcattaaaacttaaccgcatcagaagcctattgtaaatacaagttctatttaagtgtactaattaacatataatatatgttttaaatatagaatttttaatgtttttaaatatattttcaaagtacataaaa

SEQ ID NO: 2152 - DNA, 4018 bp, Homo sapiens
  source 1..4018: mol_type = unassigned DNA; mol_type = unassigned DNA
agagctaaataatgtctgacccgggcgcaaggcgcagcctggagctccgggtccccgacgctgccgccgccgcgcccgggcgcacccgcccgctcgctgtcccgcgcaccccgtagcgcctcgggctcccgggccggacagaggagccagcccggtgcgcccctccacctcctgctcggggggctttaatgagacacccaccgctgctgtggggccggcggggagcagcaccgcgacggggaccggggctgggcgctggagccagaatcggaaccacgatgtgactccgccgccggggacccgtgaggtttgtgtggaccccgagttccaccaggtgagaagagtgatgaccatccttttccttactatggttatttcatactttggttgcatgaaggctgcccccatgaaagaagcaaacatccgaggacaaggtggcttggcctacccaggtgtgcggacccatgggactctggagagcgtgaatgggcccaaggcaggttcaagaggcttgacatcattggctgacactttcgaacacgtgatagaagagctgttggatgaggaccagaaagttcggcccaatgaagaaaacaataaggacgcagacttgtacacgtccagggtgatgctcagtagtcaagtgcctttggagcctcctcttctctttctgctggaggaatacaaaaattacctagatgctgcaaacatgtccatgagggtccggcgccactctgaccctgcccgccgaggggagctgagcgtgtgtgacagtattagtgagtgggtaacggcggcagacaaaaagactgcagtggacatgtcgggcgggacggtcacagtccttgaaaaggtccctgtatcaaaaggccaactgaagcaatacttctacgagaccaagtgcaatcccatgggttacacaaaagaaggctgcaggggcatagacaaaaggcattggaactcccagtgccgaactacccagtcgtacgtgcgggcccttaccatggatagcaaaaagagaattggctggcgattcataaggatagacacttcttgtgtatgtacattgaccattaaaaggggaagatagtggatttatgttgtatagattagattatattgagacaaaaattatctatttgtatatatacataacagggtaaattattcagttaagaaaaaaataattttatgaactgcatgtataaatgaagtttatacagtacagtggttctacaatctatttattggacatgtccatgaccagaagggaaacagtcatttgcgcacaacttaaaaagtctgcattacattccttgataatgttgtggtttgttgccgttgccaagaactgaaaacataaaaagttaaaaaaaataataaattgcatgctgctttaattgtgaattgataataaactgtcctctttcagaaaacagaaaaaaaacacacacacacacaacaaaaatttgaaccaaaacattccgtttacattttagacagtaagtatcttcgttcttgttagtactatatctgttttactgcttttaacttctgatagcgttggaattaaaacaatgtcaaggtgctgttgtcattgctttactggcttaggggatgggggatggggggtatatttttgtttgttttgtgtttttttttcgtttgtttgttttgttttttagttcccacagggagtagagatggggaaagaattcctacaatatatattctggctgataaaagatacatttgtatgttgtgaagatgtttgcaatatcgatcagatgactagaaagtgaataaaaattaaggcaactgaacaaaaaaatgctcacactccacatcccgtgatgcacctcccaggccccgctcattctttgggcgttggtcagagtaagctgcttttgacggaaggacctatgtttgctcagaacacattctttccccccctccccctctggtctcctctttgttttgttttaaggaagaaaaatcagttgcgcgttctgaaatattttaccactgctgtgaacaagtgaacacattgtgtcacatcatgacactcgtataagcatggagaacagtgatttttttttagaacagaaaacaacaaaaaataaccccaaaatgaagattattttttatgaggagtgaacatttgggtaaatcatggctaagcttaaaaaaaactcatggtgaggcttaacaatgtcttgtaagcaaaaggtagagccctgtatcaacccagaaacacctagatcagaacaggaatccacattgccagtgacatgagactgaacagccaaatggaggctatgtggagttggcattgcatttaccggcagtgcgggaggaatttctgagtggccatcccaaggtctaggtggaggtggggcatggtatttgagacattccaaaacgaaggcctctgaaggacccttcagaggtggctctggaatgacatgtgtcaagctgcttggacctcgtgctttaagtgcctacattatctaactgtgctcaagaggttctcgactggaggaccacactcaagccgacttatgcccaccatcccacctctggataattttgcataaaattggattagcctggagcaggttgggagccaaatgtggcatttgtgatcatgagattgatgcaatgagatagaagatgtttgctacctgaacacttattgctttgaaactagacttgaggaaaccagggtttatcttttgagaacttttggtaagggaaaagggaacaggaaaagaaaccccaaactcaggccgaatgatcaaggggacccataggaaatcttgtccagagacaagacttcgggaaggtgtctggacattcagaacaccaagacttgaaggtgccttgctcaatggaagaggccaggacagagctgacaaaattttgctccccagtgaaggccacagcaaccttctgcccatcctgtctgttcatggagagggtccctgcctcacctctgccattttgggttaggagaagtcaagttgggagcctgaaatagtggttcttggaaaaatggatccccagtgaaaactagagctctaagcccattcagcccatttcacacctgaaaatgttagtgatcaccacttggaccagcatccttaagtatcagaaagccccaagcaattgctgcatcttagtagggtgagggataagcaaaagaggatgttcaccataacccaggaatgaagataccatcagcaaagaatttcaatttgttcagtctttcatttagagctagtctttcacagtaccatctgaatacctctttgaaagaaggaagactttacgtagtgtagatttgttttgtgttgtttgaaaatattatctttgtaattatttttaatatgtaaggaatgcttggaatatctgctgtatgtcaactttatgcagcttccttttgagggacaaatttaaaacaaacaaccccccatcacaaacttaaaggattgcaagggccagatctgttaagtggtttcataggagacacatccagcaattgtgtggtcagtggctcttttacccaataagatacatcacagtcacatgcttgatggtttatgttgacctaagatttattttgttaaaatctctctctgttgtgttcgttcttgttctgttttgttttgttttttaaagtcttgctgtggtctctttgtggcagaagtgtttcatgcatggcagcaggcctgttgcttttttatggcgattcccattgaaaatgtaagtaaatgtctgtggccttgttctctctatggtaaagatattattcaccatgtaaaacaaaaaacaatatttattgtattttagtatatttatataattatgttattgaaaaaaattggcattaaaacttaaccgcatcagaagcctattgtaaatacaagttctatttaagtgtactaattaacatataatatatgttttaaatatagaatttttaatgtttttaaatatattttcaaagtacataaaa

SEQ ID NO: 2153 - DNA, 4125 bp, Homo sapiens
  source 1..4125: mol_type = unassigned DNA; mol_type = unassigned DNA
agagctaaataatgtctgacccgggcgcaaggcgcagcctggagctccgggtccccgacgctgccgccgccgcgcccgggcgcacccgcccgctcgctgtcccgcgcaccccgtagcgcctcgggctcccgggccggacagaggagccagcccggtgcgcccctccacctcctgctcggggggctttaatgagacacccaccgctgctgtggggccggcggggagcagcaccgcgacggggaccggggctgggcgctggagccagaatcggaaccacgatgtgactccgccgccggggacccgtgaggtttgtgtggaccccgagcatgagcagagatcattaaaaattaaacttacaaagctgctaaagtgggaagaaggagaacttgaagccacaatttttgcacttgcttagaagccatctaatctcagttccaccaggtgagaagagtgatgaccatccttttccttactatggttatttcatactttggttgcatgaaggctgcccccatgaaagaagcaaacatccgaggacaaggtggcttggcctacccaggtgtgcggacccatgggactctggagagcgtgaatgggcccaaggcaggttcaagaggcttgacatcattggctgacactttcgaacacgtgatagaagagctgttggatgaggaccagaaagttcggcccaatgaagaaaacaataaggacgcagacttgtacacgtccagggtgatgctcagtagtcaagtgcctttggagcctcctcttctctttctgctggaggaatacaaaaattacctagatgctgcaaacatgtccatgagggtccggcgccactctgaccctgcccgccgaggggagctgagcgtgtgtgacagtattagtgagtgggtaacggcggcagacaaaaagactgcagtggacatgtcgggcgggacggtcacagtccttgaaaaggtccctgtatcaaaaggccaactgaagcaatacttctacgagaccaagtgcaatcccatgggttacacaaaagaaggctgcaggggcatagacaaaaggcattggaactcccagtgccgaactacccagtcgtacgtgcgggcccttaccatggatagcaaaaagagaattggctggcgattcataaggatagacacttcttgtgtatgtacattgaccattaaaaggggaagatagtggatttatgttgtatagattagattatattgagacaaaaattatctatttgtatatatacataacagggtaaattattcagttaagaaaaaaataattttatgaactgcatgtataaatgaagtttatacagtacagtggttctacaatctatttattggacatgtccatgaccagaagggaaacagtcatttgcgcacaacttaaaaagtctgcattacattccttgataatgttgtggtttgttgccgttgccaagaactgaaaacataaaaagttaaaaaaaataataaattgcatgctgctttaattgtgaattgataataaactgtcctctttcagaaaacagaaaaaaaacacacacacacacaacaaaaatttgaaccaaaacattccgtttacattttagacagtaagtatcttcgttcttgttagtactatatctgttttactgcttttaacttctgatagcgttggaattaaaacaatgtcaaggtgctgttgtcattgctttactggcttaggggatgggggatggggggtatatttttgtttgttttgtgtttttttttcgtttgtttgttttgttttttagttcccacagggagtagagatggggaaagaattcctacaatatatattctggctgataaaagatacatttgtatgttgtgaagatgtttgcaatatcgatcagatgactagaaagtgaataaaaattaaggcaactgaacaaaaaaatgctcacactccacatcccgtgatgcacctcccaggccccgctcattctttgggcgttggtcagagtaagctgcttttgacggaaggacctatgtttgctcagaacacattctttccccccctccccctctggtctcctctttgttttgttttaaggaagaaaaatcagttgcgcgttctgaaatattttaccactgctgtgaacaagtgaacacattgtgtcacatcatgacactcgtataagcatggagaacagtgatttttttttagaacagaaaacaacaaaaaataaccccaaaatgaagattattttttatgaggagtgaacatttgggtaaatcatggctaagcttaaaaaaaactcatggtgaggcttaacaatgtcttgtaagcaaaaggtagagccctgtatcaacccagaaacacctagatcagaacaggaatccacattgccagtgacatgagactgaacagccaaatggaggctatgtggagttggcattgcatttaccggcagtgcgggaggaatttctgagtggccatcccaaggtctaggtggaggtggggcatggtatttgagacattccaaaacgaaggcctctgaaggacccttcagaggtggctctggaatgacatgtgtcaagctgcttggacctcgtgctttaagtgcctacattatctaactgtgctcaagaggttctcgactggaggaccacactcaagccgacttatgcccaccatcccacctctggataattttgcataaaattggattagcctggagcaggttgggagccaaatgtggcatttgtgatcatgagattgatgcaatgagatagaagatgtttgctacctgaacacttattgctttgaaactagacttgaggaaaccagggtttatcttttgagaacttttggtaagggaaaagggaacaggaaaagaaaccccaaactcaggccgaatgatcaaggggacccataggaaatcttgtccagagacaagacttcgggaaggtgtctggacattcagaacaccaagacttgaaggtgccttgctcaatggaagaggccaggacagagctgacaaaattttgctccccagtgaaggccacagcaaccttctgcccatcctgtctgttcatggagagggtccctgcctcacctctgccattttgggttaggagaagtcaagttgggagcctgaaatagtggttcttggaaaaatggatccccagtgaaaactagagctctaagcccattcagcccatttcacacctgaaaatgttagtgatcaccacttggaccagcatccttaagtatcagaaagccccaagcaattgctgcatcttagtagggtgagggataagcaaaagaggatgttcaccataacccaggaatgaagataccatcagcaaagaatttcaatttgttcagtctttcatttagagctagtctttcacagtaccatctgaatacctctttgaaagaaggaagactttacgtagtgtagatttgttttgtgttgtttgaaaatattatctttgtaattatttttaatatgtaaggaatgcttggaatatctgctgtatgtcaactttatgcagcttccttttgagggacaaatttaaaacaaacaaccccccatcacaaacttaaaggattgcaagggccagatctgttaagtggtttcataggagacacatccagcaattgtgtggtcagtggctcttttacccaataagatacatcacagtcacatgcttgatggtttatgttgacctaagatttattttgttaaaatctctctctgttgtgttcgttcttgttctgttttgttttgttttttaaagtcttgctgtggtctctttgtggcagaagtgtttcatgcatggcagcaggcctgttgcttttttatggcgattcccattgaaaatgtaagtaaatgtctgtggccttgttctctctatggtaaagatattattcaccatgtaaaacaaaaaacaatatttattgtattttagtatatttatataattatgttattgaaaaaaattggcattaaaacttaaccgcatcagaagcctattgtaaatacaagttctatttaagtgtactaattaacatataatatatgttttaaatatagaatttttaatgtttttaaatatattttcaaagtacataaaa

SEQ ID NO: 2154 - DNA, 4000 bp, Homo sapiens
  source 1..4000: mol_type = unassigned DNA; mol_type = unassigned DNA
agagctaaataatgtctgacccgggcgcaaggcgcagcctggagctccgggtccccgacgctgccgccgccgcgcccgggcgcacccgcccgctcgctgtcccgcgcaccccgtagcgcctcgggctcccgggccggacagaggagccagcccggtgcgcccctccacctcctgctcggggggctttaatgagacacccaccgctgctgtggggccggcggggagcagcaccgcgacggggaccggggctgggcgctggagccagaatcggaaccacgatgtgactccgccgccggggacccgtgagttccaccaggtgagaagagtgatgaccatccttttccttactatggttatttcatactttggttgcatgaaggctgcccccatgaaagaagcaaacatccgaggacaaggtggcttggcctacccaggtgtgcggacccatgggactctggagagcgtgaatgggcccaaggcaggttcaagaggcttgacatcattggctgacactttcgaacacgtgatagaagagctgttggatgaggaccagaaagttcggcccaatgaagaaaacaataaggacgcagacttgtacacgtccagggtgatgctcagtagtcaagtgcctttggagcctcctcttctctttctgctggaggaatacaaaaattacctagatgctgcaaacatgtccatgagggtccggcgccactctgaccctgcccgccgaggggagctgagcgtgtgtgacagtattagtgagtgggtaacggcggcagacaaaaagactgcagtggacatgtcgggcgggacggtcacagtccttgaaaaggtccctgtatcaaaaggccaactgaagcaatacttctacgagaccaagtgcaatcccatgggttacacaaaagaaggctgcaggggcatagacaaaaggcattggaactcccagtgccgaactacccagtcgtacgtgcgggcccttaccatggatagcaaaaagagaattggctggcgattcataaggatagacacttcttgtgtatgtacattgaccattaaaaggggaagatagtggatttatgttgtatagattagattatattgagacaaaaattatctatttgtatatatacataacagggtaaattattcagttaagaaaaaaataattttatgaactgcatgtataaatgaagtttatacagtacagtggttctacaatctatttattggacatgtccatgaccagaagggaaacagtcatttgcgcacaacttaaaaagtctgcattacattccttgataatgttgtggtttgttgccgttgccaagaactgaaaacataaaaagttaaaaaaaataataaattgcatgctgctttaattgtgaattgataataaactgtcctctttcagaaaacagaaaaaaaacacacacacacacaacaaaaatttgaaccaaaacattccgtttacattttagacagtaagtatcttcgttcttgttagtactatatctgttttactgcttttaacttctgatagcgttggaattaaaacaatgtcaaggtgctgttgtcattgctttactggcttaggggatgggggatggggggtatatttttgtttgttttgtgtttttttttcgtttgtttgttttgttttttagttcccacagggagtagagatggggaaagaattcctacaatatatattctggctgataaaagatacatttgtatgttgtgaagatgtttgcaatatcgatcagatgactagaaagtgaataaaaattaaggcaactgaacaaaaaaatgctcacactccacatcccgtgatgcacctcccaggccccgctcattctttgggcgttggtcagagtaagctgcttttgacggaaggacctatgtttgctcagaacacattctttccccccctccccctctggtctcctctttgttttgttttaaggaagaaaaatcagttgcgcgttctgaaatattttaccactgctgtgaacaagtgaacacattgtgtcacatcatgacactcgtataagcatggagaacagtgatttttttttagaacagaaaacaacaaaaaataaccccaaaatgaagattattttttatgaggagtgaacatttgggtaaatcatggctaagcttaaaaaaaactcatggtgaggcttaacaatgtcttgtaagcaaaaggtagagccctgtatcaacccagaaacacctagatcagaacaggaatccacattgccagtgacatgagactgaacagccaaatggaggctatgtggagttggcattgcatttaccggcagtgcgggaggaatttctgagtggccatcccaaggtctaggtggaggtggggcatggtatttgagacattccaaaacgaaggcctctgaaggacccttcagaggtggctctggaatgacatgtgtcaagctgcttggacctcgtgctttaagtgcctacattatctaactgtgctcaagaggttctcgactggaggaccacactcaagccgacttatgcccaccatcccacctctggataattttgcataaaattggattagcctggagcaggttgggagccaaatgtggcatttgtgatcatgagattgatgcaatgagatagaagatgtttgctacctgaacacttattgctttgaaactagacttgaggaaaccagggtttatcttttgagaacttttggtaagggaaaagggaacaggaaaagaaaccccaaactcaggccgaatgatcaaggggacccataggaaatcttgtccagagacaagacttcgggaaggtgtctggacattcagaacaccaagacttgaaggtgccttgctcaatggaagaggccaggacagagctgacaaaattttgctccccagtgaaggccacagcaaccttctgcccatcctgtctgttcatggagagggtccctgcctcacctctgccattttgggttaggagaagtcaagttgggagcctgaaatagtggttcttggaaaaatggatccccagtgaaaactagagctctaagcccattcagcccatttcacacctgaaaatgttagtgatcaccacttggaccagcatccttaagtatcagaaagccccaagcaattgctgcatcttagtagggtgagggataagcaaaagaggatgttcaccataacccaggaatgaagataccatcagcaaagaatttcaatttgttcagtctttcatttagagctagtctttcacagtaccatctgaatacctctttgaaagaaggaagactttacgtagtgtagatttgttttgtgttgtttgaaaatattatctttgtaattatttttaatatgtaaggaatgcttggaatatctgctgtatgtcaactttatgcagcttccttttgagggacaaatttaaaacaaacaaccccccatcacaaacttaaaggattgcaagggccagatctgttaagtggtttcataggagacacatccagcaattgtgtggtcagtggctcttttacccaataagatacatcacagtcacatgcttgatggtttatgttgacctaagatttattttgttaaaatctctctctgttgtgttcgttcttgttctgttttgttttgttttttaaagtcttgctgtggtctctttgtggcagaagtgtttcatgcatggcagcaggcctgttgcttttttatggcgattcccattgaaaatgtaagtaaatgtctgtggccttgttctctctatggtaaagatattattcaccatgtaaaacaaaaaacaatatttattgtattttagtatatttatataattatgttattgaaaaaaattggcattaaaacttaaccgcatcagaagcctattgtaaatacaagttctatttaagtgtactaattaacatataatatatgttttaaatatagaatttttaatgtttttaaatatattttcaaagtacataaaa

SEQ ID NO: 2155 - DNA, 3918 bp, Homo sapiens
  source 1..3918: mol_type = unassigned DNA; mol_type = unassigned DNA
agagttgaaagctaggggagcgagacctcggggcgtgcgattctcactcgctccctcccgccccagcgcccacagccggggtttctgcagagggcgcgggacgcggggttccccggggctgaggctggggctggaacacccctcgaagccgcgggcgtcctgtccaaggcgccccaggagggcgcaggactcgcagggcgatgtcgcggggccctaggggaggagttccaccaggtgagaagagtgatgaccatccttttccttactatggttatttcatactttggttgcatgaaggctgcccccatgaaagaagcaaacatccgaggacaaggtggcttggcctacccaggtgtgcggacccatgggactctggagagcgtgaatgggcccaaggcaggttcaagaggcttgacatcattggctgacactttcgaacacgtgatagaagagctgttggatgaggaccagaaagttcggcccaatgaagaaaacaataaggacgcagacttgtacacgtccagggtgatgctcagtagtcaagtgcctttggagcctcctcttctctttctgctggaggaatacaaaaattacctagatgctgcaaacatgtccatgagggtccggcgccactctgaccctgcccgccgaggggagctgagcgtgtgtgacagtattagtgagtgggtaacggcggcagacaaaaagactgcagtggacatgtcgggcgggacggtcacagtccttgaaaaggtccctgtatcaaaaggccaactgaagcaatacttctacgagaccaagtgcaatcccatgggttacacaaaagaaggctgcaggggcatagacaaaaggcattggaactcccagtgccgaactacccagtcgtacgtgcgggcccttaccatggatagcaaaaagagaattggctggcgattcataaggatagacacttcttgtgtatgtacattgaccattaaaaggggaagatagtggatttatgttgtatagattagattatattgagacaaaaattatctatttgtatatatacataacagggtaaattattcagttaagaaaaaaataattttatgaactgcatgtataaatgaagtttatacagtacagtggttctacaatctatttattggacatgtccatgaccagaagggaaacagtcatttgcgcacaacttaaaaagtctgcattacattccttgataatgttgtggtttgttgccgttgccaagaactgaaaacataaaaagttaaaaaaaataataaattgcatgctgctttaattgtgaattgataataaactgtcctctttcagaaaacagaaaaaaaacacacacacacacaacaaaaatttgaaccaaaacattccgtttacattttagacagtaagtatcttcgttcttgttagtactatatctgttttactgcttttaacttctgatagcgttggaattaaaacaatgtcaaggtgctgttgtcattgctttactggcttaggggatgggggatggggggtatatttttgtttgttttgtgtttttttttcgtttgtttgttttgttttttagttcccacagggagtagagatggggaaagaattcctacaatatatattctggctgataaaagatacatttgtatgttgtgaagatgtttgcaatatcgatcagatgactagaaagtgaataaaaattaaggcaactgaacaaaaaaatgctcacactccacatcccgtgatgcacctcccaggccccgctcattctttgggcgttggtcagagtaagctgcttttgacggaaggacctatgtttgctcagaacacattctttccccccctccccctctggtctcctctttgttttgttttaaggaagaaaaatcagttgcgcgttctgaaatattttaccactgctgtgaacaagtgaacacattgtgtcacatcatgacactcgtataagcatggagaacagtgatttttttttagaacagaaaacaacaaaaaataaccccaaaatgaagattattttttatgaggagtgaacatttgggtaaatcatggctaagcttaaaaaaaactcatggtgaggcttaacaatgtcttgtaagcaaaaggtagagccctgtatcaacccagaaacacctagatcagaacaggaatccacattgccagtgacatgagactgaacagccaaatggaggctatgtggagttggcattgcatttaccggcagtgcgggaggaatttctgagtggccatcccaaggtctaggtggaggtggggcatggtatttgagacattccaaaacgaaggcctctgaaggacccttcagaggtggctctggaatgacatgtgtcaagctgcttggacctcgtgctttaagtgcctacattatctaactgtgctcaagaggttctcgactggaggaccacactcaagccgacttatgcccaccatcccacctctggataattttgcataaaattggattagcctggagcaggttgggagccaaatgtggcatttgtgatcatgagattgatgcaatgagatagaagatgtttgctacctgaacacttattgctttgaaactagacttgaggaaaccagggtttatcttttgagaacttttggtaagggaaaagggaacaggaaaagaaaccccaaactcaggccgaatgatcaaggggacccataggaaatcttgtccagagacaagacttcgggaaggtgtctggacattcagaacaccaagacttgaaggtgccttgctcaatggaagaggccaggacagagctgacaaaattttgctccccagtgaaggccacagcaaccttctgcccatcctgtctgttcatggagagggtccctgcctcacctctgccattttgggttaggagaagtcaagttgggagcctgaaatagtggttcttggaaaaatggatccccagtgaaaactagagctctaagcccattcagcccatttcacacctgaaaatgttagtgatcaccacttggaccagcatccttaagtatcagaaagccccaagcaattgctgcatcttagtagggtgagggataagcaaaagaggatgttcaccataacccaggaatgaagataccatcagcaaagaatttcaatttgttcagtctttcatttagagctagtctttcacagtaccatctgaatacctctttgaaagaaggaagactttacgtagtgtagatttgttttgtgttgtttgaaaatattatctttgtaattatttttaatatgtaaggaatgcttggaatatctgctgtatgtcaactttatgcagcttccttttgagggacaaatttaaaacaaacaaccccccatcacaaacttaaaggattgcaagggccagatctgttaagtggtttcataggagacacatccagcaattgtgtggtcagtggctcttttacccaataagatacatcacagtcacatgcttgatggtttatgttgacctaagatttattttgttaaaatctctctctgttgtgttcgttcttgttctgttttgttttgttttttaaagtcttgctgtggtctctttgtggcagaagtgtttcatgcatggcagcaggcctgttgcttttttatggcgattcccattgaaaatgtaagtaaatgtctgtggccttgttctctctatggtaaagatattattcaccatgtaaaacaaaaaacaatatttattgtattttagtatatttatataattatgttattgaaaaaaattggcattaaaacttaaccgcatcagaagcctattgtaaatacaagttctatttaagtgtactaattaacatataatatatgttttaaatatagaatttttaatgtttttaaatatattttcaaagtacataaaa

SEQ ID NO: 2156 - DNA, 4176 bp, Homo sapiens
  source 1..4176: mol_type = unassigned DNA; mol_type = unassigned DNA
gtaaaccaatagcccccatgctctgtgcgatttcattgtgtgctcgcgttcgcaagctccgtagtgcaggaaggtgcgggaagttaagtaattaaaagaaattatagagtgggatgcaaaaataacccgaaggacaactggatgtgtggagccaccagttttctccatgagtgcacaaggttaatccttgttactactcagaatgctgagtttctacagaaagggttgcaggtccacacatgttttggcgtctacccacacgcttctgtatggcatgactgtgcatcccagaagaagggctgtgctgtgtacctccacgtttcagtggaatttaacaaactgatccctgaaaatggtttcataaagggatggtaataaagtctcttagtggttgaaaatgttatttcttacaaaagtggagaacatttgcttttcaataccagagttttcagccatttctgcattctgacctattgactggagttccaccaggtgagaagagtgatgaccatccttttccttactatggttatttcatactttggttgcatgaaggctgcccccatgaaagaagcaaacatccgaggacaaggtggcttggcctacccaggtgtgcggacccatgggactctggagagcgtgaatgggcccaaggcaggttcaagaggcttgacatcattggctgacactttcgaacacgtgatagaagagctgttggatgaggaccagaaagttcggcccaatgaagaaaacaataaggacgcagacttgtacacgtccagggtgatgctcagtagtcaagtgcctttggagcctcctcttctctttctgctggaggaatacaaaaattacctagatgctgcaaacatgtccatgagggtccggcgccactctgaccctgcccgccgaggggagctgagcgtgtgtgacagtattagtgagtgggtaacggcggcagacaaaaagactgcagtggacatgtcgggcgggacggtcacagtccttgaaaaggtccctgtatcaaaaggccaactgaagcaatacttctacgagaccaagtgcaatcccatgggttacacaaaagaaggctgcaggggcatagacaaaaggcattggaactcccagtgccgaactacccagtcgtacgtgcgggcccttaccatggatagcaaaaagagaattggctggcgattcataaggatagacacttcttgtgtatgtacattgaccattaaaaggggaagatagtggatttatgttgtatagattagattatattgagacaaaaattatctatttgtatatatacataacagggtaaattattcagttaagaaaaaaataattttatgaactgcatgtataaatgaagtttatacagtacagtggttctacaatctatttattggacatgtccatgaccagaagggaaacagtcatttgcgcacaacttaaaaagtctgcattacattccttgataatgttgtggtttgttgccgttgccaagaactgaaaacataaaaagttaaaaaaaataataaattgcatgctgctttaattgtgaattgataataaactgtcctctttcagaaaacagaaaaaaaacacacacacacacaacaaaaatttgaaccaaaacattccgtttacattttagacagtaagtatcttcgttcttgttagtactatatctgttttactgcttttaacttctgatagcgttggaattaaaacaatgtcaaggtgctgttgtcattgctttactggcttaggggatgggggatggggggtatatttttgtttgttttgtgtttttttttcgtttgtttgttttgttttttagttcccacagggagtagagatggggaaagaattcctacaatatatattctggctgataaaagatacatttgtatgttgtgaagatgtttgcaatatcgatcagatgactagaaagtgaataaaaattaaggcaactgaacaaaaaaatgctcacactccacatcccgtgatgcacctcccaggccccgctcattctttgggcgttggtcagagtaagctgcttttgacggaaggacctatgtttgctcagaacacattctttccccccctccccctctggtctcctctttgttttgttttaaggaagaaaaatcagttgcgcgttctgaaatattttaccactgctgtgaacaagtgaacacattgtgtcacatcatgacactcgtataagcatggagaacagtgatttttttttagaacagaaaacaacaaaaaataaccccaaaatgaagattattttttatgaggagtgaacatttgggtaaatcatggctaagcttaaaaaaaactcatggtgaggcttaacaatgtcttgtaagcaaaaggtagagccctgtatcaacccagaaacacctagatcagaacaggaatccacattgccagtgacatgagactgaacagccaaatggaggctatgtggagttggcattgcatttaccggcagtgcgggaggaatttctgagtggccatcccaaggtctaggtggaggtggggcatggtatttgagacattccaaaacgaaggcctctgaaggacccttcagaggtggctctggaatgacatgtgtcaagctgcttggacctcgtgctttaagtgcctacattatctaactgtgctcaagaggttctcgactggaggaccacactcaagccgacttatgcccaccatcccacctctggataattttgcataaaattggattagcctggagcaggttgggagccaaatgtggcatttgtgatcatgagattgatgcaatgagatagaagatgtttgctacctgaacacttattgctttgaaactagacttgaggaaaccagggtttatcttttgagaacttttggtaagggaaaagggaacaggaaaagaaaccccaaactcaggccgaatgatcaaggggacccataggaaatcttgtccagagacaagacttcgggaaggtgtctggacattcagaacaccaagacttgaaggtgccttgctcaatggaagaggccaggacagagctgacaaaattttgctccccagtgaaggccacagcaaccttctgcccatcctgtctgttcatggagagggtccctgcctcacctctgccattttgggttaggagaagtcaagttgggagcctgaaatagtggttcttggaaaaatggatccccagtgaaaactagagctctaagcccattcagcccatttcacacctgaaaatgttagtgatcaccacttggaccagcatccttaagtatcagaaagccccaagcaattgctgcatcttagtagggtgagggataagcaaaagaggatgttcaccataacccaggaatgaagataccatcagcaaagaatttcaatttgttcagtctttcatttagagctagtctttcacagtaccatctgaatacctctttgaaagaaggaagactttacgtagtgtagatttgttttgtgttgtttgaaaatattatctttgtaattatttttaatatgtaaggaatgcttggaatatctgctgtatgtcaactttatgcagcttccttttgagggacaaatttaaaacaaacaaccccccatcacaaacttaaaggattgcaagggccagatctgttaagtggtttcataggagacacatccagcaattgtgtggtcagtggctcttttacccaataagatacatcacagtcacatgcttgatggtttatgttgacctaagatttattttgttaaaatctctctctgttgtgttcgttcttgttctgttttgttttgttttttaaagtcttgctgtggtctctttgtggcagaagtgtttcatgcatggcagcaggcctgttgcttttttatggcgattcccattgaaaatgtaagtaaatgtctgtggccttgttctctctatggtaaagatattattcaccatgtaaaacaaaaaacaatatttattgtattttagtatatttatataattatgttattgaaaaaaattggcattaaaacttaaccgcatcagaagcctattgtaaatacaagttctatttaagtgtactaattaacatataatatatgttttaaatatagaatttttaatgtttttaaatatattttcaaagtacataaaa

SEQ ID NO: 2157 - DNA, 3776 bp, Homo sapiens
  source 1..3776: mol_type = unassigned DNA; mol_type = unassigned DNA
gtaaaccaatagcccccatgctctgtgcgatttcattgtgtgctcgcgttcgcaagctccgtagtgcaggaaggtgcgggaagttccaccaggtgagaagagtgatgaccatccttttccttactatggttatttcatactttggttgcatgaaggctgcccccatgaaagaagcaaacatccgaggacaaggtggcttggcctacccaggtgtgcggacccatgggactctggagagcgtgaatgggcccaaggcaggttcaagaggcttgacatcattggctgacactttcgaacacgtgatagaagagctgttggatgaggaccagaaagttcggcccaatgaagaaaacaataaggacgcagacttgtacacgtccagggtgatgctcagtagtcaagtgcctttggagcctcctcttctctttctgctggaggaatacaaaaattacctagatgctgcaaacatgtccatgagggtccggcgccactctgaccctgcccgccgaggggagctgagcgtgtgtgacagtattagtgagtgggtaacggcggcagacaaaaagactgcagtggacatgtcgggcgggacggtcacagtccttgaaaaggtccctgtatcaaaaggccaactgaagcaatacttctacgagaccaagtgcaatcccatgggttacacaaaagaaggctgcaggggcatagacaaaaggcattggaactcccagtgccgaactacccagtcgtacgtgcgggcccttaccatggatagcaaaaagagaattggctggcgattcataaggatagacacttcttgtgtatgtacattgaccattaaaaggggaagatagtggatttatgttgtatagattagattatattgagacaaaaattatctatttgtatatatacataacagggtaaattattcagttaagaaaaaaataattttatgaactgcatgtataaatgaagtttatacagtacagtggttctacaatctatttattggacatgtccatgaccagaagggaaacagtcatttgcgcacaacttaaaaagtctgcattacattccttgataatgttgtggtttgttgccgttgccaagaactgaaaacataaaaagttaaaaaaaataataaattgcatgctgctttaattgtgaattgataataaactgtcctctttcagaaaacagaaaaaaaacacacacacacacaacaaaaatttgaaccaaaacattccgtttacattttagacagtaagtatcttcgttcttgttagtactatatctgttttactgcttttaacttctgatagcgttggaattaaaacaatgtcaaggtgctgttgtcattgctttactggcttaggggatgggggatggggggtatatttttgtttgttttgtgtttttttttcgtttgtttgttttgttttttagttcccacagggagtagagatggggaaagaattcctacaatatatattctggctgataaaagatacatttgtatgttgtgaagatgtttgcaatatcgatcagatgactagaaagtgaataaaaattaaggcaactgaacaaaaaaatgctcacactccacatcccgtgatgcacctcccaggccccgctcattctttgggcgttggtcagagtaagctgcttttgacggaaggacctatgtttgctcagaacacattctttccccccctccccctctggtctcctctttgttttgttttaaggaagaaaaatcagttgcgcgttctgaaatattttaccactgctgtgaacaagtgaacacattgtgtcacatcatgacactcgtataagcatggagaacagtgatttttttttagaacagaaaacaacaaaaaataaccccaaaatgaagattattttttatgaggagtgaacatttgggtaaatcatggctaagcttaaaaaaaactcatggtgaggcttaacaatgtcttgtaagcaaaaggtagagccctgtatcaacccagaaacacctagatcagaacaggaatccacattgccagtgacatgagactgaacagccaaatggaggctatgtggagttggcattgcatttaccggcagtgcgggaggaatttctgagtggccatcccaaggtctaggtggaggtggggcatggtatttgagacattccaaaacgaaggcctctgaaggacccttcagaggtggctctggaatgacatgtgtcaagctgcttggacctcgtgctttaagtgcctacattatctaactgtgctcaagaggttctcgactggaggaccacactcaagccgacttatgcccaccatcccacctctggataattttgcataaaattggattagcctggagcaggttgggagccaaatgtggcatttgtgatcatgagattgatgcaatgagatagaagatgtttgctacctgaacacttattgctttgaaactagacttgaggaaaccagggtttatcttttgagaacttttggtaagggaaaagggaacaggaaaagaaaccccaaactcaggccgaatgatcaaggggacccataggaaatcttgtccagagacaagacttcgggaaggtgtctggacattcagaacaccaagacttgaaggtgccttgctcaatggaagaggccaggacagagctgacaaaattttgctccccagtgaaggccacagcaaccttctgcccatcctgtctgttcatggagagggtccctgcctcacctctgccattttgggttaggagaagtcaagttgggagcctgaaatagtggttcttggaaaaatggatccccagtgaaaactagagctctaagcccattcagcccatttcacacctgaaaatgttagtgatcaccacttggaccagcatccttaagtatcagaaagccccaagcaattgctgcatcttagtagggtgagggataagcaaaagaggatgttcaccataacccaggaatgaagataccatcagcaaagaatttcaatttgttcagtctttcatttagagctagtctttcacagtaccatctgaatacctctttgaaagaaggaagactttacgtagtgtagatttgttttgtgttgtttgaaaatattatctttgtaattatttttaatatgtaaggaatgcttggaatatctgctgtatgtcaactttatgcagcttccttttgagggacaaatttaaaacaaacaaccccccatcacaaacttaaaggattgcaagggccagatctgttaagtggtttcataggagacacatccagcaattgtgtggtcagtggctcttttacccaataagatacatcacagtcacatgcttgatggtttatgttgacctaagatttattttgttaaaatctctctctgttgtgttcgttcttgttctgttttgttttgttttttaaagtcttgctgtggtctctttgtggcagaagtgtttcatgcatggcagcaggcctgttgcttttttatggcgattcccattgaaaatgtaagtaaatgtctgtggccttgttctctctatggtaaagatattattcaccatgtaaaacaaaaaacaatatttattgtattttagtatatttatataattatgttattgaaaaaaattggcattaaaacttaaccgcatcagaagcctattgtaaatacaagttctatttaagtgtactaattaacatataatatatgttttaaatatagaatttttaatgtttttaaatatattttcaaagtacataaaa

SEQ ID NO: 2158 - DNA, 4059 bp, Homo sapiens
  source 1..4059: mol_type = unassigned DNA; mol_type = unassigned DNA
gtaaaccaatagcccccatgctctgtgcgatttcattgtgtgctcgcgttcgcaagctccgtagtgcaggaaggtgcgggaagttaagtaattaaaagaaattatagagtgggatgcaaaaataacccgaaggacaactggatgtgtggagccaccagttttctccatgagtgcacaaggttaatccttgttactactcagaatgctgagtttctacagaaagggttgcaggtccacacatgttttggcgtctacccacacgcttctgtatggcatgactgtgcatcccagaagaagggctgtgctgtgtacctccacgtttcagtggaatttaacaaactgatccctgaaaatggtttcataaagttccaccaggtgagaagagtgatgaccatccttttccttactatggttatttcatactttggttgcatgaaggctgcccccatgaaagaagcaaacatccgaggacaaggtggcttggcctacccaggtgtgcggacccatgggactctggagagcgtgaatgggcccaaggcaggttcaagaggcttgacatcattggctgacactttcgaacacgtgatagaagagctgttggatgaggaccagaaagttcggcccaatgaagaaaacaataaggacgcagacttgtacacgtccagggtgatgctcagtagtcaagtgcctttggagcctcctcttctctttctgctggaggaatacaaaaattacctagatgctgcaaacatgtccatgagggtccggcgccactctgaccctgcccgccgaggggagctgagcgtgtgtgacagtattagtgagtgggtaacggcggcagacaaaaagactgcagtggacatgtcgggcgggacggtcacagtccttgaaaaggtccctgtatcaaaaggccaactgaagcaatacttctacgagaccaagtgcaatcccatgggttacacaaaagaaggctgcaggggcatagacaaaaggcattggaactcccagtgccgaactacccagtcgtacgtgcgggcccttaccatggatagcaaaaagagaattggctggcgattcataaggatagacacttcttgtgtatgtacattgaccattaaaaggggaagatagtggatttatgttgtatagattagattatattgagacaaaaattatctatttgtatatatacataacagggtaaattattcagttaagaaaaaaataattttatgaactgcatgtataaatgaagtttatacagtacagtggttctacaatctatttattggacatgtccatgaccagaagggaaacagtcatttgcgcacaacttaaaaagtctgcattacattccttgataatgttgtggtttgttgccgttgccaagaactgaaaacataaaaagttaaaaaaaataataaattgcatgctgctttaattgtgaattgataataaactgtcctctttcagaaaacagaaaaaaaacacacacacacacaacaaaaatttgaaccaaaacattccgtttacattttagacagtaagtatcttcgttcttgttagtactatatctgttttactgcttttaacttctgatagcgttggaattaaaacaatgtcaaggtgctgttgtcattgctttactggcttaggggatgggggatggggggtatatttttgtttgttttgtgtttttttttcgtttgtttgttttgttttttagttcccacagggagtagagatggggaaagaattcctacaatatatattctggctgataaaagatacatttgtatgttgtgaagatgtttgcaatatcgatcagatgactagaaagtgaataaaaattaaggcaactgaacaaaaaaatgctcacactccacatcccgtgatgcacctcccaggccccgctcattctttgggcgttggtcagagtaagctgcttttgacggaaggacctatgtttgctcagaacacattctttccccccctccccctctggtctcctctttgttttgttttaaggaagaaaaatcagttgcgcgttctgaaatattttaccactgctgtgaacaagtgaacacattgtgtcacatcatgacactcgtataagcatggagaacagtgatttttttttagaacagaaaacaacaaaaaataaccccaaaatgaagattattttttatgaggagtgaacatttgggtaaatcatggctaagcttaaaaaaaactcatggtgaggcttaacaatgtcttgtaagcaaaaggtagagccctgtatcaacccagaaacacctagatcagaacaggaatccacattgccagtgacatgagactgaacagccaaatggaggctatgtggagttggcattgcatttaccggcagtgcgggaggaatttctgagtggccatcccaaggtctaggtggaggtggggcatggtatttgagacattccaaaacgaaggcctctgaaggacccttcagaggtggctctggaatgacatgtgtcaagctgcttggacctcgtgctttaagtgcctacattatctaactgtgctcaagaggttctcgactggaggaccacactcaagccgacttatgcccaccatcccacctctggataattttgcataaaattggattagcctggagcaggttgggagccaaatgtggcatttgtgatcatgagattgatgcaatgagatagaagatgtttgctacctgaacacttattgctttgaaactagacttgaggaaaccagggtttatcttttgagaacttttggtaagggaaaagggaacaggaaaagaaaccccaaactcaggccgaatgatcaaggggacccataggaaatcttgtccagagacaagacttcgggaaggtgtctggacattcagaacaccaagacttgaaggtgccttgctcaatggaagaggccaggacagagctgacaaaattttgctccccagtgaaggccacagcaaccttctgcccatcctgtctgttcatggagagggtccctgcctcacctctgccattttgggttaggagaagtcaagttgggagcctgaaatagtggttcttggaaaaatggatccccagtgaaaactagagctctaagcccattcagcccatttcacacctgaaaatgttagtgatcaccacttggaccagcatccttaagtatcagaaagccccaagcaattgctgcatcttagtagggtgagggataagcaaaagaggatgttcaccataacccaggaatgaagataccatcagcaaagaatttcaatttgttcagtctttcatttagagctagtctttcacagtaccatctgaatacctctttgaaagaaggaagactttacgtagtgtagatttgttttgtgttgtttgaaaatattatctttgtaattatttttaatatgtaaggaatgcttggaatatctgctgtatgtcaactttatgcagcttccttttgagggacaaatttaaaacaaacaaccccccatcacaaacttaaaggattgcaagggccagatctgttaagtggtttcataggagacacatccagcaattgtgtggtcagtggctcttttacccaataagatacatcacagtcacatgcttgatggtttatgttgacctaagatttattttgttaaaatctctctctgttgtgttcgttcttgttctgttttgttttgttttttaaagtcttgctgtggtctctttgtggcagaagtgtttcatgcatggcagcaggcctgttgcttttttatggcgattcccattgaaaatgtaagtaaatgtctgtggccttgttctctctatggtaaagatattattcaccatgtaaaacaaaaaacaatatttattgtattttagtatatttatataattatgttattgaaaaaaattggcattaaaacttaaccgcatcagaagcctattgtaaatacaagttctatttaagtgtactaattaacatataatatatgttttaaatatagaatttttaatgtttttaaatatattttcaaagtacataaaa

SEQ ID NO: 2159 - DNA, 4030 bp, Homo sapiens
  source 1..4030: mol_type = unassigned DNA; mol_type = unassigned DNA
acccactttcccattcaccgcggagagggctgctctcgctgccgctccccccggcgaactagcatgaaatctccctgcctctgccgagatcaaatggagcttctcgctgatggggtgcgagtattacctccgccatgcaatttccactatcaataatttaacttctttgctgcagaacagaaggagtacataccgggcaccaaagactcgcgccccctcccccctttaattaagcgaagggaacgtgaaaaaataatagagtgtgggagttttggggccgaagtctttcccggagcagctgccttgatggttactttgacaagtagtgactgaaaagttccaccaggtgagaagagtgatgaccatccttttccttactatggttatttcatactttggttgcatgaaggctgcccccatgaaagaagcaaacatccgaggacaaggtggcttggcctacccaggtgtgcggacccatgggactctggagagcgtgaatgggcccaaggcaggttcaagaggcttgacatcattggctgacactttcgaacacgtgatagaagagctgttggatgaggaccagaaagttcggcccaatgaagaaaacaataaggacgcagacttgtacacgtccagggtgatgctcagtagtcaagtgcctttggagcctcctcttctctttctgctggaggaatacaaaaattacctagatgctgcaaacatgtccatgagggtccggcgccactctgaccctgcccgccgaggggagctgagcgtgtgtgacagtattagtgagtgggtaacggcggcagacaaaaagactgcagtggacatgtcgggcgggacggtcacagtccttgaaaaggtccctgtatcaaaaggccaactgaagcaatacttctacgagaccaagtgcaatcccatgggttacacaaaagaaggctgcaggggcatagacaaaaggcattggaactcccagtgccgaactacccagtcgtacgtgcgggcccttaccatggatagcaaaaagagaattggctggcgattcataaggatagacacttcttgtgtatgtacattgaccattaaaaggggaagatagtggatttatgttgtatagattagattatattgagacaaaaattatctatttgtatatatacataacagggtaaattattcagttaagaaaaaaataattttatgaactgcatgtataaatgaagtttatacagtacagtggttctacaatctatttattggacatgtccatgaccagaagggaaacagtcatttgcgcacaacttaaaaagtctgcattacattccttgataatgttgtggtttgttgccgttgccaagaactgaaaacataaaaagttaaaaaaaataataaattgcatgctgctttaattgtgaattgataataaactgtcctctttcagaaaacagaaaaaaaacacacacacacacaacaaaaatttgaaccaaaacattccgtttacattttagacagtaagtatcttcgttcttgttagtactatatctgttttactgcttttaacttctgatagcgttggaattaaaacaatgtcaaggtgctgttgtcattgctttactggcttaggggatgggggatggggggtatatttttgtttgttttgtgtttttttttcgtttgtttgttttgttttttagttcccacagggagtagagatggggaaagaattcctacaatatatattctggctgataaaagatacatttgtatgttgtgaagatgtttgcaatatcgatcagatgactagaaagtgaataaaaattaaggcaactgaacaaaaaaatgctcacactccacatcccgtgatgcacctcccaggccccgctcattctttgggcgttggtcagagtaagctgcttttgacggaaggacctatgtttgctcagaacacattctttccccccctccccctctggtctcctctttgttttgttttaaggaagaaaaatcagttgcgcgttctgaaatattttaccactgctgtgaacaagtgaacacattgtgtcacatcatgacactcgtataagcatggagaacagtgatttttttttagaacagaaaacaacaaaaaataaccccaaaatgaagattattttttatgaggagtgaacatttgggtaaatcatggctaagcttaaaaaaaactcatggtgaggcttaacaatgtcttgtaagcaaaaggtagagccctgtatcaacccagaaacacctagatcagaacaggaatccacattgccagtgacatgagactgaacagccaaatggaggctatgtggagttggcattgcatttaccggcagtgcgggaggaatttctgagtggccatcccaaggtctaggtggaggtggggcatggtatttgagacattccaaaacgaaggcctctgaaggacccttcagaggtggctctggaatgacatgtgtcaagctgcttggacctcgtgctttaagtgcctacattatctaactgtgctcaagaggttctcgactggaggaccacactcaagccgacttatgcccaccatcccacctctggataattttgcataaaattggattagcctggagcaggttgggagccaaatgtggcatttgtgatcatgagattgatgcaatgagatagaagatgtttgctacctgaacacttattgctttgaaactagacttgaggaaaccagggtttatcttttgagaacttttggtaagggaaaagggaacaggaaaagaaaccccaaactcaggccgaatgatcaaggggacccataggaaatcttgtccagagacaagacttcgggaaggtgtctggacattcagaacaccaagacttgaaggtgccttgctcaatggaagaggccaggacagagctgacaaaattttgctccccagtgaaggccacagcaaccttctgcccatcctgtctgttcatggagagggtccctgcctcacctctgccattttgggttaggagaagtcaagttgggagcctgaaatagtggttcttggaaaaatggatccccagtgaaaactagagctctaagcccattcagcccatttcacacctgaaaatgttagtgatcaccacttggaccagcatccttaagtatcagaaagccccaagcaattgctgcatcttagtagggtgagggataagcaaaagaggatgttcaccataacccaggaatgaagataccatcagcaaagaatttcaatttgttcagtctttcatttagagctagtctttcacagtaccatctgaatacctctttgaaagaaggaagactttacgtagtgtagatttgttttgtgttgtttgaaaatattatctttgtaattatttttaatatgtaaggaatgcttggaatatctgctgtatgtcaactttatgcagcttccttttgagggacaaatttaaaacaaacaaccccccatcacaaacttaaaggattgcaagggccagatctgttaagtggtttcataggagacacatccagcaattgtgtggtcagtggctcttttacccaataagatacatcacagtcacatgcttgatggtttatgttgacctaagatttattttgttaaaatctctctctgttgtgttcgttcttgttctgttttgttttgttttttaaagtcttgctgtggtctctttgtggcagaagtgtttcatgcatggcagcaggcctgttgcttttttatggcgattcccattgaaaatgtaagtaaatgtctgtggccttgttctctctatggtaaagatattattcaccatgtaaaacaaaaaacaatatttattgtattttagtatatttatataattatgttattgaaaaaaattggcattaaaacttaaccgcatcagaagcctattgtaaatacaagttctatttaagtgtactaattaacatataatatatgttttaaatatagaatttttaatgtttttaaatatattttcaaagtacataaaa

SEQ ID NO: 2160 - DNA, 3930 bp, Homo sapiens
  source 1..3930: mol_type = unassigned DNA; mol_type = unassigned DNA
cttccaccccgccccctcctccagcctccatccctccctcattctatctcttcctctccgtcgccctcgctcctcgctggatgcttctttctgggttttcttttttttttcccttctgtcctccctccccgcgagtttcgggcgctggcttagagggttcccgctttctcaagggaaggggagctgccgagaccgcgctccgctccccagccgggccggatgcctcactgagcccagttccaccaggtgagaagagtgatgaccatccttttccttactatggttatttcatactttggttgcatgaaggctgcccccatgaaagaagcaaacatccgaggacaaggtggcttggcctacccaggtgtgcggacccatgggactctggagagcgtgaatgggcccaaggcaggttcaagaggcttgacatcattggctgacactttcgaacacgtgatagaagagctgttggatgaggaccagaaagttcggcccaatgaagaaaacaataaggacgcagacttgtacacgtccagggtgatgctcagtagtcaagtgcctttggagcctcctcttctctttctgctggaggaatacaaaaattacctagatgctgcaaacatgtccatgagggtccggcgccactctgaccctgcccgccgaggggagctgagcgtgtgtgacagtattagtgagtgggtaacggcggcagacaaaaagactgcagtggacatgtcgggcgggacggtcacagtccttgaaaaggtccctgtatcaaaaggccaactgaagcaatacttctacgagaccaagtgcaatcccatgggttacacaaaagaaggctgcaggggcatagacaaaaggcattggaactcccagtgccgaactacccagtcgtacgtgcgggcccttaccatggatagcaaaaagagaattggctggcgattcataaggatagacacttcttgtgtatgtacattgaccattaaaaggggaagatagtggatttatgttgtatagattagattatattgagacaaaaattatctatttgtatatatacataacagggtaaattattcagttaagaaaaaaataattttatgaactgcatgtataaatgaagtttatacagtacagtggttctacaatctatttattggacatgtccatgaccagaagggaaacagtcatttgcgcacaacttaaaaagtctgcattacattccttgataatgttgtggtttgttgccgttgccaagaactgaaaacataaaaagttaaaaaaaataataaattgcatgctgctttaattgtgaattgataataaactgtcctctttcagaaaacagaaaaaaaacacacacacacacaacaaaaatttgaaccaaaacattccgtttacattttagacagtaagtatcttcgttcttgttagtactatatctgttttactgcttttaacttctgatagcgttggaattaaaacaatgtcaaggtgctgttgtcattgctttactggcttaggggatgggggatggggggtatatttttgtttgttttgtgtttttttttcgtttgtttgttttgttttttagttcccacagggagtagagatggggaaagaattcctacaatatatattctggctgataaaagatacatttgtatgttgtgaagatgtttgcaatatcgatcagatgactagaaagtgaataaaaattaaggcaactgaacaaaaaaatgctcacactccacatcccgtgatgcacctcccaggccccgctcattctttgggcgttggtcagagtaagctgcttttgacggaaggacctatgtttgctcagaacacattctttccccccctccccctctggtctcctctttgttttgttttaaggaagaaaaatcagttgcgcgttctgaaatattttaccactgctgtgaacaagtgaacacattgtgtcacatcatgacactcgtataagcatggagaacagtgatttttttttagaacagaaaacaacaaaaaataaccccaaaatgaagattattttttatgaggagtgaacatttgggtaaatcatggctaagcttaaaaaaaactcatggtgaggcttaacaatgtcttgtaagcaaaaggtagagccctgtatcaacccagaaacacctagatcagaacaggaatccacattgccagtgacatgagactgaacagccaaatggaggctatgtggagttggcattgcatttaccggcagtgcgggaggaatttctgagtggccatcccaaggtctaggtggaggtggggcatggtatttgagacattccaaaacgaaggcctctgaaggacccttcagaggtggctctggaatgacatgtgtcaagctgcttggacctcgtgctttaagtgcctacattatctaactgtgctcaagaggttctcgactggaggaccacactcaagccgacttatgcccaccatcccacctctggataattttgcataaaattggattagcctggagcaggttgggagccaaatgtggcatttgtgatcatgagattgatgcaatgagatagaagatgtttgctacctgaacacttattgctttgaaactagacttgaggaaaccagggtttatcttttgagaacttttggtaagggaaaagggaacaggaaaagaaaccccaaactcaggccgaatgatcaaggggacccataggaaatcttgtccagagacaagacttcgggaaggtgtctggacattcagaacaccaagacttgaaggtgccttgctcaatggaagaggccaggacagagctgacaaaattttgctccccagtgaaggccacagcaaccttctgcccatcctgtctgttcatggagagggtccctgcctcacctctgccattttgggttaggagaagtcaagttgggagcctgaaatagtggttcttggaaaaatggatccccagtgaaaactagagctctaagcccattcagcccatttcacacctgaaaatgttagtgatcaccacttggaccagcatccttaagtatcagaaagccccaagcaattgctgcatcttagtagggtgagggataagcaaaagaggatgttcaccataacccaggaatgaagataccatcagcaaagaatttcaatttgttcagtctttcatttagagctagtctttcacagtaccatctgaatacctctttgaaagaaggaagactttacgtagtgtagatttgttttgtgttgtttgaaaatattatctttgtaattatttttaatatgtaaggaatgcttggaatatctgctgtatgtcaactttatgcagcttccttttgagggacaaatttaaaacaaacaaccccccatcacaaacttaaaggattgcaagggccagatctgttaagtggtttcataggagacacatccagcaattgtgtggtcagtggctcttttacccaataagatacatcacagtcacatgcttgatggtttatgttgacctaagatttattttgttaaaatctctctctgttgtgttcgttcttgttctgttttgttttgttttttaaagtcttgctgtggtctctttgtggcagaagtgtttcatgcatggcagcaggcctgttgcttttttatggcgattcccattgaaaatgtaagtaaatgtctgtggccttgttctctctatggtaaagatattattcaccatgtaaaacaaaaaacaatatttattgtattttagtatatttatataattatgttattgaaaaaaattggcattaaaacttaaccgcatcagaagcctattgtaaatacaagttctatttaagtgtactaattaacatataatatatgttttaaatatagaatttttaatgtttttaaatatattttcaaagtacataaaa

SEQ ID NO: 2161 - DNA, 4071 bp, Homo sapiens
  source 1..4071: mol_type = unassigned DNA; mol_type = unassigned DNA
gtgtgtaatccgggcgataggagtccattcagcaccttggacagagccaacggatttgtccgaggtggcggtacccccaggtagtcttcttggccccgctgtaaagccaaccctgtgtcgcccttaaaaagcgtcttttctgaggttcggctcacactgagatcggggctggagagagagtcagattttggagcggagcgtttggaaagcgagccccagtttggtcccctcattgagctcgctgaagttggcttcctagcggtgtaggctggaatagactcttggcaagctccgggttggtatactgggttaactttgggaaatgcaagtgtttatctccaggatctagccaccggggtggtgtaagccgcaaagaagttccaccaggtgagaagagtgatgaccatccttttccttactatggttatttcatactttggttgcatgaaggctgcccccatgaaagaagcaaacatccgaggacaaggtggcttggcctacccaggtgtgcggacccatgggactctggagagcgtgaatgggcccaaggcaggttcaagaggcttgacatcattggctgacactttcgaacacgtgatagaagagctgttggatgaggaccagaaagttcggcccaatgaagaaaacaataaggacgcagacttgtacacgtccagggtgatgctcagtagtcaagtgcctttggagcctcctcttctctttctgctggaggaatacaaaaattacctagatgctgcaaacatgtccatgagggtccggcgccactctgaccctgcccgccgaggggagctgagcgtgtgtgacagtattagtgagtgggtaacggcggcagacaaaaagactgcagtggacatgtcgggcgggacggtcacagtccttgaaaaggtccctgtatcaaaaggccaactgaagcaatacttctacgagaccaagtgcaatcccatgggttacacaaaagaaggctgcaggggcatagacaaaaggcattggaactcccagtgccgaactacccagtcgtacgtgcgggcccttaccatggatagcaaaaagagaattggctggcgattcataaggatagacacttcttgtgtatgtacattgaccattaaaaggggaagatagtggatttatgttgtatagattagattatattgagacaaaaattatctatttgtatatatacataacagggtaaattattcagttaagaaaaaaataattttatgaactgcatgtataaatgaagtttatacagtacagtggttctacaatctatttattggacatgtccatgaccagaagggaaacagtcatttgcgcacaacttaaaaagtctgcattacattccttgataatgttgtggtttgttgccgttgccaagaactgaaaacataaaaagttaaaaaaaataataaattgcatgctgctttaattgtgaattgataataaactgtcctctttcagaaaacagaaaaaaaacacacacacacacaacaaaaatttgaaccaaaacattccgtttacattttagacagtaagtatcttcgttcttgttagtactatatctgttttactgcttttaacttctgatagcgttggaattaaaacaatgtcaaggtgctgttgtcattgctttactggcttaggggatgggggatggggggtatatttttgtttgttttgtgtttttttttcgtttgtttgttttgttttttagttcccacagggagtagagatggggaaagaattcctacaatatatattctggctgataaaagatacatttgtatgttgtgaagatgtttgcaatatcgatcagatgactagaaagtgaataaaaattaaggcaactgaacaaaaaaatgctcacactccacatcccgtgatgcacctcccaggccccgctcattctttgggcgttggtcagagtaagctgcttttgacggaaggacctatgtttgctcagaacacattctttccccccctccccctctggtctcctctttgttttgttttaaggaagaaaaatcagttgcgcgttctgaaatattttaccactgctgtgaacaagtgaacacattgtgtcacatcatgacactcgtataagcatggagaacagtgatttttttttagaacagaaaacaacaaaaaataaccccaaaatgaagattattttttatgaggagtgaacatttgggtaaatcatggctaagcttaaaaaaaactcatggtgaggcttaacaatgtcttgtaagcaaaaggtagagccctgtatcaacccagaaacacctagatcagaacaggaatccacattgccagtgacatgagactgaacagccaaatggaggctatgtggagttggcattgcatttaccggcagtgcgggaggaatttctgagtggccatcccaaggtctaggtggaggtggggcatggtatttgagacattccaaaacgaaggcctctgaaggacccttcagaggtggctctggaatgacatgtgtcaagctgcttggacctcgtgctttaagtgcctacattatctaactgtgctcaagaggttctcgactggaggaccacactcaagccgacttatgcccaccatcccacctctggataattttgcataaaattggattagcctggagcaggttgggagccaaatgtggcatttgtgatcatgagattgatgcaatgagatagaagatgtttgctacctgaacacttattgctttgaaactagacttgaggaaaccagggtttatcttttgagaacttttggtaagggaaaagggaacaggaaaagaaaccccaaactcaggccgaatgatcaaggggacccataggaaatcttgtccagagacaagacttcgggaaggtgtctggacattcagaacaccaagacttgaaggtgccttgctcaatggaagaggccaggacagagctgacaaaattttgctccccagtgaaggccacagcaaccttctgcccatcctgtctgttcatggagagggtccctgcctcacctctgccattttgggttaggagaagtcaagttgggagcctgaaatagtggttcttggaaaaatggatccccagtgaaaactagagctctaagcccattcagcccatttcacacctgaaaatgttagtgatcaccacttggaccagcatccttaagtatcagaaagccccaagcaattgctgcatcttagtagggtgagggataagcaaaagaggatgttcaccataacccaggaatgaagataccatcagcaaagaatttcaatttgttcagtctttcatttagagctagtctttcacagtaccatctgaatacctctttgaaagaaggaagactttacgtagtgtagatttgttttgtgttgtttgaaaatattatctttgtaattatttttaatatgtaaggaatgcttggaatatctgctgtatgtcaactttatgcagcttccttttgagggacaaatttaaaacaaacaaccccccatcacaaacttaaaggattgcaagggccagatctgttaagtggtttcataggagacacatccagcaattgtgtggtcagtggctcttttacccaataagatacatcacagtcacatgcttgatggtttatgttgacctaagatttattttgttaaaatctctctctgttgtgttcgttcttgttctgttttgttttgttttttaaagtcttgctgtggtctctttgtggcagaagtgtttcatgcatggcagcaggcctgttgcttttttatggcgattcccattgaaaatgtaagtaaatgtctgtggccttgttctctctatggtaaagatattattcaccatgtaaaacaaaaaacaatatttattgtattttagtatatttatataattatgttattgaaaaaaattggcattaaaacttaaccgcatcagaagcctattgtaaatacaagttctatttaagtgtactaattaacatataatatatgttttaaatatagaatttttaatgtttttaaatatattttcaaagtacataaaa

SEQ ID NO: 2162 - DNA, 3988 bp, Homo sapiens
  source 1..3988: mol_type = unassigned DNA; mol_type = unassigned DNA
gtgtgtaatccgggcgataggagtccattcagcaccttggacagagccaacggatttgtccgaggtggcggtacccccaggtagtcttcttggccccgctgtaaagccaaccctgtgtcgcccttaaaaagcgtcttttctgaggttcggctcacactgagatcggggctggagagagagtcagattttggagcggagcgtttggaaagcgagccccagtttggtcccctcattgagctcgctgaagttggcttcctagcggtgtaggctggaatagactcttggcaagctccggttccaccaggtgagaagagtgatgaccatccttttccttactatggttatttcatactttggttgcatgaaggctgcccccatgaaagaagcaaacatccgaggacaaggtggcttggcctacccaggtgtgcggacccatgggactctggagagcgtgaatgggcccaaggcaggttcaagaggcttgacatcattggctgacactttcgaacacgtgatagaagagctgttggatgaggaccagaaagttcggcccaatgaagaaaacaataaggacgcagacttgtacacgtccagggtgatgctcagtagtcaagtgcctttggagcctcctcttctctttctgctggaggaatacaaaaattacctagatgctgcaaacatgtccatgagggtccggcgccactctgaccctgcccgccgaggggagctgagcgtgtgtgacagtattagtgagtgggtaacggcggcagacaaaaagactgcagtggacatgtcgggcgggacggtcacagtccttgaaaaggtccctgtatcaaaaggccaactgaagcaatacttctacgagaccaagtgcaatcccatgggttacacaaaagaaggctgcaggggcatagacaaaaggcattggaactcccagtgccgaactacccagtcgtacgtgcgggcccttaccatggatagcaaaaagagaattggctggcgattcataaggatagacacttcttgtgtatgtacattgaccattaaaaggggaagatagtggatttatgttgtatagattagattatattgagacaaaaattatctatttgtatatatacataacagggtaaattattcagttaagaaaaaaataattttatgaactgcatgtataaatgaagtttatacagtacagtggttctacaatctatttattggacatgtccatgaccagaagggaaacagtcatttgcgcacaacttaaaaagtctgcattacattccttgataatgttgtggtttgttgccgttgccaagaactgaaaacataaaaagttaaaaaaaataataaattgcatgctgctttaattgtgaattgataataaactgtcctctttcagaaaacagaaaaaaaacacacacacacacaacaaaaatttgaaccaaaacattccgtttacattttagacagtaagtatcttcgttcttgttagtactatatctgttttactgcttttaacttctgatagcgttggaattaaaacaatgtcaaggtgctgttgtcattgctttactggcttaggggatgggggatggggggtatatttttgtttgttttgtgtttttttttcgtttgtttgttttgttttttagttcccacagggagtagagatggggaaagaattcctacaatatatattctggctgataaaagatacatttgtatgttgtgaagatgtttgcaatatcgatcagatgactagaaagtgaataaaaattaaggcaactgaacaaaaaaatgctcacactccacatcccgtgatgcacctcccaggccccgctcattctttgggcgttggtcagagtaagctgcttttgacggaaggacctatgtttgctcagaacacattctttccccccctccccctctggtctcctctttgttttgttttaaggaagaaaaatcagttgcgcgttctgaaatattttaccactgctgtgaacaagtgaacacattgtgtcacatcatgacactcgtataagcatggagaacagtgatttttttttagaacagaaaacaacaaaaaataaccccaaaatgaagattattttttatgaggagtgaacatttgggtaaatcatggctaagcttaaaaaaaactcatggtgaggcttaacaatgtcttgtaagcaaaaggtagagccctgtatcaacccagaaacacctagatcagaacaggaatccacattgccagtgacatgagactgaacagccaaatggaggctatgtggagttggcattgcatttaccggcagtgcgggaggaatttctgagtggccatcccaaggtctaggtggaggtggggcatggtatttgagacattccaaaacgaaggcctctgaaggacccttcagaggtggctctggaatgacatgtgtcaagctgcttggacctcgtgctttaagtgcctacattatctaactgtgctcaagaggttctcgactggaggaccacactcaagccgacttatgcccaccatcccacctctggataattttgcataaaattggattagcctggagcaggttgggagccaaatgtggcatttgtgatcatgagattgatgcaatgagatagaagatgtttgctacctgaacacttattgctttgaaactagacttgaggaaaccagggtttatcttttgagaacttttggtaagggaaaagggaacaggaaaagaaaccccaaactcaggccgaatgatcaaggggacccataggaaatcttgtccagagacaagacttcgggaaggtgtctggacattcagaacaccaagacttgaaggtgccttgctcaatggaagaggccaggacagagctgacaaaattttgctccccagtgaaggccacagcaaccttctgcccatcctgtctgttcatggagagggtccctgcctcacctctgccattttgggttaggagaagtcaagttgggagcctgaaatagtggttcttggaaaaatggatccccagtgaaaactagagctctaagcccattcagcccatttcacacctgaaaatgttagtgatcaccacttggaccagcatccttaagtatcagaaagccccaagcaattgctgcatcttagtagggtgagggataagcaaaagaggatgttcaccataacccaggaatgaagataccatcagcaaagaatttcaatttgttcagtctttcatttagagctagtctttcacagtaccatctgaatacctctttgaaagaaggaagactttacgtagtgtagatttgttttgtgttgtttgaaaatattatctttgtaattatttttaatatgtaaggaatgcttggaatatctgctgtatgtcaactttatgcagcttccttttgagggacaaatttaaaacaaacaaccccccatcacaaacttaaaggattgcaagggccagatctgttaagtggtttcataggagacacatccagcaattgtgtggtcagtggctcttttacccaataagatacatcacagtcacatgcttgatggtttatgttgacctaagatttattttgttaaaatctctctctgttgtgttcgttcttgttctgttttgttttgttttttaaagtcttgctgtggtctctttgtggcagaagtgtttcatgcatggcagcaggcctgttgcttttttatggcgattcccattgaaaatgtaagtaaatgtctgtggccttgttctctctatggtaaagatattattcaccatgtaaaacaaaaaacaatatttattgtattttagtatatttatataattatgttattgaaaaaaattggcattaaaacttaaccgcatcagaagcctattgtaaatacaagttctatttaagtgtactaattaacatataatatatgttttaaatatagaatttttaatgtttttaaatatattttcaaagtacataaaa

SEQ ID NO: 2163 - DNA, 3829 bp, Homo sapiens
  source 1..3829: mol_type = unassigned DNA
aatatcaagtatcacttaattagagatttttaagccttttcctcctgctgtgccgggtgtgtaatccgggcgataggagtccattcagcaccttggacagagccaacggatttgtccgaggtggcggtacccccagttccaccaggtgagaagagtgatgaccatccttttccttactatggttatttcatactttggttgcatgaaggctgcccccatgaaagaagcaaacatccgaggacaaggtggcttggcctacccaggtgtgcggacccatgggactctggagagcgtgaatgggcccaaggcaggttcaagaggcttgacatcattggctgacactttcgaacacgtgatagaagagctgttggatgaggaccagaaagttcggcccaatgaagaaaacaataaggacgcagacttgtacacgtccagggtgatgctcagtagtcaagtgcctttggagcctcctcttctctttctgctggaggaatacaaaaattacctagatgctgcaaacatgtccatgagggtccggcgccactctgaccctgcccgccgaggggagctgagcgtgtgtgacagtattagtgagtgggtaacggcggcagacaaaaagactgcagtggacatgtcgggcgggacggtcacagtccttgaaaaggtccctgtatcaaaaggccaactgaagcaatacttctacgagaccaagtgcaatcccatgggttacacaaaagaaggctgcaggggcatagacaaaaggcattggaactcccagtgccgaactacccagtcgtacgtgcgggcccttaccatggatagcaaaaagagaattggctggcgattcataaggatagacacttcttgtgtatgtacattgaccattaaaaggggaagatagtggatttatgttgtatagattagattatattgagacaaaaattatctatttgtatatatacataacagggtaaattattcagttaagaaaaaaataattttatgaactgcatgtataaatgaagtttatacagtacagtggttctacaatctatttattggacatgtccatgaccagaagggaaacagtcatttgcgcacaacttaaaaagtctgcattacattccttgataatgttgtggtttgttgccgttgccaagaactgaaaacataaaaagttaaaaaaaataataaattgcatgctgctttaattgtgaattgataataaactgtcctctttcagaaaacagaaaaaaaacacacacacacacaacaaaaatttgaaccaaaacattccgtttacattttagacagtaagtatcttcgttcttgttagtactatatctgttttactgcttttaacttctgatagcgttggaattaaaacaatgtcaaggtgctgttgtcattgctttactggcttaggggatgggggatggggggtatatttttgtttgttttgtgtttttttttcgtttgtttgttttgttttttagttcccacagggagtagagatggggaaagaattcctacaatatatattctggctgataaaagatacatttgtatgttgtgaagatgtttgcaatatcgatcagatgactagaaagtgaataaaaattaaggcaactgaacaaaaaaatgctcacactccacatcccgtgatgcacctcccaggccccgctcattctttgggcgttggtcagagtaagctgcttttgacggaaggacctatgtttgctcagaacacattctttccccccctccccctctggtctcctctttgttttgttttaaggaagaaaaatcagttgcgcgttctgaaatattttaccactgctgtgaacaagtgaacacattgtgtcacatcatgacactcgtataagcatggagaacagtgatttttttttagaacagaaaacaacaaaaaataaccccaaaatgaagattattttttatgaggagtgaacatttgggtaaatcatggctaagcttaaaaaaaactcatggtgaggcttaacaatgtcttgtaagcaaaaggtagagccctgtatcaacccagaaacacctagatcagaacaggaatccacattgccagtgacatgagactgaacagccaaatggaggctatgtggagttggcattgcatttaccggcagtgcgggaggaatttctgagtggccatcccaaggtctaggtggaggtggggcatggtatttgagacattccaaaacgaaggcctctgaaggacccttcagaggtggctctggaatgacatgtgtcaagctgcttggacctcgtgctttaagtgcctacattatctaactgtgctcaagaggttctcgactggaggaccacactcaagccgacttatgcccaccatcccacctctggataattttgcataaaattggattagcctggagcaggttgggagccaaatgtggcatttgtgatcatgagattgatgcaatgagatagaagatgtttgctacctgaacacttattgctttgaaactagacttgaggaaaccagggtttatcttttgagaacttttggtaagggaaaagggaacaggaaaagaaaccccaaactcaggccgaatgatcaaggggacccataggaaatcttgtccagagacaagacttcgggaaggtgtctggacattcagaacaccaagacttgaaggtgccttgctcaatggaagaggccaggacagagctgacaaaattttgctccccagtgaaggccacagcaaccttctgcccatcctgtctgttcatggagagggtccctgcctcacctctgccattttgggttaggagaagtcaagttgggagcctgaaatagtggttcttggaaaaatggatccccagtgaaaactagagctctaagcccattcagcccatttcacacctgaaaatgttagtgatcaccacttggaccagcatccttaagtatcagaaagccccaagcaattgctgcatcttagtagggtgagggataagcaaaagaggatgttcaccataacccaggaatgaagataccatcagcaaagaatttcaatttgttcagtctttcatttagagctagtctttcacagtaccatctgaatacctctttgaaagaaggaagactttacgtagtgtagatttgttttgtgttgtttgaaaatattatctttgtaattatttttaatatgtaaggaatgcttggaatatctgctgtatgtcaactttatgcagcttccttttgagggacaaatttaaaacaaacaaccccccatcacaaacttaaaggattgcaagggccagatctgttaagtggtttcataggagacacatccagcaattgtgtggtcagtggctcttttacccaataagatacatcacagtcacatgcttgatggtttatgttgacctaagatttattttgttaaaatctctctctgttgtgttcgttcttgttctgttttgttttgttttttaaagtcttgctgtggtctctttgtggcagaagtgtttcatgcatggcagcaggcctgttgcttttttatggcgattcccattgaaaatgtaagtaaatgtctgtggccttgttctctctatggtaaagatattattcaccatgtaaaacaaaaaacaatatttattgtattttagtatatttatataattatgttattgaaaaaaattggcattaaaacttaaccgcatcagaagcctattgtaaatacaagttctatttaagtgtactaattaacatataatatatgttttaaatatagaatttttaatgtttttaaatatattttcaaagtacataaaa

SEQ ID NO: 2164 - DNA, 4340 bp, Homo sapiens
  source 1..4340: mol_type = unassigned DNA
attattaaagcggtagtctgccggcgctgataagcaacaagttccccagcggtcttcccgccctagcctgacaaggcgaaggttttcttacctggcgacagggaaatctcccgagccgaattcagcttcgccggagccccaggtgtgacctgcgtagtgggcaagggagcggtgtgcaggctgagtttttttttttacaggggtaccctgaaactcctcactttctctgggaactttcagtgccaggacccagtaacgggcggttagaaggcagccctaggaaacacctgctacatagcagggcagttgggcaatcattggtaacctcgctcattcattagaatcacgtaagaactcaaaaggaaacgtgtctctcggagtgagggcgtttgcgtaaatctataggtttttcgacatcgatgccagttgctttgtcttctgtagtcgccaaggtggttgagagtttaagcttgcggatattgcaaagggttattagattcataagtcacaccaagtggtgggcgatccactgagcaaagccgaacttctcacatgatgacttcaaacaagacacattaccttccagcatctgttggggagacgagattttaagacacttgagtctccaggacagcaaaggcacaatgttccaccaggtgagaagagtgatgaccatccttttccttactatggttatttcatactttggttgcatgaaggctgcccccatgaaagaagcaaacatccgaggacaaggtggcttggcctacccaggtgtgcggacccatgggactctggagagcgtgaatgggcccaaggcaggttcaagaggcttgacatcattggctgacactttcgaacacgtgatagaagagctgttggatgaggaccagaaagttcggcccaatgaagaaaacaataaggacgcagacttgtacacgtccagggtgatgctcagtagtcaagtgcctttggagcctcctcttctctttctgctggaggaatacaaaaattacctagatgctgcaaacatgtccatgagggtccggcgccactctgaccctgcccgccgaggggagctgagcgtgtgtgacagtattagtgagtgggtaacggcggcagacaaaaagactgcagtggacatgtcgggcgggacggtcacagtccttgaaaaggtccctgtatcaaaaggccaactgaagcaatacttctacgagaccaagtgcaatcccatgggttacacaaaagaaggctgcaggggcatagacaaaaggcattggaactcccagtgccgaactacccagtcgtacgtgcgggcccttaccatggatagcaaaaagagaattggctggcgattcataaggatagacacttcttgtgtatgtacattgaccattaaaaggggaagatagtggatttatgttgtatagattagattatattgagacaaaaattatctatttgtatatatacataacagggtaaattattcagttaagaaaaaaataattttatgaactgcatgtataaatgaagtttatacagtacagtggttctacaatctatttattggacatgtccatgaccagaagggaaacagtcatttgcgcacaacttaaaaagtctgcattacattccttgataatgttgtggtttgttgccgttgccaagaactgaaaacataaaaagttaaaaaaaataataaattgcatgctgctttaattgtgaattgataataaactgtcctctttcagaaaacagaaaaaaaacacacacacacacaacaaaaatttgaaccaaaacattccgtttacattttagacagtaagtatcttcgttcttgttagtactatatctgttttactgcttttaacttctgatagcgttggaattaaaacaatgtcaaggtgctgttgtcattgctttactggcttaggggatgggggatggggggtatatttttgtttgttttgtgtttttttttcgtttgtttgttttgttttttagttcccacagggagtagagatggggaaagaattcctacaatatatattctggctgataaaagatacatttgtatgttgtgaagatgtttgcaatatcgatcagatgactagaaagtgaataaaaattaaggcaactgaacaaaaaaatgctcacactccacatcccgtgatgcacctcccaggccccgctcattctttgggcgttggtcagagtaagctgcttttgacggaaggacctatgtttgctcagaacacattctttccccccctccccctctggtctcctctttgttttgttttaaggaagaaaaatcagttgcgcgttctgaaatattttaccactgctgtgaacaagtgaacacattgtgtcacatcatgacactcgtataagcatggagaacagtgatttttttttagaacagaaaacaacaaaaaataaccccaaaatgaagattattttttatgaggagtgaacatttgggtaaatcatggctaagcttaaaaaaaactcatggtgaggcttaacaatgtcttgtaagcaaaaggtagagccctgtatcaacccagaaacacctagatcagaacaggaatccacattgccagtgacatgagactgaacagccaaatggaggctatgtggagttggcattgcatttaccggcagtgcgggaggaatttctgagtggccatcccaaggtctaggtggaggtggggcatggtatttgagacattccaaaacgaaggcctctgaaggacccttcagaggtggctctggaatgacatgtgtcaagctgcttggacctcgtgctttaagtgcctacattatctaactgtgctcaagaggttctcgactggaggaccacactcaagccgacttatgcccaccatcccacctctggataattttgcataaaattggattagcctggagcaggttgggagccaaatgtggcatttgtgatcatgagattgatgcaatgagatagaagatgtttgctacctgaacacttattgctttgaaactagacttgaggaaaccagggtttatcttttgagaacttttggtaagggaaaagggaacaggaaaagaaaccccaaactcaggccgaatgatcaaggggacccataggaaatcttgtccagagacaagacttcgggaaggtgtctggacattcagaacaccaagacttgaaggtgccttgctcaatggaagaggccaggacagagctgacaaaattttgctccccagtgaaggccacagcaaccttctgcccatcctgtctgttcatggagagggtccctgcctcacctctgccattttgggttaggagaagtcaagttgggagcctgaaatagtggttcttggaaaaatggatccccagtgaaaactagagctctaagcccattcagcccatttcacacctgaaaatgttagtgatcaccacttggaccagcatccttaagtatcagaaagccccaagcaattgctgcatcttagtagggtgagggataagcaaaagaggatgttcaccataacccaggaatgaagataccatcagcaaagaatttcaatttgttcagtctttcatttagagctagtctttcacagtaccatctgaatacctctttgaaagaaggaagactttacgtagtgtagatttgttttgtgttgtttgaaaatattatctttgtaattatttttaatatgtaaggaatgcttggaatatctgctgtatgtcaactttatgcagcttccttttgagggacaaatttaaaacaaacaaccccccatcacaaacttaaaggattgcaagggccagatctgttaagtggtttcataggagacacatccagcaattgtgtggtcagtggctcttttacccaataagatacatcacagtcacatgcttgatggtttatgttgacctaagatttattttgttaaaatctctctctgttgtgttcgttcttgttctgttttgttttgttttttaaagtcttgctgtggtctctttgtggcagaagtgtttcatgcatggcagcaggcctgttgcttttttatggcgattcccattgaaaatgtaagtaaatgtctgtggccttgttctctctatggtaaagatattattcaccatgtaaaacaaaaaacaatatttattgtattttagtatatttatataattatgttattgaaaaaaattggcattaaaacttaaccgcatcagaagcctattgtaaatacaagttctatttaagtgtactaattaacatataatatatgttttaaatatagaatttttaatgtttttaaatatattttcaaagtacataaaa

SEQ ID NO: 2165 - DNA, 4030 bp, Homo sapiens; identical to SEQ ID NO: 2159
  source 1..4030: mol_type = unassigned DNA

SEQ ID NO: 2166 - DNA, 4176 bp, Homo sapiens; identical to SEQ ID NO: 2156
  source 1..4176: mol_type = unassigned DNA

SEQ ID NO: 2167 - DNA, 1988 bp, Homo sapiens
  source 1..1988: mol_type = unassigned DNA; mol_type = unassigned DNA
gacgcccgagcccgagcgcagtggcctccgagcgggaaccggactgggagccggagccggggcgggaaccggagctggagccgaagctggagccggcactgcggcgcacggagcggagcgctgcagccaagccgagtgagtggaggggccttccctgcgagaagtcagagctgtgcccgtgggcaggctggctccgctgttctgctccaaggattacatgtccttcaaacgtccctgccccttagcacgatacaaccgcaccagctacttctaccccacattctcagagagctcggagcacagccatctgctcgtgtcccccgtgctggtggcgagtgccgtcataggtgtggtcatcatcctctcctgcatcaccatcattgtgggcagcatccgcagggacaggcaggcccggcttcagcggcaccgccaccgccaccaccgccaccaccaccaccatcatcaccaccgccggcgtcgacaccgagagtacgagcacggctacgtgtcggacgagcacacatacagccgctcaagccgcaggatgcgctatgcctgcagctcctcagaggactggcccccacccttggacatcagctctgacggggacgtggatgccacggtgctcagggagctgtacccagattctccaccaggctacgaggagtgtgtggggccaggggccactcagctgtatgtccccacggacgcaccaccaccctactcgctgactgattcctgccccacgctggatggcacctccgactcaggcagcggccacagccctggccgacaccagcaggagcagaggaccccggcccaaggtggccttcacacggtctccatggacacccttcccccctacgaggctgtgtgcggggctggccccccatcaggcctgctgccactgccgggcccagacccagggccaaggggctcccagggctcacccaccccaacccgggccccagcctctggcccagagaggattgtgtgagggacccagccagccgggtcctgctggtccctacaggctgaaccacattctttaggcacacaaaggcgtgcacacacacacagagatgcacacgtgactcataacacacacatagaccaaacttgtatacacacagacatctacactgacataccccatgtacacacacagatctagacgtgctccacatatgtgtgaatatgcgcacatacaggcctaccacaaacacaaaacccacctgcaaaggtttcacggaacgtggagctctcctggcctcccgtccctcctcccggcctgtttgttgtgcctctgtagagagcgcttcggagagagaggcgaagtaggaagtgggattttctcttccctctcctgggcccgtttgcccctaccctcgcccagcaagctgcgcccaaattctattctgcctctggaaactgctggaccatccaaggtcagctgcctgccctgacccctaccccagggccagcttgtcctcctgggaggcgggacaggccccagtgaggttccgttgtgcgctgtgcctatctctcgattccagggcagatgagccacaacatcaccaccctgccacttacaaggtgggggacctgggtctggggtctcaggcgcaaactggaggccctcacagcccactaggccccctcccaaccccagtaccctcagtccctcagtcaggtggtgctagtagagctatctctgacgctgcaggccccaggtagatgggcagggccctccgtgggtgtgcagcggcggttccctcatcagtccagccactgcccaggactaagggtcttcaaggaagatgaggccattgcccttctccaggtggcttcaccacagtgctgcctgggcacctctctgaggcagagaagtggcccctccctcagtccctgcctggccgaccactgtggcctgcacgcgaatgggtcagagccagaccccggagctggtgctgtccttctaggtggct

SEQ ID NO: 2168 - DNA, 2469 bp, Homo sapiens
  source 1..2469: mol_type = unassigned DNA
ggactgggagccggagccggggcgggaaccggagctggagccgaagctggagccggcactgcggcgcacggagcggagcgctgcagccaagccgatagcacgatacaaccgcaccagctacttctaccccacattctcagagagctcggagcacagccatctgctcgtgtcccccgtgctggtggcgagtgccgtcataggtgtggtcatcatcctctcctgcatcaccatcattgtgggcagcatccgcagggacaggcaggcccggcttcagcggcaccgccaccgccaccaccgccaccaccaccaccatcatcaccaccgccggcgtcgacaccgagagtacgagcacggctacgtgtcggacgagcacacatacagccgctcaagccgcaggatgcgctatgcctgcagctcctcagaggactggcccccacccttggacatcagctctgacggggacgtggatgccacggtgctcagggagctgtacccagattctccaccaggctacgaggagtgtgtggggccaggggccactcagctgtatgtccccacggacgcaccaccaccctactcgctgactgattcctgccccacgctggatggcacctccgactcaggcagcggccacagccctggccgacaccagcaggagcagaggaccccggcccaaggtggccttcacacggtctccatggacacccttcccccctacgaggctgtgtgcggggctggccccccatcaggcctgctgccactgccgggcccagacccagggccaaggggctcccagggctcacccaccccaacccgggccccagcctctggcccagagaggattgtgtgagggacccagccagccgggtcctgctggtccctacaggctgaaccacattctttaggcacacaaaggcgtgcacacacacacagagatgcacacgtgactcataacacacacatagaccaaacttgtatacacacagacatctacactgacataccccatgtacacacacagatctagacgtgctccacatatgtgtgaatatgcgcacatacaggccccagtgaggttccgttgtgcgctgtgcctatctctcgattccagggcagatgagccacaacatcaccaccctgccacttacaaggtgggggacctgggtctggggtctcaggcgcaaactggaggccctcacagcccactaggccccctcccaaccccagtaccctcagtccctcagtcaggtggtgctagtagagctatctctgacgctgcaggccccaggtagatgggcagggccctccgtgggtgtgcagcggcggttccctcatcagtccagccactgcccaggactaagggtcttcaaggaagatgaggccattgcccttctccaggtggcttcaccacagtgctgcctgggcacctctctgaggcagagaagtggcccctccctcagtccctgcctggccgaccactgtggcctgcacgcgaatgggtcagagccagaccccggagctggtgctgtccttctaggtggctgctcatagctggggatggtgagtggctgtgttctggccttgcccacgtgggtgtttgcagagacaaaatgaaggggatatgctccccataaataccaccttgccaccacaagaggaccagaaggctactcagccttgctgccacagaaggggatttgtagggtcagcctggctgcagaaaggctggctcagatcttgaccaagaaaccccagcgatttccatcaaagaccacgcaggtaacagaggtgattcctgaagacccagcccacagagggtggcagccaagcatctctgagcagtgtccctgctagcatcgccagcggccatcactctgcctccctcccacctcttgtccctcgtcgttaaaaaacagcaccctatcctgcttccccacatttctgttcctccaatgaagggctaagactatttagtaatctctttcttaagcagaggagtggcaaggatggcaatcttgaattttattttctgtagagatagcatttcttctggtgcggagctgaaaggaatccacccagaagttctgtagcatcctgcgtgcagcctcctggagccccagactccatctgggggagggacttgtttacaagcagttctgaccaccttagtggtgtactgttttctaggcaaaaaatatctgtctgttgtactgtatagcctttaaaatgcagtccaggaatgagactcttttaagaaacacatcctgcttctgcaattccagagagtgctgggggaaaaaaagggataaaaattcctacctactcatcagtgtttgaaagatggagctgaatagcttttcttgttcctggactaggcaatgaataagcaacaatgtatcttttctgtgttcaaaataaatacataatatcaataaaatgtagcaagaagtaacactttcagagagtgca

SEQ ID NO: 2169 - DNA, 2160 bp, Homo sapiens
  source 1..2160: mol_type = unassigned DNA
ctggagccgaagctggagccggcactgcggcgcacggagcggagcgctgcagccaagccgatagcacgatacaaccgcaccagctacttctaccccacattctcagagagctcggagcacagccatctgctcgtgtcccccgtgctggtggcgagtgccgtcataggtgtggtcatcatcctctcctgcatcaccatcattgtgggcagcatccgcagggacaggcaggcccggcttcagcggcaccgccaccgccaccaccgccaccaccaccaccatcatcaccaccgccggcgtcgacaccgagagtacgagcacggctacgtgtcggacgagcacacatacagccgctcaagccgcaggatgcgctatgcctgcagctcctcagaggactggcccccacccttggacatcagctctgacggggacgtggatgccacggtgctcagggagctgtacccagattctccaccaggctacgaggagtgtgtggggccaggggccactcagctgtatgtccccacggacgcaccaccaccctactcgctgactgattcctgccccacgctggatggcacctccgactcaggcagcggccacagccctggccgacaccagcaggagcagaggaccccggcccaaggtggccttcacacggtctccatggacacccttcccccctacgaggctgtgtgcggggctggccccccatcaggcctgctgccactgccgggcccagacccagggccaaggggctcccagggctcacccaccccaacccgggccccagcctctggcccagagaggattgtgtgagggacccagccagccgggtcctgctggtccctacaggctgaaccacattctttaggcacacaaaggcgtgcacacacacacagagatgcacacgtgactcataacacacacatagaccaaacttgtatacacacagacatctacactgacataccccatgtacacacacagatctagacgtgctccacatatgtgtgaatatgcgcacatacaggcctaccacaaacacaaaacccacctgcaaaggtttcacggaacgtggagctctcctggcctcccgtccctcctcccggcctgtttgttgtgcctctgtagagagcgcttcggagagagaggcgaagtaggaagtgggattttctcttccctctcctgggcccgtttgcccctaccctcgcccagcaagctgcgcccaaattctattctgcctctggaaactgctggaccatccaaggtcagctgcctgccctgacccctaccccagggccagcttgtcctcctgggaggcgggacaggccccagtgaggttccgttgtgcgctgtgcctatctctcgattccagggcagatgagccacaacatcaccaccctgccacttacaaggtgggggacctgggtctggggtctcaggcgcaaactggaggccctcacagcccactaggccccctcccaaccccagtaccctcagtccctcagtcaggtggtgctagtagagctatctctgacgctgcaggccccaggtagatgggcagggccctccgtgggtgtgcagcggcggttccctcatcagtccagccactgcccaggactaagggtcttcaaggaagatgaggccattgcccttctccaggtggcttcaccacagtgctgcctgggcacctctctgaggcagagaagtggcccctccctcagtccctgcctggccgaccactgtggcctgcacgcgaatgggtcagagccagaccccggagctggtgctgtccttctaggtggctgctcatagctggggatggtgagtggctgtgttctggccttgcccacgtgggtgtttgcagagacaaaatgaaggggatatgctccccataaataccaccttgccaccacaagaggaccagaaggctactcagccttgctgccacagaaggggatttgtagggtcagcctggctgcagaaaggctggctcagatcttgaccaagaaaccccagcgatttccatcaaagaccacgcaggtaacagaggtgattcctgaagacccagcccacagagggtggcagccaagcatctctgagcagtgtccctgctagcatcgccagcggccatcactctgcctccctcccacctcttgt

SEQ ID NO: 2170 - DNA, 1078 bp, Homo sapiens
  source 1..1078: mol_type = unassigned DNA
ctggagccgaagctggagccggcactgcggcgcacggagcggagcgctgcagccaagccgatagcacgatacaaccgcaccagctacttctaccccacattctcagagagctcggagcacagccatctgctcgtgtcccccgtgctggtggcgagtgccgtcataggtgtggtcatcatcctctcctgcatcaccatcattgtgggcagcatccgcagggacaggcaggcccggcttcagcggcaccgccaccgccaccaccgccaccaccaccaccatcatcaccaccgccggcgtcgacaccgagagtacgagcacggctacgtgtcggacgagcacacatacagccgctcaagccgcaggatgcgctatgcctgcagctcctcagaggactggcccccacccttggacatcagctctgacggggacgtggatgccacggtgctcagggagctgtacccagattctccaccaggggtctcactcagtcgcctacgctggagtgcaatgatgtacactgggagctttacctactgggtgcgatctatgctttccagacacaaactggacgccatcctgggcaggctgggctacacggccaccttggagtctgagttctcactggtccaggccatcagcaaagagaatgtcaagcagatggtgttcaagatcttcctggtgagggtctcatgtgaagccgttctcagaaccgcgggcacacggatgcttgagccgggcacagagaaactcgctaggacccacagcaggcacagctcagagaaaaggctggtgaagccctgcagctgcctcgagggggttcagccaggcccaggttccgggggaccacagcaaggtccctcagaaggggtggggtccgagacggccctggcagagggcactgctggccagagatctctgcccatggctctgagcccatctgaggtctcaacagcccccaacagcctccccagtggctctccagtcctctagggcccccagtgccatggcagcacatgcctggacagtgaggaggtcctgccttgcttcagtgaccctgtcttacactggatgccctggt

SEQ ID NO: 2171 - DNA, 963 bp, Homo sapiens
  source 1..963: mol_type = unassigned DNA
ctcgagtccccgacgagcatcaaccgcatttggggaacccaagacagcctccccagcagcttgccctcggtttcggggacccctgaacaacccaaccaagaagggaaaactagggcgcactctcggtcggggtgggagaggaaaggggctggggcttcacggagtttggagtttgaacccacccgcacccctttgagctaggaagtttgacccttcgacgagcaggtcgcctggggtatgcccctgtctccgtgcctctgtctcagcaccgagcgtcggagagagagcgcgccctccgcaccttctcccactttgggacagactttcccttgcgctgtcagagggacccgaggctgagtacgaggcgaggcggcaggcagctcaggctggctgcgcagcgctgagtggcaccgccgccgctccccaggggcagggcccaccccacacccggctgactctcgctgcccttcctccttccctatcgggctctgcggtctggaggctggagagcggtgaggaccagggactgccctgtccatctcgggcgggtgccggcgtgggtggcggggcgcaggctgggaaagggagggcgcaagtaactggtgtgagaggcaggggttcagggatccttgctcttgagccacgatttccgatgagcccctgccgagagcatgccgctctggactcactcctcaaacataactgctctgctggaacgagagacttcaccaccctgtgcctcagtttcctcatctgaaatggaggggccttccctgcgagaagtcagagctgtgcccgtgggcaggctggctccgctgttctgctccaaggattacatgtccttcaaacgtccctgcccctgtaagtttcctccccacatccttccaccacttggggccaggcaagggcagagcttggagtcgagctgcagagaacggcttgaggtgtttggccaaagaactg

SEQ ID NO: 2172 - DNA, 437 bp, Homo sapiens
  source 1..437: mol_type = unassigned DNA
gaggctggagagcggtgagtggaggggccttccctgcgagaagtcagagctgtgcccgtgggcaggctggctccgctgttctgctccaaggattacatgtccttcaaacgtccctgcccctgtaagtttcctccccacatccttccaccacttggggccaggcaagggcagagcttggagtcgagctgcagagaacggcttgaggtgtttggccaaagaactgcaggggtccaaccagaggctaatgtggcatgctgggtggggagagggcaacacggaagacccctgacgtctgcaagatgctccctgagaactgaaaatcgcactttggcccattcttctgtatcagcccttcccgaagtgtggatcggagttcctctgagggatgttaatgggatgacacacacccacacacaaataaaagactacatggccaa

SEQ ID NO: 2173 - DNA, 2929 bp, Homo sapiens
  source 1..2929: mol_type = unassigned DNA; mol_type = unassigned DNA
catcatcctctcctgcatcaccatcattgtgggcagcatccgcagggacaggcaggcccggcttcagcggcaccgccaccgccaccaccgccaccaccaccaccatcatcaccaccgccggcgtcgacaccgagagtacgagcacggctacgtgtcggacgagcacacatacagccgctcaagccgcaggatgcgctatgcctgcagctcctcagaggactggcccccacccttggacatcagctctgacggggacgtggatgccacggtgctcagggagctgtacccagattctccaccaggacagggtctcactcagtcgcctacgctggagtgcaatggtatgaacatagctcactgtagccttgaactcctgggctcaagtgatcctcccacctcagcctcctaagcagctgggactacaggcatgcaccaccatacccagctaatttttgattttgaatttttgtaaacacagggtctcactatgttgcccaggctagttgaaactcctggtctcaagcgatcctctcacctcagcctcccgagtagggtttataccttctgaaacttgtaagaaaaggaaacactaaatagcaacaaaatgaaaatacacctccggctagcaatctctacccattcattacctctcaagattaagcaccattgaagccttgtcattttcctgttgatgtggatatttggatagtcagtgccttacaggagttgcttttttttttttaacctcactgaaacttggcatcatttctctgagacatggctggtgtaacgtcatgaggatgggccatcaacttcaggacctgactctaggaacttcagagactacacgttttactctaacaggagttggcttgtagcaccctgatggcttgtaccaccaggaaagagaggaaagtggcaatgaaactgaaatgagctgttgtctcaccctctgcaggaattcccctcttcctttccatgccctccacaacaccatggcttgggctattgatctcttagcggacagagcctgggccccttcctctgtcacatttccctcccaccagaactccaatagagcccactaacatagtcctagatgcccccaagtgccttgaaagtggggtgcaatccaaaattcgaatagtccattaatatagtcttagaccccaagtgccttgaaagtggggtgcaatcctgaaggagggtgcagcggggggaaagaccacgagataggctcatccttctggttctccagcccacgtccctgctggacaggccaaggctggctctgctgcgcctatcacccccaccctgagcccacactgccacctgccggctcgctgctgccactgctcaaagtgaacaagtcaggccctgaagaatgaggaagcccctcctctcaccttgaaacacaatacccaccagcactcataattgcagacaaaacccgtcattttaaccctgggcttttcttccacccttgagatgttctatgaggttgaacccattcaagtattccatttttggggctcacccccgccccgccagcatcactctctggacaaagcctgacacttatgtccccctctctgtaagcaaaataatcattttgcatgccctctgttctgaacatcactaggcatggctctggtgccacctcagtgctctggggctccacctcctgggaatgaatgcagaaacttccacagtgatggtgtccagccatgtgctgcccccaaccgaaaccaccccacaccgacacccagctcccaccacaaagacttaggatcccacaggcctttgggactgtcacgctcttggcttttcctgctcctccatccacgacatgccctatgctgtggtgtgtcacatatggcaccacattcaaggtcctttgcacattcctaaggagatgccgcctgtctgtgccaggggccaaggagaacaccccaggtacctgggctcatcagaggcccaaggagatggaaggtgaagctgcatcacaggacgatggagacaggggccccagggccagaccctgggatgaggatgtgggtgagagtttggttagggaagtgttcccaggagtaccagatggagtgaggcaggaaacaagaaaggcaaggaagccagtgagggggtcaccaagcaggtcaccactgcaggccactgagcgcagtcccactggtgactctgagacacagagtagaacgcacctcaaagtgacgcccgccctcaggtgggagagacgggttgtttgtaccctgatgctcagcagacatttttggaggctgccctttggagaatgttcattcctgccccttgtggaggccaaatgggctcctctggccagaaaaaagtcttcaggggagtcaccgtgctggcgatgacgccatcgtgatagtccacaagagccatcattgggtccccgtgtatgggtgtggtgaggtcccaggtctctgcaaagggctccagcagctgctgccacacacaagcaacaggcatcgcccagaagagggcggaaggagggttgatacagagtaaggctgttcacagccaccacgaggaacatccattgtcacactggccaagcccacatgcacatacacacactggggcccctcccaagttcctagagatacccctggcacacactcacatgtagcatccctcagctccacctcctgtggtttcgtggacatttgctcagacagctttggtgcacacacactagtgcccttctcacttagagcttgtgcacgtacacacttggtgttgcatactccagtgccactgacactcccactcagctgttcctatccatgcccacctgcatgtccaggctcttggcatgagcggtggagagacagtaagcttcatcgtctgaggaagtgaatcttctgtcctggtctctgctttgcttcac

SEQ ID NO: 2174 - DNA, 720 bp, Homo sapiens
  source 1..720: mol_type = unassigned DNA; mol_type = unassigned DNA
catcatcctctcctgcatcaccatcattgtgggcagcatccgcagggacaggcaggcccggcttcagcggcaccgccaccgccaccaccgccaccaccaccaccatcatcaccaccgccggcgtcgacaccgagagtacgagcacggctacgatgtacactgggagctttacctactgggtgcgatctatgctttccagacacaaactggacgccatcctgggcaggctgggctacacggccaccttggagtctgagttctcactggtccaggccatcagcaaagagaatgtcaagcagatggtgttcaagatcttcctggtgagggtctcatgtgaagccgttctcagaaccgcgggcacacggatgcttgagccgggcacagagaaactcgctaggacccacagcaggcacagctcagagaaaaggctggtgaagccctgcagctgcctcgagggggttcagccaggcccaggttccgggggaccacagcaaggtccctcagaaggggtggggtccgagacggccctggcagagggcactgctggccagagatctctgcccatggctctgagcccatctgaggtctcaacagcccccaacagcctccccagtggctctccagtcctctagggcccccagtgccatggcagcacatgcctggacagtgaggaggtcctgccttgcttcagtgaccctgtcttacactggatgccctggt

SEQ ID NO: 2175 - DNA, 644 bp, Homo sapiens
  source 1..644: mol_type = unassigned DNA; mol_type = unassigned DNA
cacccttggacatcagctctgacggggacgtggatgccacggtgctcagggagctgtacccagattctccaccaggatgtacactgggagctttacctactgggtgcgatctatgctttccagacacaaactggacgccatcctgggcaggctgggctacacggccaccttggagtctgagttctcactggtccaggccatcagcaaagagaatgtcaagcagatggtgttcaagatcttcctggtgagggtctcatgtgaagccgttctcagaaccgcgggcacacggatgcttgagccgggcacagagaaactcgctaggacccacagcaggcacagctcagagaaaaggctggtgaagccctgcagctgcctcgagggggttcagccaggcccaggttccgggggaccacagcaaggtccctcagaaggggtggggtccgagacggccctggcagagggcactgctggccagagatctctgcccatggctctgagcccatctgaggtctcaacagcccccaacagcctccccagtggctctccagtcctctagggcccccagtgccatggcagcacatgcctggacagtgaggaggtcctgccttgcttcagtgaccctgtcttacactggatgccctggt

SEQ ID NO: 2176 - DNA, 449 bp, Homo sapiens
  source 1..449: mol_type = unassigned DNA; mol_type = unassigned DNA
tggcaccatctgaactgtgtggtggagtagaagagcatcccttgaaaaggaccctccactccctgccactctgagcctcattatccaactgcaagagtcagaaacccaacttgaatcttcatgagcaaggaagaatacttactgaattgtccaagtcaggcatggctggatccagaaagtccgggaatatgggcagatgtacactgggagctttacctactgggtgcgatctatgctttccagacacaaactggacgccatcctgggcaggctgggctacacggccaccttggagtctgagttctcactggtccaggccatcagcaaagagaatgtcaagcagatggtgttcaagatcttcctggtgagggtctcatgtgaagccgttctcagaaccgcgggcacacggatgcttgagccgggcacagagaaactcgctaggacccaca

SEQ ID NO: 2177 - DNA, 1171 bp, Homo sapiens
  source 1..1171: mol_type = unassigned DNA; mol_type = unassigned DNA
gacgcccgagcccgagcgcagtggcctccgagcgggaaccggactgggagccggagccggggcgggaaccggagctggagccgaagctggagccggcactgcggcgcacggagcggagcgctgcagccaagccgagtgagtggaggggccttccctgcgagaagtcagagctgtgcccgtgggcaggctggctccgctgttctgctccaaggattacatgtccttcaaacgtccctgccccttagcacgatacaaccgcaccagctacttctaccccacattctcagagagctcggagcacagccatctgctcgtgtcccccgtgctggtggcgagtgccgtcataggtgtggtcatcatcctctcctgcatcaccatcattgtgggcagcatccgcagggacaggcaggcccggcttcagcggcaccgccaccgccaccaccgccaccaccaccaccatcatcaccaccgccggcgtcgacaccgagagtacgagcacggctacgtgtcggacgagcacacatacagccgctcaagccgcaggatgcgctatgcctgcagctcctcagaggactggcccccacccttggacatcagctctgacggggacgtggatgccacggtgctcagggagctgtacccagattctccaccaggggtctcactcagtcgcctacgctggagtgcaatgatgtacactgggagctttacctactgggtgcgatctatgctttccagacacaaactggacgccatcctgggcaggctgggctacacggccaccttggagtctgagttctcactggtccaggccatcagcaaagagaatgtcaagcagatggtgttcaagatcttcctggtgagggtctcatgtgaagccgttctcagaaccgcgggcacacggatgcttgagccgggcacagagaaactcgctaggacccacagcaggcacagctcagagaaaaggctggtgaagccctgcagctgcctcgagggggttcagccaggcccaggttccgggggaccacagcaaggtccctcagaaggggtggggtccgagacggccctggcagagggcactgctggccagagatctctgcccatggctctgagcccatctgaggtctcaacagcccccaacagcctccccagtggctctccagtcctctag

SEQ ID NO: 2178 - DNA, 2744 bp, Homo sapiens
  source 1..2744: mol_type = unassigned DNA; mol_type = unassigned DNA
gcggcgccgggcttcccacggacggggccccgcggggttgcccggccgtgcccgctgtgcccggctctgcccggcgcggccgcggagcgcacgcctcctgcctgctgaccctctcgtttggtttctcgcaggcctctgccgcagacatggagaaactcagcgcgctgcaggagcagaagggcgagctgcgcaagcggctgtcctacaccacacacaagctcgagaagctcgagaccgagttcgactccacgcgccactacctggagatcgagctgcggcgcgcgcaggaggaactggagaaggtcacggagaagctgcgcaggattcagagcaactacatggcactgcagaggatcaaccaggagctggaggacaagctgtaccgcatgggccagcactatgaggaggagaagcgtgcgctgagccacgagattgttgccctcaacagccatctgctagaagccaaggtgaccatcgacaagctgtcagaggacaacgagctctataggaaggactgcaatctagcggcccagctgctgcagtgcagccagacctacggcagggtccacaaggtgtctgagctgccctcggatttccaggagcgcgtgagcctgcacatggagaagcacggctgcagcctgccatccccgctctgccacccggcctacgccgacagcgtccccacctgcgtcattgccaaggtgctggagaagccggaccccgccagcctgtcctcccgcctgtccgatgcctccgcccgcgacctggccttctgcgacggggtggagaaaccaggcccgcggcccccctacaagggagacatctactgcagtgacacagccctctactgcccggaggagcggcggcgagaccggcggcctagcgtggacgcgcccgtgaccgacgtgggcttcctgcgggcccagaactccactgacagcgcggccgaggaggaggaggaggccgaggcggcggccttcccggcgggcttccagcatgaggccttccccagctacgcaggctcactgcccacgtccagctcctactccagcttcagcgccacgtcggaggagaaggagcacgcgcaggccagcacgctgaccgcgtcgcagcaggccatctacctgaacagccgcgacgagctcttcgaccgcaagccacccgccaccacctacgagggcagccctcgctttgccaaggccacggccgcggtggcggccccgctggaggccgaagtggccccaggcttcgggcggaccatgtcaccgtacccggccgagaccttccgcttcccggcctctccgggtccccagcaggccctgatgcccccaaacctgtggagcctgcgggccaagccggggaccgcccggctccccggggaggacatgaggggccagtggcgtcccctgagcgtggaggacatcggcgcctactcctaccccgtgagcgctgccggccgcgcctcaccctgcagcttctctgaacgctactacggcggggccgggggcagcccgggcaagaaggccgacggccgcgccagcccgctctacgccagctacaaggccgacagcttctccgagggggacgacctctcccagggccacctggcagagccctgcttcctgcgggcgggcggcgacctgagcctcagtcccggccgctcggctgacccactgcccggctatgcacccagcgaggggggggacggggacaggctcggggtgcagctgtgtgggaccgccagcagccctgagcccgagcagggttccagggactccttggagccgagctccatggaggcctccccggaaatgcatcctgccgcccgcctcagcccccagcaggcctttccgcggactggtggctcggggctgagccgcaaggacagcctcaccaaggcccagctctacggaaccttgctcaactgagcgcctgcgtgcaggcctggccgtggttcgctccccgccagcccacgtgccccagaagggccggcctcacctctccccagcccccgctgttcccctgccccggccaacaacgaggagtctgttcctccccgcacctcctctcctccccagccctgtaggcctgaggggagggtcccccacaccacggtgtccacccggccccggcccgtggaactccacttagagcgtttttcacgcgtccttcccccatgtgagaggagcatccccccttttataaagcgaaactatttttatagagaaaaagggtctttcttaacgcacttggcctccagctccctggacggctgccttggcgttttcaacacaaagctcctttattttttgggcgagggtgcgtggggcctgccccttggaagggaagggaaggacggtgtcctgtggagaccagactctgcaagtggggagaccacccccgcaagccagtgacaagggagccctgaagttgtgtccacgaagagggagctgaaacaaattcggggctatgaagtgttttaaaaatccattcttcgcagtgtggccaccacaccgccctgagccctcccacggcccatcgtcccgggtgggccgggatgatgccccagtgcggccggtgctcatctccgcccccgggtccgccccctgacaccgtcttactctacctcagacatgaggaggccctccattcctggtttctgtagcttgcattcttgttgtctctgatgcatgccctgccagttagtactgtattttgcattcattaataaaagacaccggtgg

SEQ ID NO: 2179 - DNA, 625 bp, Homo sapiens
  source 1..625: mol_type = unassigned DNA; mol_type = unassigned DNA
ggccgagcctggccgaggccccggggccgggccttctagcttggcgctgcggccgggctgcgccctcgcccggcggggcggtgggggaggcggcgtggggcccggacccgagcggagcgcgctcccggcggacgcggcggcggcgcccggcgcgaggggccgggatgggcagtcatcagtcttcccaggcctctgccgcagacatggagaaactcagcgcgctgcaggagcagaagggcgagctgcgcaagcggctgtcctacaccacacacaagctcgagaagctcgagaccgagttcgactccacgcgccactacctggagatcgagctgcggcgcgcgcaggaggaactggagaaggtcacggagaagctgcgcagatggggagtccagaggttctggtaggggaagctcttcctccaaagtcacactatggagcagctgagccaggatttgaacccagcagatctccagacccagactggtccacccggggcccagccatggttccctgggtcctgatgggaaaagctgtgtctagcccggagatgaaccagtttagggacccttcccttgagcgcgtacgggctaatgaagtgtcgatccagttgtgctggactccctca

SEQ ID NO: 2180 - DNA, 354 bp, Homo sapiens
  source 1..354: mol_type = unassigned DNA; mol_type = unassigned DNA
ccttcccatcttcagggggtcccggggtggagggggaaatacagtcctgggccctggcctaggaaaggcttctacaaaagtttgctttaatgggatgttctctgctgtgtgcagaggggcacacattccaccagggtgaagctggtggggtgagctcaggaggtccaaattcagccccaccctgctcagcaggctgtgcggccataagggtcgtgggagggacaggccttgcatggcagtgacccccttgcctcctgcaccaggattcagagcaactacatggcactgcagaggatcaaccaggagctggaggacaagctgtaccgcatgggccagcactatgaggaggagaag

SEQ ID NO: 2181 - DNA, 632 bp, Homo sapiens
  source 1..632: mol_type = unassigned DNA; mol_type = unassigned DNA
cctgcgggaagccgggcggggtgggggagccccggccgcgccggctcccggcgcgctcggcctcggaggggagggggcggcggtagcggcggcggcggtgagcggcgcggctgccctggggccatgtggactggcggtcgccggccgggccggctgcgccgggcggcctctgccgcagacatggagaaactcagcgcgctgcaggagcagaagggcgagctgcgcaagcggctgtcctacaccacacacaagctcgagaagctcgagaccgagttcgactccacgcgccactacctggagatcgagctgcggcgcgcgcaggaggaactggagaaggtcacggagaagctgcgcaggattcagagcaactacatggcactgcagaggatcaaccaggagctggaggacaagctgtaccgcatgggccagcactatgaggaggagaagcgtgcgctgagccacgagattgttgccctcaacagccatctgctagaagccaaggtgaccatcgacaagctgtcagaggacaacgagctctataggaaggactgcaatctagcggcccagctgctgcagtgcagccagacctacggcagggtccacaaggtgtctgagctgccctcggatttcca

SEQ ID NO: 2182 - DNA, 649 bp, Homo sapiens
  source 1..649: mol_type = unassigned DNA; mol_type = unassigned DNA
gcggcgccgggcttcccacggacggggccccgcggggttgcccggccgtgcccgctgtgcccggctctgcccggcgcggccgcggagcgcacgcctcctgcctgctgaccctctcgtttggtttctcgcaggcctctgccgcagacatggagaaactcagcgcgctgcaggagcagaagggcgagctgcgcaagcggctgtcctacaccacacacaagctcgagaagctcgagaccgagttcgactccacgcgccactacctggagatcgagctgcggcgcgcgcaggaggaactggagaaggtcacggagaagctgcgcaggattcagagcaactacatggcactgcagaggatcaaccaggagctggaggacaagctgtaccgcatgggccagcactatgaggaggagaagcgtgcgctgagccacgagattgttgccctcaacagccatctgctagaagccaaggtgaccatcgacaagctgtcagaggacaacgagctctataggaaggactgcaatctagcggcccagctgctgcagtgcagccagacctacggcagggtccacaaggtgtctgagctgccctcggatttccaggagcgcgtgagcctgcacatggagaagcacggctgcagcctgccatcccc

SEQ ID NO: 2183 - DNA, 747 bp, Homo sapiens
  source 1..747: mol_type = unassigned DNA; mol_type = unassigned DNA
ctcttgggaagacccgccctgcccttctctgaggttctcaaaaaccgcgctgcaggagcagaagggcgagctgcgcaagcggctgtcctacaccacacacaagctcgagaagctcgagaccgagttcgactccacgcgccactacctggagatcgagctgcggcgcgcgcaggaggaactggagaaggtcacggagaagctgcgcaggattcagagcaactacatggcactgcagaggatcaaccaggagctggaggacaagctgtaccgcatgggccagcactatgaggaggagaagcgtgcgctgagccacgagattgttgccctcaacagccatctgctagaagccaaggtgaccatcgacaagctgtcagaggacaacgagctctataggaaggactgcaatctagcggcccagctgctgcagtgcagccagacctacggcagggtccacaaggtgtctgagctgccctcggatttccaggagcgcgtgagcctgcacatggagaagcacggctgcagcctgccatccccgctctgccacccggcctacgccgacagcgtccccacctgcgtcattgccaaggtgctggagaagccggaccccgccagcctgtcctcccgcctgtccgatgcctccgcccgcgacctggccttctgcgacggggtggagaaaccaggcccgcggcccccctacaagggagacatctactgcagtgacacagccctctactgcccggaggagcg

SEQ ID NO: 2184 - DNA, 1010 bp, Homo sapiens
  source 1..1010: mol_type = unassigned DNA; mol_type = unassigned DNA
ccaggaggggaaagggccaggaaagacaggctccagtgccgtaggatccaggcatgcactgtccgtgtttattgagcgcctgctgtatgctgggacctagcatgagaagcgctgtcatggggacccggaaaggcctctgccgcagacatggagaaactcagcgcgctgcaggagcagaagggcgagctgcgcaagcggctgtcctacaccacacacaagctcgagaagctcgagaccgagttcgactccacgcgccactacctggagatcgagctgcggcgcgcgcaggaggaactggagaaggtcacggagaagctgcgcaggattcagagcaactacatggcactgcagaggatcaaccaggagctggaggacaagctgtaccgcatgggccagcactatgaggaggagaagcgtgcgctgagccacgagattgttgccctcaacagccatctgctagaagccaaggtgaccatcgacaagctgtcagaggacaacgagctctataggaaggactgcaatctagcggcccagctgctgcagtgcagccagacctacggcagggtccacaaggtgtctgagctgccctcggatttccaggagcgcgtgagcctgcacatggagaagcacggctgcagcctgccatccccgctctgccacccggcctacgccgacagcgtccccacctgcgtcattgccaaggtgctggagaagccggaccccgccagcctgtcctcccgcctgtccgatgcctccgcccgcgacctggccttctgcgacggggtggagaaaccaggcccgcggcccccctacaagggagacatctactgcagtgacacagccctctactgcccggaggagcggcggcgagaccggcggcctagcgtggacgcgcccgtgaccgacgtgggcttcctgcgggcccagaactccactgacagcgcggccgaggaggaggaggaggccgaggcggcggccttcccggcgggcttccagcatgaggccttccc

SEQ ID NO: 2185 - DNA, 925 bp, Homo sapiens
  source 1..925: mol_type = unassigned DNA; mol_type = unassigned DNA
ccctgattgaggagtcgaggctccaaatgccatcgccctcggattgtgcctctgccgcagacatggagaaactcagcgcgctgcaggagcagaagggcgagctgcgcaagcggctgtcctacaccacacacaagctcgagaagctcgagaccgagttcgactccacgcgccactacctggagatcgagctgcggcgcgcgcaggaggaactggagaaggtcacggagaagctgcgcaggattcagagcaactacatggcactgcagaggatcaaccaggagctggaggacaagctgtaccgcatgggccagcactatgaggaggagaagcgtgcgctgagccacgagattgttgccctcaacagccatctgctagaagccaaggtgaccatcgacaagctgtcagaggacaacgagctctataggaaggactgcaatctagcggcccagctgctgcagtgcagccagacctacggcagggtccacaaggtgtctgagctgccctcggatttccaggagcgcgtgagcctgcacatggagaagcacggctgcagcctgccatccccgctctgccacccggcctacgccgacagcgtccccacctgcgtcattgccaaggtgctggagaagccggaccccgccagcctgtcctcccgcctgtccgatgcctccgcccgcgacctggccttctgcgacggggtggagaaaccaggcccgcggcccccctacaagggagacatctactgcagtgacacagccctctactgcccggaggagcggcggcgagaccggcggcctagcgtggacgcgcccgtgaccgacgtgggcttcctgcgggcccagaactccactgacagcgcggccgaggaggaggaggaggccgaggcggcggccttcccggcgggcttccagcatgaggccttccc

SEQ ID NO: 2186 - DNA, 5811 bp, Homo sapiens
  source 1..5811: mol_type = unassigned DNA; mol_type = unassigned DNA
gctgtttccagacgctggggactccctgacccatctcggcccttgccaggacaccttttcacccagggcaggggacagaggcctctgagccacaggcctccagcagtttcccccagattcccagtggcctggtggccccaccccacacagtgccacctcttgacattgtccactgtgtggagggtgctactatgtagaatgtggaccagcaacagccctgcccccgtgtctgggtgcaccatccagttctgcagatgtggagacaggctgccgtggcagggctcgggttattgcccggtgtggggaacactggacagggaaggaggtactacccgggtgaccgcagaccctaggtacacagcctggactgggcagaggggacacgttcagaggtgtgagaagctgaacccccaggacttagtgacagggctgtgaggggtaaagaggggtcaccatgcccaccccccgggtggggaacgtggagggcagtgaaggtgtggtggatgtggctgcattggacgggttgggtgtggagatgcctgagggccataggtgggtggctggacgtggtgagggtatggagcctgacagacaccccgctggagtcagatggaaacctgggaggggtccctgtgcagctggcttggaggggatttggtctgagcatgcagggcaggggtgcaggtgcaaaccggggccccagggaacagcccgggcgaggtcgggaggggcctgtggtgtgatcgccggaccagcagaggtggggaaagacgtggcaggaaccctggggcggccaagtgcggggcatcagctatgcctggggacggggtgcgtgtccatggcccgatgcctgcagcaagcggacactgaggcagagaggggtgtgagagtcaggggctgggggcactgctagcccaaagattggttgggtgtagcaggtggttgggtgtgaaggacttggggagggggagcagtatttaagggctggtggaacagggagttgactgctgtatctggaaggccatccaaaggccaggggtaaactgaggctctgtgaagctgcctgacttgtgagatgtctgccccgagcccaccccatagccccttcgtcctcccctcccacacctgccccgtggagaatccctgcctagctcattgtctgcctcccctctggaccgcaggctcccggggcaggggcagggtttgtcttactcctggctgtgaggtctcagacaggttgcttgctctgagaggtgagggtagggacctcagggtgcccagaaggggcagggctgggtgagggggcacagtgagctaggggtgcaggtctcagaatagcaaggacctaaggctgctcagtgaggcctggggtgtggctggagaaggggtgaggactcggggctgaggtggccacgtgggtggatggatgacgccctcacctcttcccgagggctgtgggtacaccaggagcccctgcagggaacagtcgacttcaggggctgctgtgcagcccattgtgcctgccctaggagcccaggatggcataggagtccccaggaagttcaccacctccctggggaggacaggtctgtgtgggaagcagcctgggacctgtagctatagagtgctagaagtggggcagccacggaaggctgcctggaggaggtggaaggaggcctgagcactgtcccagagagcgctcccggaggcagacccacgtgggcagctgtggcactttgcctcagggcttccctctttgcttgttactctacttcctcttgtggtgactgactcttgggaagacccgccctgcccttctctgaggttctcaaaaacgtaagcgacgctttatttttatttgtttttaaaaatatagccctgggcaggaatccaagagtgcttcctggaggcttgctgggtgtgtgcccgcagtgccacatgcggtttactcacggggcccagacagaagatgcctctgctcggggctgggggacagtggtggccccagggggactgggagcctcctgcctgccctctactcccctcgcttgggtttgggtcgggaatatcacaagaacgcgggcttttgcccaaggtcccacagcacatctgggcagagtcagggttccaggccctctcccacacctcaagtttccttcatgacacccgggacttctgcctgtcccgtccccatctcacagcaacacaatccaaaagatgttggtcccagatagcccctgggctgtgcacccattgcaaggaaagaactgctggctgctgaccccactctgacccagacaaccggaagtgcagcccctgccttggggagctccgagccatccctgttggaggcccccacactaccctcctgcctttgcacagctttagttcaggtgaattgttggcaggtggctcggaagagtgggtcatagtgggtctctgtttcctgagcatgtggggctctgcatcctggggtcctaccctccaggagaccccattctgggggaagaaaatagagcctcaagaattgtctgggtttctggaaggcttcctggaggaaggggaacttgagcaggccaggaccttgccaggtttcccgtgctgcatgcagcctcattggccatggtggcagacactgcccgggcatgggacattgccaccaaacatctctctggcccagagaagtgacccagggtcccagggccacacagccattttggggaaagcaggtctggtcttgggcatggcactgctgactctgggcctcagccatcccaacctagcactgtggaggagcaggagtgagggccccagtcacctgtgccacccagggccagctctgtgatagcctgggtgctgatgggtgctctttgtacctgggtcctttaaaccgcccccaacacactggccaggttctggggtcaaagactcctccagccaccacctgggatttacctgtgtgagggacactggtggagtctgaggaaccgcccaggccagactggctcagggtcagagtccctgactctggggcgccatggtcttcagtgacgcccgggaggctgggtgtgtgtgagtgtgtgtgtgtgtgtgtgtgtgtgtgtgtgtgcgcgcgcgcgcgcgcgccggtactcgcgtgttagtgcggcacgccccggctggcctgcgggccttagtttcccccgctcagcgccgcggcccggcccgccgccgccatgtcgttgcagcgcgctgcaggagcagaagggcgagctgcgcaagcggctgtcctacaccacacacaagctcgagaagctcgagaccgagttcgactccacgcgccactacctggagatcgagctgcggcgcgcgcaggaggaactggagaaggtcacggagaagctgcgcaggattcagagcaactacatggcactgcagaggatcaaccaggagctggaggacaagctgtaccgcatgggccagcactatgaggaggagaagcgtgcgctgagccacgagattgttgccctcaacagccatctgctagaagccaaggtgaccatcgacaagctgtcagaggacaacgagctctataggaaggactgcaatctagcggcccagctgctgcagtgcagccagacctacggcagggtccacaaggtgtctgagctgccctcggatttccaggagcgcgtgagcctgcacatggagaagcacggctgcagcctgccatccccgctctgccacccggcctacgccgacagcgtccccacctgcgtcattgccaaggtgctggagaagccggaccccgccagcctgtcctcccgcctgtccgatgcctccgcccgcgacctggccttctgcgacggggtggagaaaccaggcccgcggcccccctacaagggagacatctactgcagtgacacagccctctactgcccggaggagcggcggcgagaccggcggcctagcgtggacgcgcccgtgaccgacgtgggcttcctgcgggcccagaactccactgacagcgcggccgaggaggaggaggaggccgaggcggcggccttcccggcgggcttccagcatgaggccttccccagctacgcaggctcactgcccacgtccagctcctactccagcttcagcgccacgtcggaggagaaggagcacgcgcaggccagcacgctgaccgcgtcgcagcaggccatctacctgaacagccgcgacgagctcttcgaccgcaagccacccgccaccacctacgagggcagccctcgctttgccaaggccacggccgcggtggcggccccgctggaggccgaagtggccccaggcttcgggcggaccatgtcaccgtacccggccgagaccttccgcttcccggcctctccgggtccccagcaggccctgatgcccccaaacctgtggagcctgcgggccaagccggggaccgcccggctccccggggaggacatgaggggccagtggcgtcccctgagcgtggaggacatcggcgcctactcctaccccgtgagcgctgccggccgcgcctcaccctgcagcttctctgaacgctactacggcggggccgggggcagcccgggcaagaaggccgacggccgcgccagcccgctctacgccagctacaaggccgacagcttctccgagggggacgacctctcccagggccacctggcagagccctgcttcctgcgggcgggcggcgacctgagcctcagtcccggccgctcggctgacccactgcccggctatgcacccagcgaggggggggacggggacaggctcggggtgcagctgtgtgggaccgccagcagccctgagcccgagcagggttccagggactccttggagccgagctccatggaggcctccccggaaatgcatcctgccgcccgcctcagcccccagcaggcctttccgcggactggtggctcggggctgagccgcaaggacagcctcaccaaggcccagctctacggaaccttgctcaactgagcgcctgcgtgcaggcctggccgtggttcgctccccgccagcccacgtgccccagaagggccggcctcacctctccccagcccccgctgttcccctgccccggccaacaacgaggagtctgttcctccccgcacctcctctcctccccagccctgtaggcctgaggggagggtcccccacaccacggtgtccacccggccccggcccgtggaactccacttagagcgtttttcacgcgtccttcccccatgtgagaggagcatccccccttttataaagcgaaactatttttatagagaaaaagggtctttcttaacgcacttggcctccagctccctggacggctgccttggcgttttcaacacaaagctcctttattttttgggcgagggtgcgtggggcctgccccttggaagggaagggaaggacggtgtcctgtggagaccagactctgcaagtggggagaccacccccgcaagccagtgacaagggagccctgaagttgtgtccacgaagagggagctgaaacaaattcggggctatgaagtgttttaaaaatccattcttcgcagtgtggccaccacaccgccctgagccctcccacggcccatcgtcccgggtgggccgggatgatgccccagtgcggccggtgctcatctccgcccccgggtccgccccctgacaccgtcttactctacctcagacatgaggaggccctccattcctggtttctgtagcttgcattcttgttgtctctgatgcatgccctgccagttagtactgtattttgcattcattaataaaagacaccggtgg

SEQ ID NO: 2187 - DNA, 3259 bp, Homo sapiens
  source 1..3259: mol_type = unassigned DNA; mol_type = unassigned DNA
atgctctcaggggccagctcccaggcacggggctctaaccctacctgtcccaggcaggacggctacagctccctcctggagcccgggacagaagcccccatcaaggaagctcacagacaggaccttcgaagccacatgccaagccccagccaaggtcggaaccccaagggcaaagcatcttgccaccgctgggcagctcggtccagccaggagatggcccgggtgtcgccagcccagccttcctccccagagtccctgaacacaggcagccgggctgtcactggctccctcgcacgcctgggccgctggcgggaggccagactgcccttctccaggttcctggatgaggtcactgtgcgggttctggaccctgggaccctggaggccttcagggtgcccagaggccgcagcccagagccctctgcagtggatcgaggccaaggtctagcccaggaggcccttacaagagctgcagccccaggggagaaggacccagccctgagctcccagctttcttcggaggcggccactgaggctgcaagcagagtggggccaggccaggccgtgggaactagtgggccttgcttgggcagtggcaagcgtggaggccggactgcctccccttggaggtctccaggtcgggcctctgccgcagacatggagaaactcagcgcgctgcaggagcagaagggcgagctgcgcaagcggctgtcctacaccacacacaagctcgagaagctcgagaccgagttcgactccacgcgccactacctggagatcgagctgcggcgcgcgcaggaggaactggagaaggtcacggagaagctgcgcaggattcagagcaactacatggcactgcagaggatcaaccaggagctggaggacaagctgtaccgcatgggccagcactatgaggaggagaagcgtgcgctgagccacgagattgttgccctcaacagccatctgctagaagccaaggtgaccatcgacaagctgtcagaggacaacgagctctataggaaggactgcaatctagcggcccagctgctgcagtgcagccagacctacggcagggtccacaaggtgtctgagctgccctcggatttccaggagcgcgtgagcctgcacatggagaagcacggctgcagcctgccatccccgctctgccacccggcctacgccgacagcgtccccacctgcgtcattgccaaggtgctggagaagccggaccccgccagcctgtcctcccgcctgtccgatgcctccgcccgcgacctggccttctgcgacggggtggagaaaccaggcccgcggcccccctacaagggagacatctactgcagtgacacagccctctactgcccggaggagcggcggcgagaccggcggcctagcgtggacgcgcccgtgaccgacgtgggcttcctgcgggcccagaactccactgacagcgcggccgaggaggaggaggaggccgaggcggcggccttcccggcgggcttccagcatgaggccttccccagctacgcaggctcactgcccacgtccagctcctactccagcttcagcgccacgtcggaggagaaggagcacgcgcaggccagcacgctgaccgcgtcgcagcaggccatctacctgaacagccgcgacgagctcttcgaccgcaagccacccgccaccacctacgagggcagccctcgctttgccaaggccacggccgcggtggcggccccgctggaggccgaagtggccccaggcttcgggcggaccatgtcaccgtacccggccgagaccttccgcttcccggcctctccgggtccccagcaggccctgatgcccccaaacctgtggagcctgcgggccaagccggggaccgcccggctccccggggaggacatgaggggccagtggcgtcccctgagcgtggaggacatcggcgcctactcctaccccgtgagcgctgccggccgcgcctcaccctgcagcttctctgaacgctactacggcggggccgggggcagcccgggcaagaaggccgacggccgcgccagcccgctctacgccagctacaaggccgacagcttctccgagggggacgacctctcccagggccacctggcagagccctgcttcctgcgggcgggcggcgacctgagcctcagtcccggccgctcggctgacccactgcccggctatgcacccagcgaggggggggacggggacaggctcggggtgcagctgtgtgggaccgccagcagccctgagcccgagcagggttccagggactccttggagccgagctccatggaggcctccccggaaatgcatcctgccgcccgcctcagcccccagcaggcctttccgcggactggtggctcggggctgagccgcaaggacagcctcaccaaggcccagctctacggaaccttgctcaactgagcgcctgcgtgcaggcctggccgtggttcgctccccgccagcccacgtgccccagaagggccggcctcacctctccccagcccccgctgttcccctgccccggccaacaacgaggagtctgttcctccccgcacctcctctcctccccagccctgtaggcctgaggggagggtcccccacaccacggtgtccacccggccccggcccgtggaactccacttagagcgtttttcacgcgtccttcccccatgtgagaggagcatccccccttttataaagcgaaactatttttatagagaaaaagggtctttcttaacgcacttggcctccagctccctggacggctgccttggcgttttcaacacaaagctcctttattttttgggcgagggtgcgtggggcctgccccttggaagggaagggaaggacggtgtcctgtggagaccagactctgcaagtggggagaccacccccgcaagccagtgacaagggagccctgaagttgtgtccacgaagagggagctgaaacaaattcggggctatgaagtgttttaaaaatccattcttcgcagtgtggccaccacaccgccctgagccctcccacggcccatcgtcccgggtgggccgggatgatgccccagtgcggccggtgctcatctccgcccccgggtccgccccctgacaccgtcttactctacctcagacatgaggaggccctccattcctggtttctgtagcttgcattcttgttgtctctgatgcatgccctgccagttagtactgtattttgcattcattaataaaagacaccggtggaaag

SEQ ID NO: 2188 - DNA, 2674 bp, Homo sapiens
  source 1..2674: mol_type = unassigned DNA
ctgctttgtctgctgtcccctctctgctggagaacttagcccagagctagtgaacgagcctctgccgcagacatggagaaactcagcgcgctgcaggagcagaagggcgagctgcgcaagcggctgtcctacaccacacacaagctcgagaagctcgagaccgagttcgactccacgcgccactacctggagatcgagctgcggcgcgcgcaggaggaactggagaaggtcacggagaagctgcgcaggattcagagcaactacatggcactgcagaggatcaaccaggagctggaggacaagctgtaccgcatgggccagcactatgaggaggagaagcgtgcgctgagccacgagattgttgccctcaacagccatctgctagaagccaaggtgaccatcgacaagctgtcagaggacaacgagctctataggaaggactgcaatctagcggcccagctgctgcagtgcagccagacctacggcagggtccacaaggtgtctgagctgccctcggatttccaggagcgcgtgagcctgcacatggagaagcacggctgcagcctgccatccccgctctgccacccggcctacgccgacagcgtccccacctgcgtcattgccaaggtgctggagaagccggaccccgccagcctgtcctcccgcctgtccgatgcctccgcccgcgacctggccttctgcgacggggtggagaaaccaggcccgcggcccccctacaagggagacatctactgcagtgacacagccctctactgcccggaggagcggcggcgagaccggcggcctagcgtggacgcgcccgtgaccgacgtgggcttcctgcgggcccagaactccactgacagcgcggccgaggaggaggaggaggccgaggcggcggccttcccggcgggcttccagcatgaggccttccccagctacgcaggctcactgcccacgtccagctcctactccagcttcagcgccacgtcggaggagaaggagcacgcgcaggccagcacgctgaccgcgtcgcagcaggccatctacctgaacagccgcgacgagctcttcgaccgcaagccacccgccaccacctacgagggcagccctcgctttgccaaggccacggccgcggtggcggccccgctggaggccgaagtggccccaggcttcgggcggaccatgtcaccgtacccggccgagaccttccgcttcccggcctctccgggtccccagcaggccctgatgcccccaaacctgtggagcctgcgggccaagccggggaccgcccggctccccggggaggacatgaggggccagtggcgtcccctgagcgtggaggacatcggcgcctactcctaccccgtgagcgctgccggccgcgcctcaccctgcagcttctctgaacgctactacggcggggccgggggcagcccgggcaagaaggccgacggccgcgccagcccgctctacgccagctacaaggccgacagcttctccgagggggacgacctctcccagggccacctggcagagccctgcttcctgcgggcgggcggcgacctgagcctcagtcccggccgctcggctgacccactgcccggctatgcacccagcgaggggggggacggggacaggctcggggtgcagctgtgtgggaccgccagcagccctgagcccgagcagggttccagggactccttggagccgagctccatggaggcctccccggaaatgcatcctgccgcccgcctcagcccccagcaggcctttccgcggactggtggctcggggctgagccgcaaggacagcctcaccaaggcccagctctacggaaccttgctcaactgagcgcctgcgtgcaggcctggccgtggttcgctccccgccagcccacgtgccccagaagggccggcctcacctctccccagcccccgctgttcccctgccccggccaacaacgaggagtctgttcctccccgcacctcctctcctccccagccctgtaggcctgaggggagggtcccccacaccacggtgtccacccggccccggcccgtggaactccacttagagcgtttttcacgcgtccttcccccatgtgagaggagcatccccccttttataaagcgaaactatttttatagagaaaaagggtctttcttaacgcacttggcctccagctccctggacggctgccttggcgttttcaacacaaagctcctttattttttgggcgagggtgcgtggggcctgccccttggaagggaagggaaggacggtgtcctgtggagaccagactctgcaagtggggagaccacccccgcaagccagtgacaagggagccctgaagttgtgtccacgaagagggagctgaaacaaattcggggctatgaagtgttttaaaaatccattcttcgcagtgtggccaccacaccgccctgagccctcccacggcccatcgtcccgggtgggccgggatgatgccccagtgcggccggtgctcatctccgcccccgggtccgccccctgacaccgtcttactctacctcagacatgaggaggccctccattcctggtttctgtagcttgcattcttgttgtctctgatgcatgccctgccagttagtactgtattttgcattcattaataaaagacaccggtggaaag

SEQ ID NO: 2189 - DNA, 2911 bp, Homo sapiens
  source 1..2911: mol_type = unassigned DNA
gttactcggccgcggcccggcgcgcccactgagtcacgggggccgcggccgggactggaagctggggacgcgcggcgccgggcttcccacggacggggccccgcggggttgcccggccgtgcccgctgtgcccggctctgcccggcgcggccgcggagcgcacgcctcctgcctgctgaccctctcgtttggtttctcgcaggcctctgccgcagacatggagaaactcaggctgcgcagcccctgggtgcccttgtgcctcgggcagccccgagtactgcagggccggctggccaggtcctcgccctccatctgggacagcgcgctgcaggagcagaagggcgagctgcgcaagcggctgtcctacaccacacacaagctcgagaagctcgagaccgagttcgactccacgcgccactacctggagatcgagctgcggcgcgcgcaggaggaactggagaaggtcacggagaagctgcgcaggattcagagcaactacatggcactgcagaggatcaaccaggagctggaggacaagctgtaccgcatgggccagcactatgaggaggagaagcgtgcgctgagccacgagattgttgccctcaacagccatctgctagaagccaaggtgaccatcgacaagctgtcagaggacaacgagctctataggaaggactgcaatctagcggcccagctgctgcagtgcagccagacctacggcagggtccacaaggtgtctgagctgccctcggatttccaggagcgcgtgagcctgcacatggagaagcacggctgcagcctgccatccccgctctgccacccggcctacgccgacagcgtccccacctgcgtcattgccaaggtgctggagaagccggaccccgccagcctgtcctcccgcctgtccgatgcctccgcccgcgacctggccttctgcgacggggtggagaaaccaggcccgcggcccccctacaagggagacatctactgcagtgacacagccctctactgcccggaggagcggcggcgagaccggcggcctagcgtggacgcgcccgtgaccgacgtgggcttcctgcgggcccagaactccactgacagcgcggccgaggaggaggaggaggccgaggcggcggccttcccggcgggcttccagcatgaggccttccccagctacgcaggctcactgcccacgtccagctcctactccagcttcagcgccacgtcggaggagaaggagcacgcgcaggccagcacgctgaccgcgtcgcagcaggccatctacctgaacagccgcgacgagctcttcgaccgcaagccacccgccaccacctacgagggcagccctcgctttgccaaggccacggccgcggtggcggccccgctggaggccgaagtggccccaggcttcgggcggaccatgtcaccgtacccggccgagaccttccgcttcccggcctctccgggtccccagcaggccctgatgcccccaaacctgtggagcctgcgggccaagccggggaccgcccggctccccggggaggacatgaggggccagtggcgtcccctgagcgtggaggacatcggcgcctactcctaccccgtgagcgctgccggccgcgcctcaccctgcagcttctctgaacgctactacggcggggccgggggcagcccgggcaagaaggccgacggccgcgccagcccgctctacgccagctacaaggccgacagcttctccgagggggacgacctctcccagggccacctggcagagccctgcttcctgcgggcgggcggcgacctgagcctcagtcccggccgctcggctgacccactgcccggctatgcacccagcgaggggggggacggggacaggctcggggtgcagctgtgtgggaccgccagcagccctgagcccgagcagggttccagggactccttggagccgagctccatggaggcctccccggaaatgcatcctgccgcccgcctcagcccccagcaggcctttccgcggactggtggctcggggctgagccgcaaggacagcctcaccaaggcccagctctacggaaccttgctcaactgagcgcctgcgtgcaggcctggccgtggttcgctccccgccagcccacgtgccccagaagggccggcctcacctctccccagcccccgctgttcccctgccccggccaacaacgaggagtctgttcctccccgcacctcctctcctccccagccctgtaggcctgaggggagggtcccccacaccacggtgtccacccggccccggcccgtggaactccacttagagcgtttttcacgcgtccttcccccatgtgagaggagcatccccccttttataaagcgaaactatttttatagagaaaaagggtctttcttaacgcacttggcctccagctccctggacggctgccttggcgttttcaacacaaagctcctttattttttgggcgagggtgcgtggggcctgccccttggaagggaagggaaggacggtgtcctgtggagaccagactctgcaagtggggagaccacccccgcaagccagtgacaagggagccctgaagttgtgtccacgaagagggagctgaaacaaattcggggctatgaagtgttttaaaaatccattcttcgcagtgtggccaccacaccgccctgagccctcccacggcccatcgtcccgggtgggccgggatgatgccccagtgcggccggtgctcatctccgcccccgggtccgccccctgacaccgtcttactctacctcagacatgaggaggccctccattcctggtttctgtagcttgcattcttgttgtctctgatgcatgccctgccagttagtactgtattttgcattcattaataaaagacaccggtggaaagaa

SEQ ID NO: 2190 - DNA, 1187 bp, Homo sapiens
  source 1..1187: mol_type = unassigned DNA
tctgggtcctctcagtggccagagaacagaaagaaaatctgactgtgcacgagcgaagggtgacaccgggcgtgcagcaccgacctgaaggcacctcttcgggggagcccgaaatttgaagattctctttcctgtcggagactacaaaccaaataaatagcagtgttcacggaagcgacgagcacgggcgcctgcttagaaggacgctgatgcgctacgtcaatctcacctccctgctcatctttcgctcggtgagcactgctgtgtacaaaagatttcccacaatggaccacgtggttgaagcaggttttatgacaacagatgaaaggaaattattcaaccacctcaagtctcctcatctgaaatattgggttccattcatctggtttggaaatcttgcaactaaagcccggaatgaaggtagaatcagagacagtgttgatctgcaatcattgatgactgaaatgaatcgataccgctcttggtgcagcctcttattcggttatgactgggttgggattccgctggtttacacccaggtagcagagcagcttatcaacccttttggagaagatgatgatgattttgaaactaactggtgcattgacagaaatttgcagctgtggacgaaatgcacatgagcttacccaagatgaagaaggacatttactgggacgattctgctgctcgcccaccatacacattggcagctgctgactactgcataccctcatttctggggtcaacagtccagatggggaaacagatgcctaagaatgagtggaagatggaagatataaaaatcccactccctcagcctcaattccagtgtgctaagagtgatcctggtggttaaaggtacaacactcgaatctttcaaaacaacttggctcctaaacacaagccaacaatctcatctgctgctcaactgaaaaacattctccactttttagcatccaggcatgtggagttcctaagaaatgcactttattaatgcccaacatggtaccttcccaggagattttaatggtaattttcactctaccagtgttatgtgtgctgactttagggcccacccttcacatatggtattactcactcaagggtttaaactggggcattccagaagtaccagtttccatgatgaaaagtggaacagcagaagcgcttaaagcaattttactgaa

SEQ ID NO: 2191 - DNA, 1506 bp, Homo sapiens
  source 1..1506: mol_type = unassigned DNA
gggtcctctcagtggccagagaacagaaagaaaatctgactgtgcacgagcgaagggtgacaccgggcgtgcagcaccgacctgaaggcacctcttcgggggagcccgaaatttgaagattctctttcctgtcggagactacaaaccaaataaatagaaaaaactatccaagatgactgtcacttactccagtaaagtagcaaatgcaactttttttggatttcataggttactcctcaagtggagaggcagcatctacaaactactgtacagggaatttattgtttttgctgttctttatacagcaataagtttggtatacagattgttacttacaggagtccaaaaacgttactttgaaaaattatcaatttactgtgacagatatgctgaacaaattccagtaacctttgtgcttgggttttatgttactctggtagtgaaccgatggtggaaccagtttgtgaatttgccctggccagacaggctaatgttcctcatctctagcagtgttcacggaagcgacgagcacgggcgcctgcttagaaggacgctgatgcgctacgtcaatctcacctccctgctcatctttcgctcggtgagcactgctgtgtacaaaagatttcccacaatggaccacgtggttgaagcaggttttatgacaacagatgaaaggaaattattcaaccacctcaagtctcctcatctgaaatattgggttccattcatctggtttggaaatcttgcaactaaagcccggaatgaaggtagaatcagagacagtgttgatctgcaatcattgatgactgaaatgaatcgataccgctcttggtgcagcctcttattcggttatgactgggttgggattccgctggtttacacccaggttgtcactcttgctgtctataccttcttctttgcgtgcctgattggacgccagtttttggatcccaccaaaggctacgcagggcatgacttggatctttacattcccatcttcaccctcctacaattcttcttctatgcaggatggcttaaggtagcagagcagcttatcaacccttttggagaagatgatgatgattttgaaactaactggtgcattgacagaaatttgcaggtctctcttttagctgtggacgaaatgcacatgagcttacccaagatgaagaaggacatttactgggacgattctgctgctcgcccaccatacacattggcagctgctgactactgcataccctcatttctggggtcaacagtccagatggggaaacagatgcctaagaatgagtggaagatggaagatataaaaatcccactccctcagcctcaattccagtgtgctaagagtgatcctggtggttaaaggtacaacactcgaatctttcaaaacaacttggctcctaaacacaagccaacaatctcatctgctgctcaactgaaaaacattctccactttttagcatccaggcatgtggagttcctaagaaatgcactttatta

SEQ ID NO: 2192 - DNA, 2878 bp, Homo sapiens
  source 1..2878: mol_type = unassigned DNA
cagagagggctgactcagagtctgcacatggggtctgcttccaagttcttccaactgggcatatgcctccgccactctctgactgtcctttgcctgtgccaaggtttctgggaagaacaggaagttcagggatggcggaaaatgtttggcagattccctgagtccaaagccggagcacctgctcctgcctgagggcagagaggactggttttatgacaacagatgaaaggaaattattcaaccacctcaagtctcctcatctgaaatattgggttccattcatctggtttggaaatcttgcaactaaagcccggaatgaaggtagaatcagagacagtgttgatctgcaatcattgatgactgaaatgaatcgataccgctcttggtgcagcctcttattcggttatgactgggttgggattccgctggtttacacccaggtagcagagcagcttatcaacccttttggagaagatgatgatgattttgaaactaactggtgcattgacagaaatttgcaggtctctcttttagctgtggacgaaatgcacatgagcttacccaagatgaagaaggacatttactgggacgattctgctgctcgcccaccatacacattggcagctgctgactactgcataccctcatttctggggtcaacagtccagatggggctgtctgggtccgactttcctgacgaggagtggctgtgggattatgagaagcatggccatcggcattccatgataagaagagtcaagcggttcctgagtgcccacgaacacccctccagccccagaagaagaagctacaggaggcagacaagtgacagctccatgttcttaccccgagatgacctcagcccagccagggacctactggatgtgccctcaagaaacccccccagggcctcacccacctggaagaaatcctgcttcccagaaggaagccccacgctgcacttcagcatgggagagctgtccaccatcagggagaccagccagacaagcactttacagagcctgaccccacagtccagtgtgagaacttcccccatcaaaatgccactggtacctgaggtattgatcacagcagccgaagcaccagtgcccacatcagggggctaccaccatgattccgctacctccatcttgagctctgagtttacaggggttcagccaagcaagactgagcagcagcagggccccatgggatccatcctgtctccctcagagaaggagacacctcctggaggccccagtccccagacagtttcagccagcgctgaggaaaatatattcaactgtgaagaagaccctggtgatacctttctaaaaaggtggagtcttccgggattcctggggtccagccacacttccctgggaaacctaagtccagaccccatgagctctcagccagctcttttaattgacacagaaacatcctcagagatcagtgggatcaacattgtggctggctctcgagtctcttctgatatgctgtatttaatggaaaacctggacaccaaggaaacagatatcatagagctgaacaaggaaactgaggaatcacccaaatgagtgccaccaagttctaggacctggttctagcctagattcttacctccccaaaagcagcatattaggcccaggacatacctgaaggctggtcgactttttaaaaaacatgatcacactgtataagctacttagaactttgaagggcattatgatcctgactttttgagagctgcgaaaaatcaaacgcattcacgtcatccaacacaacatggctttcatcagaagttacacagaccacagtgatttagccaaataagtcttaaccaaaaaaaggaatctgaaaaacatacatgacttataaattcatagattattagttgtggaaagagtctcatagatcatagtccaatcccctagacccaaaggcccagacacgcagggttctctatttctcttcttttttctctttctttttttctttagccataaagaaaggagatggatcacctaatgcctgaaagatcccctccttcctaacgtttttgtttgaggctttctaaccatctcattcctacttttataactattattgttattatcacttcctgattcttaagcttcatcagcaccagaacacttaattctcttcaatttccttttttacttttctctcttttccttttattctgtcatcctttttttcccttcccttctccctggttgtgctgcttttctagtaatctgtcccatttttcaggttataatatttcctcttgccaaatctgttgcttatgtcttgccatgaatttcaaaatataagacattggcaaagcctcctacagaatcatcaaaggtgtcaacaaatccagcctgatacccttccagtctcacttccagtggaaggcatataggagtgatggttccccccgtgcccttgcagccattgacatttctttctgcttccactatttggtgttgggcactggagaaaaacgaagccaagagaatatgaaatttgcatagccaaatgctatggaaccaaagaataagatgactcacatctgtttaacttgaactcttatgcaaaaatcctaatcgtgtcgcaacacgggaccagttactgtgtctatcgggtcatttgggaatgggcaggatactggagctgggaggctaatggggtccagagctgcataatggggatcggatgttggtactcctcccagggagctctcaggacagctgtttgtcgtgggctcccaagtgcctaggccatgccttacgactgctgcacttaccatttgtcatatgatggcacttgactacatatggctttagaaataaaataaccctcaaaacta

SEQ ID NO: 2193 - DNA, 3532 bp, Homo sapiens
  source 1..3532: mol_type = unassigned DNA
ataaacaggcctctacaagtggaaaaacatttaacccctgttcttgtcacactctgggtcctctcagtggccagagaacagaaagaaaatctgactgtgcacgagcgaagggtgacaccgggcgtgcagcaccgacctgaaggcacctcttcgggggagcccgaaatttgaagattctctttcctgtcggagactacaaaccaaataaatagaaaaaactatccaagatgactgtcacttactccagtaaagtagcaaatgcaactttttttggatttcataggttactcctcaagtggagaggcagcatctacaaactactgtacagggaatttattgtttttgctgttctttatacagcaataagtttggtatacagattgttacttacaggagtccaaaaacgttactttgaaaaattatcaatttactgtgacagatatgctgaacaaattccagtaacctttgtgcttgggttttatgttactctggtagtgaaccgatggtggaaccagtttgtgaatttgccctggccagacaggctaatgttcctcatctctagcagtgttcacggaagcgacgagcacgggcgcctgcttagaaggacgctgatgcgctacgtcaatctcacctccctgctcatctttcgctcggtgagcactgctgtgtacaaaagatttcccacaatggaccacgtggttgaagcaggttttatgacaacagatgaaaggaaattattcaaccacctcaagtctcctcatctgaaatattgggttccattcatctggtttggaaatcttgcaactaaagcccggaatgaaggtagaatcagagacagtgttgatctgcaatcattgatgactgaaatgaatcgataccgctcttggtgcagcctcttattcggttatgactgggttgggattccgctggtttacacccaggttgtcactcttgctgtctataccttcttctttgcgtgcctgattggacgccagtttttggatcccaccaaaggctacgcagggcatgacttggatctttacattcccatcttcaccctcctacaattcttcttctatgcaggatggcttaaggtagcagagcagcttatcaacccttttggagaagatgatgatgattttgaaactaactggtgcattgacagaaatttgcaggtctctcttttagctgtggacgaaatgcacatgagcttacccaagatgaagaaggacatttactgggacgattctgctgctcgcccaccatacacattggcagctgctgactactgcataccctcatttctggggtcaacagtccagatggggctgtctgggtccgactttcctgacgaggagtggctgtgggattatgagaagcatggccatcggcattccatgataagaagagtcaagcggttcctgagtgcccacgaacacccctccagccccagaagaagaagctacaggaggcagacaagtgacagctccatgttcttaccccgagatgacctcagcccagccagggacctactggatgtgccctcaagaaacccccccagggcctcacccacctggaagaaatcctgcttcccagaaggaagccccacgctgcacttcagcatgggagagctgtccaccatcagggagaccagccagacaagcactttacagagcctgaccccacagtccagtgtgagaacttcccccatcaaaatgccactggtacctgaggtattgatcacagcagccgaagcaccagtgcccacatcagggggctaccaccatgattccgctacctccatcttgagctctgagtttacaggggttcagccaagcaagactgagcagcagcagggccccatgggatccatcctgtctccctcagagaaggagacacctcctggaggccccagtccccagacagtttcagccagcgctgaggaaaatatattcaactgtgaagaagaccctggtgatacctttctaaaaaggtggagtcttccgggattcctggggtccagccacacttccctgggaaacctaagtccagaccccatgagctctcagccagctcttttaattgacacagaaacatcctcagagatcagtgggatcaacattgtggctggctctcgagtctcttctgatatgctgtatttaatggaaaacctggacaccaaggaaacagatatcatagagctgaacaaggaaactgaggaatcacccaaatgagtgccaccaagttctaggacctggttctagcctagattcttacctccccaaaagcagcatattaggcccaggacatacctgaaggctggtcgactttttaaaaaacatgatcacactgtataagctacttagaactttgaagggcattatgatcctgactttttgagagctgcgaaaaatcaaacgcattcacgtcatccaacacaacatggctttcatcagaagttacacagaccacagtgatttagccaaataagtcttaaccaaaaaaaggaatctgaaaaacatacatgacttataaattcatagattattagttgtggaaagagtctcatagatcatagtccaatcccctagacccaaaggcccagacacgcagggttctctatttctcttcttttttctctttctttttttctttagccataaagaaaggagatggatcacctaatgcctgaaagatcccctccttcctaacgtttttgtttgaggctttctaaccatctcattcctacttttataactattattgttattatcacttcctgattcttaagcttcatcagcaccagaacacttaattctcttcaatttccttttttacttttctctcttttccttttattctgtcatcctttttttcccttcccttctccctggttgtgctgcttttctagtaatctgtcccatttttcaggttataatatttcctcttgccaaatctgttgcttatgtcttgccatgaatttcaaaatataagacattggcaaagcctcctacagaatcatcaaaggtgtcaacaaatccagcctgatacccttccagtctcacttccagtggaaggcatataggagtgatggttccccccgtgcccttgcagccattgacatttctttctgcttccactatttggtgttgggcactggagaaaaacgaagccaagagaatatgaaatttgcatagccaaatgctatggaaccaaagaataagatgactcacatctgtttaacttgaactcttatgcaaaaatcctaatcgtgtcgcaacacgggaccagttactgtgtctatcgggtcatttgggaatgggcaggatactggagctgggaggctaatggggtccagagctgcataatggggatcggatgttggtactcctcccagggagctctcaggacagctgtttgtcgtgggctcccaagtgcctaggccatgccttacgactgctgcacttaccatttgtcatatgatggcacttgactacatatggctttagaaataaaataaccctcaaaacta

SEQ ID NO: 2194 - DNA, 2929 bp, Homo sapiens
  source 1..2929: mol_type = unassigned DNA
ccgacctgaaggcacctcttcgggggagcccgaaatttgaagattctctttcctgtcggagactacaaaccaaataaatagggttttatgttactctggtagtgaaccgatggtggaaccagtttgtgaatttgccctggccagacaggctaatgttcctcatctctagcagtgttcacggaagcgacgagcacgggcgcctgcttagaaggacgctgatgcgctacgtcaatctcacctccctgctcatctttcgctcggtgagcactgctgtgtacaaaagatttcccacaatggaccacgtggttgaagcaggttttatgacaacagatgaaaggaaattattcaaccacctcaagtctcctcatctgaaatattgggttccattcatctggtttggaaatcttgcaactaaagcccggaatgaaggtagaatcagagacagtgttgatctgcaatcattgatgactgaaatgaatcgataccgctcttggtgcagcctcttattcggttatgactgggttgggattccgctggtttacacccaggttgtcactcttgctgtctataccttcttctttgcgtgcctgattggacgccagtttttggatcccaccaaaggctacgcagggcatgacttggatctttacattcccatcttcaccctcctacaattcttcttctatgcaggatggcttaaggtagcagagcagcttatcaacccttttggagaagatgatgatgattttgaaactaactggtgcattgacagaaatttgcaggtctctcttttagctgtggacgaaatgcacatgagcttacccaagatgaagaaggacatttactgggacgattctgctgctcgcccaccatacacattggcagctgctgactactgcataccctcatttctggggtcaacagtccagatggggctgtctgggtccgactttcctgacgaggagtggctgtgggattatgagaagcatggccatcggcattccatgataagaagagtcaagcggttcctgagtgcccacgaacacccctccagccccagaagaagaagctacaggaggcagacaagtgacagctccatgttcttaccccgagatgacctcagcccagccagggacctactggatgtgccctcaagaaacccccccagggcctcacccacctggaagaaatcctgcttcccagaaggaagccccacgctgcacttcagcatgggagagctgtccaccatcagggagaccagccagacaagcactttacagagcctgaccccacagtccagtgtgagaacttcccccatcaaaatgccactggtacctgaggtattgatcacagcagccgaagcaccagtgcccacatcagggggctaccaccatgattccgctacctccatcttgagctctgagtttacaggggttcagccaagcaagactgagcagcagcagggccccatgggatccatcctgtctccctcagagaaggagacacctcctggaggccccagtccccagacagtttcagccagcgctgaggaaaatatattcaactgtgaagaagaccctggtgatacctttctaaaaaggtggagtcttccgggattcctggggtccagccacacttccctgggaaacctaagtccagaccccatgagctctcagccagctcttttaattgacacagaaacatcctcagagatcagtgggatcaacattgtggctggctctcgagtctcttctgatatgctgtatttaatggaaaacctggacaccaaggaaacagatatcatagagctgaacaaggaaactgaggaatcacccaaatgagtgccaccaagttctaggacctggttctagcctagattcttacctccccaaaagcagcatattaggcccaggacatacctgaaggctggtcgactttttaaaaaacatgatcacactgtataagctacttagaactttgaagggcattatgatcctgactttttgagagctgcgaaaaatcaaacgcattcacgtcatccaacacaacatggctttcatcagaagttacacagaccacagtgatttagccaaataagtcttaaccaaaaaaaggaatctgaaaaacatacatgacttataaattcatagattattagttgtggaaagagtctcatagatcatagtccaatcccctagacccaaaggcccagacacgcagggttctctatttctcttcttttttctctttctttttttctttagccataaagaaaggagatggatcacctaatgcctgaaagatcccctccttcctaacgtttttgtttgaggctttctaaccatctcattcctacttttataactattattgttattatcacttcctgattcttaagcttcatcagcaccagaacacttaattctcttcaatttccttttttacttttctctcttttccttttattctgtcatcctttttttcccttcccttctccctggttgtgctgcttttctagtaatctgtcccatttttcaggttataatatttcctcttgccaaatctgttgcttatgtcttgccatgaatttcaaaatataagacattggcaaagcctcctacagaatcatcaaaggtgtcaacaaatccagcctgatacccttccagtctcacttccagtggaaggcatataggagtgatggttccccccgtgcccttgcagccattgacatttctttctgcttccactatttggtgttgggcactggagaaaaacgaagccaagagaatatgaaatttgcatagccaaatgctatggaaccaaagaataagatgactcacatctgtttaacttgaactcttatgcaaaaatcctaatcgtgtcgcaacacgggaccagttactgtgtctatcgggtcatttgggaatgg

SEQ ID NO: 2195 - DNA, 1692 bp, Homo sapiens
  source 1..1692: mol_type = unassigned DNA
agtggccagagaacagaaagaaaatctgactgtgcacgagcgaagggtgacaccgggcgtgcagcaccgacctgaaggcacctcttcgggggagcccgaaatttgaagattctctttcctgtcggagactacaaaccaaataaatagggttttatgttactctggtagtgaaccgatggtggaaccagtttgtgaatttgccctggccagacaggctaatgttcctcatctctagcagtgttcacggaagcgacgagcacgggcgcctgcttagaaggacgctgatgcgctacgtcaatctcacctccctgctcatctttcgctcggttttatgacaacagatgaaaggaaattattcaaccacctcaagtctcctcatctgaaatattgggttccattcatctggtttggaaatcttgcaactaaagcccggaatgaaggtagaatcagagacagtgttgatctgcaatcattgatgactgaaatgaatcgataccgctcttggtgcagcctcttattcggttatgactgggttgggattccgctggtttacacccaggtagcagagcagcttatcaacccttttggagaagatgatgatgattttgaaactaactggtgcattgacagaaatttgcaggtctctcttttagctgtggacgaaatgcacatgagcttacccaagatgaagaaggacatttactgggacgattctgctgctcgcccaccatacacattggcagctgctgactactgcataccctcatttctggggtcaacagtccagatggggagatctcgcttcaaccctgttccctttgccgaatgtctcctaatccccatcagtgatggtttgtggcacttctcttccaaaggggcctctgaggctgaaaacctttccagacccaaagaaaaggaagactgaaagtggaatttcagtagttccagcaaataatgagaacgatttaggagccaggagatttgccttgttgcccgcaaagcacatcttagagaaggttgcctactccaggctagatttgcttctgcttctagctagccttctaagaccagacccacccacccagggctccttccaggccagagagctcatccctgccctcagtgtattctcagtttccatggataggaatctcttgttgtatgcatgtctcagccttcatgataccttctgcaggggcagagcttcatggacatccagcaatcatctcaattttcagaattaataagagctgttcttctgtgagtttgattttagataattaaatatgctttatccttttcctcactctcaccattgattaatgcaaagtacttgacgatttaacttgaaaagaaaagagaccagcaatactgatagaatcagagcatcattgtgataactctatttagactgcaaatgctccaaacactctatttcttatgtccattgagttgttgttaccccatggttaagataattttttgaaggtctcaaaatttttatcctgacctacttatttatcctaatcatcataattctgcagattactacataaatgttcatgttctttagcaaatattaaaacacatttctcttgtttctaaatacagaaacagaaatagggattgacaagatctcagagaaaattccttccccaaaagatcattgggaagattagatgagattgtaaa

SEQ ID NO: 2196 - DNA, 720 bp, Homo sapiens
  source 1..720: mol_type = unassigned DNA
aggcacaaatgacattttttttctggaaggcaaaatcagaagatatggataataatatatttttgtcctccaacctctaaaaaggctaaaattcagctaaaagcatcagtgtcaccaacgtgtctgctgtaagaaactgctttataatttcctgttattctacagggttttatgttactctggtagtgaaccgatggtggaaccagtttgtgaatttgccctggccagacaggctaatgttcctcatctctagcagtgttcacggaagcgacgagcacgggcgcctgcttagaaggacgctgatgcgctacgtcaatctcacctccctgctcatctttcgctcggtgagcactgctgtgtacaaaagatttcccacaatggaccacgtggttgaagcaggttttatgacaacagatgaaaggaaattattcaaccacctcaagtctcctcatctgaaatattgggttccattcatctggtttggaaatcttgcaactaaagcccggaatgaaggtagaatcagagacagtgttgatctgcaatcattgatgactgaaatgaatcgataccgctcttggtgcagcctcttattcggttatgactgggttgggattccgctggtttacacccaggtagcagagcagcttatcaacccttttggagaagatgatgatgattttgaaactaactggtgcattgacagaaatttgcaggtctctc

SEQ ID NO: 2197 - DNA, 572 bp, Homo sapiens
  source 1..572: mol_type = unassigned DNA
aaagaaaatctgactgtgcacgagcgaagggtgacaccgggcgtgcagcaccgacctgaaggcacctcttcgggggagcccgaaatttgaagattctctttcctgtcggagactacaaaccaaataaatagaaaaaactatccaagatgactgtcacttactccagtaaagtagcaaatgcaactttttttggatttcataggttactcctcaagtggagaggcagcatctacaaactactgtacagggaatttattgtttttgctgttctttatacagcaataagtttggtatacagattgttacttacaggagtccaaaaacgttactttgaaaaattatcaatttactgtgacagatatgctgaacaaattccagtaacctttgtgcttggttttatgacaacagatgaaaggaaattattcaaccacctcaagtctcctcatctgaaatattgggttccattcatctggtttggaaatcttgcaactaaagcccggaatgaaggtagaatcagagacagtgttgatctgcaatcattgatgactgaaatgaatcgataccgctcttgg

SEQ ID NO: 2198 - DNA, 1876 bp, Homo sapiens
  source 1..1876: mol_type = unassigned DNA
atcagcagctgttgcttctgtttgttcccagctataactgtcatcagtggctaaactggcataaacaggcctctacaagtggaaaaacatttaacccctgttcttgtcacactctgggtcctctcagtggccagagaacagaaagaaaatctgactgtgcacgagcgaagggtgacaccgggcgtgcagcaccgacctgaaggcacctcttcgggggagcccgaaatttgaagattctctttcctgtcggagactacaaaccaaataaatagggttttatgttactctggtagtgaaccgatggtggaaccagtttgtgaatttgccctggccagacaggctaatgttcctcatctctagcagtgttcacggaagcgacgagcacgggcgcctgcttagaaggacgctgatgcgctacgtcaatctcacctccctgctcatctttcgctcggtgagcactgctgtgtacaaaagatttcccacaatggaccacgtggttgaagcagaaagaactggcatgaaacccattctgccttcaagttttgagatgcagagcttttagttcctctgctaatagagcctcgtttgaatactctgcttgaaaggcaaaagacatctgcctcaacttcaatcaaggaaaaatagagcaactgtacagcaggcagaatctctatgatgactggaattttgtctatcaatggatgtaattaatcctttggctcgagggcaataaaattttgtcttaaagtagcagatcctgctccatcaaaccacaactcaattgggagtaaatgcaaacatgtatctatattgagagatagattttactctgattagaaagatgaaggagggatttggggataaacaatatgaaaattgctgagcagagctgagccagccagaagaaaaagcgatagcaagagaaactgtaggcagatgcaacggcaggataaaatagctatgccaggggtgtgatggggcctgaggagagcatggcatggagacagacacgtgcagggaaccaagtggtgggaggacaagcccactcagagtgttgccgaactgtagcaaatcagtaactataattagcacagcctcagcaatgacaataatgatcatattctgaaaaaaatattggtctctgcttaaaatggcttgaagtcctgatgagggtgacattccatttcataacaaatacttttggaatggacttgaccaacaacctagagattttctttcagttgaccgactttgatttccaaaggtggagttacttttgtgaacccccaaaatctgagacaggtctcagttaatttagaaagtttattttgccaaggttgaggatgtgcacccgtgacacagcctcaggtggtcctgatgacgtgtgcccaaagcggtcagaacagtttggttttatgcattgtaggaagacatgagacatcgatcaacatatgtaagataaacattggttcagtctggaaaagccagagatgactcaaagtggggagggggcttccgggtcataggtaggtaagagacaaatggttgcattcttctgggtttctgattagtctctccaaaggaggcaatcagatatgcatttatctcagtgaatggagcaatgactttaatagaatgggaggcatgtatgccgtaagcagttcccaacttgacttttccctttagcttagtgattttggggacccaagatattttcctttcacactttggataagtaagatgtgtgaccctgcaaggaataacaaaaattattctgcttatatattcttagaggatacattaatgtctcagtgattgtcattcatctttcacagcacccagcaaaatactcaataaatttgtgctaaaaacaaaa

SEQ ID NO: 2199 - DNA, 386 bp, Homo sapiens
  source 1..386: mol_type = unassigned DNA
cctccgccactctctgactgtcctttgcctgtgccaaggtttctgggaagaacaggaagttcagggatggcggaaaatgtttggcagattccctgagtccaaagccggagcacctgctcctgcctgagggcagagaggactgaaagaactggcatgaaacccattctgccttcaagttttgagatgcagagcttttagttcctctgctaatagagcctcgtttgaatactctgcttgaaaggcaaaagacatctgcctcaacttcaatcaaggaaaaatagagcaactgtacagcaggcagaatctctatgatgactggaattttgtctatcaatggatgtaattaatcctttggctcgagggcaataaaattttgtcttaaagta

SEQ ID NO: 2200 - DNA, 721 bp, Homo sapiens
  source 1..721: mol_type = unassigned DNA
gaaaaacatttaacccctgttcttgtcacactctgggtcctctcagtggccagagaacagaaagaaaatctgactgtgcacgagcgaagggtgacaccgggcgtgcagcaccgacctgaaggcacctcttcgggggagcccgaaatttgaagattctctttcctgtcggagactacaaaccaaataaatagattgttacttacaggagtccaaaaacgttactttgaaaaattatcaatttactgtgacagatatgctgaacaaattccagtaacctttgtgcttgggttttatgttactctggtagtgaaccgatggtggaaccagtttgtgaatttgccctggccagacaggctaatgttcctcatctctagcagtgttcacggaagcgacgagcacgggcgcctgcttagaaggacgctgatgcgctacgtcaatctcacctccctgctcatctttcgctcggtgagcactgctgtgtacaaaagatttcccacaatggaccacgtggttgaagcagaaagaactggcatgaaacccattctgccttcaagttttgagatgcagagcttttagttcctctgctaatagagcctcgtttgaatactctgcttgaaaggcaaaagacatctgcctcaacttcaatcaaggaaaaatagagcaactgtacagcaggcagaatctctatgatgactggaattttgtctatcaatggatgtaa

SEQ ID NO: 2201 - DNA, 670 bp, Homo sapiens
  source 1..670: mol_type = unassigned DNA
agagaacagaaagaaaatctgactgtgcacgagcgaagggtgacaccgggcgtgcagcaccgacctgaaggcacctcttcgggggagcccgaaatttgaagattctctttcctgtcggagactacaaaccaaataaatagattgttacttacaggagtccaaaaacgttactttgaaaaattatcaatttactgtgacagatatgctgaacaaattccagtaacctttgtgcttgggttttatgttactctggtagtgaaccgatggtggaaccagtttgtgaatttgccctggccagacaggctaatgttcctcatctctagcagtgttcacggaagcgacgagcacgggcgcctgcttagaaggacgctgatgcgctacgtcaatctcacctccctgctcatctttcgctcggtgagcactgctgtgtacaaaagatttcccacaatggaccacgtggttgaagcagagtctcactatgttgcctatgctggtcttgaactcctggcctcaagcaatcttcccaccatagcctcccaaagggctgggatttctggtgtgagccaccacacctggcctgccctggaatcttaatgtaaagattcttgactgtcttctatgactacagggagcctgatgagactccactggaattttcagtgacacttat

SEQ ID NO: 2202 - DNA, 2402 bp, Homo sapiens
  source 1..2402: mol_type = unassigned DNA
cctgcccagcctttagcctcccgcccgccgcctctgtctccctctctccacaaactgcccaggagtgagtagctgctttcggtccgccggacacaccggacagatagacgtgcggacggcccaccaccccagcccgccaactagtcagcctgcgcctggcgcctcccctctccaggtccatccgccatgtggcccctgtggcgcctcgtgtctctgctggccctgagccaggccctgccctttgagcagagaggcttctgggacttcaccctggacgatgggccattcatgatgaacgatgaggaagcttcgggcgctgacacctcgggcgtcctggacccggactctgtcacacccacctacagcgccatgtgtcctttcggctgccactgccacctgcgggtggttcagtgctccgacctgggtctgaagtctgtgcccaaagagatctcccctgacaccacgctgctggacctgcagaacaacgacatctccgagctccgcaaggatgacttcaagggtctccagcacctctacgccctcgtcctggtgaacaacaagatctccaagatccatgagaaggccttcagcccactgcggaagctgcagaagctctacatctccaagaaccacctggtggagatcccgcccaacctacccagctccctggtggagctccgcatccacgacaaccgcatccgcaaggtgcccaagggagtgttcagcgggctccggaacatgaactgcatcgagatgggcgggaacccactggagaacagtggctttgaacctggagccttcgatggcctgaagctcaactacctgcgcatctcagaggccaagctgactggcatccccaaagacctccctgagaccctgaatgaactccacctagaccacaacaaaatccaggccatcgaactggaggacctgcttcgctactccaagctgtacaggctgggcctaggccacaaccagatcaggatgatcgagaacgggagcctgagcttcctgcccaccctccgggagctccacttggacaacaacaagttggccagggtgccctcagggctcccagacctcaagctcctccaggtggtctatctgcactccaacaacatcaccaaagtgggtgtcaacgacttctgtcccatgggcttcggggtgaagcgggcctactacaacggcatcagcctcttcaacaaccccgtgccctactgggaggtgcagccggccactttccgctgcgtcactgaccgcctggccatccagtttggcaactacaaaaagtagaggcagctgcagccaccgcggggcctcagtgggggtctctggggaacacagccagacatcctgatggggaggcagagccaggaagctaagccagggcccagctgcgtccaacccagccccccacctcgggtccctgaccccagctcgatgccccatcaccgcctctccctggctcccaagggtgcaggtgggcgcaaggcccggcccccatcacatgttcccttggcctcagagctgcccctgctctcccaccacagccacccagaggcaccccatgaagcttttttctcgttcactcccaaacccaagtgtccaaggctccagtcctaggagaacagtccctgggtcagcagccaggaggcggtccataagaatggggacagtgggctctgccagggctgccgcacctgtccagacacacatgttctgttcctcctcctcatgcatttccagcctttcaaccctccccgactctgcggctcccctcagcccccttgcaagttcatggcctgtccctcccagacccctgctccactggcccttcgaccagtcctcccttctgttctctctttccccgtccttcctctctctctctctctctctctctctctctttctgtgtgtgtgtgtgtgtgtgtgtgtgtgtgtgtgtgtgtgtgtgtcttgtgcttcctcagacctttctcgcttctgagcttggtggcctgttccctccatctctccgaacctggcttcgcctgtccctttcactccacaccctctggccttctgccttgagctgggactgctttctgtctgtccggcctgcacccagcccctgcccacaaaaccccagggacagcagtctccccagcctgccctgctcaggccttgcccccaaacctgtactgtcccggaggaggttgggaggtggaggcccagcatcccgcgcagatgacaccatcaaccgccagagtcccagacaccggttttcctagaagcccctcacccccactggcccactggtggctaggtctccccttatccttctggtccagcgcaaggaggggctgcttctgaggtcggtggctgtctttccattaaagaaacaccgtgcaacgtggctccgtg

SEQ ID NO: 2203 - DNA, 2225 bp, Homo sapiens
  source 1..2225: mol_type = unassigned DNA
tctctccacaaactgcccaggagtgagtagctgctttcggtccgccggacacaccggacagatagacgtgcggacggcccaccaccccagcccgccaactagtcagcctgcgcctggcgcctcccctctccaggtccatccgccatgtggcccctgtggcgcctcgtgtctctgctggccctgagccaggccctgccctttgagcagagaggcttctgggacttcaccctggacgatgggccattcatgatgaacgatgaggaagcttcgggcgctgacacctcgggcgtcctggacccggactctgtcacacccacctacagcgccatgtgtcctttcggctgccactgccacctgcgggtggttcagtgctccgacctgggtctgaagtctgtgcccaaagagatctcccctgacaccacgctgctggacctctgcagaagctctacatctccaagaaccacctggtggagatcccgcccaacctacccagctccctggtggagctccgcatccacgacaaccgcatccgcaaggtgcccaagggagtgttcagcgggctccggaacatgaactgcatcgagatgggcgggaacccactggagaacagtggctttgaacctggagccttcgatggcctgaagctcaactacctgcgcatctcagaggccaagctgactggcatccccaaagacctccctgagaccctgaatgaactccacctagaccacaacaaaatccaggccatcgaactggaggacctgcttcgctactccaagctgtacaggctgggcctaggccacaaccagatcaggatgatcgagaacgggagcctgagcttcctgcccaccctccgggagctccacttggacaacaacaagttggccagggtgccctcagggctcccagacctcaagctcctccaggtggtctatctgcactccaacaacatcaccaaagtgggtgtcaacgacttctgtcccatgggcttcggggtgaagcgggcctactacaacggcatcagcctcttcaacaaccccgtgccctactgggaggtgcagccggccactttccgctgcgtcactgaccgcctggccatccagtttggcaactacaaaaagtagaggcagctgcagccaccgcggggcctcagtgggggtctctggggaacacagccagacatcctgatggggaggcagagccaggaagctaagccagggcccagctgcgtccaacccagccccccacctcgggtccctgaccccagctcgatgccccatcaccgcctctccctggctcccaagggtgcaggtgggcgcaaggcccggcccccatcacatgttcccttggcctcagagctgcccctgctctcccaccacagccacccagaggcaccccatgaagcttttttctcgttcactcccaaacccaagtgtccaaggctccagtcctaggagaacagtccctgggtcagcagccaggaggcggtccataagaatggggacagtgggctctgccagggctgccgcacctgtccagacacacatgttctgttcctcctcctcatgcatttccagcctttcaaccctccccgactctgcggctcccctcagcccccttgcaagttcatggcctgtccctcccagacccctgctccactggcccttcgaccagtcctcccttctgttctctctttccccgtccttcctctctctctctctctctctctctctctctttctgtgtgtgtgtgtgtgtgtgtgtgtgtgtgtgtgtgtgtgtgtgtcttgtgcttcctcagacctttctcgcttctgagcttggtggcctgttccctccatctctccgaacctggcttcgcctgtccctttcactccacaccctctggccttctgccttgagctgggactgctttctgtctgtccggcctgcacccagcccctgcccacaaaaccccagggacagcagtctccccagcctgccctgctcaggccttgcccccaaacctgtactgtcccggaggaggttgggaggtggaggcccagcatcccgcgcagatgacaccatcaaccgccagagtcccagacaccggttttcctagaagcccctcacccccactggcccactggtggctaggtctccccttatccttctggtccagcgcaaggaggggctgcttctgaggtcggtggctgtctttccattaaagaaacaccgtgcaacgtg

SEQ ID NO: 2204 - DNA, 2278 bp, Homo sapiens
  source 1..2278: mol_type = unassigned DNA
tctccacaaactgcccaggagtgagtagctgctttcggtccgccggacacaccggacagatagacgtgcggacggcccaccaccccagcccgccaactagtcagcctgcgcctggcgcctcccctctccaggtccatccgccatgtggcccctgtggcgcctcgtgtctctgctggccctgagccaggccctgccctttgagcagagaggcttctgggacttcaccctggacgatgggccattcatgatgaacgatgaggaagcttcgggcgctgacacctcgggcgtcctggacccggactctgtcacacccacctacagcgccatgtagatctcccctgacaccacgctgctggacctgcagaacaacgacatctccgagctccgcaaggatgacttcaagggtctccagcacctctacgccctcgtcctggtgaacaacaagatctccaagatccatgagaaggccttcagcccactgcggaagctgcagaagctctacatctccaagaaccacctggtggagatcccgcccaacctacccagctccctggtggagctccgcatccacgacaaccgcatccgcaaggtgcccaagggagtgttcagcgggctccggaacatgaactgcatcgagatgggcgggaacccactggagaacagtggctttgaacctggagccttcgatggcctgaagctcaactacctgcgcatctcagaggccaagctgactggcatccccaaagacctccctgagaccctgaatgaactccacctagaccacaacaaaatccaggccatcgaactggaggacctgcttcgctactccaagctgtacaggctgggcctaggccacaaccagatcaggatgatcgagaacgggagcctgagcttcctgcccaccctccgggagctccacttggacaacaacaagttggccagggtgccctcagggctcccagacctcaagctcctccaggtggtctatctgcactccaacaacatcaccaaagtgggtgtcaacgacttctgtcccatgggcttcggggtgaagcgggcctactacaacggcatcagcctcttcaacaaccccgtgccctactgggaggtgcagccggccactttccgctgcgtcactgaccgcctggccatccagtttggcaactacaaaaagtagaggcagctgcagccaccgcggggcctcagtgggggtctctggggaacacagccagacatcctgatggggaggcagagccaggaagctaagccagggcccagctgcgtccaacccagccccccacctcgggtccctgaccccagctcgatgccccatcaccgcctctccctggctcccaagggtgcaggtgggcgcaaggcccggcccccatcacatgttcccttggcctcagagctgcccctgctctcccaccacagccacccagaggcaccccatgaagcttttttctcgttcactcccaaacccaagtgtccaaggctccagtcctaggagaacagtccctgggtcagcagccaggaggcggtccataagaatggggacagtgggctctgccagggctgccgcacctgtccagacacacatgttctgttcctcctcctcatgcatttccagcctttcaaccctccccgactctgcggctcccctcagcccccttgcaagttcatggcctgtccctcccagacccctgctccactggcccttcgaccagtcctcccttctgttctctctttccccgtccttcctctctctctctctctctctctctctctctttctgtgtgtgtgtgtgtgtgtgtgtgtgtgtgtgtgtgtgtgtgtgtcttgtgcttcctcagacctttctcgcttctgagcttggtggcctgttccctccatctctccgaacctggcttcgcctgtccctttcactccacaccctctggccttctgccttgagctgggactgctttctgtctgtccggcctgcacccagcccctgcccacaaaaccccagggacagcagtctccccagcctgccctgctcaggccttgcccccaaacctgtactgtcccggaggaggttgggaggtggaggcccagcatcccgcgcagatgacaccatcaaccgccagagtcccagacaccggttttcctagaagcccctcacccccactggcccactggtggctaggtctccccttatccttctggtccagcgcaaggaggggctgcttctgaggtcggtggctgtctttccattaaagaaacaccgtgcaacgtg

SEQ ID NO: 2205 - DNA, 846 bp, Homo sapiens
  source 1..846: mol_type = unassigned DNA
ctgcccaggagtgagtagctgctttcggtccgccggacacaccggacagatagacgtgcggacggcccaccaccccagcccgccaactagtcagcctgcgcctggcgcctcccctctccaggtccatccgccatgtggcccctgtggcgcctcgtgtctctgctggccctgagccaggccctgccctttgagcagagaggcttctgggacttcaccctggacgatgggccattcatgatgaacgatgaggaagcttcgggcgctgacacctcgggcgtcctggacccggactctgtcacacccacctacagcgccatgtgtcctttcggctgccactgccacctgcgggtggttcagtgctccgacctgggtctgaagtctgtgcccaaagagatctcccctgacaccacgctgctggacctgcagaacaacgacatctccgagctccgcaaggatgacttcaagggtctccagcacctctacgtaaggagctgggaggaaccagcaggcctacagcagagggcaggggtccgggccctcgtcctggtgaacaacaagatctccaagatccatgagaaggccttcagcccactgcggaagctgcagaagctctacatctccaagaaccacctggtggagatcccgcccaacctacccagctccctggtggagctccgcatccacgacaaccgcatccgcaaggtgcccaagggagtgttcagcgggctccggaacatgaactgcatcgagatgggcgggaacccactggagaacagtggctttgaacctggagccttcgatggcctgaagctcaactacctgcgcatctcagaggccaagctgact

SEQ ID NO: 2206 - DNA, 420 bp, Homo sapiens
  source 1..420: mol_type = unassigned DNA
gtcctggtgaacaacaagatctccaagatccatgagaaggccttcagcccactgcggaagctgcagaagctctacatctccaagaaccacctggtggagatcccgcccaacctacccagctccctggtggagctccgcatccacgacaaccgcatccgcaaggtgcccaagggagtgttcagcgggctccggaacatgaactgcatcgagatgggcgggaacccactggagaacagtggctttgaacctggagccttcgatggcctgaagctcaactacctgcgcatctcagagctgcccctgctctcccaccacagccacccagaggcaccccatgaagcttttttctcgttcactcccaaacccaagtgtccaaggctccagtcctaggagaacagtccctgggtcagcagccaggag

SEQ ID NO: 2207 - DNA, 3262 bp, Homo sapiens
  source 1..3262: mol_type = unassigned DNA
aaaagactcccccgtctgtggcggcggctgtttgatgggtccggaaatctcttgaaggtgaatccaagcaagataaacggtgcggagaggaggcgcggggctgggctcagagcggcggcggcggcggctccactccctccgcgcccaccctcccaccatgcggggccgcggcccatggtgagccccagcagccagcaccatcggctggagacgaagaagaagaagaagaggaggcggcgagcgcgggggaaggcgaaaaagaaaaagaaagaaggggagagggctcccggcagcaccaggaccgacgcgcgcaccagctccggagcccagctcgcgcgcgtctgtggggccgcctgactccggggccgaggcggcggcggcggcagcgggcgcggcggcccgggctgcgcgccggcgcgggaccatggagcgcgggatgcacctcggtgcagcggccgccggcgaggacgacctcttcctgcacaagagcctgagcgcctccacctccaagcgcttggaagcggctttccgctccacgcccccgggcatggacctgtccctggcgccgccgcctcgggaacgcccggcgtcctcctcctcgtcgcccctgggctgcttcgagccggctgaccccgagggggcagggctgctgttgccgccgcctggaggaggcggcggcggcagcgcgggaagtggcggcggcggcggcggcggggtgggtgtccccgggctgctagtaggttcagccggcgttgggggcgaccctagcctaagcagcctgccggccggggccgccctttgcctcaagtacggcgaaagcgcgagccggggctcggtggccgagagcagcggcggcgagcagagccccgacgacgacagcgacggtcgctgcgagctcgtgctgcgggccggagtagccgacccgcgggcctccccgggagcgggaggtggtggcgcgaaggcagccgagggctgctccaatgcccacctccacggcggcgccagcgtccccccggggggcctgggcggcggcggcggcgggggtagcagcagcggtagcagtggcggcggtggcggtagcggtagcggcagcggcggcagcagcagcagcagcagcagcagcagcaagaaatccaaagagcaaaaggcgctgcggcttaacatcaatgcccgagagcgccggcggatgcacgacctgaacgacgcgctggacgagctgcgcgcggtgatcccctacgcgcacagcccctcggtgcgaaagctctccaagatcgccacgctgctgctcgccaagaactacatcctcatgcaggcgcaggccctggaggagatgcggcgcctagtcgcctacctcaaccagggccaggccatctcggctgcctccctgcccagctcggcggctgcagcggcagcagctgctgccctgcacccggcgctcggcgcctacgagcaggcagccggctacccgttcagcgccggactgcccccggctgcctcctgcccggagaagtgcgccctgtttaacagcgtctcctccagcctctgcaaacagtgcacggagaagccttaaacacacccccgaaaaacacaagaccgacccaaaatctagaggaaagcgaaaagctgctccccaccccctttattttggtcctctcgtagttgtgaaacacttgcagagcaaacaaagcagaggcaagaactgaggagaagtatcagagacaaacgggacttttagccttgacatccccagaatctcggtctttggggtggggagggagggaggagggaggtggagttgggatggagtatggatgtcttttttttctcagaaaagtggcaactttggtggcagcctagaccgcgaggaagtggaatcttccttaaaggtgaaacataagttgagaagtagtgcttggttattaagcctggagagtgtttgaatggcaaaatactaatcctactaataattgtggatttggctagtgctgagggggagaggaggggttaggggttgggtagcatgagagatggaatattcattcagacaaatcagaaagggcacttgaaaataaattttgattctgagccaggagaaaaacttgaaatgttgacttaagtgagggggaaataaaacccagagagagagagagagcgagagagagagacatgttactatgaaagacttgtattttttattgtctctgaactttaatcctgtgaaaatgctcaaagttttggcgagagtgatataaaaaaactgactgtggctgaaagaattgcatttaaaaatatttatgtgcaccttgttactttctactctgcaatgatgtattaacaattcatggtatttatttgttattcttcaatgacccttccacatcaacagtatttatcatgtgttaaagtcatgggtcttatgtgcagatttttttaatgcctctaaaattgttttatagattacttatgctgtgtgccaagtgtttaaaggtttatttgccaacaagtatgaagagaaatattgatgtatctgagctgcttaggtttatgaaaggtcacctggatattttcagttgcatcatccctgtatttaaattgagctttaataaattgcttcagtccaaaaattacaggaaaggtgtattcttaattgatgaatgaattgatctcttttttgaaaggggactcctttacattccaaaagggaaaaacatcacagcaatagttgctatacgtaagaacatgctaagcaaatatttttccaggctgtgctgtgcatttttaaaaggtctaatttaattgcttttaatatatatgtacatatatgttattttaactgtggagaattatttaagttaaaagactggtttgatttgcctatggtgtgaaatcctttgttatttttctaaaaaaataaaatttaaaaagaaagaaaactaaggaagaacaagaagctatttacccaaagtgagctttcagttttagttttgcatggctgtttgactgcctttccgccctatgaaaatcaagaaaatcttttttaaaaatggagtcctgctattttccactccttgcagataatacaaattcagtttgtcaggttggatggtgagttgggagctgtgatggatctgttggcgggttttggatgtgtaaagaatgatatatatattaaataggtcaatcagactatgacagctatgtacgaccatttgtatgtgtatctatgtcagaaagaatctttattaaaatattttgatcaaac

SEQ ID NO: 2208 - DNA, 3473 bp, Homo sapiens
  source 1..3473: mol_type = unassigned DNA
gcggccgcagccgcagacacctgggggccggggctgggggtgggggctccctagcagccgccggagcgttgtccaacacgtgagactcatgtgatgaagccgggggagggcgggcaggtcgctccttccctccccggcagtggccagacgtgcctggagtcacagggtagaacacgtagctccaacccacccactcgctcccatttaacccagcccgcagcctctccattactcctcggcttgcccccccacccccccactccgccctaaccgcccccccctcacccgctccctcccgcctccccgcccgccccacttctcattcacttggctcgcacggcgcagacagaccgcgcagggagcacacaccgccagtctgtgcgctgagtcggagccagaggccgcggggacaccgggccatgcacgcccccaactgaagctgcatctcaaagccgaagattccagcagcccaggggatttcaaagagctcagactcagaggaacatctgcggagagacccccgaagccctctccagggcagtcctcatccagacgctccgctagtgcagacaggagcgcgcagtggccccggctcgccgcgccatggagcggatccccagcgcgcaaccaccccccgcctgcctgcccaaagcaccgggactggagcacggagacctaccagggatgtaccctgcccacatgtaccaagtgtacaagtcaagacggggaataaagcggagcgaggacagcaaggagacctacaaattgccgcaccggctcatcgagaaaaagagacgtgaccggattaacgagtgcatcgcccagctgaaggatctcctacccgaacatctcaaacttacaactttgggtcacttggaaaaagcagtggttcttgaacttaccttgaagcatgtgaaagcactaacaaacctaattgatcagcagcagcagaaaatcattgccctgcagagtggtttacaagctggtgagctgtcagggagaaatgtcgaaacaggtcaagagatgttctgctcaggtttccagacatgtgcccgggaggtgcttcagtatctggccaagcacgagaacactcgggacctgaagtcttcgcagcttgtcacccacctccaccgggtggtctcggagctgctgcagggtggtacctccaggaagccatcagacccagctcccaaagtgatggacttcaaggaaaaacccagctctccggccaaaggttcggaaggtcctgggaaaaactgcgtgccagtcatccagcggactttcgctcactcgagtggggagcagagcggcagcgacacggacacagacagtggctatggaggagaatcggagaagggcgacttgcgcagtgagcagccgtgcttcaaaagtgaccacggacgcaggttcacgatgggagaaaggatcggcgcaattaagcaagagtccgaagaaccccccacaaaaaagaaccggatgcagctttcggatgatgaaggccatttcactagcagtgacctgatcagctccccgttcctgggcccacacccacaccagcctcctttctgcctgcccttctacctgatcccaccttcagcgactgcctacctgcccatgctggagaagtgctggtatcccacctcagtgccagtgctatacccaggcctcaacgcctctgccgcagccctctctagcttcatgaacccagacaagatctcggctcccttgctcatgccccagagactcccttctcccttgccagctcatccgtccgtcgactcttctgtcttgctccaagctctgaagccaatcccccctttaaacttagaaaccaaagactaaactctctaggggatcctgctgctttgctttccttcctcgctacttcctaaaaagcaacaaaaaagtttttgtgaatgctgcaagattgttgcattgtgtatactgagataatctgaggcatggagagcagattcagggtgtgtgtgtgtgtgtgtgtgtgtgtatgtgcgtgtgcgtgcacatgtgtgcctgcgtgttggtataggactttaaagctccttttggcatagggaagtcacgaaggattgcttgacatcaggagacttgggggggattgtagcagacgtctgggcttttccccacccagagaatagcccccttcgatacacatcagctggattttcaaaagcttcaaagtcttggtctgtgagtcactcttcagtttgggagctgggtctgtggctttgatcagaaggtactttcaaaagagggctttccagggctcagctcccaaccagctgttaggaccccacccttttgcctttattgtcgacgtgactcaccagacgtcggggagagagagcagtcagaccgagctttctgctaacatggggaggtagcaggcactggcatagcacggtagtggtttggggaggtttccgcaggtctgctccccacccctgcctcggaagaataaagagaatgtagttccctactcaggctttcgtagtgattagcttactaaggaactgaaaatgggccccttgtacaagctgagctgccccggagggagggaggagttccctgggcttctggcacctgtttctaggcctaaccattagtacttactgtgcagggaaccaaaccaaggtctgagaaatgcggacaccccgagcgagcaccccaaagtgcacaaagctgagtaaaaagctgcccccttcaaacagaactagactcagttttcaattccatcctaaaactccttttaaccaagcttagcttctcaaaggcctaaccaagccttggcaccgccagatcctttctgtaggctaattcctcttgcccaacggcatatggagtgtccttattgctaaaaaggattccgtctccttcaaagaagttttatttttggtccagagtacttgttttcccgatgtgtccagccagctccgcagcagcttttcaaaatgcactatgcctgattgctgatcgtgttttaactttttcttttcctgtttttattttggtattaagtcgttgcctttatttgtaaagctgttataaatatatattatataaatatattaaaaaggaaaatgtttcagatgtttatttgtataattacttgattcacacagtgagaaaaaatgaatgtattcctgtttttgaagagaagaataattttttttttctctagggagaggtacagtgtttatattttggagccttcctgaaggtgtaaaattgtaaatatttttatctatgagtaaatgttaagtagttgttttaaaatacttaataaaataattcttttcctgtggaagagaaagatggtctcctgagttttttaaaatagctcacttggtgtgatatggctgactcccatgtccttctttcttggctgaagcaaaccagttaatctcagtgtaatttcattcagcttttcatgtgctttgtattcaatcagaata

SEQ ID NO: 2209 - DNA, 1366 bp, Homo sapiens
  source 1..1366: mol_type = unassigned DNA
attcacttggctcgcacggcgcagacagaccgcgcagggagcacacaccgccagtctgtgcgctgagtcggagccagaggccgcggggacaccgggccatgcacgcccccaactgaagctgcatctcaaagccgaagattccagcagcccaggggatttcaaagagctcagactcagaggaacatctgcggagagacccccgaagccctctccagggcagtcctcatccagacgctccgctagtgcagacaggagcgcgcagtggccccggctcgccgcgccatggagcggatccccagcgcgcaaccaccccccgcctgcctgcccaaagcaccgggactggagcacggagacctaccagggatgtaccctgcccacatgtaccaagtgtacaagtcaagacggggaataaagcggagcgaggacagcaaggtaagcaagtgcacccctagggaccctgcgctcagcccctcgcgcgcgctgagtttccaagaaaagttttctcgctttgaggttggcgaggggatgcagggtgtgggctcggtgcctcttctgagtgacttggaaaagaaagggcagacgatggttctgggtgctactctgctactctgctcctctgccggactgttgctgcggggctgggaggataggcttctcatctccttccccaagcgcccaccgcctccccgtgcgtcttgcaggagacctacaaattgccgcaccggctcatcgagaaaaagagacgtgaccggattaacgagtgcatcgcccagctgaaggatctcctacccgaacatctcaaacttacaactttgggtcacttggaaaaagcagtggttcttgaacttaccttgaagcatgtgaaagcactaacaaacctaattgatcagcagcagcagaaaatcattgccctgcagagtggtttacaagctggtgagctgtcagggagaaatgtcgaaacaggtcaagagatgttctgctcaggtttccagacatgtgcccgggaggtgcttcagtatctggccaagcacgagaacactcgggacctgaagtcttcgcagcttgtcacccacctccaccgggtggtctcggagctgctgcagggtggtacctccaggaagccatcagacccagctcccaaagtgatggacttcaaggaaaaacccagctctccggccaaaggttcggaaggtcctgggaaaaactgcgtgccagtcatccagcggactttcgctcactcgagtggggagcagagcggcagcgacacggacacagacagtggctatggaggagaatcggagaagggcgacttgcgcagtgagcagccgtgcttcaaaagtgaccacggacgcaggttcacgatggg

SEQ ID NO: 2210 - DNA, 396 bp, Homo sapiens
  source 1..396: mol_type = unassigned DNA
gcggggctgggaggataggcttctcatctccttccccaagcgcccaccgcctccccgtgcgtcttgcaggagacctacaaattgccgcaccggctcatcgagaaaaagagacgtgaccggattaacgagtgcatcgcccagctgaaggatctcctacccgaacatctcaaacttacaactttgggtcacttggaaaaagcagtggttcttgaacttaccttgaagcatgtgaaagcactaacaaacctaattgatcagcagcagcagaaaatcattgccctgcagagtggtttacaagctggtgagtgctgattctggctatgctctctttaagagtttgagtgcaaatagagagcccgtgggctcaacatctgatgtaataaacattactgcaac

SEQ ID NO: 2211 - DNA, 2355 bp, Homo sapiens
  source 1..2355: mol_type = unassigned DNA
ctgcaggaagagagaccaggaagggtcgtgactgcttgcgcacggctgcaggcgttctgccgggcaagaacctcccggtgcgcccggagctgctccaagttgagagtggcgcataacatggggctgcagttgaggcttgaagggccaaggagtgccaacttaccctgatttctttgcaagtttcattaagctcttcagcatctgagaaaggattagaatgtttattcacactctccaaattccagtttatcagttcattgattcatcaacgttgattaagcacttactatgtgctgagaatacaaagggttgcagaaaaggaagaagaatcagcagagagcatttgtggccagcaaagcttaaaatatttcctaaccgatcctttgcaaaaaaagttcacccactcctgtagtcagcagctcccctactgtgcgcagtcagtgtgccatctcagactagcaaagatttgtgcttggatcatctacacttccctgaatgttgaagaagatatgctatccatgcaatccttgtcgactgcttgattaaaaagtggataaactgtcttcaggcccttggagtatggtgtctgtgtgaagaagggaatgaggcagaagtagcagtcagtggtggctgaagtaggagaaagtgcttgctaatgaaatcttgatttttctgtggcttttctgtgcaattgggtggctaagtaggaaagccattggagcttcactgtatcaattctgcctttcttgttttttggaactccaattcaccaaggctccctgccaccctatccatctataacttttcatcactttttcctcaaagtaagaagtgtgtcccagaaaatgtgcctttgtgactcagcaacatttcaaatccatctgagccttcccagcgttccaaaagaaatactgatttgaattcagctgcttaaaaaaccagtctctaagcagacagcttgaaacttccttacagcaatagtttaggctttggaggggaaattggtttgtttttaattgttttaatttttcattcaattcatttgccgcctgattatatatgatcttttgagcccaatactctgctaaattaaccttgactttctttctctctttctctctctctccttctctctttcttcctttctttctttctttttgacagagccttgctctgtcgcccaggctggaatgcagtggcacaatctcagctcactgtaaactccgcctccaaagttcaagcaattctcctgcctcagcctcctgtgtagctgggattacacacgccagccaccatgcctggctaatttttgtatttttagtaaagatggagtttcaccctcttggccaagctggtctcgaactcctgacctcaaccttggcctctcaaagtgctgggattacaagcatgagccaccatgcctggccttaccttgattttttttttttgagacagagtctcactctgttgctcaggctggagtgtagtggctcgatcttggctcactgcaacctccatctcccgggttcaagagattctcctgcctcagcctcccaagtagctgggactacaggtgtgggccaccacgcctagctaattttttatatgtttactagagacagggtttcaccatgttgggcaggctggtcttgaactcctgacctcaggtgattcacctgcctcggcctcccaaaatgctgggattacaggtgtgagccaccacacccggcccctacctttgatttttaagtcaagagggaacaagtcgaaatttctattcaggtaaactgtatacctttggacactgaatcacttttagaaccccagtaaaaatcatgtatgaatgacccacaatttcactccaacaggaaggtgtgtatatgtgcacaaaaacattagattgttcacaccggtgctattcataatagtcaaaaactggaaacaactcaaacatccatcaactgtagaatggataaataaatcatgatatattcataccatggaacataacagtgacaataaatgaaccactgctacacacaacagatatgaatttcacaaacagaatgctgagcaacagaagccaaacacagaaggatacacatttataaatccatttgtatgaagttcataaacagacaaaattagtcagtggagattattctcatagaagtctgaagggtagttgtctttagggagggggatatagtgactgaggtgggtataaggggtttctggggtttggtgatggtacaccagcatattcactctgaaaactcattgagctgtgcaataatgatttttcaaacttttatatgtgtatgataatgcttcaataaagctttgcttaaaaac

SEQ ID NO: 2212 - DNA, 2215 bp, Homo sapiens
  source 1..2215: mol_type = unassigned DNA
ctgcaggaagagagaccaggaagggtcgtgactgcttgcgcacggctgcaggcgttctgccgggcaagaacctcccggtgcgcccggagctgctccaagttgagagtggcgcataacatggggctgcagttgaggcttgaagggccaaggagtgccaacttaccctgggttgcagaaaaggaagaagaatcagcagagagcatttgtggccagcaaagcttaaaatatttcctaaccgatcctttgcaaaaaaagttcacccactcctgtagtcagcagctcccctactgtgcgcagtcagtgtgccatctcagactagcaaagatttgtgcttggatcatctacacttccctgaatgttgaagaagatatgctatccatgcaatccttgtcgactgcttgattaaaaagtggataaactgtcttcaggcccttggagtatggtgtctgtgtgaagaagggaatgaggcagaagtagcagtcagtggtggctgaagtaggagaaagtgcttgctaatgaaatcttgatttttctgtggcttttctgtgcaattgggtggctaagtaggaaagccattggagcttcactgtatcaattctgcctttcttgttttttggaactccaattcaccaaggctccctgccaccctatccatctataacttttcatcactttttcctcaaagtaagaagtgtgtcccagaaaatgtgcctttgtgactcagcaacatttcaaatccatctgagccttcccagcgttccaaaagaaatactgatttgaattcagctgcttaaaaaaccagtctctaagcagacagcttgaaacttccttacagcaatagtttaggctttggaggggaaattggtttgtttttaattgttttaatttttcattcaattcatttgccgcctgattatatatgatcttttgagcccaatactctgctaaattaaccttgactttctttctctctttctctctctctccttctctctttcttcctttctttctttctttttgacagagccttgctctgtcgcccaggctggaatgcagtggcacaatctcagctcactgtaaactccgcctccaaagttcaagcaattctcctgcctcagcctcctgtgtagctgggattacacacgccagccaccatgcctggctaatttttgtatttttagtaaagatggagtttcaccctcttggccaagctggtctcgaactcctgacctcaaccttggcctctcaaagtgctgggattacaagcatgagccaccatgcctggccttaccttgattttttttttttgagacagagtctcactctgttgctcaggctggagtgtagtggctcgatcttggctcactgcaacctccatctcccgggttcaagagattctcctgcctcagcctcccaagtagctgggactacaggtgtgggccaccacgcctagctaattttttatatgtttactagagacagggtttcaccatgttgggcaggctggtcttgaactcctgacctcaggtgattcacctgcctcggcctcccaaaatgctgggattacaggtgtgagccaccacacccggcccctacctttgatttttaagtcaagagggaacaagtcgaaatttctattcaggtaaactgtatacctttggacactgaatcacttttagaaccccagtaaaaatcatgtatgaatgacccacaatttcactccaacaggaaggtgtgtatatgtgcacaaaaacattagattgttcacaccggtgctattcataatagtcaaaaactggaaacaactcaaacatccatcaactgtagaatggataaataaatcatgatatattcataccatggaacataacagtgacaataaatgaaccactgctacacacaacagatatgaatttcacaaacagaatgctgagcaacagaagccaaacacagaaggatacacatttataaatccatttgtatgaagttcataaacagacaaaattagtcagtggagattattctcatagaagtctgaagggtagttgtctttagggagggggatatagtgactgaggtgggtataaggggtttctggggtttggtgatggtacaccagcatattcactctgaaaactcattgagctgtgcaataatgatttttcaaacttttatatgtgtatgataatgcttcaataaagctttgcttaaaaac

SEQ ID NO: 2213 - DNA, 993 bp, Homo sapiens
  source 1..993: mol_type = unassigned DNA
agtgctgtgtatgcagccatatagtgaatgccttcatttgcaccctgaactctgaatagtcacttttaaaacatccatctgtcatccatctagtgaggtcaggagagtggctgcttaacttctgggggttgcagaaaaggaagaagaatcagcagagagcatttgtggccagcaaagcttaaaatatttcctaaccgatcctttgcaaaaaaagttcacccactcctgtagtcagcagctcccctactgtgcgcagtcagtgtgccatctcagactagcaaagttgtccagagaggaaagacaggccaaaatagttcagtatgctgtcttactgggaggacaacagcttaagccacaaagccctgagtttgaccctagaactctgtggctactggtgactcatcttgaaaattatcagattgaatcttctctaccggtttgataacaactgatgagtggaaaaagaacgccaatcaaatgtgcatgcttaataagcagcctccttattcccctctgcagatttgtgcttggatcatctacacttccctgaatgttgaagaagatatgctatccatgcaatccttgtcgactgcttgattaaaaagtggataaactgtcttcaggcccttggagtatggtgtctgtgtgaagaagggaatgaggcagaagtagcagtcagtggtggctgaagtaggagaaagtgcttgctaatgaaatcttgatttttctgtggcttttctgtgcaattgggtggctaagtaggaaagccattggagcttcactgtatcaattctgcctttcttgttttttggaactccaattcaccaaggctccctgccaccctatccatctataacttttcatcactttttcctcaaagtaagaagtgtgtcccagaaaatgtgcctttgtgactcagcaacatttcaaatccatctgagccttcccagcgttccaaaagaaatactgatttgaattcagctgcttaaaaaa

SEQ ID NO: 2214 - DNA, 557 bp, Homo sapiens
  source 1..557: mol_type = unassigned DNA
gtcgtgactgcttgcgcacggctgcaggcgttctgccgggcaagaacctcccggtgcgcccggagctgctccaagttgagagtggcgcataacatggggctgcagttgaggcttgaagggccaaggagtgccaacttaccctgggttgcagaaaaggaagaagaatcagcagagagcatttgtggccagcaaagcttaaaatatttcctaaccgatcctttgcaaaaaaagttcacccactcctgtagtcagcagctcccctactgtgcgcagtcagtgtgccatctcagactagcaaagttgtccagagaggaaagacaggccaaaatagttcagtatgctgtcttactgggaggacaacagcttaagccacaaagccctgagtttgaccctagaactctgtggctactggtgactcatcttgaaaattatcagattgaatcttctctaccggtttgataacaactgatgagtggaaaaagaacgccaatcaaatgtgcatgcttaataagcagcctccttattcccctctgcagatttgtgcttggatcatctac

SEQ ID NO: 2215 - DNA, 1962 bp, Homo sapiens
  source 1..1962: mol_type = unassigned DNA
ccccgagactgcatcattccgcaccggctgctgcagggccagagggagcaggtggagcgagagagcgagccgcgagccggagcgcgccagacccagggcgagactgcagtgacgcggcccgggagacatggcggacgggcgtctctgaataagcagaatccggagcccctcgctacccgcggccgccgcagcccgggccatgccgcacggctgctgaccgcacgcaggggccggccccgaggacacatgcggcggcctttgccgcctcgcccctgaccctctgccctgttctccatgttgcatttctcgtcagtttctcgggcggtgtagctgccgctgccaccagagccggcggggcatcgcgctgctcattcatccggccgcactttcttttccgtttccacccatcccttcccatttccttctccctttccccgccagcttcgcatccatctcccccaccccgtaaccccctcctgcctccatccaccggggctatggccgcagaagaggtattgcagacggtggaccattataagactgagatagagaggctaaccaaggagctcacggagaccacccacgagaagatccaggctgccgagtacgggctggtggtgctggaggagaagctgaccctcaaacagcagtatgatgaactggaggctgagtacgacagcctcaaacaggagctggagcagctcaaagaggtgagttgcctgtcacctctccctttcctggccctcactccccccacccgcaaggcccactcatcatgatcaagaagtcataaaggaggtgattgaaaggactgttttttcttctagggccctttgttggtaagagaagattgaaagagtccattgtttcctcccccaagagaaaaattgcctaagaaatgaatatataagctggaatttgggaggcaatggctgtttggcctgcgggggagggagattagtaagagtcatcaagtctcagcactctaagacgacattcaagtgggttggaatgtataaatcaaacttctcaaaaccgctgttatctcaaacccaggtttcagcgacaatttcgtagtccacaaaagtgatgaggtttgtgcctgaggacccacaatttcaggatttagactgtgtggcacctcagctttcctctggatgtaaccactccttggtgagagagggaactcctcaccaatcccatttgacaaaggctaggcaatcttcattctgcttggctttagtcattcttgtcattgggctgcagaagaaaaacaactttgctgggtgatcccactgccttgatttcacctcggagcgaggctgggccatgtccaagtcttatgaggtcaccctgactagaaaaaattgaactcacctacaaatagtctgaaagagtggtgtatatcaaatacgtgggtagtgttgcatttcaaatgaggctcttctggttgaaatgatatatttataaaaccagaatatcaaaaatgggtgatgtataatgtctctttagttttttggtatttggcctcttttaaagcctgtcggatgtatgggagaaaacaatgaacgtgctttgatttcctatcagtcactcttaagaacatacatattgtttaagtaactcggtcttttttatctgattcttgaggcactatgggtagcaaataaccacttacaaatttaaatgtaatatacactccttttctgtgtgtcaagtccttatttttaggtgcatattgacatttaaatgttaattattgtttggcatataatatcaaaaatctattatttattttatgctgttacagttaaaagatgtgatttatgacatactgaatcaacttgccttccaatttagtgtgtaatatggtaagcatttatacttttagatatgtcttatttttatttggatgcctgtctaccaaaaaataaatgtactacctatgattaaaaatcccaa

SEQ ID NO: 2216 - DNA, 1328 bp, Homo sapiens
  source 1..1328: mol_type = unassigned DNA
ggtggagcgagagagcgagccgcgagccggagcgcgccagacccagggcgagactgcagtgacgcggcccgggagacatggcggacgggcgtctctgaataagcagaatccggagcccctcgctacccgcggccgccgcagcccgggccatgccgcacggctgctgaccgcacgcaggggccggccccgaggacacatgcggcggcctttgccgcctcgcccctgaccctctgccctgttctccatgttgcatttctcgtcagtttctcgggcggtgtagctgccgctgccaccagagccggcggggcatcgcgctgctcattcatccggccgcactttcttttccgtttccacccatcccttcccatttccttctccctttccccgccagcttcgcatccatctcccccaccccgtaaccccctcctgcctccatccaccggggctatggccgcagaagaggtattgcagacggtggaccattataagactgagatagagaggctaaccaaggagctcacggagaccacccacgagaagatccaggctgccgagtacgggctggtggtgctggaggagaagctgaccctcaaacagcagtatgatgaactggaggctgagtacgacagcctcaaacaggagctggagcagctcaaagagggccctttgttggtaagagaagattgaaagagtccattgtttcctcccccaagagaaaaattgcctaagaaatgaatatataagctggaatttgggaggcaatggctgtttggcctgcgggggagggagattagtaagagtcatcaagtctcagcactctaagacgacattcaagtgggttggaatgtataaatcaaacttctcaaaaccgctgttatctcaaacccaggtttcagcgacaatttcgtagtccacaaaagtgatgaggtttgtgcctgaggacccacaatttcaggatttagactgtgtggcacctcagctttcctctggatgtaaccactccttggtgagagagggaactcctcaccaatcccatttgacaaaggctaggcaatcttcattctgcttggctttagtcattcttgtcattgggctgcagaagaaaaacaactttgctgggtgatcccactgccttgatttcacctcggagcgaggctgggccatgtccaagtcttatgaggtcaccctgactagaaaaaattgaactcacctacaaatagtctgaaagagtggtgtatatcaaatacgtgggtagtgttgcatttcaaatgaggctcttctggttgaaatgatatatttataaaaccagaatatcaaaaatgggtgat

SEQ ID NO: 2217 - DNA, 8811 bp, Homo sapiens
  source 1..8811: mol_type = unassigned DNA
ctcgggcggtgtagctgccgctgccaccagagccggcggggcatcgcgctgctcattcatccggccgcactttcttttccgtttccacccatcccttcccatttccttctccctttccccgccagcttcgcatccatctcccccaccccgtaaccccctcctgcctccatccaccggggctatggccgcagaagaggtattgcagacggtggaccattataagactgagatagagaggctaaccaaggagctcacggagaccacccacgagaagatccaggctgccgagtacgggctggtggtgctggaggagaagctgaccctcaaacagcagtatgatgaactggaggctgagtacgacagcctcaaacaggagctggagcagctcaaagaggcatttgggcagtccttctccatccaccggaaggttgctgaagatggagagactcgggaggaaacgcttctgcaggagtcagcatcgaaggaggcttactatctggggaagatcttggagatgcagaacgagctgaaacagagccgggctgtggtcactaatgtacaggcagaaaacgagaggctcaccgcagtcgtgcaggatctgaaggagaacaatgagatggtggagctacagagaatacggatgaaggatgaaatccgagaatataagttccgggaggcacggctccttcaggactatactgaattggaagaagaaaatatcacattgcagaaactagtgtccacgttgaagcagaaccaggttgaatacgaaggcttaaagcatgagattaagcgatttgaggaggagacggtactgctgaacagccagctggaagatgccatccgattgaaagagattgctgagcaccaactggaagaagccctcgagactttaaaaaatgaaagagagcaaaagaacaacctgcggaaggagctctcccagtatatcagcctcaatgataaccatatcagcatctcagtagatggactcaaatttgccgaggatgggagtgaaccaaacaatgatgacaaaatgaacggtcatatccatgggcctcttgtgaaactgaatggagactatcggactcccaccttaaggaaaggagagtctctgaaccctgtctctgacttattcagtgagctgaacatttcagaaatacagaagttgaagcagcagcttatgcaggtagagcgggaaaaggccattcttttggccaacctacaggagtcacagacacagctggaacacaccaagggggcactgacggagcagcatgagcgggtgcaccggctcacagagcacgtcaatgccatgaggggcctgcaaagcagcaaggagctcaaggctgagctggacggggagaagggccgggactcaggggaggaggcccatgactatgaggtggacatcaatggtttagagatccttgaatgcaaatacagggtggcagtaactgaggtgattgatctgaaagctgaaattaaggccttaaaggagaaatataataaatctgtagaaaactacactgatgagaaggccaagtatgagagtaaaatccagatgtatgatgagcaggtgacaagccttgagaagaccaccaaggagagtggtgagaagatggcccacatggagaaggagttgcaaaagatgaccagcatagccaacgaaaatcacagtacccttaatacggcccaggatgagttagtgacattcagtgaggagttagctcagctttaccaccatgtgtgtctatgtaataatgaaactcccaacagggtcatgctggattactataggcagagcagagtcacccgcagtggcagcctgaaagggcccgatgatcccagaggacttttgtccccacgattagccaggcggggtgtgtcatccccggtagaaacaaggacctcatctgaaccagttgcaaaagaaagcacagaggccagcaaagaaccaagtccaactaagacccccacaatctctcctgttattactgccccaccgtcatctccagtattggatacaagtgacatccgcaaagagccaatgaatatctacaaccttaatgccataatccgggaccaaatcaagcatctgcagaaagctgtggaccggtccttgcaactgtctcgtcaaagagcagcggctcgggagctagcccccatgattgataaagacaaggaagccttaatggaagagatcctcaagctaaagtccctgctgagcaccaaacgggagcagatcgccacattgagggcggtgttgaaagccaacaagcagacagctgaggtggcgctagctaatctcaagaacaaatatgaaaatgaaaaagcaatggtgactgaaaccatgacgaagcttagaaatgaactgaaggctttgaaagaagatgctgcaaccttctcatccctgagagcaatgtttgcaacaagatgtgatgaatatgtcacccagttggatgagatgcagagacagttagcagctgcagaggatgagaagaagactctgaacactttgttacgaatggctatccagcaaaaactcgccctgacccagaggctggaggacttagagtttgaccatgagcagtcccgacgcagcaaaggcaaacttggaaagagcaagatcggcagccctaaaattgtcagcagcctgctgcctccgtaccgccacagtgctcacaactagccgggaggcaagactgcccaactgtcagtcctgacacagctctccctgaggagcagccacattccagctcccagtgcgcccctctccactgtctctccaagcctcctcacccctagtcttcatctcctgtggacgaacatctggggtggaagttttgtagccacacacaggatactgcccaagatccagcgggtgttttcttctcggttgttagatgtacaattggattaatgtccatcgttttggaagacgagagaaagttgagaagaacacgaagcacagaccctgatgtgataaaacattttgtggtttctctgagtcacagataaacttctgccatcaaatggctacagttcatttaaatttaaaaaaaagaaaaaagaaacagaaaacgtgtctcagatggctggctttacctcgatagcataagagagacctaagacatgtaaaatacgtatattgcagtatcatctttcctcacactccaaattcagctagggaagttgattccaatatgtttgtcattgatatttattttgtactttatttgctacatgatttatgtctatacaaataatttctctgaggtgaatttaattcatttattttcaaataagcataatttgctcaattaagtatgagtttgaatttagtttgaaatctggaattggccagactgtggtcatttttcttgcacaaaatgataaatgaggtgcatcagaatgttaacaataactgtattttgctgctacgctggtattgtttaggcacttactttctaatcagtagctcattaactgctgggttttgtttttgtatttttaactagagttcttcactggacattactaagtaaatctaagaaagagactaagttatgatttattgacttattcaagttttgatggcatctttacttttattttttcattgcagttgagtagatgtactggtgctgctcctttgtatgtgtgtatgtgtgtgataacgttaaagaaggctcaataacttgaagggaaaaaaatggtgtgtttatttaatgaccagaattttttttacttctcccaaaatcagggtcctactgagtctttcctgataaaaggtatcaagtacaaatgggaaaatatatacatatatagatgtaagatagcctttaattaattaatttacccagagagtgttcaaagtttgattaaaattgtatgttttgttgttgttagtttttttcataacgaatcttccttgccaaaaaaacaatagataataaaccttagctcattgtctacttttgacaaacactcaggtgcctacaaacattctattatcttgagataatacatgttcctggttaatttacagattctgctgggtaacttttatgacttgatttaaggcagtggattttcatagcaaaatttattttgcacataatctgacaaacaaggaaaacagctaactgagctgaaaggtctaacactctcgggctccttaaccatcaagtgctgcccacacaattgctcctagccctgattccttgtctttgtcaggtagccttaacttatttaaaaccataagggtttgaccttttcatataaagacatctgtaacttctcttcaaaacaaaaatgaccctcactgttaacacaaaggacagttaccagtgtagggcactgagaaaggagatccaggagccactcagcttattgagcggacatgggtggcacagaaatggagtggtccatcagagaccaaatggtaagtcgtaaagcacattgcaggagctttcgttagtcatacgcctattaagtagtggtcgctattaccaaagcaaccaggacgttttgtgttctttatatgagtgctattttccacagtgtcatttattatgcaacgtggagtaaagagttgaaatcttcaccaaaataagggttcaggttaaagtacagaaacagaaacaaaacgattcgacatgaagttcccaaccatagcagcctaaccttctgctcttttctacctgcatggccttgctgttcctaaacattgtcttcatttcactggcgttgtatctgcctagtaccagtattagtgagactgtggattttatcagagttcaatgaaagaaagcttacccctgccctcactttgtgttttttatttttccccctttctcaagcaccacgtatttggacctgagaagtggcatagctgctaagttgacttttaataaaaaactgtttgtgcctgagggaaatatatgcctttttaaaaagtacctcagaacatgttcgtagatcgtctcatcggttttgtttggtgggactgggagttcagcaggaagtattgtctgtgtgtgatgacggggcagtattgccagtcggcaatgttgtatttgcattctttatccctaactctgaatctaggactccatgaaaagccgggtcacccacaaaacatttcttccaatacaaagtgtattattacgtctattataaactagtttcatttcagttatttatcttcatagagtgggaaagtctttttctgaaatactaattctatgaaaataataattttagtgaatctttgccaagaagttatagaaacttggaaataaatttctcattttcagcacaaaattaagtgatagtccctaagcagtaagagagaataccatgtatttacactgtggcatcatttagtatagtttacactgagccatatttatttataggcatttaaagtgaatcagtatgtgtagtgttgataaaaatcagtatctgtaaagataacatcaggaattcaaaaggaaattgaaaaggggcagaactagtgagaaccaaaaagaatgaactccagtaagactaattgaagacatacttggagaggaaaaataaacagcagaaatgcactaaaaaatactggctaattattgcaaacagagtgagcaaagattaatgctaactagtaaaagtagttagcaaagtaaacaggtagttttttaaaagtaagcacaattacaatattgaatagtatggagaaatgcttttctcctgaggattttccttaatcaaaaaataagaagaagcaataaattgtctttggcctgagtgctgagtggcataaataaaggagcttggcttaatctttctggtccacacataatccattagatcccattcatatatccaactctggattctaataaaataatttggagaactttgagaaaaaggaaaactgttaaataagaaaagacctatttagaaattatactttagtctaacgaagaggaggtacaatagtagtcttcaagaaaagaatatttaacaaatgatagatatcagctatagatattgttactaagtctagaataaaaaaggcttcagtgtgaaggatgtatagtaactctaggaaagagatttttaacactgggaaattaacgtggaaattgataatcataaagaatatttgttttgtaaaaattgaatatcattggtggtctagtaagtattaagtggcaagataggagaatgcatttcagttctgggagctcataatcctgtgattcttttattttaagttttaaaatacattaaaattttactggttaatcataaaatattttatatttgaaaataggatggcaatctttatttttccaagatatttgttggaaaaaaatgatcgttggtattattttttctttcagctatattccatggtatctttaaaattgttcagaatataggacttttactaaaaaaattcaattgtcagagtctaaaaaaacaatgtcctcaggaatacttcagaaatagaaggtatgcaatcccttagtggggggcaaacacatttcagatttcgtctttatttaaaaggatcttcagtctacaacatttgcttttttcgtgctttggaaaatatccttgtgcagataagttcttctgtttgaaacaagcatgaaacattggtccaataacctaagaatgtggagatttcttgatattctgtattaattaaagttctctacatgtctcaaatggagatcacaaaacatgaaaaggaagaaatgaaatatcttttcttctgggatgagtgtcaattttaatgtataattgtcataatcaatcagccaaaagttacaatctgtccctcagagacattgggggaagctgatggatttccagtaaggaactgtggtgggttcaaactcaggctgccacaaatacattgatatggtaggtaggaagtaggactaaatttgaaagaaacttatgggataaagttcacaattttaaaaaggttgccctccagtttttttgtttgtttataaactagagtgatttttaagtaacccttatatttaaggctgcaaaaaatgtacaagagtatgttttcaagtaaagggaacataattcttcaaaaagctgttgaactggagttatgataggttatgacagagagcatgatcagtgctgatactgacaagtacttttttaccttaaaatcaacttctatggaactacaagatcaatctagctcccgagtgacattttccattgtctgtaataatgccctcggatgagttgtgtctaaaattaagttcatctttatttatatgcgaacttaactgccatagtccctaatgtattgcgtttgtaacctgatcgtattatgtttacagctgaaagatttcatctagacatgtctttcgtccttattattcaaagtgtaattgaaagagatatttagtattaagacatgttccccaattgagaattttccagaatattctacttaagaagaagaagagcaattaactgcctttagtgtaagggcgagagtgcatagaaatatgcaatgtaaaatgtttgcatgaattatttcacatcatgtaagctttcccatattcataagatgaacactatagaagtctcatttctctgtgatcttctgtccattaggaaagtaaggagattgttatctatatctagtctcctttccatattgaactgcatggctctaatcctcagtgtatttttatcccttctcgagttatttaaaatttgccctatttaagctgaagcctggataaactgctgagccagattattcctgtgattggagtttaattgctgtagaacacttgttgagaacacattttttactttttttctttcagaattattcctcaatcattgttctctaatgaaaacaccgagaagtaaatctggtgcttcttagtgtaaatatgtttttctttttaaaaagtcattttaaaacaaagatgagagaactataaagtaaggggaaatatcattttatttaaaaataattattcaatgatagataatggagatacagaatgactcattgggttcataggtatgatttgtgcagccagtcttagaggaaatacatcattttaacattattcccacaaaatgttaaagctcaatggtttgactatgagagtcaaacaattactatttgaaaatctcttatgacatttttataatctactctgtttttatttgcatgattatgcttatgtgatgaaccatccatgattctgatattgtatttctttccagtattaacatgtgtattgtgtggccaactctgatttgtacaccgtattattgttgtaatgattcaactgttcctacatttaattgcagtttaattattatgccttttggggttaaatgatgtgaagtgtttccacctactgataaataccatatgaaaacacgactaaaagactgatttaagaaacttgttatttttaaaaatatgaatttcaaaagaaatgttctcaaagacacatgcatttattttaaattcaaaaaattcttatgaatttattattgcttgtactttaactttttttattgtagacaatcctaagtgaataatgtctcatgggagaacacatgatatgtgcttgtatttgtgtaatctgatcatgcactcaatggttggaaaaggcactccagtgctaagaaaataaccagaagccaatatatcgattcttatatctcggtttatgttaccaactgaatatggtgtaatgcataactttttccagtaaataaactggttattttttgttcatttca

SEQ ID NO: 2218 - DNA, 3281 bp, Homo sapiens
  source 1..3281: mol_type = unassigned DNA
ccgtttccacccatcccttcccatttccttctccctttccccgccagcttcgcatccatctcccccaccccgtaaccccctcctgcctccatccaccggggctatggccgcagaagaggtattgcagacggtggaccattataagactgagatagagaggctaaccaaggagctcacggagaccacccacgagaagatccaggctgccgagtacgggctggtggtgctggaggagaagctgaccctcaaacagcagtatgatgaactggaggctgagtacgacagcctcaaacaggagctggagcagctcaaagaggcatttgggcagtccttctccatccaccggaaggttgctgaagatggagagactcgggaggaaacgcttctgcaggagtcagcatcgaaggaggcttactatctggggaagatcttggagatgcagaacgagctgaaacagagccgggctgtggtcactaatgtacaggcagaaaacgagaggctcaccgcagtcgtgcaggatctgaaggagaacaatgagatggtggagctacagagaatacggatgaaggatgaaatccgagaatataagttccgggaggcacggctccttcaggactatactgaattggaagaagaaaatatcacattgcagaaactagtgtccacgttgaagcagaaccaggttgaatacgaaggcttaaagcatgagattaagcgatttgaggaggagacggtactgctgaacagccagctggaagatgccatccgattgaaagagattgctgagcaccaactggaagaagccctcgagactttaaaaaatgaaagagagcaaaagaacaacctgcggaaggagctctcccagtatatcagcctcaatgataaccatatcagcatctcagtagatggactcaaatttgccgaggatgggagtgaaccaaacaatgatgacaaaatgaacggtcatatccatgggcctcttgtgaaactgaatggagactatcggactcccaccttaaggaaaggagagtctctgaaccctgtctctgacttattcagtgagctgaacatttcagaaatacagaagttgaagcagcagcttatgcaggtagagcgggaaaaggccattcttttggccaacctacaggagtcacagacacagctggaacacaccaagggggcactgacggagcagcatgagcgggtgcaccggctcacagagcacgtcaatgccatgaggggcctgcaaagcagcaaggagctcaaggctgagctggacggggagaagggccgggactcaggggaggaggcccatgactatgaggtggacatcaatggtttagagatccttgaatgcaaatacagggtggcagtaactgaggtgattgatctgaaagctgaaattaaggccttaaaggagaaatataataaatctgtagaaaactacactgatgagaaggccaagtatgagagtaaaatccagatgtatgatgagcaggtgacaagccttgagaagaccaccaaggagagtggtgagaagatggcccacatggagaaggagttgcaaaagatgaccagcatagccaacgaaaatcacagtacccttaatacggcccaggatgagttagtgacattcagtgaggagttagctcagctttaccaccatgtgtgtctatgtaataatgaaactcccaacagggtcatgctggattactataggcagagcagagtcacccgcagtggcagcctgaaagggcccgatgatcccagaggacttttgtccccacgattagccaggcggggtgtgtcatccccggtagaaacaaggacctcatctgaaccagttgcaaaagaaagcacagaggccagcaaagaaccaagtccaactaagacccccacaatctctcctgttattactgccccaccgtcatctccagtattggatacaagtgacatccgcaaagagccaatgaatatctacaaccttaatgccataatccgggaccaaatcaagcatctgcagaaagctgtggaccggtccttgcaactgtctcgtcaaagagcagcggctcgggagctagcccccatgattgataaagacaaggaagccttaatggaagagatcctcaagctaaagtccctgctgagcaccaaacgggagcagatcgccacattgagggcggtgttgaaagccaacaagcagacagctgaggtggcgctagctaatctcaagaacaaatatgaaaatgaaaaagcaatggtgactgaaaccatgacgaagcttagaaatgaactgaaggctttgaaagaagatgctgcaaccttctcatccctgagagcaatgtttgcaacaagatgtgatgaatatgtcacccagttggatgagatgcagagacagttagcagctgcagaggatgagaagaagactctgaacactttgttacgaatggctatccagcaaaaactcgccctgacccagaggctggaggacttagagtttgaccatgagcagtcccgacgcagcaaaggcaaacttggaaagagcaagatcggcagccctaaagtaagtggggaggcatcagtcaccgtgcccaccatagacacttacctcctgcatagtcagggcccacagacacccaacattcgggtcagcagtggcactcagaggaaaagacaattttcaccttccctttgtgatcagagccgtcccaggacttcaggggcttcctacctacagaatttattaagagttccccctgatcccacctccacagaatcatttcttctgaagggccccccttccatgagtgaattcatccaagggcaccggctcagcaaggaaaaaaggttaaccgtggctccaccagattgtcagcagcctgctgcctccgtaccgccacagtgctcacaactagccgggaggcaagactgcccaactgtcagtcctgacacagctctccctgaggagcagccacattccagctcccagtgcgcccctctccactgtctctccaagcctcctcacccctagtcttcatctcctgtggacgaacatctggggtggaagttttgtagccacacacaggatactgcccaagatccagcgggtgttttcttctcggttgttagatgtacaattggattaatgtccatcgttttggaagacgagagaaagttgagaagaacacgaagcacagaccctgatgtgataaaacattttgtggtttctctgagtcacagataaacttctgccatcaaatggctacagttcatttaaattt

SEQ ID NO: 2219 - DNA, 3194 bp, Homo sapiens
  source 1..3194: mol_type = unassigned DNA
tttccttctccctttccccgccagcttcgcatccatctcccccaccccgtaaccccctcctgcctccatccaccggggctatggccgcagaagaggtattgcagacggtggaccattataagactgagatagagaggctaaccaaggagctcacggagaccacccacgagaagatccaggctgccgagtacgggctggtggtgctggaggagaagctgaccctcaaacagcagtatgatgaactggaggctgagtacgacagcctcaaacaggagctggagcagctcaaagaggcatttgggcagtccttctccatccaccggaaggttgctgaagatggagagactcgggaggaaacgcttctgcaggagtcagcatcgaaggaggcttactatctggggaagatcttggagatgcagaacgagctgaaacagagccgggctgtggtcactaatgtacaggcagaaaacgagaggctcaccgcagtcgtgcaggatctgaaggagaacaatgagatggtggagctacagagaatacggatgaaggatgaaatccgagaatataagttccgggaggcacggctccttcaggactatactgaattggaagaagaaaatatcacattgcagaaactagtgtccacgttgaagcagaaccaggttgaatacgaaggcttaaagcatgagattaagcgatttgaggaggagacggtactgctgaacagccagctggaagatgccatccgattgaaagagattgctgagcaccaactggaagaagccctcgagactttaaaaaatgaaagagagcaaaagaacaacctgcggaaggagctctcccagtatatcagcctcaatgataaccatatcagcatctcagtagatggactcaaatttgccgaggatgggagtgaaccaaacaatgatgacaaaatgaacggtcatatccatgggcctcttgtgaaactgaatggagactatcggactcccaccttaaggaaaggagagtctctgaaccctgtctctgacttattcagtgagctgaacatttcagaaatacagaagttgaagcagcagcttatgcaggtagagcgggaaaaggccattcttttggccaacctacaggagtcacagacacagctggaacacaccaagggggcactgacggagcagcatgagcgggtgcaccggctcacagagcacgtcaatgccatgaggggcctgcaaagcagcaaggagctcaaggctgagctggacggggagaagggccgggactcaggggaggaggcccatgactatgaggtggacatcaatggtttagagatccttgaatgcaaatacagggtggcagtaactgaggtgattgatctgaaagctgaaattaaggccttaaaggagaaatataataaatctgtagaaaactacactgatgagaaggccaagtatgagagtaaaatccagatgtatgatgagcaggtgacaagccttgagaagaccaccaaggagagtggtgagaagatggcccacatggagaaggagttgcaaaagatgaccagcatagccaacgaaaatcacagtacccttaatacggcccaggatgagttagtgacattcagtgaggagttagctcagctttaccaccatgtgtgtctatgtaataatgaaactcccaacagggtcatgctggattactataggcagagcagagtcacccgcagtggcagcctgaaagggcccgatgatcccagaggacttttgtccccacgattagccaggcggggtgtgtcatccccggtagaaacaaggacctcatctgaaccagttgcaaaagaaagcacagaggccagcaaagaaccaagtccaactaagacccccacaatctctcctgttattactgccccaccgtcatctccagtattggatacaagtgacatccgcaaagagccaatgaatatctacaaccttaatgccataatccgggaccaaatcaagcatctgcagaaagctgtggaccggtccttgcaactgtctcgtcaaagagcagcggctcgggagctagcccccatgattgataaagacaaggaagccttaatggaagagatcctcaagctaaagtccctgctgagcaccaaacgggagcagatcgccacattgagggcggtgttgaaagccaacaagcagacagctgaggtggcgctagctaatctcaagaacaaatatgaaaatgaaaaagcaatggtgactgaaaccatgacgaagcttagaaatgaactgaaggctttgaaagaagatgctgcaaccttctcatccctgagagcaatgtttgcaacaagatgtgatgaatatgtcacccagttggatgagatgcagagacagttagcagctgcagaggatgagaagaagactctgaacactttgttacgaatggctatccagcaaaaactcgccctgacccagaggctggaggacttagagtttgaccatgagcagtcccgacgcagcaaaggcaaacttggaaagagcaagatcggcagccctaaaacaattttcaccttccctttgtgatcagagccgtcccaggacttcaggggcttcctacctacagaatttattaagagttccccctgatcccacctccacagaatcatttcttctgaagggccccccttccatgagtgaattcatccaagggcaccggctcagcaaggaaaaaaggttaaccgtggctccaccagattgtcagcagcctgctgcctccgtaccgccacagtgctcacaactagccgggaggcaagactgcccaactgtcagtcctgacacagctctccctgaggagcagccacattccagctcccagtgcgcccctctccactgtctctccaagcctcctcacccctagtcttcatctcctgtggacgaacatctggggtggaagttttgtagccacacacaggatactgcccaagatccagcgggtgttttcttctcggttgttagatgtacaattggattaatgtccatcgttttggaagacgagagaaagttgagaagaacacgaagcacagaccctgatgtgataaaacattttgtggtttctctgagtcacagataaacttctgccatcaaatggctacagttcatttaaatttaaaaaaaagaaaaaagaaacagaaaacgtgtctcagatggctggct

SEQ ID NO: 2220 - DNA, 423 bp, Homo sapiens
  source 1..423: mol_type = unassigned DNA
ccccgtaaccccctcctgcctccatccaccggggctatggccgcagaagaggtattgcagacggtggaccattataagactgagatagagaggctaaccaaggagctcacggagaccacccacgagaagatccaggctgccgagtacgggctggtggtgctggaggagaagctgaccctcaaacagcagtatgatgaactggaggctgagtacgacagcctcaaacaggagctggagcagctcaaagagggccctttgttgttaaaagatgtgatttatgacatactgaatcaacttgccttccaatttagtgtgtaatatggtaagcatttatacttttagatatgtcttatttttatttggatgcctgtctaccaaaaaataaatgtactacctatgattaaaaatcccaactaggaatct

SEQ ID NO: 2221 - DNA, 766 bp, Homo sapiens
  source 1..766: mol_type = unassigned DNA
gtctcgtcaaagagcagcggctcgggagctagcccccatgattgataaagacaaggaagccttaatggaagagatcctcaagctaaagtccctgctgagcaccaaacgggagcagatcgccacattgagggcggtgttgaaagccaacaagcaggcacagtgccttctgatgaagtcagtaaatgcttatgaagcaccgtccatctagcactgtgctagatgctgaagattcaaagaagactaacacatggtccctgccttccagaagactcagcctcctggggatgtcaggatagaaacacaattacagttcaacgttacacatgctgtaatccaagttatgagaacaatgcagaggaagcaactaaggtttcctagaggagcggaaaagacttcacagaagcaattataccttagtttgttattaaaggataagaagttgttttccagaggaggaggaagtaattccagacagaacagtaggtagagaggctttggagtgacaaaatagaataatatattcagggaatgctcacaaaggcctatgtggctggaaataagactttttttatttagaaagtcaactttggaatgtgtggagaaagtggtgaaagcagaaatcagcaaatccagtgagttatggatacttaaaattacttaattctggaaaaactttgcacagtcaatggacaaacaaatctacaaacaaaactgaggctttggggtatttgtcacaaacaataaatgattttgtatttctgtttca

SEQ ID NO: 2222 - DNA, 1583 bp, Homo sapiens
  source 1..1583: mol_type = unassigned DNA
cagctgaggtggcgctagctaatctcaagaacaaatatgaaaatgaaaaagcaatggtgactgaaaccatgacgaagcttagaaatgaactgaaggctttgaaagaagatgctgcaaccttctcatccctgagagcaatgtttgcaacaagatgtgatgaatatgtcacccagttggatgagatgcagagacagttagcagctgcagaggatgagaagaagactctgaacactttgttacgaatggctatccagcaaaaactcgccctgacccagaggctggaggacttagagtttgaccatgagcagtcccgacgcagcaaaggcaaacttggaaagagcaagatcggcagccctaaagtaagtggggaggcatcagtcaccgtgcccaccatagacacttacctcctgcatagtcagggcccacagacacccaacattcgggtcagcagtggcactcagaggaaaaggtatgcatgcagcgatcttcatagtacggtgcagtggccagattttagttaactgcaaaaataaatgtgctcttgttgtggaggatggaggaggggaagcaaaagaaaaaatgggagctggcatataaatggtcttgctaatgtgggtctttccagatcaaaacctttttgataattgtgtttatgtagtcctttctaaccccctgcccaatccctcctcttgattaatcgtaatataattttcaagtgtctgttaatatttttgctactctttgtatgtgtaaatatgcctctcccttacctccaacctgagaattggtagataaaggtggatattaagaatgaagctgtgttctacctgggttataattttaaaagtcattgtacctttggaaatggtgctgtttatcagcttctctttaacggggcaaggatatgaatatgttctcttagggaaacttttgtccatatgaccaaaactgatgacagactgaaaggggatgtctatatctagataaaatgggatggaatacgcacagtccttttcttgaaagcaggtttttgtgctttttcatttggcatgggaatattgcccagagaaaccacttgtaaggtttttaggggcttgattttgtgagtcctggctgttgagttacttaccctgtattttcggttaatggtaacatttttattttaggagctttcattaaagactcaaataatatattttctatttgcggttcaagctgactaactgtaataaatcttttttccagtatccagaacagtttccaaatagggttgtatcctgatgtggaaactaaaaaaaaaaaaagcaaaaagattgatttacatatttaaaaaattaaatgccagtataaataatgttgtcactggtgaggcgttaaaaggtaattaaagtaaaacttttttgtttcctatatgtatttttcttggatctcctgcaagacaattttcaccttccctttgtgatcagagccgtcccaggacttcaggggcttcctacctacagaatttattaagagttccccctgatcccacctccacagaatcatttcttctgaagggccccccttccatgagtgaattcatc

SEQ ID NO: 2223 - DNA, 543 bp, Homo sapiens
  source 1..543: mol_type = unassigned DNA
atgtgatgaatatgtcacccagttggatgagatgcagagacagttagcagctgcagaggatgagaagaagactctgaacactttgttacgaatggctatccagcaaaaactcgccctgacccagaggctggaggacttagagtttgaccatgagcagtcccgacgcagcaaaggcaaacttggaaagagcaagatcggcagccctaaaacaattttcaccttccctttgtgatcagagccgtcccaggacttcaggggcttcctacctacagaatttattaagagttccccctgatcccacctccacagaatcatttcttctgaagggccccccttccatgagtgaattcatccaagggcaccggctcagcaaggaaaaaaggttaaccgtggctccaccaggtaaacattttttccttgggtgcatgtgatgcaaatgattagttgaatagactctccccttccttccggtcactcaggctcacccagctgcagagtatacctttgatgatgtgtaaattcctataagtcaagtaaaaactt

SEQ ID NO: 2224 - DNA, 529 bp, Homo sapiens
  source 1..529: mol_type = unassigned DNA
aaaagctgaatcaggatatttctgtgtgaatgcacattcctcactaaatctctcaggcagctgctttagtcactgttactaacaccttgctctgtcatctctttgtacacatgtctaatttatcagtttcttgtagattgtcagcagcctgctgcctccgtaccgccacagtgctcacaactagccgggaggcaagactgcccaactgtcaggtaaattcagatgtcctttcccttccacccagctgcatgtcagatccatagaccccagctcccctttccgacacctgaactgcctacgcatcattgtattttgctgtattttatttcaagtgtgggctacatagacacacattggacacctgcagtccctgcgttcccagtaggaatacaagagagctggggtttattttgctggctgccagctggtagactctacaggctgccttcagcccctttgtctgtgtaaatacttggattagtccactgtttcattcctttccaaaaaataaaagctggaattgttatga

SEQ ID NO: 2225 - DNA, 6427 bp, Homo sapiens
  source 1..6427: mol_type = unassigned DNA
gcggcggcggctgaggagggcccggcctgcgagagcctcagtgggagccggctcagccctcggccaccatgtcggcgccgtcggaggaggaggagtacgcgcggctggtgatggaggcgcagccggagtggctgcgcgccgaggtgaagcggctgtcccacgagctggccgagaccacgcgtgagaagatccaggcggccgagtacgggctggcggtgctcgaggagaagcaccagctcaagctgcagttcgaggagctcgaggtggactatgaggctatccgcagcgagatggagcagctcaaggaggcctttggacaagcacacacaaaccacaagaaggtggctgctgacggagagagccgggaggagagcctgatccaggagtcggcctccaaggagcagtactacgtgcggaaggtgctagagctgcagacggagctgaagcagttgcgcaatgtcctcaccaacacgcagtcggagaatgagcgcctggcctctgtggcccaggagctgaaggagatcaaccagaatgtggagatccagcgtggccgcctgcgggatgacatcaaggagtacaaattccgggaagctcgtctgctgcaggactactcggaactggaggaggagaacatcagcctgcagaagcaagtgtctgtgctcagacagaaccaggtggagtttgagggcctcaagcatgagatcaagcgtctggaggaggagaccgagtacctcaacagccagctggaggatgccatccgcctcaaggagatctcagagcggcagctggaggaggcgctggagaccctgaagacggagcgcgaacagaagaacagcctgcgcaaggagctgtcacactacatgagcatcaatgactccttctacaccagccacctgcatgtctcgctggatggcctcaagttcagtgacgatgctgccgagcccaacaacgatgccgaggccctggtcaatggctttgagcacggcggcctggccaagctgccactggacaacaagacctccacgcccaagaaggagggcctcgcaccgccctcccccagcctcgtctccgacctactcagtgagctcaacatctctgagatccagaagctgaagcagcagctgatgcagatggagcgggaaaaggcgggcctgctggcaacgctgcaggacacacagaagcagctggagcacacgcggggctccctgtcagaacagcaggagaaggtgacccgcctcacagagaatctgagtgccctgcggcgcctgcaggccagcaaggagcggcagacagccctggacaacgagaaggaccgtgacagccatgaggatggggactactacgaggtggacatcaacgggcctgagatcttggcctgcaagtaccatgtggctgtggctgaggctggcgagctccgcgagcagctcaaggcactgcgcagcacgcacgaggctcgtgaggcccagcacgccgaggagaagggccgctatgaggctgagggccaggcactcacggagaaggtctccctgctagagaaggccagccgccaggaccgcgagctgctggcccggctggagaaggagctaaagaaggtgagcgacgtcgccggcgagacacagggcagcctgagtgtggcccaggatgagctggtgaccttcagtgaggagctggccaatctctaccaccacgtgtgcatgtgcaacaatgagacacccaaccgtgtcatgctggactactaccgcgagggccagggcggggccggccgcaccagtcccgggggccgcaccagccccgaggcgcgtggccggcgctcacccatcctcctacccaaggggctgctggctcctgaggcgggccgagcagatggtgggacgggggacagcagcccctcgcctggctcctcactgccatcacccctgagtgacccacgccgggagcccatgaacatctacaacctgatcgctatcatccgtgaccagatcaagcacctgcaggcagccgtggaccgcaccacggagctgtcacgccagcgcattgcctctcaggagctgggccccgccgtggacaaggacaaggaagcgcttatggaggagatcctcaagctgaagtcgctgctcagcaccaagcgggagcagatcaccacgctgcgcactgtgctcaaggccaacaagcagacggccgaggtggcccttgccaacctgaagagcaagtatgagaatgagaaggccatggttaccgagaccatgatgaagctgcgcaatgagctcaaggccctcaaggaggacgcagccaccttctcctcgctgcgtgctatgtttgccaccaggtgtgacgagtacattacacagctggatgagatgcagcggcagctggcggctgctgaggacgagaagaagacgctgaactcgctgctgcgcatggccatccagcagaagctggcgctgacccagcggctggagctgctcgagctggaccatgagcagacccggcgtggccgtgccaaagccgccccgaagaccaagccagccacaccgagcgtaagtcacacctgtgcctgtgccagcgacagggccgagggcaccgggctggccaaccaggtgttctgcagcgagaagcacagcatttactgtgattaggggctgtggggcgccgcacgctgcagctaacatctgcttcacctcaactaacccagcagcagcgggacggcggtgctaggtcaatcttaacgtgactaatgcacagagggtaggagtctagccgaggcgccatggggcgttgcatcagcaggacacttgtgagagctttgtgtcgcttctcactcctcaaagccccctcaggagcacccagtcctcagctgctctcttaggtgggggtcagaggtggggatagagctgcacattcttgcagcagatgtgtgatgaaagcatcttctaagccctgcgcacccgtggggaaacccaagggaggagtcctggtcctgctccctcagcacccaaaaggggcagaacctgagttgagacttgcatgttcctcgcatgtgtctaatgtcagcactagaaagcagttttaggaggttccagcctgcagcataggtacgacctcagaggatggctttgcacttggcatagtttcatggaaaggagtacgttgtagtttatgcagtatctgactgcaaatcatattcaggaaagaagtgcagaatttcttccccaagcccagagaagagcagccctgagcccctgtattctgctggccagacacacatggcacagacacagctgaccataacccaggaatccagagctcggtttctcatttctgagatcaggatgcttgtatagtggcctgtgaggtgacagattggcagggcccaaggccccaggttttcatttttcatgagaaaagctttccaagtgcctggccagaccttggtccttagtgcagagcccgtccttttgtacttggggtgaccccagcagccaattatccggccttccatagggggttcagtcccaaagacatggggctttgaaaaccctagcctgaagtctgagccaccaagggcttggctgggttggacacccacaggtgtatccagagcccagcccggtgctgggaaagctttgcatagggccagggccacttgtcaggattcacaggtaggagatgtttaggtctctttatttagtgcaatctgggggatggcaacagagaaagaggaaaggtagctgtagggttctcccatttccagaggctccatccacacctgccttcccacattctgagcagaacttttctcagtacttttttcccgatcaccctgtgggaccagctggacctgaggctgcagtcttctctcctgcaggctgcttgccttgtctctcatgcggaagaggcattcgagttacctggtgagagaccgtgttgccccctcccacagctctctgccctgcgcgttcttccctttggtgccgagtatgtttcggtcccctccagactccaggacacgcccatgtatgtcccctgcgtgttcatcctgggcccagatccccctgccccagcaagactcgcagtgggatggctgctggcatgcccaccctgcatgcgctttgccctctccttgcaagcctggcacatagcttctctccatactcctaagggactttgcagacacccaagccactgggacccctgctaacacatgcaggtcttctcttctgccaactaacgtgctcgcgccctcccagcacgtggagagcttcaattgtcagataaacaggaagcgacagatgaccgctttctaacgctctcttttctcccgttttcagctgtagagtagctgccaggaggacttggccacccggccctgtcacactgcagccccttccccttccctctcgtggcccacaaggaggaaggaagggcaacctaaaagcccacttagaaactttttggatatgccactgcaattcttttcaaaatagcattccccaggtttttaatgggaggaaaaaaagctttaatgttgagcatgctgcgagctgctgcgtggaaaggcctctgtatgggccgaagacccttcttccctggctgccaggctcgccaggagcccactggaaacgcccaccacgggggctccttgttacacatgttctttttttatccgatcaacctgtgcacttttgatattttgatattatatttgcttccttaattcctcgcgtagagacggtctcaggtgccgtggtctatgctcgtggtcctgtagctgtccgcctcagctcccaccgtgtttgtctggtgtcagcacgaggcagagctgtgtgctccatagcgtgtagctttagactcggagatgagtgctttgacccagcgaggagctcagctaagtgtatccacgctgtggttcagcagcctttagatcatacggcattgtggttcatgtttgaaattacagattttaaatgccatgttcattaagaaatccagggtattcagattctggggtttttcatattgtattattattattcttaggaatagttcaatgtaacaagaagaaaacttgacctttgctctggttaaaacagtaataggcacttgaaaaaaaaagataaattattgaatgagtagtattacctacaaattccagaattttctgggttttaggacgttgtgaagcatgactgattaacagaattttatacaactgtaccaataaaattccaaattggaattgttttgttactctggttgttgtgccaaattgtggtacacttagaaaattctacagtcgtcgatttttagggtgttctctttcaacacctttttgttagtaatcattgccagtagtgccttcatcagttaagggaggtgtcccagcacagatcattctcaaaagcgagcagggaagagctagtgggcatgctgaaggccagcgtggacagcaggtgaggcaggtgctcctcacacccagacctgggcatcttcattgagggaaagaaaacagtcattgtgcaaaattctgttagtcagtgattctttacttgcaaattcaggggcttagaaaatgaaagcaaacacaaaaccttgagtgtgctttgggaaccaaatggaccttctgggacaagctgagcaagctgtatgaacgccacgtttgtgaagagctgagggtatcaggagggccgacgctgtgttggcatgcgcagtaggggatgagggttagccatagtattctttgcaaatgtgaaagcgagacattatatcttctcttgcttggtgtaactaatcactgttaatttcaggaaacagaactcattaaaactccttagcaaaccaggtctacatcctgttttgtttgctgagtgaggttagtgggagtggtcaaattggtactcttggaggaagaaaaactgtccttccttctccaaaaaaggaaaaattataataatataaatgacaaaaataaaagaattctgtttcctggaataagcatttcttattcctagttgtagggactcctatttttaccttccgttacagtgttgattcataagaaatattgttacatttgagataacttcatctgtatggggtatttatttgcaatgatgtctgagtactgtattttttctgtgcattaccttagtgtcagaatgttggtctttattttaaagtcatatgcatgttctcctgccaaggaacctttacacagacccaaacaaaaaaataataatcaaatgccttcaatttctgagaaaatgaggcagagcatggaaaaggaataggaaggagaaattaattgagattttcaggacacagacatatgatgtgaatgcctacaaagccagtgcgcataggaacagtgggcctgggtaaagagtcacattggtaggaccaataaagaataataaaaagacaaagcaca

SEQ ID NO: 2226 - DNA, 4636 bp, Homo sapiens
  source 1..4636: mol_type = unassigned DNA
gcggcggcggctgaggagggcccggcctgcgagagcctcagtgggagccggctcagccctcggccaccatgtcggcgccgtcggaggaggaggagtacgcgcggctggtgatggaggcgcagccggagtggctgcgcgccgaggtgaagcggctgtcccacgagctggccgagaccacgcgtgagaagatccaggcggccgagtacgggctggcggtgctcgaggagaagcaccagctcaagctgcagttcgaggagctcgaggtggactatgaggctatccgcagcgagatggagcagctcaaggaggcctttggacaagcacacacaaaccacaagaaggtggctgctgacggagagagccgggaggagagcctgatccaggagtcggcctccaaggagcagtactacgtgcggaaggtgctagagctgcagacggagctgaagcagttgcgcaatgtcctcaccaacacgcagtcggagaatgagcgcctggcctctgtggcccaggagctgaaggagatcaaccagaatgtggagatccagcgtggccgcctgcgggatgacatcaaggagtacaaattccgggaagctcgtctgctgcaggactactcggaactggaggaggagaacatcagcctgcagaagcaagtgtctgtgctcagacagaaccaggtggagtttgagggcctcaagcatgagatcaagcgtctggaggaggagaccgagtacctcaacagccagctggaggatgccatccgcctcaaggagatctcagagcggcagctggaggaggcgctggagaccctgaagacggagcgcgaacagaagaacagcctgcgcaaggagctgtcacactacatgagcatcaatgactccttctacaccagccacctgcatgtctcgctggatggcctcaagttcagtgacgatgctgccgagcccaacaacgatgccgaggccctggtcaatggctttgagcacggcggcctggccaagctgccactggacaacaagacctccacgcccaagaaggagggcctcgcaccgccctcccccagcctcgtctccgacctactcagtgagctcaacatctctgagatccagaagctgaagcagcagctgatgcagatggagcgggaaaaggcgggcctgctggcaacgctgcaggacacacagaagcagctggagcacacgcggggctccctgtcagaacagcaggagaaggtgacccgcctcacagagaatctgagtgccctgcggcgcctgcaggccagcaaggagcggcagacagccctggacaacgagaaggaccgtgacagccatgaggatggggactactacgaggtggacatcaacgggcctgagatcttggcctgcaagtaccatgtggctgtggctgaggctggcgagctccgcgagcagctcaaggcactgcgcagcacgcacgaggctcgtgaggcccagcacgccgaggagaagggccgctatgaggctgagggccaggcactcacggagaaggtctccctgctagagaaggccagccgccaggaccgcgagctgctggcccggctggagaaggagctaaagaaggtgagcgacgtcgccggcgagacacagggcagcctgagtgtggcccaggatgagctggtgaccttcagtgaggagctggccaatctctaccaccacgtgtgcatgtgcaacaatgagacacccaaccgtgtcatgctggactactaccgcgagggccagggcggggccggccgcaccagtcccgggggccgcaccagccccgaggcgcgtggccggcgctcacccatcctcctacccaaggggctgctggctcctgaggcgggccgagcagatggtgggacgggggacagcagcccctcgcctggctcctcactgccatcacccctgagtgacccacgccgggagcccatgaacatctacaacctgatcgctatcatccgtgaccagatcaagcacctgcaggcagccgtggaccgcaccacggagctgtcacgccagcgcattgcctctcaggagctgggccccgccgtggacaaggacaaggaagcgcttatggaggagatcctcaagctgaagtcgctgctcagcaccaagcgggagcagatcaccacgctgcgcactgtgctcaaggccaacaagcagacggccgaggtggcccttgccaacctgaagagcaagtatgagaatgagaaggccatggttaccgagaccatgatgaagctgcgcaatgagctcaaggccctcaaggaggacgcagccaccttctcctcgctgcgtgctatgtttgccaccaggtgtgacgagtacattacacagctggatgagatgcagcggcagctggcggctgctgaggacgagaagaagacgctgaactcgctgctgcgcatggccatccagcagaagctggcgctgacccagcggctggagctgctcgagctggaccatgagcagacccggcgtggccgtgccaaagccgccccgaagaccaagccagccacaccgagcctgtagagtagctgccaggaggacttggccacccggccctgtcacactgcagccccttccccttccctctcgtggcccacaaggaggaaggaagggcaacctaaaagcccacttagaaactttttggatatgccactgcaattcttttcaaaatagcattccccaggtttttaatgggaggaaaaaaagctttaatgttgagcatgctgcgagctgctgcgtggaaaggcctctgtatgggccgaagacccttcttccctggctgccaggctcgccaggagcccactggaaacgcccaccacgggggctccttgttacacatgttctttttttatccgatcaacctgtgcacttttgatattttgatattatatttgcttccttaattcctcgcgtagagacggtctcaggtgccgtggtctatgctcgtggtcctgtagctgtccgcctcagctcccaccgtgtttgtctggtgtcagcacgaggcagagctgtgtgctccatagcgtgtagctttagactcggagatgagtgctttgacccagcgaggagctcagctaagtgtatccacgctgtggttcagcagcctttagatcatacggcattgtggttcatgtttgaaattacagattttaaatgccatgttcattaagaaatccagggtattcagattctggggtttttcatattgtattattattattcttaggaatagttcaatgtaacaagaagaaaacttgacctttgctctggttaaaacagtaataggcacttgaaaaaaaaagataaattattgaatgagtagtattacctacaaattccagaattttctgggttttaggacgttgtgaagcatgactgattaacagaattttatacaactgtaccaataaaattccaaattggaattgttttgttactctggttgttgtgccaaattgtggtacacttagaaaattctacagtcgtcgatttttagggtgttctctttcaacacctttttgttagtaatcattgccagtagtgccttcatcagttaagggaggtgtcccagcacagatcattctcaaaagcgagcagggaagagctagtgggcatgctgaaggccagcgtggacagcaggtgaggcaggtgctcctcacacccagacctgggcatcttcattgagggaaagaaaacagtcattgtgcaaaattctgttagtcagtgattctttacttgcaaattcaggggcttagaaaatgaaagcaaacacaaaaccttgagtgtgctttgggaaccaaatggaccttctgggacaagctgagcaagctgtatgaacgccacgtttgtgaagagctgagggtatcaggagggccgacgctgtgttggcatgcgcagtaggggatgagggttagccatagtattctttgcaaatgtgaaagcgagacattatatcttctcttgcttggtgtaactaatcactgttaatttcaggaaacagaactcattaaaactccttagcaaaccaggtctacatcctgttttgtttgctgagtgaggttagtgggagtggtcaaattggtactcttggaggaagaaaaactgtccttccttctccaaaaaaggaaaaattataataatataaatgacaaaaataaaagaattctgtttcctggaataagcatttcttattcctagttgtagggactcctatttttaccttccgttacagtgttgattcataagaaatattgttacatttgagataacttcatctgtatggggtatttatttgcaatgatgtctgagtactgtattttttctgtgcattaccttagtgtcagaatgttggtctttattttaaagtcatatgcatgttctcctgccaaggaacctttacacagacccaaacaaaaaaataataatcaaatgccttcaatttctgagaaaatgaggcagagcatggaaaaggaataggaaggagaaattaattgagattttcaggacacagacatatgatgtgaatgcctacaaagccagtgcgcataggaacagtgggcctgggtaaagagtcacattggtaggaccaataaagaataataaaaagacaaagcaca

SEQ ID NO: 2227 - DNA, 5258 bp, Homo sapiens
  source 1..5258: mol_type = unassigned DNA
aatcggaataggcaagcttccggcgggaagtgagccagggcttggcgcggcggccgtggttgcggcgcgggaagtttggatcctggttccgtccgctaggagtctgcgtgcgaggattatggctgctgttcctcaaaataatctacaggagcaactagaacgtcactcagccagaacacttaataataaattaagtctttcaaaaccaaaattttcaggtttcacttttaaaaagaaaacatcttcagataacaatgtatctgtaactaatgtgtcagtagcaaaaacacctgtattaagaaataaagatgttaatgttaccgaagacttttccttcagtgaacctctacccaacaccacaaatcagcaaagggtcaaggacttctttaaaaatgctccagcaggacaggaaacacagagaggtggatcaaaatcattattgccagatttcttgcagactccgaaggaagttgtatgcactacccaaaacacaccaactgtaaagaaatcccgggatactgctctcaagaaattagaatttagttcttcaccagattctttaagtaccatcaatgattgggatgatatggatgactttgatacttctgagacttcaaaatcatttgttacaccaccccaaagtcactttgtaagagtaagcactgctcagaaatcaaaaaagggtaagagaaacttttttaaagcacagctttatacaacaaacacagtaaagactgatttgcctccaccctcctctgaaagcgagcaaatagatttgactgaggaacagaaggatgactcagaatggttaagcagcgatgtgatttgcatcgatgatggccccattgctgaagtgcatataaatgaagatgctcaggaaagtgactctctgaaaactcatttggaagatgaaagagataatagcgaaaagaagaagaatttggaagaagctgaattacattcaactgagaaagttccatgtattgaatttgatgatgatgattatgatacggattttgttccaccttctccagaagaaattatttctgcttcttcttcctcttcaaaatgccttagtacgttaaaggaccttgacacctctgacagaaaagaggatgttcttagcacatcaaaagatcttttgtcaaaacctgagaaaatgagtatgcaggagctgaatccagaaaccagcacagactgtgacgctagacagataagtttacagcagcagcttattcatgtgatggagcacatctgtaaattaattgatactattcctgatgataaactgaaacttttggattgtgggaacgaactgcttcagcagcggaacataagaaggaaacttctaacggaagtagattttaataaaagtgatgccagtcttcttggctcattgtggagatacaggcctgattcacttgatggccctatggagggtgattcctgccctacagggaattctatgaaggagttaaatttttcacaccttccctcaaattctgtttctcctggggactgtttactgactaccaccctaggaaagacaggattctctgccaccaggaagaatctttttgaaaggcctttattcaatacccatttacagaagtcctttgtaagtagcaactgggctgaaacaccaagactaggaaaaaaaaatgaaagctcttatttcccaggaaatgttctcacaagcactgctgtgaaagatcagaataaacatactgcttcaataaatgacttagaaagagaaacccaaccttcctatgatattgataattttgacatagatgactttgatgatgatgatgactgggaagacataatgcataatttagcagccagcaaatcttccacagctgcctatcaacccatcaaggaaggtcggccaattaaatcagtatcagaaagactttcctcagccaagacagactgtcttccagtgtcatctactgctcaaaatataaacttctcagagtcaattcagaattatactgacaagtcagcacaaaatttagcatccagaaatctgaaacatgagcgtttccaaagtcttagttttcctcatacaaaggaaatgatgaagatttttcataaaaaatttggcctgcataattttagaactaatcagctagaggcgatcaatgctgcactgcttggtgaagactgttttatcctgatgccgactggaggtggtaagagtttgtgttaccagctccctgcctgtgtttctcctggggtcactgttgtcatttctcccttgagatcacttatcgtagatcaagtccaaaagctgacttccttggatattccagctacatatctgacaggtgataagactgactcagaagctacaaatatttacctccagttatcaaaaaaagacccaatcataaaacttctatatgtcactccagaaaagatctgtgcaagtaacagactcatttctactctggagaatctctatgagaggaagctcttggcacgttttgttattgatgaagcacattgtgtcagtcagtggggacatgattttcgtcaagattacaaaagaatgaatatgcttcgccagaagtttccttctgttccggtgatggctcttacggccacagctaatcccagggtacagaaggacatcctgactcagctgaagattctcagacctcaggtgtttagcatgagctttaacagacataatctgaaatactatgtattaccgaaaaagcctaaaaaggtggcatttgattgcctagaatggatcagaaagcaccacccatatgattcagggataatttactgcctctccaggcgagaatgtgacaccatggctgacacgttacagagagatgggctcgctgctcttgcttaccatgctggcctcagtgattctgccagagatgaagtgcagcagaagtggattaatcaggatggctgtcaggttatctgtgctacaattgcatttggaatggggattgacaaaccggacgtgcgatttgtgattcatgcatctctccctaaatctgtggagggttactaccaagaatctggcagagctggaagagatggggaaatatctcactgcctgcttttctatacctatcatgatgtgaccagactgaaaagacttataatgatggaaaaagatggaaaccatcatacaagagaaactcacttcaataatttgtatagcatggtacattactgtgaaaatataacggaatgcaggagaatacagcttttggcctactttggtgaaaatggatttaatcctgatttttgtaagaaacacccagatgtttcttgtgataattgctgtaaaacaaaggattataaaacaagagatgtgactgacgatgtgaaaagtattgtaagatttgttcaagaacatagttcatcacaaggaatgagaaatataaaacatgtaggtccttctggaagatttactatgaatatgctggtcgacattttcttggggagtaagagtgcaaaaatccagtcaggtatatttggaaaaggatctgcttattcacgacacaatgccgaaagactttttaaaaagctgatacttgacaagattttggatgaagacttatatatcaatgccaatgaccaggcgatcgcttatgtgatgctcggaaataaagcccaaactgtactaaatggcaatttaaaggtagactttatggaaacagaaaattccagcagtgtgaaaaaacaaaaagcgttagtagcaaaagtgtctcagagggaagagatggttaaaaaatgtcttggagaacttacagaagtctgcaaatctctggggaaagtttttggtgtccattacttcaatatttttaataccgtcactctcaagaagcttgcagaatctttatcttctgatcctgaggttttgcttcaaattgatggtgttactgaagacaaactggaaaaatatggtgcggaagtgatttcagtattacagaaatactctgaatggacatcgccagctgaagacagttccccagggataagcctgtccagcagcagaggccccggaagaagtgccgctgaggagctcgacgaggaaatacccgtatcttcccactactttgcaagtaaaaccagaaatgaaaggaagaggaaaaagatgccagcctcccaaaggtctaagaggagaaaaactgcttccagtggttccaaggcaaagggggggtctgccacatgtagaaagatatcttccaaaacgaaatcctccagcatcattggatccagttcagcctcacatacttctcaagcgacatcaggagccaatagcaaattggggattatggctccaccgaagcctataaatagaccgtttcttaagccttcatatgcattctcataacaaccgaatctcaatgtacatagaccctctttcttgtttgtcagcatctgaccatctgtgactataaagctgttattcttgttataccatttgaagtttttactcgtctctattaatatttaaataaatgctggggggtgatagttcttctttttaaaataaacattttcttttgaataagcatgttttgctgccgctgcaagtgttgtggccgttgtttctcagaacgtctgaggcagcagctgaatcatctcagtgcaagagcttctgagcataacacgaaacccagaagccaaaggaagagccacgcgtgggcccttgtgaaactaaagcttttcgtgtaagacaacacaaacaaaatttaaagacaaatgacggggaaaagaggagaaaatatattacaaaggattagtatccatcataccaaatacccgtgaaccagtcagaaacatcccagggggcaggtggaccaaggatgtgaacaggctagtctcagaagaagaaatacacatgctcatggcccggcactgtggctcacgcctgggatcccagcactttgggaggccgaggcaggtggatcacgaggtcaggagtttgagaccagcctgcccaacatggtgaaaccccgtctctactaaaaatacaaaaattagccaggcgtggtgtacaggcacgcctgtagtcccagctactcaggaggctgaggcaagagaatcgcttgaacccaggaggcggaggttgcagtgagccgagatcgtgccactgcactccagcctgggtgacagagcaagactccgtctcaaaaaaaaaaaaaaaaaaagaaatatacatgctctgcaaatatgtgaaaaaggtcaatctccatgaataaaaatatgataaaacc

SEQ ID NO: 2228 - DNA, 3966 bp, Homo sapiens
  source 1..3966: mol_type = unassigned DNA
cgggaagtttggatcctggttccgtccgctaggagtctgcgtgcgaggattatggctgctgttcctcaaaataatctacaggagcaactagaacgtcactcagccagaacacttaataataaattaagtctttcaaaaccaaaattttcaggtttcacttttaaaaagaaaacatcttcagataacaatgtatctgtaactaatgtgtcagtagcaaaaacacctgtattaagaaataaagatgttaatgttaccgaagacttttccttcagtgaacctctacccaacaccacaaatcagcaaagggtcaaggacttctttaaaaatgctccagcaggacaggaaacacagagaggtggatcaaaatcattattgccagatttcttgcagactccgaaggaagttgtatgcactacccaaaacacaccaactgtaaagaaatcccgggatactgctctcaagaaattagaatttagttcttcaccagattctttaagtaccatcaatgattgggatgatatggatgactttgatacttctgagacttcaaaatcatttgttacaccaccccaaagtcactttgtaagagtaagcactgctcagaaatcaaaaaagggtaagagaaacttttttaaagcacagctttatacaacaaacacagtaaagactgatttgcctccaccctcctctgaaagcgagcaaatagatttgactgaggaacagaaggatgactcagaatggttaagcagcgatgtgatttgcatcgatgatggccccattgctgaagtgcatataaatgaagatgctcaggaaagtgactctctgaaaactcatttggaagatgaaagagataatagcgaaaagaagaagaatttggaagaagctgaattacattcaactgagaaagttccatgtattgaatttgatgatgatgattatgatacggattttgttccaccttctccagaagaaattatttctgcttcttcttcctcttcaaaatgccttagtacgttaaaggaccttgacacctctgacagaaaagaggatgttcttagcacatcaaaagatcttttgtcaaaacctgagaaaatgagtatgcaggagctgaatccagaaaccagcacagactgtgacgctagacagataagtttacagcagcagcttattcatgtgatggagcacatctgtaaattaattgatactattcctgatgataaactgaaacttttggattgtgggaacgaactgcttcagcagcggaacataagaaggaaacttctaacggaagtagattttaataaaagtgatgccagtcttcttggctcattgtggagatacaggcctgattcacttgatggccctatggagggtgattcctgccctacagggaattctatgaaggagttaaatttttcacaccttccctcaaattctgtttctcctggggactgtttactgactaccaccctaggaaagacaggattctctgccaccaggaagaatctttttgaaaggcctttattcaatacccatttacagaagtcctttgtaagtagcaactgggctgaaacaccaagactaggaaaaaaaaatgaaagctcttatttcccaggaaatgttctcacaagcactgctgtgaaagatcagaataaacatactgcttcaataaatgacttagaaagagaaacccaaccttcctatgatattgataattttgacatagatgactttgatgatgatgatgactgggaagacataatgcataatttagcagccagcaaatcttccacagctgcctatcaacccatcaaggaaggtcggccaattaaatcagtatcagaaagactttcctcagccaagacagactgtcttccagtgtcatctactgctcaaaatataaacttctcagagtcaattcagaattatactgacaagtcagcacaaaatttagcatccagaaatctgaaacatgagcgtttccaaagtcttagttttcctcatacaaaggaaatgatgaagatttttcataaaaaatttggcctgcataattttagaactaatcagctagaggcgatcaatgctgcactgcttggtgaagactgttttatcctgatgccgactggaggtggtaagagtttgtgttaccagctccctgcctgtgtttctcctggggtcactgttgtcatttctcccttgagatcacttatcgtagatcaagtccaaaagctgacttccttggatattccagctacatatctgacaggtgataagactgactcagaagctacaaatatttacctccagttatcaaaaaaagacccaatcataaaacttctatatgtcactccagaaaagatctgtgcaagtaacagactcatttctactctggagaatctctatgagaggaagctcttggcacgttttgttattgatgaagcacattgtgtcagtcagtggggacatgattttcgtcaagattacaaaagaatgaatatgcttcgccagaagtttccttctgttccggtgatggctcttacggccacagctaatcccagggtacagaaggacatcctgactcagctgaagattctcagacctcaggtgtttagcatgagctttaacagacataatctgaaatactatgtattaccgaaaaagcctaaaaaggtggcatttgattgcctagaatggatcagaaagcaccacccatatgattcagggataatttactgcctctccaggcgagaatgtgacaccatggctgacacgttacagagagatgggctcgctgctcttgcttaccatgctggcctcagtgattctgccagagatgaagtgcagcagaagtggattaatcaggatggctgtcaggttatctgtgctacaattgcatttggaatggggattgacaaaccggacgtgcgatttgtgattcatgcatctctccctaaatctgtggagggttactaccaagaatctggcagagctggaagagatggggaaatatctcactgcctgcttttctatacctatcatgatgtgaccagactgaaaagacttataatgatggaaaaagatggaaaccatcatacaagagaaactcacttcaataatttgtatagcatggtacattactgtgaaaatataacggaatgcaggagaatacagcttttggcctactttggtgaaaatggatttaatcctgatttttgtaagaaacacccagatgtttcttgtgataattgctgtaaaacaaaggattataaaacaagagatgtgactgacgatgtgaaaagtattgtaagatttgttcaagaacatagttcatcacaaggaatgagaaatataaaacatgtaggtccttctggaagatttactatgaatatgctggtcgacattttcttggaatctttatcttctgatcctgaggttttgcttcaaattgatggtgttactgaagacaaactggaaaaatatggtgcggaagtgatttcagtattacagaaatactctgaatggacatcgccagctgaagacagttccccagggataagcctgtccagcagcagaggccccggaagaagtgccgctgaggagctcgacgaggaaatacccgtatcttcccactactttgcaagtaaaaccagaaatgaaaggaagaggaaaaagatgccagcctcccaaaggtctaagaggagaaaaactgcttccagtggttccaaggcaaagggggggtctgccacatgtagaaagatatcttccaaaacgaaatcctccagcatcattggatccagttcagcctcacatacttctcaagcgacatcaggagccaatagcaaattggggattatggctccaccgaagcctataaatagaccgtttcttaagccttcatatgcattctcataacaaccgaatctcaatgtacatagaccctctttcttgtttgtcagcatctgacca

SEQ ID NO: 2229 - DNA, 4510 bp, Homo sapiens
  source 1..4510: mol_type = unassigned DNA
ggatcctggttccgtccgctaggagtctgcgtgcgaggattatggctgctgttcctcaaaataatctacaggagcaactagaacgtcactcagccagaacacttaataataaattaagtctttcaaaaccaaaattttcaggtttcacttttaaaaagaaaacatcttcagataacaatgtatctgtaactaatgtgtcagtagcaaaaacacctgtattaagaaataaagatgttaatgttaccgaagacttttccttcagtgaacctctacccaacaccacaaatcagcaaagggtcaaggacttctttaaaaatgctccagcaggacaggaaacacagagaggtggatcaaaatcattattgccagatttcttgcagactccgaaggaagttgtatgcactacccaaaacacaccaactgtaaagaaatcccgggatactgctctcaagaaattagaatttagttcttcaccagattctttaagtaccatcaatgattgggatgatatggatgactttgatacttctgagacttcaaaatcatttgttacaccaccccaaagtcactttgtaagagtaagcactgctcagaaatcaaaaaagggtaagagaaacttttttaaagcacagctttatacaacaaacacagtaaagactgatttgcctccaccctcctctgaaagcgagcaaatagatttgactgaggaacagaaggatgactcagaatggttaagcagcgatgtgatttgcatcgatgatggccccattgctgaagtgcatataaatgaagatgctcaggaaagtgactctctgaaaactcatttggaagatgaaagagataatagcgaaaagaagaagaatttggaagaagctgaattacattcaactgagaaagttccatgtattgaatttgatgatgatgattatgatacggattttgttccaccttctccagaagaaattatttctgcttcttcttcctcttcaaaatgccttagtacgttaaaggaccttgacacctctgacagaaaagaggatgttcttagcacatcaaaagatcttttgtcaaaacctgagaaaatgagtatgcaggagctgaatccagaaaccagcacagactgtgacgggtctcactgtgttgcccaggctggtcttgaactcctggacttaagcaatcctcctgccttggcctccccaaagggctgggattacagtcatgagccaccatgcctagccaagacttttttttttttccctcaaagaaaaatattaacaacataattattttatagctagacagataagtttacagcagcagcttattcatgtgatggagcacatctgtaaattaattgatactattcctgatgataaactgaaacttttggattgtgggaacgaactgcttcagcagcggaacataagaaggaaacttctaacggaagtagattttaataaaagtgatgccagtcttcttggctcattgtggagatacaggcctgattcacttgatggccctatggagggtgattcctgccctacagggaattctatgaaggagttaaatttttcacaccttccctcaaattctgtttctcctggggactgtttactgactaccaccctaggaaagacaggattctctgccaccaggaagaatctttttgaaaggcctttattcaatacccatttacagaagtcctttgtaagtagcaactgggctgaaacaccaagactaggaaaaaaaaatgaaagctcttatttcccaggaaatgttctcacaagcactgctgtgaaagatcagaataaacatactgcttcaataaatgacttagaaagagaaacccaaccttcctatgatattgataattttgacatagatgactttgatgatgatgatgactgggaagacataatgcataatttagcagccagcaaatcttccacagctgcctatcaacccatcaaggaaggtcggccaattaaatcagtatcagaaagactttcctcagccaagacagactgtcttccagtgtcatctactgctcaaaatataaacttctcagagtcaattcagaattatactgacaagtcagcacaaaatttagcatccagaaatctgaaacatgagcgtttccaaagtcttagttttcctcatacaaaggaaatgatgaagatttttcataaaaaatttggcctgcataattttagaactaatcagctagaggcgatcaatgctgcactgcttggtgaagactgttttatcctgatgccgactggaggtggtaagagtttgtgttaccagctccctgcctgtgtttctcctggggtcactgttgtcatttctcccttgagatcacttatcgtagatcaagtccaaaagctgacttccttggatattccagctacatatctgacaggtgataagactgactcagaagctacaaatatttacctccagttatcaaaaaaagacccaatcataaaacttctatatgtcactccagaaaagatctgtgcaagtaacagactcatttctactctggagaatctctatgagaggaagctcttggcacgttttgttattgatgaagcacattgtgtcagtcagtggggacatgattttcgtcaagattacaaaagaatgaatatgcttcgccagaagtttccttctgttccggtgatggctcttacggccacagctaatcccagggtacagaaggacatcctgactcagctgaagattctcagacctcaggtgtttagcatgagctttaacagacataatctgaaatactatgtattaccgaaaaagcctaaaaaggtggcatttgattgcctagaatggatcagaaagcaccacccatatgattcagggataatttactgcctctccaggcgagaatgtgacaccatggctgacacgttacagagagatgggctcgctgctcttgcttaccatgctggcctcagtgattctgccagagatgaagtgcagcagaagtggattaatcaggatggctgtcaggttatctgtgctacaattgcatttggaatggggattgacaaaccggacgtgcgatttgtgattcatgcatctctccctaaatctgtggagggttactaccaagaatctggcagagctggaagagatggggaaatatctcactgcctgcttttctatacctatcatgatgtgaccagactgaaaagacttataatgatggaaaaagatggaaaccatcatacaagagaaactcacttcaataatttgtatagcatggtacattactgtgaaaatataacggaatgcaggagaatacagcttttggcctactttggtgaaaatggatttaatcctgatttttgtaagaaacacccagatgtttcttgtgataattgctgtaaaacaaaggattataaaacaagagatgtgactgacgatgtgaaaagtattgtaagatttgttcaagaacatagttcatcacaaggaatgagaaatataaaacatgtaggtccttctggaagatttactatgaatatgctggtcgacattttcttggggagtaagagtgcaaaaatccagtcaggtatatttggaaaaggatctgcttattcacgacacaatgccgaaagactttttaaaaagctgatacttgacaagattttggatgaagacttatatatcaatgccaatgaccaggcgatcgcttatgtgatgctcggaaataaagcccaaactgtactaaatggcaatttaaaggtagactttatggaaacagaaaattccagcagtgtgaaaaaacaaaaagcgttagtagcaaaagtgtctcagagggaagagatggttaaaaaatgtcttggagaacttacagaagtctgcaaatctctggggaaagtttttggtgtccattacttcaatatttttaataccgtcactctcaagaagcttgcagaatctttatcttctgatcctgaggttttgcttcaaattgatggtgttactgaagacaaactggaaaaatatggtgcggaagtgatttcagtattacagaaatactctgaatggacatcgccagctgaagacagttccccagggataagcctgtccagcagcagaggccccggaagaagtgccgctgaggagctcgacgaggaaatacccgtatcttcccactactttgcaagtaaaaccagaaatgaaaggaagaggaaaaagatgccagcctcccaaaggtctaagaggagaaaaactgcttccagtggttccaaggcaaagggggggtctgccacatgtagaaagatatcttccaaaacgaaatcctccagcatcattggatccagttcagcctcacatacttctcaagcgacatcaggagccaatagcaaattggggattatggctccaccgaagcctataaatagaccgtttcttaagccttcatatgcattctcataacaaccgaatctcaatgtacatagaccctctttcttgtttgtcagcatct

SEQ ID NO: 2230 - DNA, 866 bp, Homo sapiens
  source 1..866: mol_type = unassigned DNA
attatggctgctgttcctcaaaataatctacaggagcaactagaacgtcactcagccagaacacttaataataaattaagtctttcaaaaccaaaattttcgtaagtgttttgactggtttgctgtcacataggcactaacttaccacattgtacacatgagatatcttctctttaaactcccccattgtacagatgaggaaatgaagctgagagattcattgattttcccactttgccaattaatggtagagtatgttttagcagcaccagaggtttcacttttaaaaagaaaacatcttcagataacaatgtatctgtaactaatgtgtcagtagcaaaaacacctgtattaagaaataaagatgttaatgttaccgaagacttttccttcagtgaacctctacccaacaccacaaatcagcaaagggtcaaggacttctttaaaaatgctccagcaggacaggaaacacagagaggtggatcaaaatcattattgccagatttcttgcagactccgaaggaagttgtatgcactacccaaaacacaccaactgtaaagaaatcccgggatactgctctcaagaaattagaatttagttcttcaccagattctttaagtaccatcaatgattgggatgatatggatgactttgatacttctgagacttcaaaatcatttgttacaccaccccaaagtcactttgtaagagtaagcactgctcagaaatcaaaaaagggtaagagaaacttttttaaagcacagctttatacaacaaacacagtaaagactgatttgcctccaccctcctctgaaagcgagcaaatagatttgactgaggaacagaaggatgactcagaatggtt

SEQ ID NO: 2231 - DNA, 577 bp, Homo sapiens
  source 1..577: mol_type = unassigned DNA
atataaatgaagatgctcaggaaagtgactctctgaaaactcatttggaagatgaaagagataatagcgaaaagaagaagaatttggaagaagctgaattacattcaactgagaaagttccatgtattgaatttgatgatgatgattatgatacggattttgttccaccttctccagaagaaattatttctgcttcttcttcctcttcaaaatgccttagtacgttaaaggaccttgacacctctgacagaaaagaggatgttcttagcacatcaaaagatcttttgtcaaaacctgagaaaatgagtatgcaggagctgaatccagaaaccagcacagactgtgacgaaggaaacttctaacggaagtagattttaataaaagtgatgccagtcttcttggctcattgtggagatacaggcctgattcacttgatggccctatggagggtgattcctgccctacagggaattctatgaaggagttaaatttttcacaccttccctcaaattctgtttctcctggggactgtttactgactaccaccctaggaaagacaggattctctgccaccagg

SEQ ID NO: 2232 - DNA, 533 bp, Homo sapiens
  source 1..533: mol_type = unassigned DNA
gagtcagatttggagaaaagctgagaagggctagtttaagtctagaggttaaagtgctgacaagtcagcacaaaatttagcatccagaaatctgaaacatgagcgtttccaaagtcttagttttcctcatacaaaggaaatgatgaagatttttcataaaaaatttggcctgcataattttagaactaatcagctagaggcgatcaatgctgcactgcttggtgaagactgttttatcctgatgccgactggaggtggtaagagtttgtgttaccagctccctgcctgtgtttctcctggggtcactgttgtcatttctcccttgagatcacttatcgtagatcaagtccaaaagctgacttccttggatattccagctacatatctgacaggtgataagactgactcagaagctacaaatatttacctccagttatcaaaaaaagacccaatcataaaacttctatatgtcactccagaaaagatctgtgcaagtaacagactcatttctactctggagaatctctatgaga

SEQ ID NO: 2233 - DNA, 2023 bp, Homo sapiens
  source 1..2023: mol_type = unassigned DNA
agtttaagtctagaggttaaagtgctgacaagtcagcacaaaatttagcatccagaaatctgaaacatgagcgtttccaaagtcttagttttcctcatacaaaggaaatgatgaagatttttcataaaaaatttggcctgcataattttagaactaatcagctagaggcgatcaatgctgcactgcttggtgaagactgttttatcctgatgccgactgattccagctacatatctgacaggtgataagactgactcagaagctacaaatatttacctccagttatcaaaaaaagacccaatcataaaacttctatatgtcactccagaaaagatctgtgcaagtaacagactcatttctactctggagaatctctatgagaggaagctcttggcacgttttgttattgatgaagcacattgtgtcagtcagtggggacatgattttcgtcaagattacaaaagaatgaatatgcttcgccagaagtttccttctgttccggtgatggctcttacggccacagctaatcccagggtacagaaggacatcctgactcagctgaagattctcagacctcaggtgtttagcatgagctttaacagacataatctgaaatactatgtattaccgaaaaagcctaaaaaggtggcatttgattgcctagaatggatcagaaagcaccacccatatgattcagggataatttactgcctctccaggcgagaatgtgacaccatggctgacacgttacagagagatgggctcgctgctcttgcttaccatgctggcctcagtgattctgccagagatgaagtgcagcagaagtggattaatcaggatggctgtcaggttatctgtgctacaattgcatttggaatggggattgacaaaccggacgtgcgatttgtgattcatgcatctctccctaaatctgtggagggttactaccaagaatctggcagagctggaagagatggggaaatatctcactgcctgcttttctatacctatcatgatgtgaccagactgaaaagacttataatgatggaaaaagatggaaaccatcatacaagagaaactcacttcaataatttgtatagcatggtacattactgtgaaaatataacggaatgcaggagaatacagcttttggcctactttggtgaaaatggatttaatcctgatttttgtaagaaacacccagatgtttcttgtgataattgctgtaaaacaaaggattataaaacaagagatgtgactgacgatgtgaaaagtattgtaagatttgttcaagaacatagttcatcacaaggaatgagaaatataaaacatgtaggtccttctggaagatttactatgaatatgctggtcgacattttcttggggagtaagagtgcaaaaatccagtcaggtatatttggaaaaggatctgcttattcacgacacaatgccgaaagactttttaaaaagctgatacttgacaagattttggatgaagacttatatatcaatgccaatgaccaggcgatcgcttatgtgatgctcggaaataaagcccaaactgtactaaatggcaatttaaaggtagactttatggaaacagaaaattccagcagtgtgaaaaaacaaaaagcgttagtagcaaaagtgtctcagagggaagagatggttaaaaaatgtcttggagaacttacagaagtctgcaaatctctggggaaagtttttggtgtccattacttcaatatttttaataccgtcactctcaagaagcttgcagaatctttatcttctgatcctgaggttttgcttcaaattgatggtgttactgaagacaaactggaaaaatatggtgcggaagtgatttcagtattacagaaatactctgaatggacatcgccagctgaagacagttccccagggataagcctgtccagcagcagaggccccggaagaagtgccgctgaggagctcgacgaggaaatacccgtatcttcccactactttgcaagtaaaaccagaaatg

SEQ ID NO: 2234 - DNA, 747 bp, Homo sapiens
  source 1..747: mol_type = unassigned DNA
tgactgtgtgagcaacaccccccacacctcagtagcaaaaacagagaacagtggcagcacatcgtgggctgactgcagttgattctggctctcttacatgagaatgccaagtcatacaagaaagtgcctgccatgctgagcttctctttaccttcttgggttttaatggcattgcaagttatcagtataaaaactcatattagttatactaaatagttggaccaagttaagatattaggttgttatgtagtgtgcattttaaagtaaaacaaatgatagagcttttagaagcatctattatgaaaatgttccttcaagtctgtgccttatgaatctaataagcttttgcttttatatcaggttatctgtgctacaattgcatttggaatggggattgacaaaccggacgtgcgatttgtgattcatgcatctctccctaaatctgtggagggttactaccaagaatctggcagagctggaagagatggggaaatatctcactgcctgcttttctatacctatcatgatgtgaccagactgaaaagacttataatgatggaaaaagatggaaaccatcatacaagagaaactcacttcaataatttgtatagcatggtacattactgtgaaaatataacggaatgcaggagaatacagcttttggcctactttggtgaaaatggatttaatcctgatttttgtaagaaacacccagatgtttcttgtgataattgctgtaaaacaaag

SEQ ID NO: 2235 - DNA, 1683 bp, Homo sapiens
  source 1..1683: mol_type = unassigned DNA
ctttgacctcagatactcagagaagtgcatggccactgccgtaatctcaggctctgcttcctcaggatgttcagttcggtggatgctcgactgataaatacagcaaatataagtcaaaccatcatcattggggataatgaagatttgaaaaaaaaaaacctaacatttattcctatagtactaaaatcttgaggatgaacattaatactcagttaattataatatagaatgccatgttgacaatgctgttaacagtaattttcttatttaatatttaaagttatatgaatctattctaaatatttctatgatatgctctatttttcccctataagtatgtcttactatagtcttcatctcttttagtggaaaaagatggaaaccatcatacaagagaaactcacttcaataatttgtatagcatggtacattactgtgaaaatataacggaatgcaggagaatacagcttttggcctactttggtgaaaatggatttaatcctgatttttgtaagaaacacccagatgtttcttgtgataattgctgtaaaacaaaggattataaaacaagagatgtgactgacgatgtgaaaagtattgtaagatttgttcaagaacatagttcatcacaaggaatgagaaatataaaacatgtaggtccttctggaagatttactatgaatatgctggtcgacattttcttggggagtaagagtgcaaaaatccagtcaggtatatttggaaaaggatctgcttattcacgacacaatgccgaaagactttttaaaaagctgatacttgacaagattttggatgaagacttatatatcaatgccaatgaccaggcgatcgcttatgtgatgctcggaaataaagcccaaactgtactaaatggcaatttaaaggtagactttatggaaacagaaaattccagcagtgtgaaaaaacaaaaagcgttagtagcaaaagtgtctcagagggaagagatggttaaaaaatgtcttggagaacttacagaagtctgcaaatctctggggaaagtttttggtgtccattacttcaatatttttaataccgtcactctcaagaagcttgcagaatctttatcttctgatcctgaggttttgcttcaaattgatggtgttactgaagacaaactggaaaaatatggtgcggaagtgatttcagtattacagaaatactctgaatggacatcgccagctgaagacagttccccagggataagcctgtccagcagcagaggccccggaagaagtgccgctgaggagctcgacgaggaaatacccgtatcttcccactactttgcaagtaaaaccagaaatgaaaggaagaggaaaaagatgccagcctcccaaaggtctaagaggagaaaaactgcttccagtggttccaaggcaaagggggggtctgccacatgtagaaagatatcttccaaaacgaaatcctccagcatcattggatccagttcagcctcacatacttctcaagcgacatcaggagccaatagcaaattggggattatggctccaccgaagcctataaatagaccgtttcttaagccttcatatgcattctcataacaaccgaatctcaatgtacatagaccctctttcttgtttgtcagcatctgaccatctgtgactataaagctgttattcttgt

SEQ ID NO: 2236 - DNA, 1024 bp, Homo sapiens
  source 1..1024: mol_type = unassigned DNA
cagtaaagagagggcacaccagtctcagctagatgagtactggccatgggaacagtgggcaagagcagatctgctccactccacgcacatggcacaggtcccaccctcagcttcctcctgccctggctcttgcccttgctctgccctggcctatgccgctggaattggatgaatctttatcttctgatcctgaggttttgcttcaaattgatggtgttactgaagacaaactggaaaaatatggtgcggaagtgatttcagtattacagaaatactctgaatggacatcgccagctgaagacagttccccagggataagcctgtccagcagcagaggccccggaagaagtgccgctgaggagctcgacgaggaaatacccgtatcttcccactactttgcaagtaaaaccagaaatgaaaggaagaggaaaaagatgccagcctcccaaaggtctaagaggagaaaaactgcttccagtggttccaaggcaaagggggggtctgccacatgtagaaagatatcttccaaaacgaaatcctccagcatcattggatccagttcagcctcacatacttctcaagcgacatcaggagccaatagcaaattggggattatggctccaccgaagcctataaatagaccgtttcttaagccttcatatgcattctcataacaaccgaatctcaatgtacatagaccctctttcttgtttgtcagcatctgaccatctgtgactataaagctgttattcttgttataccatttgaagtttttactcgtctctattaatatttaaataaatgctggggggtgatagttcttctttttaaaataaacattttcttttgaataagcatgttttgctgccgctgcaagtgttgtggccgttgtttctcagaacgtctgaggcagcagctgaatcatctcagtgcaagagcttctgagcataacacgaaacccagaagccaaaggaagagccacgcgtgggcccttgtgaaactaaagcttttcgtgtaagacaac

SEQ ID NO: 2237 - DNA, 1784 bp, Homo sapiens
  source 1..1784: mol_type = unassigned DNA
gcagcctgcactctcagaaatcagacttgagtggccggaacccttgagaccagaggcttaccatgctgctccctaggagggccaggaactgctgacgtgaccactggacagttattcgtgtctcttacaattaccaaacagaatggacaagcttaataaaataaccgtccccgccagtcagaagttgaggcagcttcaaaagatggtccatgatattaaaaacaatgaaggtggaataatgaataaaatcaaaaagctaaaagtcaaagcacctccaagtgttcctcgaagggactacgcttcagagagccctgctgacgaagaggagcagtggtccgatgactttgacagcgactatgaaaatccagatgagcactcggactcagagatgtacgtgatgcccgccgaggagaacgctgatgacagctacgagccgcctccagtagagcaggaaaccaggccggttcacccagccctgcccttcgccagaggcgagtatatagacaatcgatcaagccagaggcattccccacccttcagcaagacacttcccagtaagcccagctggccttcagagaaagcaaggctcacctccaccctgccggccctgactgctttgcagaaacctcaagtcccacccaaacccaaaggcctccttgaggatgaggctgattatgtggtccccgtggaagataatgatgaaaactatattcatcccacagaaagcagttcacctccacctgaaaaagctcccatggtgaatagatcaaccaagccaaattcctcaacgcccgcctctcctccaggaacagcttcaggtcgaaacagtggggcctgggaaaccaagtcacctccaccagctgcaccatccccgttgccacgggccgggaaaaaaccaacgacaccactgaagacaactccagttgcctctcaacagaatgcttcaagtgtttgtgaagaaaaacctatacctgctgaacgccaccgagggtcaagtcacagacaagaagctgtgcagtcaccagtgtttcctcctgcccagaaacaaatccaccaaaaacccatacctctgccaagatttacagaagggggaaacccaactgtggatgggcccctacccagcttttcatctaattccactatttcagaacaggaagctggcgttctctgcaagccatggtatgctggagcctgtgatcgaaagtctgctgaagaggcattgcacagatcaaacaaggatggatcatttcttattcggaaaagctctggccatgattccaaacaaccatatacactagttgtattctttaataagcgagtatataatattcctgtgcgatttattgaagcaacaaaacaatatgccttgggcagaaagaaaaatggtgaagagtactttggaagtgttgctgaaatcatcaggaatcatcaacatagtcctttggttcttattgacagtcagaataacacaaaagattccaccagactgaagtatgcagttaaagtttcataaagggggaaaaaaaagatcaataccattgcttcagacactttcccaaagtttctccttttgagaaaaagtcccaaaacttcatattttggattatgaatcatccagtaataaaatggaagatggagtcagctattgaagtggtcatccatttctttttaagaagctcatgtggacttgttctattgcctgacctgatgaactgttaatatctggtgaggttgagttatcatgctactaatattttccaaataaatatttttatttttaaaaa

SEQ ID NO: 2238 - DNA, 1715 bp, Homo sapiens
  source 1..1715: mol_type = unassigned DNA
gcagcctgcactctcagaaatcagacttgagtggccggaacccttgagaccagaggcttaccatgctgctccctaggagggccaggaactgctgacgtgaccactggacagttattcgtgtctcttacaattaccaaacagaatggacaagcttaataaaataaccgtccccgccagtcagaagttgaggcagcttcaaaagatggtccatgatattaaaaacaatgaaggtggaataatgaataaaatcaaaaagctaaaagtcaaagcacctccaagtgttcctcgaagggactacgcttcagagagccctgctgacgaagaggagcagtggtccgatgactttgacagcgactatgaaaatccagatgagcactcggactcagagatgtacgtgatgcccgccgaggagaacgctgatgacagctacgagccgcctccagtagagcaggaaaccaggccggttcacccagccctgcccttcgccagaggcgagtatatagacaatcgatcaagccagaggcattccccacccttcagcaagacacttcccagtaagcccagctggccttcagagaaagcaaggctcacctccaccctgccggccctgactgctttgcagaaacctcaagtcccacccaaacccaaaggcctccttgaggatgaggctgattatgtggtccccgtggaagataatgatgaaaactatattcatcccacagaaagcagttcacctccacctgaaaaaggtcgaaacagtggggcctgggaaaccaagtcacctccaccagctgcaccatccccgttgccacgggccgggaaaaaaccaacgacaccactgaagacaactccagttgcctctcaacagaatgcttcaagtgtttgtgaagaaaaacctatacctgctgaacgccaccgagggtcaagtcacagacaagaagctgtgcagtcaccagtgtttcctcctgcccagaaacaaatccaccaaaaacccatacctctgccaagatttacagaagggggaaacccaactgtggatgggcccctacccagcttttcatctaattccactatttcagaacaggaagctggcgttctctgcaagccatggtatgctggagcctgtgatcgaaagtctgctgaagaggcattgcacagatcaaacaaggatggatcatttcttattcggaaaagctctggccatgattccaaacaaccatatacactagttgtattctttaataagcgagtatataatattcctgtgcgatttattgaagcaacaaaacaatatgccttgggcagaaagaaaaatggtgaagagtactttggaagtgttgctgaaatcatcaggaatcatcaacatagtcctttggttcttattgacagtcagaataacacaaaagattccaccagactgaagtatgcagttaaagtttcataaagggggaaaaaaaagatcaataccattgcttcagacactttcccaaagtttctccttttgagaaaaagtcccaaaacttcatattttggattatgaatcatccagtaataaaatggaagatggagtcagctattgaagtggtcatccatttctttttaagaagctcatgtggacttgttctattgcctgacctgatgaactgttaatatctggtgaggttgagttatcatgctactaatattttccaaataaatatttttatttttaaaaa

SEQ ID NO: 2239 - DNA, 625 bp, Homo sapiens
  source 1..625: mol_type = unassigned DNA
gatgaatgcagaggtggtaggatgtacctgtaacactgctgggagggagtcctggtcctcatagcacaaccacatcaacagactggcaagtgcacagatccatgacatctcagtaactaagacatgttcccgggaagacttctgatcaaatttggttcttctcagctgatgttgctgggttttgggatgaggacagacatttcactctaatcctaatatgataattttcctgatccagaaaaacctatacctgctgaacgccaccgagggtcaagtcacagacaagaagctgtgcagtcaccagtgtttcctcctgcccagaaacaaatccaccaaaaacccatacctctgccaagatttacagaagggggaaacccaactgtggatgggcccctacccagcttttcatctaattccactatttcagaacaggaagctggcgttctctgcaagccatggtatgctggagcctgtgatcgaaagtctgctgaagaggcattgcacagatcaaacaaggtctgatcatttttattatttattatttttattttattttattttatttatttgttttgagatgatgcagtttcactggagtgcagtggctcgatctcagctcactgca

SEQ ID NO: 2240 - DNA, 927 bp, Homo sapiens
  source 1..927: mol_type = unassigned DNA
tgtgctcgggcaagttttacttctccctagagcaggggtgtttgccagcagcctgcactctcagaaatcagacttgagtggccggaacccttgagaccagaggcttaccatgctgctccctaggagggccaggaactgctgacgtgaccactggacagttattcgtgtctcttacaattaccaaacagaatggacaagcttaataaaataaccgtccccgccagtcagaagttgaggcagcttcaaaagatggtccatgatattaaaaacaatgaaggtggaataatgaataaaatcaaaaagctaaaagtcaaagcacctccaagtgttcctcgaagggactacgcttcagagagccctgctgacgaagaggagcagtggtccgatgactttgacagcgactatgaaaatccagatgagcactcggactcagagatgtacgtgatgcccgccgaggagaacgctgatgacagctacgagccgcctccagtagagcaggaaaccaggccggttcacccagccctgcccttcgccagaggcgagtatataggctgattatgtggtccccgtggaagataatgatgaaaactatattcatcccacagaaagcagttcacctccacctgaaaaagctcccatggtgaatagatcaaccaagccaaattcctcaacgcccgcctctcctccaggaacagcttcaggtcgaaacagtggggcctgggaaaccaagtcacctccaccagctgcaccatccccgttgccacgggccgggaaaaaaccaacgacaccactgaagacaactccagttgcctctcaacagaatgcttcaagtgtttgtgaagaaaaacctatacctgctgaacgccaccgagggtcaagtcacagacaagaagctgtgcagtcaccagtgtttcctcctgcccagaa

SEQ ID NO: 2241 - DNA, 557 bp, Homo sapiens
  source 1..557: mol_type = unassigned DNA
acatttgtgcagtgtgcacagatgtaggtgtgagctgttggctcccttcctgaaggacctctgtgggggtcctcactgagtcctcagaatcagtgggctcaggacttgccccatggggcagggggcgggtaaggagaaggtcctttagaaatgttaaggtggagtccctaacccccatcccagctctgagcttatacactgacacttttaaaatgtgtcatcacctttgcccacaagttttccttaatagcttcaatataactacctatatgtgcttaactgaaagcaacacagtatgtgcaaatatttctgagcctgccagagaggccagcctcagtgtgagcatcagcccccggctcaggacttggggactgagtagtgtatatgtttgtgcaggtcgaaacagtggggcctgggaaaccaagtcacctccaccagctgcaccatccccgttgccacgggccgggaaaaaaccaacgacaccactgaagacaactccagttgcctctcaacagaatgcttcaagtgtttgtgaagaaaaacctatacctgctgaa

SEQ ID NO: 2242 - DNA, 1138 bp, Homo sapiens
  source 1..1138: mol_type = unassigned DNA
gctgatgacagctacgagccgcctccagtagagcaggaaaccaggccggttcacccagccctgcccttcgccagaggcgagtatatagacaatcgatcaagccagaggcattccccacccttcagcaagacacttcccagtaagcccagctggccttcagagaaagcaaggctcacctccaccctgccggccctgactgctttgcagaaacctcaagtcccacccaaacccaaaggcctccttgaggatgaggctgattatgtggtccccgtggaagataatgatgaaaactatattcatcccacagaaagcagttcacctccacctgaaaaaggtaagagtttgtcgccttaagcacctgaaaatttttagcagttgatcaggatgtataagagtatttggtagtaagcactaagaggctcagaaatgacagtgcccaggactttctcccctgggccacagtgtgtgcttctttggctggttgggcagacagcatcagtgacaacccatctctgtgtatcatagcccttccctgccttccccttcctcttccatgctttaatcttcccatctcacattatgaaagcacctgggtagttctcttcagctgccctcgcttcaaatggatttctcataaaacctaatacaatgtcacaagccaccatgttggccttgtaaacattgcaccaagaacagtttctgcagaggagtgaaaaaatgaaagagtgaaatatgccctgagtcctggttctttaaatttagtagtatgataagcctatgaaacatttcatccgtaaacccttcacagaacaacaaatgctatgaccaatgaattaccttaaaaagccagtgctacataagattaggcatggaaacagggtatgtttactctgaatatagtcactatggagaatatgatccagtacaagtgatacctcttcaggtaacattactcatctactactctcaactccatggtagccatattcaggtttcagtccgccatcatgtagcaaccctctcccgtactccgtacctatcaccaacagcttcaagacccacctgaattcccaagccacccattaccacaaaagaacaaatacacattccctccttaccaacccctctttaaaaaaac

SEQ ID NO: 2243 - DNA, 440 bp, Homo sapiens
  source 1..440: mol_type = unassigned DNA
atggacaagcttaataaaataaccgtccccgccagtcagaagttgaggcagcttcaaaagatggtccatgatattaaaaacaatgaaggtggaataatgaataaaatcaaaaagctaaaagtcaaagcacctccaagtgttcctcgaagggactacgcttcagacacctgctccctttcctggaacccttccaaatagtcttgatgtcagaacatttaatctctcctggaatgcagaagtgtggcccaacaggatcttctaagcctttgcaacacaaagtttgattcccagcaagatagcatcaacctcatctggagcttgttagaaatgcagaatcttggccccaccctagaactactggatcagaatttacattttagcaagatctccaggggatctgaatgtaaatcatatttaagaaaccctgctataaaccacca

SEQ ID NO: 2244 - DNA, 1284 bp, Homo sapiens
  source 1..1284: mol_type = unassigned DNA
acttgagtggccggaacccttgagaccagaggcttaccatgctgctccctaggagggccaggaactgctgacgtgaccactggacagttattcgtgtctcttacaattaccaaacagaatggacaagcttaataaaataaccgtccccgccagtcagaagttgaggcagcttcaaaagatggtccatgatattaaaaacaatgaaggtggaataatgaataaaatcaaaaagctaaaagtcaaagcacctccaagtgttcctcgaagggactacgcttcagagagccctgctgacgaagaggagcagtggtccgatgactttgacagcgactatgaaaatccagatgagcactcggactcagagatgtacgtgatgcccgccgaggagaacgctgatgacagctacgagccgcctccagtagagcaggaaaccaggccggttcacccagccctgcccttcgccagaggaacagcttcaggtcgaaacagtggggcctgggaaaccaagtcacctccaccagctgcaccatccccgttgccacgggccgggaaaaaaccaacgacaccactgaagacaactccagttgcctctcaacagaatgcttcaagtgtttgtgaagaaaaacctatacctgctgaacgccaccgagggtcaagtcacagacaagaagctgtgcagtcaccagtgtttcctcctgcccagaaacaaatccaccaaaaacccatacctctgccaagatttacagaagggggaaacccaactgtggatgggcccctacccagcttttcatctaattccactatttcagaacaggaagctggcgttctctgcaagccatggtatgctggagcctgtgatcgaaagtctgctgaagaggcattgcacagatcaaacaagtactttggaagtgttgctgaaatcatcaggaatcatcaacatagtcctttggttcttattgacagtcagaataacacaaaagattccaccagactgaagtatgcagttaaagtttcataaagggggaaaaaaaagatcaataccattgcttcagacactttcccaaagtttctccttttgagaaaaagtcccaaaacttcatattttggattatgaatcatccagtaataaaatggaagatggagtcagctattgaagtggtcatccatttctttttaagaagctcatgtggacttgttctattgcctgacctgatgaactgttaatatctggtgaggttgagttatcatgctactaatattttccaaataaatatttttattttt

SEQ ID NO: 2245 - DNA, 1599 bp, Homo sapiens
  source 1..1599: mol_type = unassigned DNA
acttgagtggccggaacccttgagaccagaggcttaccatgctgctccctaggagggccaggaactgctgacgtgaccactggacagttattcgtgtctcttacaattaccaaacagaatggacaagcttaataaaataaccgtccccgccagtcagaagttgaggcagcttcaaaagatggtccatgatattaaaaacaatgaaggtggaataatgaataaaatcaaaaagctaaaagtcaaagcacctccaagtgttcctcgaagggactacgcttcagagagccctgctgacgaagaggagcagtggtccgatgactttgacagcgactatgaaaatccagatgagcactcggactcagagatgtacgtgatgcccgccgaggagaacgctgatgacagctacgagccgcctccagtagagcaggaaaccaggccggttcacccagccctgcccttcgccagaggcgagtatatagacaatcgatcaagccagaggcattccccacccttcagcaagacacttcccagtaagcccagctggccttcagagaaagcaaggctcacctccaccctgccggccctgactgctttgcagaaacctcaagtcccacccaaacccaaaggcctccttgaggatgaggctgattatgtggtccccgtggaagataatgatgaaaactatattcatcccacagaaagcagttcacctccacctgaaaaagctcccatggtgaatagatcaaccaagccaaattcctcaacgcccgcctctcctccaggaacagcttcaggtcgaaacagtggggcctgggaaaccaagtcacctccaccagctgcaccatccccgttgccacgggccgggaaaaaaccaacgacaccactgaagacaactccagttgcctctcaacagaatgcttcaagtgtttgtgaagaaaaacctatacctgctgaacgccaccgagggtcaagtcacagacaagaagctgtgcagtcaccagtgtttcctcctgcccagaaacaaatccaccaaaaacccatacctctgccaagatttacagaagggggaaacccaactgtggatgggcccctacccagcttttcatctaattccactatttcagaacaggaagctggcgttctctgcaagccatggtatgctggagcctgtgatcgaaagtctgctgaagaggcattgcacagatcaaacaagtactttggaagtgttgctgaaatcatcaggaatcatcaacatagtcctttggttcttattgacagtcagaataacacaaaagattccaccagactgaagtatgcagttaaagtttcataaagggggaaaaaaaagatcaataccattgcttcagacactttcccaaagtttctccttttgagaaaaagtcccaaaacttcatattttggattatgaatcatccagtaataaaatggaagatggagtcagctattgaagtggtcatccatttctttttaagaagctcatgtggacttgttctattgcctgacctgatgaactgttaatatctggtgaggttgagttatcatgctactaatattttccaaataaatatttttattttt

SEQ ID NO: 2246 - DNA, 2741 bp, Homo sapiens
  source 1..2741: mol_type = unassigned DNA
agccgggcagctgcagcggagccgcggagcgggcggcggggcccaggctgtgcgcttggggagcgcggaatgtgaggcttggcgggccgcagcacgctcggacgggccaggggcggcgacccctcgcggacgcccggctgcgcgccgggccggggacttgcccttgcacgctccctgcgccctccagctcgccggcgggaccatgaagaagttctctcggatgcccaagtcggagggcggcagcggcggcggagcggcgggtggcggggctggcggggccggggccggggccggctgcggctccggcggctcgtccgtgggggtccgggtgttcgcggtcggccgccaccaggtcaccctggaagagtcgctggccgaaggtggattctccacagttttcctcgtgcgtactcacggtggaatccgatgtgcattgaagcgaatgtatgtcaataacatgccagacctcaatgtttgtaaaagggaaattacaattatgaaagagctatctggtcacaaaaatattgtgggctatttggactgtgctgttaattcaattagtgataatgtatgggaagtccttatcttaatggaatattgtcgagctggacaggtagtgaatcaaatgaataagaagctacagacgggttttacagaaccagaagtgttacagatattctgtgatacctgtgaagctgttgcaaggttgcatcagtgtaagactccaataattcaccgggatctgaaggtagaaaatattttgttgaatgatggtgggaactatgtactttgtgactttggcagtgccactaataaatttcttaatcctcaaaaagatggagttaatgtagtagaagaagaaattaaaaagtatacaactctgtcatacagagcccctgaaatgatcaacctttatggagggaaacccatcaccaccaaggctgatatctgggcactgggatgtctactctataaactttgtttcttcactcttccttttggtgagagtcaggttgctatctgtgatggcaacttcaccatcccagacaattctcgttactcccgtaacatacattgcttaataaggttcatgcttgaaccagatccggaacatagacctgatatatttcaagtgtcatattttgcatttaaatttgccaaaaaggattgtccagtctccaacatcaataagtgttgtaaacaattactgagacacggagcactgttaactgaaattcttctattccttcagctcttcctgaaccgatgactgctagtgaagcagctgctaggaaaagccaaataaaagccagaataacagataccattggaccaacagaaacctcaattgcaccaagacaaagaccaaaggccaactctgctactactgccactcccagtgtgctgaccattcaaagttcagcaacacctgttaaagtccttgctcctggtgaattcggtaaccatagaccaaaaggggcactaagacctggaaatggccctgaaattttattgggtcagggacctcctcagcagccgccacagcagcatagagtactccagcaactacagcagggagattggagattacagcaactccatttacagcatcgtcatcctcaccagcagcagcagcagcagcagcagcaacagcaacagcagcagcagcaacagcaacagcagcagcagcagcagcagcagcagcaccaccaccaccaccaccaccacctacttcaagatgcttatatgcagcagtatcaacatgcaacacagcagcaacagatgcttcaacaacaatttttaatgcattcggtatatcaaccacaaccttctgcatcacagtatcctacaatgatgccgcagtatcagcaggctttctttcaacagcagatgctagctcaacatcagccgtctcaacaacaggcatcacctgaatatcttacctcccctcaagagttctcaccagccttagtttcctacacttcatcacttccagctcaggttggaaccataatggactcctcctatagtgccaataggtcagttgctgataaagaggccattgcaaatttcacaaatcagaagaacatcagcaatccacctgatatgtcagggtggaatccttttggagaggataatttctctaagttaacagaagaggaactattggacagagaatttgaccttctaagatcaagtaagggacacttgaaggcttattttgcttcacagtaaaataacagctctattattattcagcaaggccaaagacttttgagaatgtgtatggaaaattctttttgtgcatttgagggcaaaattcaggccatcttcttatacatatactatcaaattatgttgtgtgcattagaaatcagttgcttgatagtagctattaaacccaatattgctgatagtatgctaatatcctaaaacttaaatattgcatatctatgaatgttaaattcagaatatctctaaaacatggaaaattgatgtttcaataaaaagggagacattttattattttgccttactaatgattttgcagctctgtttttctgcacactcaatagaaaatattgtgggtctgagatgccctttgaaaatgcctgaaagaaaacatgggctactacattatgttaatgttttgtaatgtccttttaatgagtggtgacataaaagggctgctttgttgtcctgatatggcaaaaattaaataaattctttttcactttaaa

SEQ ID NO: 2247 - DNA, 3195 bp, Homo sapiens
  source 1..3195: mol_type = unassigned DNA
cggggcccaggctgtgcgcttggggagcgcggaatgtgaggcttggcgggccgcagcacgctcggacgggccaggggcggcgacccctcgcggacgcccggctgcgcgccgggccggggacttgcccttgcacgctccctgcgccctccagctcgccggcgggaccatgaagaagttctctcggatgcccaagtcggagggcggcagcggcggcggagcggcgggtggcggggctggcggggccggggccggggccggctgcggctccggcggctcgtccgtgggggtccgggtgttcgcggtcggccgccaccaggtcaccctggaagagtcgctggccgaaggtggattctccacagttttcctcgtgcgtactcacggtggaatccgatgtgcattgaagcgaatgtatgtcaataacatgccagacctcaatgtttgtaaaagggaaattacaattatgaaagagctatctggtcacaaaaatattgtgggctatttggactgtgctgttaattcaattagtgataatgtatgggaagtccttatcttaatggaatattgtcgagctggacaggtagtgaatcaaatgaataagaagctacagacgggttttacagaaccagaagtgttacagatattctgtgatacctgtgaagctgttgcaaggttgcatcagtgtaagactccaataattcaccgggatctgaaggtagaaaatattttgttgaatgatggtgggaactatgtactttgtgactttggcagtgccactaataaatttcttaatcctcaaaaagatggagttaatgtagtagaagaagaaattaaaaagtatacaactctgtcatacagagcccctgaaatgatcaacctttatggagggaaacccatcaccaccaaggctgatatctgggcactgggatgtctactctataaactttgtttcttcactcttccttttggtgagagtcaggttgctatctgtgatggcaacttcaccatcccagacaattctcgttactcccgtaacatacattgcttaataaggttcatgcttgaaccagatccggaacatagacctgatatatttcaagtgtcatattttgcatttaaatttgccaaaaaggattgtccagtctccaacatcaataattcttctattccttcagctcttcctgaaccgatgactgctagtgaagcagctgctaggaaaagccaaataaaagccagaataacagataccattggaccaacagaaacctcaattgcaccaagacaaagaccaaaggccaactctgctactactgccactcccagtgtgctgaccattcaaagttcagcaacacctgttaaagtccttgctcctggtgaattcggtaaccatagaccaaaaggggcactaagacctggaaatggccctgaaattttattgggtcagggacctcctcagcagccgccacagcagcatagagtactccagcaactacagcagggagattggagattacagcaactccatttacagcatcgtcatcctcaccagcagcagcagcagcagcagcagcaacagcaacagcagcagcagcaacagcaacagcagcagcagcagcagcagcagcagcaccaccaccaccaccaccaccacctacttcaagatgcttatatgcagcagtatcaacatgcaacacagcagcaacagatgcttcaacaacaatttttaatgcattcggtatatcaaccacaaccttctgcatcacagtatcctacaatgatgccgcagtatcagcaggctttctttcaacagcagatgctagctcaacatcagccgtctcaacaacaggcatcacctgaatatcttacctcccctcaagagttctcaccagccttagtttcctacacttcatcacttccagctcaggttggaaccataatggactcctcctatagtgccaataggtcagttgctgataaagaggccattgcaaatttcacaaatcagaagaacatcagcaatccacctgatatgtcagggtggaatccttttggagaggataatttctctaagttaacagaagaggaactattggacagagaatttgaccttctaagatcaagtaagggacacttgaaggcttattttgcttcacagtaaaataacagctctattattattcagcaaggccaaagacttttgagaatgtgtatggaaaattctttttgtgcatttgagggcaaaattcaggccatcttcttatacatatactatcaaattatgttgtgtgcattagaaatcagttgcttgatagtagctattaaacccaatattgctgatagtatgctaatatcctaaaacttaaatattgcatatctatgaatgttaaattcagaatatctctaaaacatggaaaattgatgtttcaataaaaagggagacattttattattttgccttactaatgattttgcagctctgtttttctgcacactcaatagaaaatattgtgggtctgagatgccctttgaaaatgcctgaaagaaaacatgggctactacattatgttaatgttttgtaatgtccttttaatgagtggtgacataaaagggctgctttgttgtcctgatatggcaaaaattaaataaattctttttcactttaaatcagatatctcaatgtttttacttggaatcattgcttttctttgaactacctaatatatgtcaagcttcgccacacatattttagaaatgtcctttttgaaagaatgatgtgagtgttttgagtaggttgccaaataggagcaaaaagctcacttctagagtatgtagataattttcaggtttctgaggctttgtgtgtgtgtgtgtgtgtgcacgcgcatgtgtgtgcaggtgtgcacacaaaacaagtgtgttttccccttttgcatgtgaaaagaaggtcttaataatccctagtttatagttcctagttcctatttcatttaggtaattggccttatgagaatgtttaatagatgaaatgctttgttctgaattggtatatattttatgtaaaattcctgtaagaatagtttgggatttaaatttgtattttatatattggttatatgattatgaaaattaaattgatgattaaatgcagatataaaaataagttctgagccgttaataaaggtttctaaataaaaccga

SEQ ID NO: 2248 - DNA, 566 bp, Homo sapiens
  source 1..566: mol_type = unassigned DNA
tctaatgatatttatgcttctttggtttacaggcactgggatgtctactctataaactttgtttcttcactcttccttttggtgagagtcaggttgctatctgtgatggcaacttcaccatcccagacaattctcgttactcccgtaacatacattgcttaataaggttcatgcttgaaccagatccggaacatagacctgatatatttcaagtgtcatattttgcatttaaatttgccaaaaaggattgtccagtctccaacatcaataattcttctattccttcagctcttcctgaaccgatgactgctagtgaagcagctgctaggaaaagccaaataaaagccagaataacagataccattggaccaacagaaacctcaattgcaccaagacaaagaccaaaggccaactctgctactactgccactcccagtgtgctgaccattcaaagttcagcaacacctgttaaagtccttgctcctggtgaattcggtaaccatagaccaaaaggtaatagagccccgccaacctcatcctcttaaaggttaatgttaataaacctt

SEQ ID NO: 2249 - DNA, 602 bp, Homo sapiens
  source 1..602: mol_type = unassigned DNA
attaaggatcacttaaaaattaatacaggtattttggataatagtaataattattttgaatagaattatcttgaaggacctttttactatggccttggaactttcttgaataattccccagtgttcactaaactcactttttcttttgtgtcactttttcaatagaataatcaagtttgtcattcatacttctagtgtagagctgttctgtgattgatctacccttagcttgggataatgctttatttataaaatagcaatttctgcattttctgtaggcattaataaagtttgctagaatcatcactgatcttagagtggaacagaaaatacatattttttatccttataatgtgcccctaagtagtataatgtgtgtttcataaaacttcttaacattttgatctattcttgcagggttcatgcttgaaccagatccggaacatagacctgatatatttcaagtgtcatattttgcatttaaatttgccaaaaaggattgtccagtctccaacatcaataattcttctattccttcagctcttcctgaaccgatgactgctagtgaagcagctgctaggaaaagccaaataaaagccagg

SEQ ID NO: 2250 - DNA, 6902 bp, Homo sapiens
  source 1..6902: mol_type = unassigned DNA
atttcaagtgtcatattttgcatttaaatttgccaaaaaggattgtccagtctccaacatcaataattcttctattccttcagctcttcctgaaccgatgactgctagtgaagcagctgctaggaaaagccaaataaaagccagaataacagataccattggaccaacagaaacctcaattgcaccaagacaaagaccaaaggccaactctgctactactgccactcccagtgtgctgaccattcaaagttcagcaacacctgttaaagtccttgctcctggtgaattcggtaaccatagaccaaaaggggcactaagacctggaaatggccctgaaattttattgggtcagggacctcctcagcagccgccacagcagcatagagtactccagcaactacagcagggagattggagattacagcaactccatttacagcatcgtcatcctcaccagcagcagcagcagcagcagcagcaacagcaacagcagcagcagcaacagcaacagcagcagcagcagcagcagcagcagcaccaccaccaccaccaccaccacctacttcaagatgcttatatgcagcagtatcaacatgcaacacagcagcaacagatgcttcaacaacaatttttaatgcattcggtatatcaaccacaaccttctgcatcacagtatcctacaatgatgccgcagtatcagcaggctttctttcaacagcagatgctagctcaacatcagccgtctcaacaacaggcatcacctgaatatcttacctcccctcaagagttctcaccagccttagtttcctacacttcatcacttccagctcaggttggaaccataatggactcctcctatagtgccaataggtcagttgctgataaagaggccattgcaaatttcacaaatcagaagaacatcagcaatccacctgatatgtcagggtggaatccttttggagaggataatttctctaagttaacagaagaggaactattggacagagaatttgaccttctaagatcaaataggctcgaggagagagcatcctcagataagaatgtagactcactttctgctccacataaccatcctccagaagatccttttggttctgttcctttcatttctcattcaggttctcctgaaaagaaagctgaacattcatctataaatcaagaaaatggcactgcaaaccctatcaagaacggtaaaacaagtccagcatctaaagatcagcggactggaaagaaaacctcagtacagggtcaagtgcaaaaggggaatgatgaatctgaaagtgattttgaatcagatcccccttctcctaagagcagtgaagaggaagagcaagatgatgaagaagttcttcagggggaacaaggagattttaatgatgatgatactgaaccagaaaatctgggtcataggcctctcctcatggattctgaagatgaggaagaagaggagaaacatagctctgattctgattatgagcaggctaaagcaaagtacagtgacatgagctctgtctacagagacagatctggcagtggaccaacccaagatcttaatacaatactcctcacctcagcccaattatcctctgatgttgcagtggagactcccaaacaggagtttgatgtatttggcgctgtccccttctttgcagtgcgtgctcaacagccccagcaagaaaagaatgaaaagaacctccctcaacacaggtttcctgctgcaggactggagcaggaggaatttgatgtattcacaaaggcgccttttagcaagaaggtgaatgtacaagaatgccatgcagtggggcctgaggcacatactatccctggttatcccaaaagtgtagatgtatttggctccactccatttcagcccttcctcacatcaacaagtaaaagtgaaagcaatgaggacctttttgggcttgtgccctttgatgaaataacggggagccagcagcaaaaagtcaaacagcgcagcttacagaaactgtcctctcgccaaaggcgcacaaagcaggatatgtccaaaagtaatgggaagcggcatcatggcacgccaactagcacaaagaagactttgaagcctacctatcgcactccagagagggctcgcaggcacaaaaaagtgggccgccgagactctcaaagtagcaatgaatttttaaccatctcagactccaaggagaacattagtgttgcactgactgatgggaaagatagggggaatgtcttacaacctgaggagagcctgttggaccccttcggtgccaagcccttccattctccagacctgtcatggcaccctccacatcagggcctgagcgacatccgtgctgatcacaatactgtcctgccagggcggccaagacaaaattcactacatgggtcattccatagtgcagatgtattgaaaatggatgattttggtgccgtgccctttacagaacttgtggtgcaaagcatcactccacatcagtcccaacagtcccaaccagtcgaattagacccatttggtgctgctccatttccttctaaacagtagatacttctgatggattctcggcattaactcctgtttcaaaaaagtgtgaacagttttatgaatttgaaagaaaatttggtagctctttatagcattcattcttaaagatcagtcagaataggtgatttctaaataaaccaaatagaagaatgaagtatctctacagggtagtaacttgattcctcttcaggagaaaagggagctaaattgcaagctctaactaagggtttctgctactgacatcacaacacagaaatgcaagtgtggtacttccagtgaaagcacatggcacctttctaggtgtgtagccactgagaagggacagtgaaactgttatttttgatatcagaatgtcatttttatgtgcatatccctaaaattagggttatttctacatacactagttacacttgtgaattttttttaaggtctcttttaatttccagacagttaaaaacaatctagttatcttaaagcattagaaagttattatctggagagtgcagagatttcagtccatacacctttctccacaaagcagagccagaagtaactgactattgtgcctaaaactctgtttcatttttaaaaacaagtgccattaaaatggaatatctaatgataagcatatgaaataatgtgtaattagctcaatttaactattccacaacttacatattccaaaacaatgttatacatgataaatatatataatttttgtcagttaaaacaaattaaaaaaatggactatcgtcgcacagaagcctagaacaaaaatatgaagagaaatatctgacatttgtaaagaaattataagaagaaaaaaagatacagaacagaaaacattcactactttagaaacactttatgcatggcttcttgccccaaacttttattgtgatggccctaataaagcagattattggaaaaattggaggacaagggttgtataaaaattttattttatgaagaaaatatgtagcggaaactgaattttcaagacatttacaatgtgaaatcatgttgcatttaacaatgtactttattagcaacttcaccaaatattccccaagtcataagcaacaattatttttattaggttttggggggtggagtagttttaataaagtgcacagaatggtgacacccacaaagccttatataaaggcaggattcatgcatcctgctgcaagtacctctgcactaatataccagatcctaaaatgcatataaggtggactagcatcttaattctgctagttgattgtgtctttactgaaaagaacccagctaccaatttgcctttttttacaccacaaatcctaattagaaacttgaggttttatagaaatcatttaatgatagagattacatatgtgaattaatgtgaatatagtatctgtgcttcctgtgtctatgactattttaagatataattgtgctgcgctatcagattaacatttggaagtttctagaacagttaatgctatttacagaaaggagtagaaactcatcaactggcactctctttgatttttatattttaaattaactctcttcgatctcaaagtatattttacgagtaattttattaggaatctcttatagtgccccaatgggataagctatttgcctattttcacagttctgaacttggaaagaagcaaagtatatgtaactaaaccacatatttgtctttttattgctttttcccttcttttatatgctaaatcaaatatagatttgtggatagggaagcaatatgtgaatcacaatgtagcagaggcagaccaagcattacattattatttagagctggactgcaccaattacttgtcctcgtgccaaaggcaaatatgtttgcacctttttttttttttctgattctcaggttgattaatactgctaatgcaaatgctcaagtagatgtttaaaaactttacaaaatagattcaagtgatactttcttttaaaagtgaagagttgatgattacacatagtaaattcatgaactacagtaggtttgtatcaaacaattttttttaatgaaaatctgttgaggtgtacacaatatgcttcttgattgtattagtccttggtctctgctagacctcatgagtttcatcatttagaaaaggggtagaggatgaactaatgtctccttcagatgtaaacatgaaatacctagagttttacttgcttttcaatacactgaataattttaaatgattctgacactgatgtagaccctttgacttataaattctgaggaaacaactgacagcataaaatatttacattcttataacacagcacagtgactttcttctttcaagattgtagctcagagaaaagatacaggattcaattgggggttcaataggatagaaatggagagattcctttgtgttgtagtagaggcattttcctaaggagtatagatttatactttgcattttcattcatcatcccccagaatcatggtcaaggtgtaggtcactccacacagctgatgctcaggttattcccttgtgagaattatgagaataaagctcccaagatatgtgaaagtgcttaacacagtacctggcacacagcactcaataaaagtttggctctattatgggatggttcaattctggtttaaggaaggaagaaaggttattatatatgtaccactaagcaaatatatatatatatatatatttggggttttttttccctaatattatttgggtgtcccctgtgcttctttaggatgtagttataactaaacctgttatacttgaacatcactaagagaagtaaattattatgaagctagcaaaaatcttgaggccaaagttgtttcttaacagctttaataatgcttgttgattttgaataatcctttaaaaagtggaccatttgcttattttaatatcacgtcagtaaaatgttagtattaaaaagatcagctttttatggcattgaagaatgtatctgctaagacacaaaaattgcatggtaagtataataggtggaggaggaaaggttgtaggccggatgaaaatttaactgactagaacatttattcaggagtgtaattattttcccttaccccaatccctgtgtacgtgttgggtatagttacgacattatccggatttgcaaatagacacaactttcagtcttaccctgtttattgtttaagagtgatagactgttgtcctcttgctggtggaaaatctaaggtggagcccactcttctatgctgaagttcaccaggcagagcagttttcttacaagtcagctactctgcttggtttattttaggttttggtacttcacgtaagcactgttagaaggtacaagtgtattaatatcactagttttgaggcgcttgggtacatttgtttttaatatatttagaatgtgcagtaaacttttttctcatttttttttctttttagcaaacttgttattttaggtccaattattgagttgacagtctactgtgagaatgagatgacatatctactgtgagaataccataaatgatgaatagtttatttgagaacttttatactcagtggtgttttatatattaagataaaaatatgtacacacatgcatgtcacatctctctactgtggagttaatgtgaatttttaaaaaatggaattgcaaccacaatcatatctaagagaacattcactcctagtgagggtttacaaaagctactaagagaataaggtagatgataatgcaaagggtcatgatttggggttatttttgttttattttaaaatttatactgctacttttgaaagaattgtttttatgactatgctctttttgtgattgaaaagtcatctaatagaagctgtatagaagctactttttaattgctggcaaacagctttaagtgcactttctttgattacacttccattttttgttaaacttgaattttctgaagccttttatgtaccactaagcaaataactttaacctttaaataaagcaaatttacatctttattgtatttctacttgttacaaaacatacttgctaaagtaacttcagtcctcaaatatagctgggaaacaattatgagatagactcagtctccccctcccaccccttttcccctgccatatctaattaagcactaactgattttattactttattgcctttacactgcttattctttttgactgaattctgtccctgattcactgttttgtttgaaatttaaagttattttcttactgtatttatcatacctgttttaatctgttttctttaaatgcaataaatcccaaatggattgcatattctttataatcagtga

SEQ ID NO: 2251 - DNA, 1170 bp, Homo sapiens
  source 1..1170: mol_type = unassigned DNA
ttaacagcaaccactatattagtgactttaagctactctttttcttaaaatacttaaaagaggatttttgattctggccaagtgagcctacctttacaactttttaaaaagatttatttcatcttgctgtagttttctagtaatagagctgcttctgtagatgattgttttttacgtttctgattttgtcaccaatgtgaaaggaaggaacatagtaaatagatgcagtgctgacagtgctttaggactggagcattgttttgtataatatcatttcttttttcagatgccgcagtatcagcaggctttctttcaacagcagatgctagctcaacatcagccgtctcaacaacaggcatcacctgaatatcttacctcccctcaagagttctcaccagccttagtttcctacacttcatcacttccagctcaggttggaaccataatggactcctcctatagtgccaataggtcagttgctgataaagaggccattgcaaatttcacaaatcagaagaacatcagcaatccacctgatatgtcagggtggaatccttttggagaggataatttctctaagttaacagaagaggaactattggacagagaatttgaccttctaagatcaagtaagggacacttgaaggcttattttgcttcacagtaaaataacagctctattattattcagcaaggccaaagacttttgagaatgtgtatggaaaattctttttgtgcatttgagggcaaaattcaggccatcttcttatacatatactatcaaattatgttgtgtgcattagaaatcagttgcttgatagtagctattaaacccaatattgctgatagtatgctaatatcctaaaacttaaatattgcatatctatgaatgttaaattcagaatatctctaaaacatggaaaattgatgtttcaataaaaagggagacattttattattttgccttactaatgattttgcagctctgtttttctgcacactcaatagaaaatattgtgggtctgagatgccctttgaaaatgcctgaaagaaaacatgggctactacattatgttaatgttttgtaatgtccttttaatgagtggtgacataaaagggctgctttgttgtcctgatatggcaaaaattaaataaattctttttcacttt

SEQ ID NO: 2252 - DNA, 3804 bp, Homo sapiens
  source 1..3804: mol_type = unassigned DNA
cggggcccaggctgtgcgcttggggagcgcggaatgtgaggcttggcgggccgcagcacgctcggacgggccaggggcggcgacccctcgcggacgcccggctgcgcgccgggccggggacttgcccttgcacgctccctgcgccctccagctcgccggcgggaccatgaagaagttctctcggatgcccaagtcggagggcggcagcggcggcggagcggcgggtggcggggctggcggggccggggccggggccggctgcggctccggcggctcgtccgtgggggtccgggtgttcgcggtcggccgccaccaggtcaccctggaagagtcgctggccgaaggtggattctccacagttttcctcgtgcgtactcacggtggaatccgatgtgcattgaagcgaatgtatgtcaataacatgccagacctcaatgtttgtaaaagggaaattacaattatgaaagagctatctggtcacaaaaatattgtgggctatttggactgtgctgttaattcaattagtgataatgtatgggaagtccttatcttaatggaatattgtcgagctggacaggtagtgaatcaaatgaataagaagctacagacgggttttacagaaccagaagtgttacagatattctgtgatacctgtgaagctgttgcaaggttgcatcagtgtaagactccaataattcaccgggatctgaaggtagaaaatattttgttgaatgatggtgggaactatgtactttgtgactttggcagtgccactaataaatttcttaatcctcaaaaagatggagttaatgtagtagaagaagaaattaaaaagtatacaactctgtcatacagagcccctgaaatgatcaacctttatggagggaaacccatcaccaccaaggctgatatctgggcactgggatgtctactctataaactttgtttcttcactcttccttttggtgagagtcaggttgctatctgtgatggcaacttcaccatcccagacaattctcgttactcccgtaacatacattgcttaataaggttcatgcttgaaccagatccggaacatagacctgatatatttcaagtgtcatattttgcatttaaatttgccaaaaaggattgtccagtctccaacatcaataattcttctattccttcagctcttcctgaaccgatgactgctagtgaagcagctgctaggaaaagccaaataaaagccagaataacagataccattggaccaacagaaacctcaattgcaccaagacaaagaccaaaggccaactctgctactactgccactcccagtgtgctgaccattcaaagttcagcaacacctgttaaagtccttgctcctggtgaattcggtaaccatagaccaaaaggggcactaagacctggaaatggccctgaaattttattgggtcagggacctcctcagcagccgccacagcagcatagagtactccagcaactacagcagggagattggagattacagcaactccatttacagcatcgtcatcctcaccagcagcagcagcagcagcagcagcaacagcaacagcagcagcagcaacagcaacagcagcagcagcagcagcagcagcagcaccaccaccaccaccaccaccacctacttcaagatgcttatatgcagcagtatcaacatgcaacacagcagcaacagatgcttcaacaacaatttttaatgcattcggtatatcaaccacaaccttctgcatcacagtatcctacaatgatgccgcagtatcagcaggctttctttcaacagcagatgctagctcaacatcagccgtctcaacaacaggcatcacctgaatatcttacctcccctcaagagttctcaccagccttagtttcctacacttcatcacttccagctcaggttggaaccataatggactcctcctatagtgccaataggtcagttgctgataaagaggccattgcaaatttcacaaatcagaagaacatcagcaatccacctgatatgtcagggtggaatccttttggagaggataatttctctaagttaacagaagaggaactattggacagagaatttgaccttctaagatcaaataggctcgaggagagagcatcctcagataagaatgtagactcactttctgctccacataaccatcctccagaagatccttttggttctgttcctttcatttctcattcaggttctcctgaaaagaaagctgaacattcatctataaatcaagaaaatggcactgcaaaccctatcaagaacggtaaaacaagtccagcatctaaagatcagcggactggaaagaaaacctcagtacagggtcaagtgcaaaaggggaatgatgaatctgaaagtgattttgaatcagatcccccttctcctaagagcagtgaagaggaagagcaagatgatgaagaagttcttcagggggaacaaggagattttaatgatgatgatactgaaccagaaaatctgggtcataggcctctcctcatggattctgaagatgaggaagaagaggagaaacatagctctgattctgattatgagcaggctaaagcaaagtacagtgacatgagctctgtctacagagacagatctggcagtggaccaacccaagatcttaatacaatactcctcacctcagcccaattatcctctgatgttgcagtggagactcccaaacaggagtttgatgtatttggcgctgtccccttctttgcagtgcgtgctcaacagccccagcaagaaaagaatgaaaagaacctccctcaacacaggtttcctgctgcaggactggagcaggaggaatttgatgtattcacaaaggcgccttttagcaagaaggtgaatgtacaagaatgccatgcagtggggcctgaggcacatactatccctggttatcccaaaagtgtagatgtatttggctccactccatttcagcccttcctcacatcaacaagtaaaagtgaaagcaatgaggacctttttgggcttgtgccctttgatgaaataacggggagccagcagcaaaaagtcaaacagcgcagcttacagaaactgtcctctcgccaaaggcgcacaaagcaggatatgtccaaaagtaatgggaagcggcatcatggcacgccaactagcacaaagaagactttgaagcctacctatcgcactccagagagggctcgcaggcacaaaaaagtgggccgccgagactctcaaagtagcaatgaatttttaaccatctcagactccaaggagaacattagtgttgcactgactgatgggaaagatagggggaatgtcttacaacctgaggagagcctgttggaccccttcggtgccaagcccttccattctccagacctgtcatggcaccctccacatcagggcctgagcgacatccgtgctgatcacaatactgtcctgccagggcggccaagacaaaattcactacatgggtcattccatagtgcagatgtattgaaaatggatgattttggtgccgtgccctttacagaacttgtggtgcaaagcatcactccacatcagtcccaacagtcccaaccagtcgaattagacccatttggtgctgctccatttccttctaaacagtagatacttctgatggattctcggcattaactcctgtttcaaaaaagtgtgaacagttttatgaatttgaaagaaaatttggtagctctttatagcattcattcttaaagatcagtcagaataggtgatttctaaataaaccaaatagaagaatg

SEQ ID NO: 2253 - DNA, 3848 bp, Homo sapiens
  source 1..3848: mol_type = unassigned DNA
cggggcccaggctgtgcgcttggggagcgcggaatgtgaggcttggcgggccgcagcacgctcggacgggccaggggcggcgacccctcgcggacgcccggctgcgcgccgggccggggacttgcccttgcacgctccctgcgccctccagctcgccggcgggaccatgaagaagttctctcggatgcccaagtcggagggcggcagcggcggcggagcggcgggtggcggggctggcggggccggggccggggccggctgcggctccggcggctcgtccgtgggggtccgggtgttcgcggtcggccgccaccaggtcaccctggaagagtcgctggccgaaggtggattctccacagttttcctcgtgcgtactcacggtggaatccgatgtgcattgaagcgaatgtatgtcaataacatgccagacctcaatgtttgtaaaagggaaattacaattatgaaagagctatctggtcacaaaaatattgtgggctatttggactgtgctgttaattcaattagtgataatgtatgggaagtccttatcttaatggaatattgtcgagctggacaggtagtgaatcaaatgaataagaagctacagacgggttttacagaaccagaagtgttacagatattctgtgatacctgtgaagctgttgcaaggttgcatcagtgtaagactccaataattcaccgggatctgaaggtagaaaatattttgttgaatgatggtgggaactatgtactttgtgactttggcagtgccactaataaatttcttaatcctcaaaaagatggagttaatgtagtagaagaagaaattaaaaagtatacaactctgtcatacagagcccctgaaatgatcaacctttatggagggaaacccatcaccaccaaggctgatatctgggcactgggatgtctactctataaactttgtttcttcactcttccttttggtgagagtcaggttgctatctgtgatggcaacttcaccatcccagacaattctcgttactcccgtaacatacattgcttaataaggttcatgcttgaaccagatccggaacatagacctgatatatttcaagtgtcatattttgcatttaaatttgccaaaaaggattgtccagtctccaacatcaataagtgttgtaaacaattactgagacacggagcactgttaactgaaattcttctattccttcagctcttcctgaaccgatgactgctagtgaagcagctgctaggaaaagccaaataaaagccagaataacagataccattggaccaacagaaacctcaattgcaccaagacaaagaccaaaggccaactctgctactactgccactcccagtgtgctgaccattcaaagttcagcaacacctgttaaagtccttgctcctggtgaattcggtaaccatagaccaaaaggggcactaagacctggaaatggccctgaaattttattgggtcagggacctcctcagcagccgccacagcagcatagagtactccagcaactacagcagggagattggagattacagcaactccatttacagcatcgtcatcctcaccagcagcagcagcagcagcagcagcaacagcaacagcagcagcagcaacagcaacagcagcagcagcagcagcagcagcagcaccaccaccaccaccaccaccacctacttcaagatgcttatatgcagcagtatcaacatgcaacacagcagcaacagatgcttcaacaacaatttttaatgcattcggtatatcaaccacaaccttctgcatcacagtatcctacaatgatgccgcagtatcagcaggctttctttcaacagcagatgctagctcaacatcagccgtctcaacaacaggcatcacctgaatatcttacctcccctcaagagttctcaccagccttagtttcctacacttcatcacttccagctcaggttggaaccataatggactcctcctatagtgccaataggtcagttgctgataaagaggccattgcaaatttcacaaatcagaagaacatcagcaatccacctgatatgtcagggtggaatccttttggagaggataatttctctaagttaacagaagaggaactattggacagagaatttgaccttctaagatcaaataggctcgaggagagagcatcctcagataagaatgtagactcactttctgctccacataaccatcctccagaagatccttttggttctgttcctttcatttctcattcaggttctcctgaaaagaaagctgaacattcatctataaatcaagaaaatggcactgcaaaccctatcaagaacggtaaaacaagtccagcatctaaagatcagcggactggaaagaaaacctcagtacagggtcaagtgcaaaaggggaatgatgaatctgaaagtgattttgaatcagatcccccttctcctaagagcagtgaagaggaagagcaagatgatgaagaagttcttcagggggaacaaggagattttaatgatgatgatactgaaccagaaaatctgggtcataggcctctcctcatggattctgaagatgaggaagaagaggagaaacatagctctgattctgattatgagcaggctaaagcaaagtacagtgacatgagctctgtctacagagacagatctggcagtggaccaacccaagatcttaatacaatactcctcacctcagcccaattatcctctgatgttgcagtggagactcccaaacaggagtttgatgtatttggcgctgtccccttctttgcagtgcgtgctcaacagccccagcaagaaaagaatgaaaagaacctccctcaacacaggtttcctgctgcaggactggagcaggaggaatttgatgtattcacaaaggcgccttttagcaagaaggtgaatgtacaagaatgccatgcagtggggcctgaggcacatactatccctggttatcccaaaagtgtagatgtatttggctccactccatttcagcccttcctcacatcaacaagtaaaagtgaaagcaatgaggacctttttgggcttgtgccctttgatgaaataacggggagccagcagcaaaaagtcaaacagcgcagcttacagaaactgtcctctcgccaaaggcgcacaaagcaggatatgtccaaaagtaatgggaagcggcatcatggcacgccaactagcacaaagaagactttgaagcctacctatcgcactccagagagggctcgcaggcacaaaaaagtgggccgccgagactctcaaagtagcaatgaatttttaaccatctcagactccaaggagaacattagtgttgcactgactgatgggaaagatagggggaatgtcttacaacctgaggagagcctgttggaccccttcggtgccaagcccttccattctccagacctgtcatggcaccctccacatcagggcctgagcgacatccgtgctgatcacaatactgtcctgccagggcggccaagacaaaattcactacatgggtcattccatagtgcagatgtattgaaaatggatgattttggtgccgtgccctttacagaacttgtggtgcaaagcatcactccacatcagtcccaacagtcccaaccagtcgaattagacccatttggtgctgctccatttccttctaaacagtagatacttctgatggattctcggcattaactcctgtttcaaaaaagtgtgaacagttttatgaatttgaaagaaaatttggtagctctttatagcattcattcttaaagatcagtcagaataggtgatttctaaataaaccaaatagaagaatg

SEQ ID NO: 2254 - DNA, 5734 bp, Homo sapiens
  source 1..5734: mol_type = unassigned DNA
agatcttgaaaacacccgggccacacacgccgcgacctacagctctttctcagcgttggagtggagacggcgcccgcagcgccctgcgcgggtgaggtccgcgcagctgctggggaagagcccacctgtcaggctgcgctgggtcagcgcagcaagtggggctggccgctatctcgctgcacccggccgcgtcccgggctccgtgcgccctcgccccagctggtttggagttcaaccctcggctccgccgccggctccttgcgccttcggagtgtcccgcagcgacgccgggagccgacgcgccgcgcgggtacctagccatggctggggcgagcaggctgctctttctgtggctgggctgcttctgcgtgagcctggcgcagggagagagaccgaagccacctttcccggagctccgcaaagctgtgccaggtgaccgcacggcaggtggtggcccggactccgagctgcagccgcaagacaaggtctctgaacacatgctgcggctctatgacaggtacagcacggtccaggcggcccggacaccgggctccctggagggaggctcgcagccctggcgccctcggctcctgcgcgaaggcaacacggttcgcagctttcgggcggcagcagcagaaactcttgaaagaaaaggactgtatatcttcaatctgacatcgctaaccaagtctgaaaacattttgtctgccacactgtatttctgtattggagagctaggaaacatcagcctgagttgtccagtgtctggaggatgctcccatcatgctcagaggaaacacattcagattgatctttctgcatggaccctcaaattcagcagaaaccaaagtcaactccttggccatctgtcagtggatatggccaaatctcatcgagatattatgtcctggctgtctaaagatatcactcaactcttgaggaaggccaaagaaaatgaagagttcctcataggatttaacattacgtccaagggacgccagctgccaaagaggaggttaccttttccagagccttatatcttggtatatgccaatgatgccgccatttctgagccagaaagtgtggtatcaagcttacagggacaccggaattttcccactggaactgttcccaaatgggatagccacatcagagctgccctttccattgagcggaggaagaagcgctctactggggtcttgctgcctctgcagaacaacgagcttcctggggcagaataccagtataaaaaggatgaggtgtgggaggagagaaagccttacaagacccttcaggctcaggcccctgaaaagagtaagaataaaaagaaacagagaaaggggcctcatcggaagagccagacgctccaatttgatgagcagaccctgaaaaaggcaaggagaaagcagtggattgaacctcggaattgcgccaggagatacctcaaggtagactttgcagatattggctggagtgaatggattatctcccccaagtcctttgatgcctattattgctctggagcatgccagttccccatgccaaagtctttgaagccatcaaatcatgctaccatccagagtatagtgagagctgtgggggtcgttcctgggattcctgagccttgctgtgtaccagaaaagatgtcctcactcagtattttattctttgatgaaaataagaatgtagtgcttaaagtataccctaacatgacagtagagtcttgcgcttgcagataacctggcaaagaactcatttgaatgcttaattcaatcattagtttatttttatggacttcttcctgttttttttttttttttttttgcactgccaatgcattttgtttcaaaagattatttctatagtcagaggggaatgagcaaatagactgaagattgccaccaaggaaaagaactgtatttgtttctgaatgtaacttaaagcaagatttttagtaaatatggacatctatttctctttttgtaatcaaacacaacaacttatcaaactgtttttagaactgttagagaacacactggtttatttttgtaatgttctttgaaaacagaatggagaagcagcaatagcttgtcatttatctcatttaatgactaatgggaaatagagaacaatttcgcgttttgaattaggcttattgccttagaatcctgagaaagtgctaaataatcaactctgatgtttttcttaagttcttgagactcttgtttatccttgtttttcctccacaagtcattgtctaagtgtaatggaaagtttatgctgagcgttagtgtgtatgtatgtgcgtacatgcgccaggtgcctgtgccctctgtaggatggtttgcttaatatggttttataattcagtttacacaggattctttattttttttaattttgtattttggcaaacaccattcagttataagaactttgccaaatatgatagaataattcaagagcatatacagagagttaccacttgacccagctatttaattgcaaatacagttgttttcatttcatttcctaccagaaaaaggaatcagaaacctagtttttgaaaacacaagtgtaattcctcttttgtacttctttttcacaaatgcttttatttattctaaattgaatttaaaaatccttcctaaagccattaactctttaattctcctgatatgcctttacttcctatgaagttattggtagatgttgaggcccaaaaactggtagaatattgaagatcttcttaaatgaccaatttaaccataaccaaatattgaatatcattcttcagtcacatctaagtcaggcactttttcacatagatcagggcttttggctcagtcacgaaatctacaagttagcaaagcttacaaaacattattcgtcaggtatgggaatcaaatatagacacttgtttgtctttgctttccatttctatgtgtcacatacatatatgtgtcctcttataactttagtcttcaaaattatttcaatatccttcttctcactatatttatttgtgtgatggaaatgctttcaggccgtagatcattgttggtgttaatctgtggttaatcctcattttagttccgtcttatctgatacttagaaatatctcagccattttggaggctgtgcagtatcagaagacgtggagtttgttctgtctctgcctgtagctaattatggtggttcagtcatttaataaatatgttttgagcatctattttgtgaaaggcactgtgttacctgtgtgtctttagtgtcctcactggtaaaatgaagaggctggccatgagctggaagggttaagtttataattccagctatttcacacccgtcttccttgaaggaatgatagtgatagatataaaaacactgtaagtccctcttttaataaactaaatgaaagaacatcctatacttcgctgtttgtaaattagtatggcattcgctttggtttaagtggtattttattgcaaacccattaaaagaataactcatgaaaagaagctctttgacaccttggggtacacaaatgttggtgtgggtgtgtgttaattctgtgagtgagacacaccagttctaaaaaaaatgagtgaagttctggtgcctgagttaccatgctttcttctagttcttacagtagcataaaattaaagattcaaagtgagatggaggataaaattactttttaatacatgttctcaaacatttgaaaataaaagtatatgatagaagggggccagagtgtggccaccatcctgatcgtactgtttttcaataaagaaaactttttcattggtagatttggtgaaattctaaatttaggtttttttctagagctgtatcaaccaaaacttctggcaattcccagtatcacttcttagccttcttatatccaaatgcctgtttattacctttcttaatttgaatcaatgcctagttattacagattgcaccccacaatggccaaaaacccactacataataaaatttacaggtactaactagttaagattatattttaagtagcaattgatataaaattacaacacaatgaaagaacttgggtaatctcttagcaatggaaataggttttaaccagcagtttttctgggtgctttgtaactatcattttactaatgaattgaggatgtattatggtttaaattggaagagttttattcccaaagaataaagcaagattatctttcagtagtagagattgaagtaaatgtattaatattttaattaatacagatttactaagagtagttagaaaatttagtaagtgcctgttttacaaattgttaggtactagtttctgtataattcctacacagaagctttagaaatctcctgatattaaattattaaattggcattcatgaaaagagaagctacaattataaactccatttgctaaatcatgcataatactctctctctctcttcccccacaagtaatctctctaccccatgcagtgtgcacacacacacacacacagtcagttactgaaaaaaataattctttttctttttttttttaaatggagtttcactcttgtcgcccaggctggagtgcagtggcgtgatctcggcccactgcaacctccacctcccaggttcaagcagttctcctgcctcagcctcctgagtagctgggattacaggtgtccgccaccatgcctggctaatttttttatttgataaaaagaattctttttctcaataactgttctcttgaattcaaattaagggactgccaaagtcaattagaatattttaaaaatactttgttgtaacctgtgtaaataatatacaatttacaggatttgggattgtagaacttaaactggaagactggattcctcagatctcaggactataacattccagataaatttttacattccctttgctgtatattaactgatgatcatttatatgttaagattttttaccttaatatttctgaataaaactcttattgcccatttaatattttcataggcaatcaaatgtgagtaatactgctaagagtctgatttattaaaaatatttgtataattcattcagtttagtttttcagtttagtctttctgctttcacttttctctgtgctaacaagtaactaatgtctgggcattgacttcttattgaatcaaagttgggttaggcatagctatgcacacctgatgtgtaagattaaagaagagattaaataagaaatcttgggtaagttggacttttctgtatagctcttttttcctctgagttgtattttaatgtagtttataagtgataaaatgatccttgttttctaaaagccagtccttcccttcagctttccacagtttctgtaaatgtttaatacttgtacagtcaatggcaattttaaatatatatatatatataatatatgtatatggaaaaggttcaaagatgcttttaatttatttaatgactattgccttcctataataataattttcatccttaattatgataatacttttagcaagaaaaattcctttttactacagtttttagatgcaaaatgcagtttggttctttagtcaaatccacttagagggtatattgcagtgaaactgtgaaggatacttcactaccaatgtataagctttgttgaatttgtatcattttctttcagtaatgaaaagctattcattatacagtatggaaataaaaattgcttcattga

SEQ ID NO: 2255 - DNA, 844 bp, Homo sapiens
  source 1..844: mol_type = unassigned DNA
ggacagtggagacgcgccttctcggctctggtccgcgccctggggccctggcctccctggaggggctggggaactggaagctgggccgagagagttcccgctgcagctatcgcgcagtccctcctgcgcccgggcgcccccagcgggttccgggaggcgcccggtgagcccacgtctgttgcggcggagcgagcgcgctccgggagggccgagagccggcggggctggcaggagctctcgggcgcccgcctccctccttcgcggacggtctcccgacacgccggctgagagcccttttcgactgtgagctgcggcagctgagcagaggcggcggcgcgggacctgcagtcgccagggattccctccaggtgacgatgctctggttctccggcgtcggggctctggctgagcgttactgccgccgctcgcctgggattacgtgctgcgtcttgctgctactcaattgctcgggggtccccatgtctctggcttcctccttcttgacaggttctgttgcaaaatgtgaaaatgaaggtgaagtcctccagattccatttatcacagacaacccttgcataatgtgtgtctgcttgcatgagccaactagatggagcaatctgacacaaaacccagggttttatgactgacctagtgcgccagctgcatctggaggaaccagacgcaaacaacgcagagttgagggccaggtgaagcgggatccagctccccacttcaccccaaccccttcgactcctcaaaacctctgcaagaagctatttccttcggctggcaacttacagccagcaggtcccttcctcgtgcagaataaagccattctgggaaa

SEQ ID NO: 2256 - DNA, 5031 bp, Homo sapiens
  source 1..5031: mol_type = unassigned DNA
ggacagtggagacgcgccttctcggctctggtccgcgccctggggccctggcctccctggaggggctggggaactggaagctgggccgagagagttcccgctgcagctatcgcgcagtccctcctgcgcccgggcgcccccagcgggttccgggaggcgcccggtgagcccacgtctgttgcggcggagcgagcgcgctccgggagggccgagagccggcggggctggcaggagctctcgggcgcccgcctccctccttcgcggacggtctcccgacacgccggctgagagcccttttcgactgtgagctgcggcagctgagcagaggcggcggcgcgggacctgcagtcgccagggattccctccaggtgacgatgctctggttctccggcgtcggggctctggctgagcgttactgccgccgctcgcctgggattacgtgctgcgtcttgctgctactcaattgctcgggggtccccatgtctctggcttcctccttcttgacaggttctgttgcaaaatgtgaaaatgaaggtgaagtcctccagattccatttatcacagacaacccttgcataatgtgtgtctgcttgaacaaggaagtgacatgtaagagagagaagtgccccgtgctgtcccgagactgtgccctggccatcaagcagaggggagcctgttgtgaacagtgcaaaggttgcacctatgaaggaaatacctataacagctccttcaaatggcagagcccggctgagccttgtgttctacgccagtgccaggagggcgttgtcacagagtctggggtgcgctgtgttgttcattgtaaaaaccctttggagcatctgggaatgtgctgccccacatgtccaggctgtgtgtttgagggtgtgcagtatcaagaaggggaggaatttcagccagaaggaagcaaatgtaccaagtgttcctgcactggaggcaggacacaatgtgtgagagaagtctgtcccattctctcctgtccccagcaccttagtcacatacccccaggacagtgctgccccaaatgtttgggtcagaggaaagtgtttgacctcccttttgggagctgcctctttcgaagtgatgtttatgacaatggatcctcatttctgtacgataactgcacagcttgtacctgcagggactctactgtggtttgcaagaggaagtgctcccaccctggtggctgtgaccaaggccaggagggctgttgtgaagagtgcctcctacgagtgcccccagaagacatcaaagtatgcaaatttggcaacaagattttccaggatggagagatgtggtcctctatcaattgtaccatctgtgcttgtgtgaaaggcaggacggagtgtcgcaataagcagtgcattcccatcagtagctgcccacagggcaaaattctcaacagaaaaggatgctgtcctatttgcactgaaaagcccggcgtttgcacggtgtttggagatccccactacaacacttttgacggtcggacatttaactttcaggggacgtgtcagtacgttttgacaaaagactgctcctcccctgcctcgcccttccaggtgctggtgaagaacgacgcccgccggacacgctccttctcgtggaccaagtcggtggagctggtgctgggcgagagcagggtcagcctgcagcagcacctcaccgtgcgctggaacggctcgcgcatcgcgctcccctgccgcgcgccacacttccacatcgacctggatggctacctcttgaaagtgaccaccaaagcaggtttggaaatatcttgggatggagacagttttgtagaagtcatggctgcgccgcatctcaagggcaagctctgtggtctttgtggcaactacaatggacataaacgtgatgacttaattggtggagatggaaacttcaagtttgatgtggatgactttgctgaatcttggagggtggagtccaatgagttctgcaacagacctcagagaaagccagtgcctgaactgtgtcaagggacagtcaaggtaaagctccgggcccatcgagaatgccaaaagctcaaatcctgggagtttcagacctgccactcgactgtggactacgccactttctaccggtcctgtgtgacagacatgtgtgaatgtccagtccataaaaactgttattgcgagtcatttttggcatatacccgggcctgccagagagagggcatcaaagtccactgggagcctcagcagaattgtgcagccacccagtgtaagcatggtgctgtgtacgatacctgtggtccgggatgtatcaagacgtgtgacaactggaatgaaattggtccatgcaacaagccgtgcgttgctgggtgccactgtccagcaaacttggtccttcacaagggaaggtgcatcaagccagtcctttgtccccagcggtgacctttgtttcgatccttaagactctgaaatctggtgactttgacactgaagcggaagagccaatgaaggactgcagtatttgtgtgcccgattctgtaaacacacacacacagagtatatatgtgtatatatatatagatatattcaaaaacattgcatcatttatatgaactatagggggattattatatgtatattttttgctataagacatgtattgtttctaggatcctaacctgtaagccattgaacatgttgtataaatacaccaggtgtttttaatttaataaggtggcatgcagatacattggatagtgttaacatcacatacatttgtcatttttaaggaagttttctaagagccctcaattgcctgcctgtattaattttagttttgagtcaggatttgtaatggagtgggaaatgtgtttctctggagaagggcacatttatctaggggcatttcaggtttccaaagaaaggaatgtatgcctgggaaagacagcaggagattggtgaccggccctaatggtgcatgaaaagcgagtgataggctgttagaatgtattaggtcatgggctaacattatttccaaaattgattggctggttgccaagaaatatatatttgtcactagggcataaccgaagaatcaagtgatttcttgccatccttgcgtagtcctcaagtcttctaatcatctatgtgtgtatgatggatgtgaccatttatatgtcatgtgttgaaattaaagggtgtctggatgccatgttaattttattgagcatgagaaagtatttgaagaaactgttgcacaacatatgatgaaattttgatttctctgaatctcagagtaatttaagatgggcaaatccaatgagttgatgtaacccatctacattttgtggctatttcatgtataaaatgaaaggctttagttatttctagaggagtcccatccaacactatttggcgactgttaatatgttataattattagacagtggaaaagcctttattgactaattgatttaacctcagtccaaagaacagtctctatacttgccctcatttactgataggctgctactagttaccatttgattgtcttgactttcgtcttcagttgaattggtgaaaacatcaacaaaaacaaaacccactgtgtcttaaaataaaatgttctgcattgtagtcaataaagggcttaagatgtaaaacaatgcattttctctctcaagatgtcctgtgttatactttacaattagttgtatcaacttcagattcattaaattttaacagctgtatttagttataatttttgtatcttacaacagtatatataaagactattattaatagacaaaagcaaacccacgtttttgacaagccagcatattgccaatgctcgtcaaagacatttatgtttcttttacattcatgacagctaaagtattaacttggaatttttttttttttttttgactggaaaatccctagttgtttgaattaactgaataaagtgcagggcgtaatagtgactggctgggggcactgggcctttgtgttttttttcattcctgtgtttggatactaatcaccctcgtatctgcagcctgaggtagtcaggtcattgtttcaatgctgcccttggaaagaagactttgacttaggtgctttgggatctaagtgtggtttgtgactatccccattatttaagcatttgggggtctcacttttgcttatctgtaacacaaagaggccatgtagtatagtgagcagggttgagaatcgggaaaactagacccctgccactaacaggctaggagactttgggcagtaatgggaggcactgagggtttgcaaatactttcctacttgtaatctcattgattccctgctctgccctgacaggaggggtagggaaaatcagttgacgttgcctggtggttcctaccttctgtaaaacgaacagattccttaagattagctttaaatcccttttcagttcactgttggttctcatctttgaaagagggcagcataagggaaatgatggagaagggagaattgtggatggttatttatagctcatgattcatccaaggactgagttattctccccatgaggctaaccggcctctttcccaacacttaatcatggcagccaggatgggtgaatgatgaaagctcttctgcatgagccggtttcatcatcttgggtgggttgattacaagtttgtgtggcattcctttagctggggattagcttaatctctgtacatttttctcatttctaattgaagaagaaagggagggcagagaggacagaaaattacttgggtttactaattcaaagagccatctctgatgggagagggtgaggaaatcagctgaatggttggcctgcatattcttttttaggccacaggctacagctgagcaatggcttagtctaatgattgggcacaatgaggatttaccaagtgcttcaatgagagcagtcctgtttcattcacatgggatgttttcaattggttcttcaactaagctcttgcagagtgagatgacttgaaataaaaatgttctatgaatattg

SEQ ID NO: 2257 - DNA, 602 bp, Homo sapiens
  source 1..602: mol_type = unassigned DNA; mol_type = unassigned DNA
gacggtctcccgacacgccggctgagagcccttttcgactgtgagctgcggcagctgagcagaggcggcggcgcgggacctgcagtcgccagggattccctccaggtgacgatgctctggttctccggcgtcggggctctggctgagcgttactgccgccgctcgcctgggattacgtgctgcgtcttgctgctactcaattgctcgggggtccccatgtctctggcttcctccttcttgacaggttctgttgcaaaatgtgaaaatgaaggtgaagtcctccagattccatttatcacagacaacccttgcataatgtgtgtctgcttgaacaaggaagtgacatgtaagagagagaagtgccccgtgctgtcccgagactgtgccctggccatcaagcagaggggagcctgttgtgaacagtgcaaaggtgattgatgtcttggccgtcttctcttctggctgctgcttcaggcatttttatttctctttctctcaccttccttttcactcagcttttggctggggtgcacatgggtggggaggagaagtagggtgtgtgtgtgtgtgtgtgtgtgtatgtgtgtgtttgtgtgtatgtg

SEQ ID NO: 2258 - DNA, 565 bp, Homo sapiens
  source 1..565: mol_type = unassigned DNA; mol_type = unassigned DNA
cttttcgactgtgagctgcggcagctgagcagaggcggcggcgcgggacctgcagtcgccagggattccctccaggtgacgatgctctggttctccggcgtcggggctctggctgagcgttactgccgccgctcgcctgggattacgtgctgcgtcttgctgctactcaattgctcgggggtccccatgtctctggcttcctccttcttgacaggttctgttgcaaaatgtgaaaatgaaggtgaagtcctccagattccatttatcacagacaacccttgcataatgtgtgtctgcttggttgcacctatgaaggaaatacctataacagctccttcaaatggcagagcccggctgagccttgtgttctacgccagtgccaggagggcgttgtcacagagtctggggtgcgctgtgttgttcattgtaaaaaccctttggagcatctgggaatgtgctgccccacatgtccaggctgtgtgtttgagggtgtgcagtatcaagaaggggaggaatttcagccagaaggaagcaaatgtaccaagtgttcctgcactggaggcag

SEQ ID NO: 2259 - DNA, 547 bp, Homo sapiens
  source 1..547: mol_type = unassigned DNA; mol_type = unassigned DNA
gactgtgagctgcggcagctgagcagaggcggcggcgcgggacctgcagtcgccagggattccctccaggtgacgatgctctggttctccggcgtcggggctctggctgagcgttactgccgccgctcgcctgggattacgtgctgcgtcttgctgctactcaattgctcgggggtccccatgtctctggcttcctccttcttgacaggttctgttgcaaaatgtgaaaatgaaggtgaagtcctccagattccatttatcacagacaacccttgcataatgtgtgtctgcttgaacaaggaagtgacatgtaagagagagaagtgccccgtgctgtcccgagactgtgccctggccatcaagcagaggggagcctgttgtgaacagtgcaaagtgcttgtctcaagggttttaagggacacagtcctgttcactcttaaatactggagactcccagtattttggttgcacctatgaaggaaatacctataacagctccttcaaatggcagagcccggctgagccttgtgttctacgccagtgccag

SEQ ID NO: 2260 - DNA, 551 bp, Homo sapiens
  source 1..551: mol_type = unassigned DNA; mol_type = unassigned DNA
attcagattctagagctcattctgtgtggtagctctgcctttcattcactaattttttattgaggttttgtttcattgctcttctgaaggatagaaggcacagaggactggcccctacccccaagacagtttagcttggaagtaaagtcaatgtctccttacaggattgagcctttatgtatgtgccaaaaattatgtatttgtgtgccccaaatacaggggtatagatggcaacagagacatagaaagatggaggaggttactaggaactgaaggctctagaagacttcacagggaggcaggacacaatgtgtgagagaagtctgtcccattctctcctgtccccagcaccttagtcacatacccccaggacagtgctgccccaaatgtttgggtcagaggaaagtgtttgacctcccttttgggagctgcctctttcgaagtgatgtttatgacaatggatcctcatttctgtacgataactgcacagcttgtacctgcagggactctactgtggtttgcaagaggaagtgctcccaccctggtggctg

SEQ ID NO: 2261 - DNA, 538 bp, Homo sapiens
  source 1..538: mol_type = unassigned DNA
gtgcctgctctcctaggagccctgcctgctgcctacacccaccacagccactcgttttggcacatctgatgtttggaaatatcttgggatggagacagttttgtagaagtcatggctgcgccgcatctcaagggcaagctctgtggtctttgtggcaactacaatggacataaacgtgatgacttaattggtggagatggaaacttcaagtttgatgtggatgactttgctgaatcttggagggtggagtccaatgagttctgcaacagacctcagagaaagccagtgcctgaactgtgtcaagggacagtcaaggtaaagctccgggcccatcgagaatgccaaaagctcaaatcctgggagtttcagacctgccactcgactgtggactacgccactttctaccggtcctgtgtgacagacatgtgtgaatgtccagtccataaaaactgttattgcgagtcatttttggcatatacccgggcctgccagagagagggcatcaaagtccactgggagcctcagcagaattgtgcag

SEQ ID NO: 2262 - DNA, 365 bp, Homo sapiens
  source 1..365: mol_type = unassigned DNA
atggagactaaggaccagaagaaacaaagaaagaaaaacagtggacccaaagatgaaaagaaaaagaagcggcatctgcaggatctccagctaggagacgaagaagatgcccagaagagaaatcccaaagcttttgcagttcagtctgctgtgtggatggctcgatcctttcacaggactcaggatttgaagacaaaaaagcatcgtattccagtggttgatcgaactccactagagcccccaccaatagtggtagtggtgacggggcctccaaagttggaaagagcactttgatataatgcctcattcagaacttcattggcagaagttgactgagatcagaggccctgtgatgatcgtgtcag

SEQ ID NO: 2263 - DNA, 12844 bp, Homo sapiens
  source 1..12844: mol_type = unassigned DNA; mol_type = unassigned DNA
gcggccgctaagaggagaccaagaggcgggggctgcacttgacaaccagcatgccgagatggcacaccttgggcccaccccacctccacatagccttaattacaaatcagaggacaggcttagtgagcaagactggccagcatatttcaaggtcccatgttgtggggttgatacatctcaaattgagtcagaagaggcagaagtggatgtgagagaaagagagacacagagagacagagagccaaagagggcaagagacttgactttaagagactcctgtactgacaactccatgcagttcggaaccagaacgactacggctgaaccagggttcatggggacatggcaaaacgctgatactaacctcttattcagaatgtcccaacaggccatccgttgcacactggtaaactgcacatgtgaatgttttcagccagggaagattaacctgaggacttgtgatcagtgtaaacatggctgggtggcacatgccttggataagctcagcacgcagcacctgtaccaccccacccaagtggagattgtgcagtccaacgtcgtgtttgacatcagcagcctgatgctctatgggacacaagcagtgcctgtgcggctaaagatcctgctggaccgtctcttcagcgtcctgaagcaagaggaggtactgcacatactgcacggccttggctggactctgcgggactatgtccgaggatacatccttcaggatgctgctggcaaggtgctggaccgctgggccatcatgtctcgagaagaggaaatcatcacccttcagcagtttctgcggtttggagaaaccaaatccattgtggagctgatggcaattcaggagaaagaagggcaggccgtggctgtaccatcttcaaagacagactcagatataaggactttcattgagagcaataatcgcaccaggagtcccagcctccttgctcacttagagaacagcaatccttccagcattcatcacttcgaaaacatcccaaacagccttgcatttctgcttccattccagtacataaaccctgtctcagcaccactgctagggttgcctccaaatgggctactgttagagcaaccagggttgaggctgcgggaacccagcctttcaactcagaatgaatataatgagagcagcgaatccgaagtttctcccacaccttataagaatgatcaaacacccaatagaaatgccctgaccagcattactaatgtggagcccaaaaccgagccagcctgtgtctctcccattcagaattctgccccagtcagtgatctaaccaaaactgaacacccaaaaagctcattccggattcatcggatgagaaggatggggtcagcctctaggaaaggaagagtgttctgtaatgcatgtgggaagacattctatgacaaaggtactctcaaaattcattacaatgctgttcacctgaagatcaaacatcgatgcaccattgaaggttgcaacatggtctttagctccctccgaagtcgtaatcgccacagtgcaaaccccaatcctcgccttcacatgcctatgctaaggaataaccgagataaagatttaattcgggccacctcaggagctgccacccctgtcatagcaagtacaaaatcaaatctggcactcacaagccctggccgacccccaatgggttttaccactccccctctagaccctgtcttgcaaaatcctctccctagccagctagtattttctgggctaaagactgtacaaccagttcctccattttatagaagtttactcactccaggggaaatggtgagtcctccaacctccctcccaaccagtcccatcattccaaccagtggtaccatagagcagcaccccccgccaccctctgagccagtagtgccagcagtgatgatggccacccatgagcccagtgctgacctggcacccaagaaaaagcccaggaagtcaagcatgcctgtgaagattgagaaggaaattattgataccgccgatgagtttgatgatgaagatgatgaccccaatgatggtggagctgtggtcaatgacatgagccatgacaatcattgtcactcccaagaggagatgagcccaggcatgtctgtgaaggacttttctaagcataacaggacccggtgcatttcaaggactgaaataaggagggccgacagcatgacttctgaagaccaagaacctgagcgggactatgagaacgagtctgagtcttcggagcccaaactgggcgaggaatccatggaaggggatgagcacattcacagcgaagtgagtgaaaaagtcctgatgaatagtgagaggcctgatgagaaccacagtgagccctctcaccaggacgtcatcaaggtgaaggaagaatttacagaccccacttacgacatgttttacatgagccagtatggactgtacaatggtgggggtgccagcatggccgccttgcatgagagctttacatcgtctctgaattatggcagccctcaaaagttctccccagaaggtgacctatgttctagcccagaccccaaaatctgttatgtgtgcaagaagagtttcaaaagctcctacagtgtgaaacttcactacaggaacgttcacttgaaagagatgcacgtctgcacagtggctggttgcaatgctgcattcccctctcgccgaagccgagacagacacagtgccaacataaacctacatcgtaaactgttgaccaaagaactcgatgacatgggcctggactcgtcgcagccctcccttagcaaggacctccgcgatgaatttttggtgaagatatatggtgcccagcaccccatggggctcgatgtcagggaagacgcctcctctcccgcagggactgaagactcccacctgaacgggtatgggagaggcatggcagaggactacatggtccttgacttgagcaccacctccagcctccagtccagcagcagtatccattcctccagagaatccgacgcaggcagcgatgaggggattcttctcgatgacattgacggggcgagtgacagtggggagtcggcacacaaggccgaggcccctgccctccctggcagcctaggggctgaagtttcaggatctcttatgttcagcagcttgtctgggagcaatggtgggatcatgtgcaacatttgccacaaaatgtacagcaacaaggggaccctgagagtgcactacaaaactgtgcatttgagagaaatgcacaagtgcaaagtcccaggttgcaatatgatgttttcctctgtacgaagccgaaatcggcacagtcagaaccctaatctccacaaaaacattcccttcacttcagtagattagtctcagaatggacactacaaatgccagctctcaccagatggcctacgtgtttgaactgccatagtcagtgtgcgcttatgtacttggggtgtgtgtgtgtgtgtgtgtgtgtgtgcatttatgtatgctctgtggctacatatacacacacgtatttccttgagataaacaagataaacactaggtgcttttgaatttttttcacttccctttatagttttgggaaaggagtgggatctttgatttcagggtgaaaacagagtacccctttaaacacacacacacacacatgcacatacacacacacacacacacacacacacagtgtgcaactagccccagttttgacagaataattcttggtcttccccaaagagacaatttgttgtacccatgactgttgcctgcaaaaataaaagggaaaaaaaagaaaaaagaaacaaaaaggaacttcttatagttgtcttttgtgaactttaaggttttgaaagaatcttcaattaaagcatggcagattcacctgtaaatatttagccttgaggggccattgatgtaaaacaattgtattgatggttgtttaacttttttgtttaatttttacagttacatccagctgttagatatgcaggaaaagatagtttgctggctagctctattcatttatgttagcattaatgcacatttttaaaaaaagaaaaaaacatggtcttgtttttactacctgttagatatagtgctaaagaggtgctggcatgctttacagcacagatctgattttttaaaatgtcctgtactagtacataaatcccgtcatgcactttttttcatacactacaaggggatgtgtaataaccatgcttcttttttatccttaaactattgccatacttcagtaagtgtcttttttaaaaaaaattcacttgtataaaaatggtctggtcagtatagggcacaaatgccaaacaaagtattagtgttaacacaaaactgccaactttgcacaagtttccagaaaagaaaatacaattagtcactcaacataaccacaggccaatttgttggccaccagaaaaccgctttttaaaaaaacacttggtgattctttcaagtgccgaatgttattagaatcaacattgcatccttcttgcttatacgttaagttacataaaaggaaaacaaaattatgtggtgtgaaacagccaaggcatttattcttcagaggcaggataatatttcaggatacaaaagcccaaattacccgctacggaacaaagatgaatacagtaaaagagtcgaacactcatttccaaggccctaacccttatcctttaaaaagaaatcctctgaactgggtcggtctgttgtatggctgtctaatttgttgcaaattctgcagtcgtactataattcaggcctgtttggtagacaaaatcaaaaggcatttaacagcagcagtacttggaagctttgaaaacatgtgctaaacttgaatggagcaacactcctttctgaaaagccagaagaagggggttttaaagcaggatctctcaatgttcagtgttttgtgtttccccacacgatttgtcagagagaaatgaaagcaagcctgaaaccaagcaattgagagtgagaaagaggagagagactattctccaaaccttttttgttttgttttgtttccgatgtttacacatgttgcctgagctggttaaccacatcggcagcctcagctaccacaacatactgactaaatgatgatatttactcaagttcagtctgcagccaaaaccattagggtgtgcattgcagactgttttgttgtcttttttttttcttttttcctttttttttaagtggaggggaaaagaagagataaacaaggaatattttgtcaaacagtacacaataatttaaagagaatgtatttcttttttgcatttaatggcctcagacatttctttcatcagtctaaaagttagaaatatccctttattttaacttttatgtcgtttccatttttcatgtttttgtaattattttttctatgttcacatcagcattcacttccgttaaatttgccaaaggaaactgttaatatgtttctgttgttattattcctgtaggatttattgtacctcacagtatttattgtttcccaaaataagcatcattagttggggattcagtatttttgttgtgaaaatttcagaaacaatagattcttaaagataagctagctatgtctaggagctttatcttttcacctccttcagaggatgctatggggtccattttaattcttcatttgttctacggggaggaaagaccaaaagtatttgcagtacaaaagaaactatatcaaacactatgttaaatgacaagtgtttatggtaaaaagctgaggaattagtaataatcgtttttgttttcttgtactttgaattccccaaagtcttaattgctttattttggtgttgtgttaaattgaacagacagatgttttcctttgttttataccatataagactctgtacagtatgtttgtgaaagattgaactagaataatgaaagtttgtttgcaaacattttggtcctctcagcgttctctgtgttgtgctgttgccccattaccaaatggttagattcaaaaagggtgggaaaagatttttaatatcccaacaaaacattatagaaactctggcttttgcagtgtgcatagactacatgtagttttatgaaaataaatacacatttttatttcagcaactttgaaaagttacactcagttgagttactagaactcatcttgtacaacagcaatgtttagtctgtttaatttaatgtcaaataaaaggtcagatagccctcgtgagtgaattacatagctgtcggcagtcacatcagcaaatgcaccaggcttagaacaaatgtttgttacttgctgcaaaccaagctaatgtgtatagccagttagaaaaagtccagaagtaatgagattctagaagtagagtttcccttgcttggaaacatgaatgtgttcacctgtgttttgtcagagaagtggcaataagtcctggacagctgacactttttaagtatctcccctatttgctactacttttgtgcctcaagtgcccagtcgttacggtggccttctaaatgagtaaataacattttccaatataaagcctatttgcttaaaagggacaggggagtggatggatgtagtacatgcaatggaaaatcataaaatgtacaattcttctgtttccaaagtattgctcgttcttgagtgtgtgcctgagtgtcttgttttgacttaactagaattctagttaagatggtgatcccatggcttatttgcaaacaggaaggataaagagatcagcgttttagtcatggagctcatctttgcccattcctactcatttgctttttcataggagttttttgttgttaaacagtttctctcaagccacatgcattctatgctggctgaaaattaatagtgatgtagatgttcatccgacaagcttttccccatgtgattggttttagccagagtttatcacaggtacaaaattaggcggtatgactgtgcatgttctctagctgatgttgaaacttgtactgtcttgatcatttaaaactatgtttttgtaaatatcaggtttagtccgctttcgggaatatctgcatgctatggaaagagagaaaaaaaggatagataatgaggaatttggtttaaaagtgtgataaaaatccttggcattctttgttctgatattaattgtatttaaataagtcaacccaatgtaactcattccagatcttagtccagctgccctgttcagcctgatgccttttaaaggtttaaaggtgttaatgttttccttttcaacatggcaaacattttttaaaacctttttggcacaatggtgccactgtcctcatagtgttatttctttggtcatgaattttcaggcccttccagtaagaggagaaaggcacttaactggttaacagccccattattatacattgctctaaggaaaaaaaaaaaaaaaaaactttgaatatatcaagaatgggctattccagaggcttctcctcaggagaaactatgcactaggttcccaccaaatacaatgtgacctttttttcccctttctctgtacacaccccagatatgtgccaagcaaatgagaatgagggccgttgacaattaaagcataaagaagctagtcaccagattgagatggacatgctgctaactgctgacagcttgacctgagcagtcctaacttgtatctggtctgttagcattgggttagattgactaacagagtaaataaaattcacctgtcataagacacgctacatctgctatcatcaagaaacaaatcatccagaagaaactttttttcatcctgtggtcacacccttttcttaagagcttcttttttaaaattatgacaaacgaatttcattctttaaaatcacttatcttctcccaaacttgaagtatttaaattaggtggttttgcttttccctctcattgtttattttttggggatggatctaaatgagtaagatgagcaataaaagataccagaaagactggagggatcacagtgttttcatcagaactaagtagagggtcggttcctgccctggttttggggtagctagaaaaggaaatcatgaatgcactggaaatgttggctcgagagaaaagactggcatagctctgcctcgcagtgggtgagagcgtattgatcgtagggacctgcagagttcctatgaccaggtgagtcggctctgaggaaggggttaggaaagcaagtacagctgcatgaaatagctgaagttcctttggggtcaggaagagccgacaattgtggggttttggttgcttttgctttgtttttgagtgggaagtgttgctggaatcccctgagaaccgaaagatgccaggggtcagcaaggctatagaaaaggccagtggtaacacctcgttttcatcctaacagaggagtaggtgcgaatggcaccagcatggatcgttcctttcttgatcattactcatgcttgccactgtagcaacacaacaaagccatgattgtaattaatactaggctaaagaccttgatcaaaatgggagctcatttactgttctatgaggtatgtaagtaacttctcttcacattttccctcagagataaaccacacgtggtagtcttgtttgcgttagtactaaggtcatgtttgatctgtcccagacgagtcgcatatttcctgtagctggagtgttgctcaccataaatggtcattttcaaaaagtattgtgtaattccagctgtacaactgaccagtgagttatctgtcatcactgttgcccacatacccgtccttccttgtgtagtttcatcatcctcatccttcccacatcttgcgcaaaatgattttctgtgctcattcggcaataactatgttattcggcatactgtctttttggcatttgttgaaaaatccaaatgcttttaatccaaaagattaatccaaatcttttttaatccaaatgattttaatccaaatccaaataacaggaggttaaaaaaaaaaaaaaaactaagcatttttacatgtacactgaattggatcagcattattgttcattataatgctatatatatttttggagcaacatactatagttgtcataaaactatctttattcttctcctctaaagtgctgttgtaaattcatttgacctttactgcaggaaaaaaaaaaatcttttttatataggatatgaagaccaaggctcagtctgtaacaaatagtggaccattacaaaagaggaaagaaaaaagccagggctgagcagcaagaagcttcagttcaatttcacctcgtatctttctaataacatacttgtcactttattaccttccagtaatgtgaacgctgctgacaagactgtcacactaacagcagacaacaccctctctgcttcagcccagctctcctggctacttattgccctggccctgaagggacacaaactaatagtgtgctttccagttcagcacttggccatcaaatataaaaggatgcgtaattgcctgtttatccccttgtgaaggagaaattgactacaagggctaggctttcccatcgagttccctgatgtacacacacatccacaatcagtcagtctctctctctctctctctctctctctctctctctctctctctctcccctctctctctccttccctcttattctcccctcctaacatacaagcacatacacacacctactgtatctgtgggaagcccaaggctgcctctcgatgccctctccagctattaagtggacagtaacaagatgacttcttaaataaagggtcagtagagagatgctgtctgtgacggcatcctttgcttctttgaaaacttaagtgttaacaattccatcttgagagtaatgggtgtggccctataattagagcaaattttcctgcaagtcagtggcataagtaagattatattgccccctaatctgtagggaaaagattaaaatatttttcttccccttcaaaaagtgcacatgttgtaaactggttacgcacagtggtcatttttttttcttatccttggcatcaaaccatggacgtaggtgtacaaatgcatctttcaatgacccctccaaatccatagtgtaacatgatagattaacttttgtcaaactggactgacaatctaaaaaagatggcgtcaggcttttgactttaatcgttaaaacaaggaccaccctatgagtaaaaggtaaattctccactttgaagaactttggtaagtacaagtacagggagctttagaaaatcgagtgatggggaccaaaggtacaaaggaagaatacatgaaaatgttatattccaaaatgccctgagcccaaagattggctgctatttttgtatattgaaatactcaaatgatggttggaaagtgactagttagtgactaaatgaagtgcaagatctatcaagcgtcttctttctgggactaggggatgccatgcttccttccaaccttcccgcagcgcatctcagagaagatagttggccccattacaaacagtcacatttcagtaagatattagtcagccaggtaagacacgtgcaggtatcggtatcatcttccatatgaactttagcaaggagagaacagcagcagatttagggatagacaatgtaacaggtctatgttgacaaatctgtgctaaataatttcatgaaccagtgtggggactgggaagaaaagcactttgagcaaggactcttgggttcgagcaaaggcaattagttgacatgatacttcttaagttcctcagtatgtatatgttacaatcgtttatcagacatcttaatagaatcctaattgaaaaaccagttgccaaaattgcacaagttctgctcgctgatactagctttctccccttaactctaaaataccagggatgcttaaggacgtttgtaatagtttttttaatgctttgtttcacttttttaaaaaagaatctttgaagggaaggaagagcagaaagaagtattttaagaaaaatggagagaagtagatagtattgaaagtatatttcttgaagagagagtatctaagtgctataccaagattttatagggcttcctgttgccaaatgtgatgttgagataatgcacagctaagatggcaaatccatcaattattaactggctctgcccacttctgtcatggaatgcaaggattgagaggtgactctggggagaccctgggtgtgtgagagagctccattcatctggccctggatatgtttttcaaaagagagggagaaagcgccagtccctgcaaggtgaactgacctggcactgtttcagtgggagcctcactgcctgccttttccatgctaggagacaaagcatcctctaccccatctgtgaatcggtgctgtggccactgcgagaagcatgattcatgaggtatgatgctcttgagctcccagacaatgtgctgagttaataggttcacttgagatgtatacaccaaggctgtttctttttttaaatctagtccccaatttggagtatttttgcatgtttttgtacagagtaatccattcctctcattgtgtatcttaatctcctctgacttttccattgtctttctcaatcccaccctttgctcttcggatctcaccaaccccccttaaaaaataaatcatgtttgagcaagaaggtagaacacgccctccctcatcttggttttaattgctttggaaacgtgttctaccctgtccagggtttgcataacgtgaattaagtgaatgagatgttctagtattatatcttaacctgataagactatctaagatttctagtatatggtgcatttgctttcctgtgcaaactttggttcagctgccctgcagagaatctcaccattttcctgccagtgccagtataaagaatgcaggagagctaaacctgggtacatgaaggtcagaggggtgaggacggtcgagaaatggggagaagacttgggcttgagacgacctgggcttttcatgtgtagctcactcagcagtatgaggatgactgacacaccagtgggtggtttccaagtgaggcaaatgcccatttcccctctcccctcacaccttgcctggcttcttccatgaagtccttgctgcttttctgcctccccaaaggtgaggggaaggggctggttggggatctgggaaagccagttctctgttctctcctgctggtgatggactaggccttttagaactagcaagatccctcacacagctgggagaacacacacctttcttactccagacccattggtgtgtctccagtaacaaaattattggactcagcctccatatttgacagcaaaagtggccagagggagttgaaatatcttgaagaaaaggaattttcactaagatatgtcctctccctctcccagagtttagctgtttattccttttttttgtttatattgttctcatctgcataaaaccagtctcttgcaataagcctgccgcagaatcaaagtctgtacttcaaaaggtaactgcaccaagggatgggacagtgtgcatcaccctgatctaatcattgtgacgttggtagcttcctaaatactgtatgtaccttgaacaagggttttatttttgttttgttctgttttgctttttgtttttattggtaggctaaggtaattaaattttttaatttgctgttactttggttgtattttctgtactataactgcctacagtatgtcttttgcataaaatgcataagggtttggggatgtaaatggaattttattcatattttgtccaaatacctcttgtaatttgtatcaaaattcttgtacaatttttatattaaagatttatcagtcactga

SEQ ID NO: 2264 - DNA, 4841 bp, Homo sapiens
  source 1..4841: mol_type = unassigned DNA; mol_type = unassigned DNA
gagagaaaggccgagacggagggagccagcggcggccgaggggctggtccaggcgcggccgctaagaggagaccaagaggcgggggctgcacttgacaaccagcatgccgagatggcacaccttgggcccaccccacctccacatagccttaattacaaatcagaggacaggcttagtgagcaagactggccagcatatttcaaggtcccatgttgtggggttgatacatctcaaattgagtcagaagaggcagaagtggatgtgagagaaagagagacacagagagacagagagccaaagagggcaagagacttgactttaagagactcctgtactgacaactccatgcagttcggaaccagaacgactacggctgaaccagggttcatggggacatggcaaaacgctgatactaacctcttattcagaatgtcccaacaggccatccgttgcacactggtaaactgcacatgtgaatgttttcagccagggaagattaacctgaggacttgtgatcagtgtaaacatggctgggtggcacatgccttggataagctcagcacgcagcacctgtaccaccccacccaagtggagattgtgcagtccaacgtcgtgtttgacatcagcagcctgatgctctatgggacacaagcagtgcctgtgcggctaaagatcctgctggaccgtctcttcagcgtcctgaagcaagaggaggtactgcacatactgcacggccttggctggactctgcgggactatgtccgaggatacatccttcaggatgctgctggcaaggtgctggaccgctgggccatcatgtctcgagaagaggaaatcatcacccttcagcagtttctgcggtttggagaaaccaaatccattgtggagctgatggcaattcaggagaaagaagggcaggccgtggctgtaccatcttcaaagacagactcagatataaggactttcattgagagcaataatcgcaccaggagtcccagcctccttgctcacttagagaacagcaatccttccagcattcatcacttcgaaaacatcccaaacagccttgcatttctgcttccattccagtacataaaccctgtctcagcaccactgctagggttgcctccaaatgggctactgttagagcaaccagggttgaggctgcgggaacccagcctttcaactcagaatgaatataatgagagcagcgaatccgaagtttctcccacaccttataagaatgatcaaacacccaatagaaatgccctgaccagcattactaatgtggagcccaaaaccgagccagcctgtgtctctcccattcagaattctgccccagtcagtgatctaaccaaaactgaacacccaaaaagctcattccggattcatcggatgagaaggatggggtcagcctctaggaaaggaagagtgttctgtaatgcatgtgggaagacattctatgacaaaggtactctcaaaattcattacaatgctgttcacctgaagatcaaacatcgatgcaccattgaaggttgcaacatggtctttagctccctccgaagtcgtaatcgccacagtgcaaaccccaatcctcgccttcacatgcctatgctaaggaataaccgagataaagatttaattcgggccacctcaggagctgccacccctgtcatagcaagtacaaaatcaaatctggcactcacaagccctggccgacccccaatgggttttaccactccccctctagaccctgtcttgcaaaatcctctccctagccagctagtattttctgggctaaagactgtacaaccagttcctccattttatagaagtttactcactccaggggaaatggtgagtcctccaacctccctcccaaccagtcccatcattccaaccagtggtaccatagagcagcaccccccgccaccctctgagccagtagtgccagcagtgatgatggccacccatgagcccagtgctgacctggcacccaagaaaaagcccaggaagtcaagcatgcctgtgaagattgagaaggaaattattgataccgccgatgagtttgatgatgaagatgatgaccccaatgatggtggagctgtggtcaatgacatgagccatgacaatcattgtcactcccaagaggagatgagcccaggcatgtctgtgaaggacttttctaagcataacaggacccggtgcatttcaaggactgaaataaggagggccgacagcatgacttctgaagaccaagaacctgagcgggactatgagaacgagtctgagtcttcggagcccaaactgggcgaggaatccatggaaggggatgagcacattcacagcgaagtgagtgaaaaagtcctgatgaatagtgagaggcctgatgagaaccacagtgagccctctcaccaggacgtcatcaaggtgaaggaagaatttacagaccccacttacgacatgttttacatgagccagtatggactgtacaatggtgggggtgccagcatggccgccttgcatgagagctttacatcgtctctgaattatggcagccctcaaaagttctccccagaaggtgacctatgttctagcccagaccccaaaatctgttatgtgtgcaagaagagtttcaaaagctcctacagtgtgaaacttcactacaggaacgttcacttgaaagagatgcacgtctgcacagtggctggttgcaatgctgcattcccctctcgccgaagccgagacagatactgggagaagagcaatgagcaaaacggtctccttgtatcatggggagagactctgtcaagcctaaagtgagcctcggatcttcctaatgacctcctgctggcccagctggatgcaagacaagctcgtttaagcctctgctgacctttcactcctccactacaagaactgcaccactcatttccaccgtcttcagaactgtgcaccaaatagaccacaaagcttcatggctgacgaatgatttccttttcatgatgcaaagagatttttacaaatttctattgatgagagttaacattaagtctcttgtggcattataacctctgttgcacaaatacaatgcttctatataactcttatttttaccttccttataaaggaacaatctactgttcttgccagcattatcttgaaaattcaggccaaaatatctgagcagaatgcacatactgagtgcaccggtggtatttttcatgaagagaccactttgaaagggtcttcctgatttccacctccctcagaatctatctgaccttctcacagactttattggtgtgaatctttcttatatttaaccatttatttgagatgctcatttttgtagcccatcttttctttttaaaaaacatgggctggtttctacccagaagagggtggtaagactgtacatgtacgttaacattcacttgtataactcagcaaaagattagaaagctgatcttattgtcacaagacacagtgccaacataaacctacatcgtaaactgttgaccaaagaactcgatgacatgggcctggactcgtcgcagccctcccttagcaaggacctccgcgatgaatttttggtgaagatatatggtgcccagcaccccatggggctcgatgtcagggaagacgcctcctctcccgcagggactgaagactcccacctgaacgggtatgggagaggcatggcagaggactacatggtccttgacttgagcaccacctccagcctccagtccagcagcagtatccattcctccagagaatccgacgcaggcagcgatgaggggattcttctcgatgacattgacggggcgagtgacagtggggagtcggcacacaaggccgaggcccctgccctccctggcagcctaggggctgaagtttcaggatctcttatgttcagcagcttgtctgggagcaatggtgggatcatgtgcaacatttgccacaaaatgtacagcaacaaggggaccctgagagtgcactacaaaactgtgcatttgagagaaatgcacaagtgcaaagtcccaggttgcaatatgatgttttcctctgtacgaagccgaaatcggcacagtcagaaccctaatctccacaaaaacattcccttcacttcagtagattagtctcagaatggacactacaaatgccagctctcaccagatggcctacgtgtttgaactgccatagtcagtgtgcgcttatgtacttggggtgtgtgtgtgtgtgtgtgtgtgtgtgcatttatgtatgctctgtggctacatatacacacacgtatttccttgagataaacaagataaacactaggtgcttttgaatttttttcacttccctttatagttttgggaaaggagtgggatctttgatttcagggtgaaaacagagtacccctttaaacacacacacacacacatgcacatacacacacacacacacacacacacacagtgtgcaactagccccagttttgacagaataattcttggtcttccccaaagagacaatttgttgtacccatgactgttgcctgcaaaaataaaagggaaaaaaaagaaaaaagaaacaaaaaggaacttcttatagttgtcttttgtgaactttaaggttttgaaagaatcttcaattaaagcatggcagattcacctgtaaatatttagccttgaggggccattgatgtaaaacaattgtattgatggttgtttaacttttttgtttaatttttacagttacatccagctgttagatatgcaggaaaagatagtttgctggctagctctattcatttatgttagcattaatgcacatttttaaaaaaaga

SEQ ID NO: 2265 - DNA, 2106 bp, Homo sapiens
  source 1..2106: mol_type = unassigned DNA; mol_type = unassigned DNA
ccctctgagccagtagtgccagcagtgatgatggccacccatgagcccagtgctgacctggcacccaagaaaaagcccaggaagtcaagcatgcctgtgaagattgagaaggaaattattgataccgccgatgagtttgatgatgaagatgatgaccccaatgatggtggagctgtggtcaatgacatgagccatgacaatcattgtcactcccaagaggagatgagcccaggcatgtctgtgaaggacttttctaagcataacaggacccggtgcatttcaaggactgaaataaggagggccgacagcatgacttctgaagaccaagaacctgagcgggactatgagaacgagtctgagtcttcggagcccaaactgggcgaggaatccatggaaggggatgagcacattcacagcgaagtgagtgaaaaagtcctgatgaatagtgagaggcctgatgagaaccacagtgagccctctcaccaggacgtcatcaaggtgaaggaagaatttacagaccccacttacgacatgttttacatgagccagtatggactgtacaatggtgggggtgccagcatggccgccttgcatgagagctttacatcgtctctgaattatggcagccctcaaaagttctccccagaaggtgacctatgttctagcccagaccccaaaatctgttatgtgtgcaagaagagtttcaaaagctcctacagtgtgaaacttcactacaggaacgttcacttgaaagagatgcacgtctgcacagtggctggttgcaatgctgcattcccctctcgccgaagccgagacagaaacagaaatttacggatggaaagaaccataggtccaggacatcgagacagcctgcatctccgaagaggaaattctaaccggcctggaacctgctgtcttcatacgggagattctcttgaagagagcgtgatagtcagaattagctgcaaaagattagaaagctgatcttattgtcacaagacacagtgccaacataaacctacatcgtaaactgttgaccaaagaactcgatgacatgggcctggactcgtcgcagccctcccttagcaaggacctccgcgatgaatttttggtgaagatatatggtgcccagcaccccatggggctcgatgtcagggaagacgcctcctctcccgcagggactgaagactcccacctgaacgggtatgggagaggcatggcagaggactacatggtccttgacttgagcaccacctccagcctccagtccagcagcagtatccattcctccagagaatccgacgcaggcagcgatgaggggattcttctcgatgacattgacggggcgagtgacagtggggagtcggcacacaaggccgaggcccctgccctccctggcagcctaggggctgaagtttcaggatctcttatgttcagcagcttgtctgggagcaatggtgggatcatgtgcaacatttgccacaaaatgtacagcaacaaggggaccctgagagtgcactacaaaactgtgcatttgagagaaatgcacaagtgcaaagtcccaggttgcaatatgatgttttcctctgtacgaagccgaaatcggcacagtcagaaccctaatctccacaaaaacattcccttcacttcagtagattagtctcagaatggacactacaaatgccagctctcaccagatggcctacgtgtttgaactgccatagtcagtgtgcgcttatgtacttggggtgtgtgtgtgtgtgtgtgtgtgtgtgcatttatgtatgctctgtggctacatatacacacacgtatttccttgagataaacaagataaacactaggtgcttttgaatttttttcacttccctttatagttttgggaaaggagtgggatctttgatttcagggtgaaaacagagtacccctttaaacacacacacacacacatgcacatacacacacacacacacacacacacacagtgtgcaactagccccagttttgacagaataattcttggtcttccccaaagagacaatttgttgtacccatgactgttgcctgcaaaaataaaagggaaaaaaaagaaaaaagaaacaaaaa

SEQ ID NO: 2266 - DNA, 3673 bp, Homo sapiens
  source 1..3673: mol_type = unassigned DNA; mol_type = unassigned DNA
tcagaagaggcagaagtggatgtgagagaaagagagacacagagagacagagagccaaagagggcaagagacttgactttaagagactcctgtactgacaactccatgcagttcggaaccagaacgactacggctgaaccagggttcatggggacatggcaaaacgctgatactaacctcttattcagaatgtcccaacaggccatccgttgcacactggtaaactgcacatgtgaatgttttcagccagggaagattaacctgaggacttgtgatcagtgtaaacatggctgggtggcacatgccttggataagctcagcacgcagcacctgtaccaccccacccaagtggagattgtgcagtccaacgtcgtgtttgacatcagcagcctgatgctctatgggacacaagcagtgcctgtgcggctaaagatcctgctggaccgtctcttcagcgtcctgaagcaagaggaggtactgcacatactgcacggccttggctggactctgcgggactatgtccgaggatacatccttcaggatgctgctggcaaggtgctggaccgctgggccatcatgtctcgagaagaggaaatcatcacccttcagcagtttctgcggtttggagaaaccaaatccattgtggagctgatggcaattcaggagaaagaagggcaggccgtggctgtaccatcttcaaagacagactcagatataaggactttcattgagagcaataatcgcaccaggagtcccagcctccttgctcacttagagaacagcaatccttccagcattcatcacttcgaaaacatcccaaacagccttgcatttctgcttccattccagtacataaaccctgtctcagcaccactgctagggttgcctccaaatgggctactgttagagcaaccagggttgaggctgcgggaacccagcctttcaactcagaatgaatataatgagagcagcgaatccgaagtttctcccacaccttataagaatgatcaaacacccaatagaaatgccctgaccagcattactaatgtggagcccaaaaccgagccagcctgtgtctctcccattcagaattctgccccagtcagtgatctaaccaaaactgaacacccaaaaagctcattccggattcatcggatgagaaggatggggtcagcctctaggaaaggaagagtgttctgtaatgcatgtgggaagacattctatgacaaaggtactctcaaaattcattacaatgctgttcacctgaagatcaaacatcgatgcaccattgaaggttgcaacatggtctttagctccctccgaagtcgtaatcgccacagtgcaaaccccaatcctcgccttcacatgcctatgctaaggaataaccgagataaagatttaattcgggccacctcaggagctgccacccctgtcatagcaagtacaaaatcaaatctggcactcacaagccctggccgacccccaatgggttttaccactccccctctagaccctgtcttgcaaaatcctctccctagccagctagtattttctgggctaaagactgtacaaccagttcctccattttatagaagtttactcactccaggggaaatggtgagtcctccaacctccctcccaaccagtcccatcattccaaccagtggtaccatagagcagcaccccccgccaccctctgagccagtagtgccagcagtgatgatggccacccatgagcccagtgctgacctggcacccaagaaaaagcccaggaagtcaagcatgcctgtgaagattgagaaggaaattattgataccgccgatgagtttgatgatgaagatgatgaccccaatgatggtggagctgtggtcaatgacatgagccatgacaatcattgtcactcccaagaggagatgagcccaggcatgtctgtgaaggacttttctaagcataacaggacccggtgcatttcaaggactgaaataaggagggccgacagcatgacttctgaagaccaagaacctgagcgggactatgagaacgagtctgagtcttcggagcccaaactgggcgaggaatccatggaaggggatgagcacattcacagcgaagtgagtgaaaaagtcctgatgaatagtgagaggcctgatgagaaccacagtgagccctctcaccaggacgtcatcaaggtgaaggaagaatttacagaccccacttacgacatgttttacatgagccagtatggactgtacaatggtgggggtgccagcatggccgccttgcatgagagctttacatcgtctctgaattatggcagccctcaaaagttctccccagaaggtgacctatgttctagcccagaccccaaaatctgttatgtgtgcaagaagagtttcaaaagctcctacagtgtgaaacttcactacaggaacgttcacttgaaagagatgcacgtctgcacagtggctggttgcaatgctgcattcccctctcgccgaagccgagacagaaacagaaatttacggatggaaagaaccataggtccaggacatcgagacagcctgcatctcctgccaacataaacctacatcgtaaactgttgaccaaagaactcgatgacatgggcctggactcgtcgcagccctcccttagcaaggacctccgcgatgaatttttggtgaagatatatggtgcccagcaccccatggggctcgatgtcagggaagacgcctcctctcccgcagggactgaagactcccacctgaacgggtatgggagaggcatggcagaggactacatggtccttgacttgagcaccacctccagcctccagtccagcagcagtatccattcctccagagaatccgacgcaggcagcgatgaggggattcttctcgatgacattgacggggcgagtgacagtggggagtcggcacacaaggccgaggcccctgccctccctggcagcctaggggctgaagtttcaggatctcttatgttcagcagcttgtctgggagcaatggtgggatcatgtgcaacatttgccacaaaatgtacagcaacaaggggaccctgagagtgcactacaaaactgtgcatttgagagaaatgcacaagtgcaaagtcccaggttgcaatatgatgttttcctctgtacgaagccgaaatcggcacagtcagaaccctaatctccacaaaaacattcccttcacttcagtagattagtctcagaatggacactacaaatgccagctctcaccagatggcctacgtgtttgaactgccatagtcagtgtgcgcttatgtacttggggtgtgtgtgtgtgtgtgtgtgtgtgtgcatttatgtatgctctgtggctacatatacacacacgtatttccttgagataaacaagataaacactaggtgcttttgaatttttttcacttccctttatagttttgggaaaggagtgggatctttgatttcagggtgaaaacagagtacccctttaaacacacacacacacacatgcacatacacacacacacacacacacacacacagtgtgcaactagccccagttttgacagaataattcttggtcttccccaaagagacaatttgttgtacccatgactgttgcctgcaaaaataaaagggaaaaaaaagaaaaaagaaacaaaaa

SEQ ID NO: 2267 - DNA, 3361 bp, Homo sapiens
  source 1..3361: mol_type = unassigned DNA; mol_type = unassigned DNA
cggcggccgaggggctggtccaggcgcggccgctaagaggagaccaagaggcgggggctgcacttgacaaccagcatgccgagatggcacaccttgggcccaccccacctccacatagccttaattacaaatcagaggacaggcttagtgagcaagactggccagcatatttcaaggtcccatgttgtggggttgatacatctcaaattgaggccatccgttgcacactggtaaactgcacatgtgaatgttttcagccagggaagattaacctgaggacttgtgatcagtgtaaacatggctgggtggcacatgccttggataagctcagcacgcagcacctgtaccaccccacccaagtggagattgtgcagtccaacgtcgtgtttgacatcagcagcctgatgctctatgggacacaagcagtgcctgtgcggctaaagatcctgctggaccgtctcttcagcgtcctgaagcaagaggaggtactgcacatactgcacggccttggctggactctgcgggactatgtccgaggatacatccttcaggatgctgctggcaaggtgctggaccgctgggccatcatgtctcgagaagaggaaatcatcacccttcagcagtttctgcggtttggagaaaccaaatccattgtggagctgatggcaattcaggagaaagaagggcaggccgtggctgtaccatcttcaaagacagactcagatataaggactttcattgagagcaataatcgcaccaggagtcccagcctccttgctcacttagagaacagcaatccttccagcattcatcacttcgaaaacatcccaaacagccttgcatttctgcttccattccagtacataaaccctgtctcagcaccactgctagggttgcctccaaatgggctactgttagagcaaccagggttgaggctgcgggaacccagcctttcaactcagaatgaatataatgagagcagcgaatccgaagtttctcccacaccttataagaatgatcaaacacccaatagaaatgccctgaccagcattactaatgtggagcccaaaaccgagccagcctgtgtctctcccattcagaattctgccccagtcagtgatctaaccaaaactgaacacccaaaaagctcattccggattcatcggatgagaaggatggggtcagcctctaggaaaggaagagtgttctgtaatgcatgtgggaagacattctatgacaaaggtactctcaaaattcattacaatgctgttcacctgaagatcaaacatcgatgcaccattgaaggttgcaacatggtctttagctccctccgaagtcgtaatcgccacagtgcaaaccccaatcctcgccttcacatgcctatgctaaggaataaccgagataaagatttaattcgggccacctcaggagctgccacccctgtcatagcaagtacaaaatcaaatctggcactcacaagccctggccgacccccaatgggttttaccactccccctctagaccctgtcttgcaaaatcctctccctagccagctagtattttctgggctaaagactgtacaaccagttcctccattttatagaagtttactcactccaggggaaatggtgagtcctccaacctccctcccaaccagtcccatcattccaaccagtggtaccatagagcagcaccccccgccaccctctgagccagtagtgccagcagtgatgatggccacccatgagcccagtgctgacctggcacccaagaaaaagcccaggaagtcaagcatgcctgtgaagattgagaaggaaattattgataccgccgatgagtttgatgatgaagatgatgaccccaatgatggtggagctgtggtcaatgacatgagccatgacaatcattgtcactcccaagaggagatgagcccaggcatgtctgtgaaggacttttctaagcataacaggacccggtgcatttcaaggactgaaataaggagggccgacagcatgacttctgaagaccaagaacctgagcgggactatgagaacgagtctgagtcttcggagcccaaactgggcgaggaatccatggaaggggatgagcacattcacagcgaagtgagtgaaaaagtcctgatgaatagtgagaggcctgatgagaaccacagtgagccctctcaccaggacgtcatcaaggtgaaggaagaatttacagaccccacttacgacatgttttacatgagccagtatggactgtacaatggtgggggtgccagcatggccgccttgcatgagagctttacatcgtctctgaattatggcagccctcaaaagttctccccagaaggtgacctatgttctagcccagaccccaaaatctgttatgtgtgcaagaagagtttcaaaagctcctacagtgtgaaacttcactacaggaacgttcacttgaaagagatgcacgtctgcacagtggctggttgcaatgctgcattcccctctcgccgaagccgagacagacacagtgccaacataaacctacatcgtaaactgttgaccaaagaactcgatgacatgggcctggactcgtcgcagccctcccttagcaaggacctccgcgatgaatttttggtgaagatatatggtgcccagcaccccatggggctcgatgtcagggaagacgcctcctctcccgcagggactgaagactcccacctgaacgggtatgggagaggcatggcagaggactacatggtccttgacttgagcaccacctccagcctccagtccagcagcagtatccattcctccagagaatccgacgcaggcagcgatgaggggattcttctcgatgacattgacggggcgagtgacagtggggagtcggcacacaaggccgaggcccctgccctccctggcagcctaggggctgaagtttcaggatctcttatgttcagcagcttgtctgggagcaatggtgggatcatgtgcaacatttgccacaaaatgtacagcaacaaggggaccctgagagtgcactacaaaactgtgcatttgagagaaatgcacaagtgcaaagtcccaggttgcaatatgatgttttcctctgtacgaagccgaaatcggcacagtcagaaccctaatctccacaaaaacattcccttcacttcagtagattagtctcagaatggacactacaaatgccagctctcaccagatggcctacgtgtttgaactgccatagtcagtgtgcgcttatgtacttggggtgtgtgtgtgtgtgtgtgtgtgtgtgcatttatgtatgctctgtggctacatatacacacacgtatttccttgagataaacaagataaac

SEQ ID NO: 2268 - DNA, 1211 bp, Homo sapiens
  source 1..1211: mol_type = unassigned DNA; mol_type = unassigned DNA
gctccaagaccggcccagacctctcgtttcatcttgccatgtcacgagtcaatgctgtgtcgtcttttcaaaaatctgcctgatttagacaagaaagaaaagtactttcatgttgcagccgcagtcccctgctaacttgtcagcagcaggatatgattcacttgggcccagaagaatggaacagagaggcgggttaggcggttcaataaagcccacggacagtcagaagaggcagaagtggatgtgagagaaagagagacacagagagacagagagccaaagagggcaagagacttgactttaagagactcctgtactgacaactccatgcagttcggaaccagaacgactacggctgaaccagggttcatggggacatggcaaaacgctgatactaacctcttattcagaatgtcccaacaggccatccgttgcacactggtaaactgcacatgtgaatgttttcagccagggaagattaacctgaggacttgtgatcagtgtaaacatggctgggtggcacatgccttggataagctcagcacgcagcacctgtaccaccccacccaagtggagattgtgcagtccaacgtcgtgtttgacatcagcagcctgatgctctatgggacacaagcagtgcctgtgcggctaaagatcctgctggaccgtctcttcagcgtcctgaagcaagaggaggtactgcacatactgcacggccttggctggactctgcgggactatgtccgaggatacatccttcaggatgctgctggcaaggtgctggaccgctgggccatcatgtctcgagaagaggaaatcatcacccttcagcagtttctgcggtttggagaaaccaaatccattgtggagctgatggcaattcaggagaaagaagggcaggccgtggctgtaccatcttcaaagacagactcagatataaggactttcattgagagcaataatcgcaccaggagtcccagcctccttgctcacttagagaacagcaatccttccagcattcatcacttcgaaaacatcccaaacagccttgcatttctgcttccattccagtacataaaccctgtctcagcaccactgctagggttgcctccaaatgggctactgttagagcaaccagggttgaggctgcgggaacccagcctttcaactcagaatgaatataatgagagcagcgaatccgaagtttctcc

SEQ ID NO: 2269 - DNA, 1008 bp, Homo sapiens
  source 1..1008: mol_type = unassigned DNA; mol_type = unassigned DNA
aaatgatagggatatctgtgcagaaggtgcgaaagaagctctgaccccctccctcccccaaatctcccccttcccaaatgaaatgcacagttcagccagcttcttaactacactacactcctgctactggctgccaagaggctcaaaaaatccaccttcacttttcagtcagaagaggcagaagtggatgtgagagaaagagagacacagagagacagagagccaaagagggcaagagacttgactttaagagactcctgtactgacaactccatgcagttcggaaccagaacgactacggctgaaccagggttcatggggacatggcaaaacgctgatactaacctcttattcagaatgtcccaacaggccatccgttgcacactggtaaactgcacatgtgaatgttttcagccagggaagattaacctgaggacttgtgatcagtgtaaacatggctgggtggcacatgccttggataagctcagcacgcagcacctgtaccaccccacccaagtggagattgtgcagtccaacgtcgtgtttgacatcagcagcctgatgctctatgggacacaagcagtgcctgtgcggctaaagatcctgctggaccgtctcttcagcgtcctgaagcaagaggaggtactgcacatactgcacggccttggctggactctgcgggactatgtccgaggatacatccttcaggatgctgctggcaaggtgctggaccgctgggccatcatgtctcgagaagaggaaatcatcacccttcagcagtttctgcggtttggagaaaccaaatccattgtggagctgatggcaattcaggagaaagaagggcaggccgtggctgtaccatcttcaaagacagactcagatataaggactttcattgagagcaataatcgcaccaggagtcccagcctccttgctcacttagagaacagcaatccttccagcattcatcacttcgaaaacatcccaaacagccttgcatttctgctt

SEQ ID NO: 2270 - DNA, 688 bp, Homo sapiens
  source 1..688: mol_type = unassigned DNA; mol_type = unassigned DNA
ggggccgcggcgagggcgcgcgcgggcgggcggggaggcggaggcggcgagagcggaggcccggaggaactcggagggggagggagagaaaggccgagacggagggagccagcggcggccgaggggctggtccaggcgcggccgctaagaggagaccaagaggcgggggctgcacttgacaaccagcatgccgagatgtcagaagaggcagaagtggatgtgagagaaagagagacacagagagacagagagccaaagagggcaagagacttgactttaagagactcctgtactgacaactccatgcagttcggaaccagaacgactacggctgaaccagggttcatggggacatggcaaaacgctgatactaacctcttattcagaatgtcccaacaggccatccgttgcacactggtaaactgcacatgtgaatgttttcagccagggaagattaacctgaggacttgtgatcagtgtaaacatggctgggtggcacatgccttggataagctcagcacgcagcacctgtaccaccccacccaagtggagattgtgcagtccaacgtcgtgtttgacatcagcagcctgatgctctatgggacacaagcagtgcctgtgcggctaaagatcctgctggaccgtctcttcagcgtcctgaagcaagaggaggtactgcacatactgc

SEQ ID NO: 2271 - DNA, 545 bp, Homo sapiens
  source 1..545: mol_type = unassigned DNA; mol_type = unassigned DNA
agctgttaaactgagcaaaggcaagcttggggagtcacaatctatgcataaatgatagggatatctgtgcagaagtcagaagaggcagaagtggatgtgagagaaagagagacacagagagacagagagccaaagagggcaagagacttgactttaagagactcctgtactgacaactccatgcagttcggaaccagaacgactacggctgaaccagggttcatggggacatggcaaaacgctgatactaacctcttattcagaatgtcccaacaggccatccgttgcacactggtaaactgcacatgtgaatgttttcagccagggaagattaacctgaggacttgtgatcagtgtaaacatggctgggtggcacatgccttggataagctcagcacgcagcacctgtaccaccccacccaagtggagattgtgcagtccaacgtcgtgtttgacatcagcagcctgatgctctatgggacacaagcagtgcctgtgcggctaaagatcctgctggaccgtctcttcagcgtcctgaagcaaga

SEQ ID NO: 2272 - DNA, 662 bp, Homo sapiens
  source 1..662: mol_type = unassigned DNA; mol_type = unassigned DNA
tcagaagaggcagaagtggatgtgagagaaagagagacacagagagacagagagccaaagagggcaagagacttgactttaagagactcctgtactgacaactccatgcagttcggaaccagaacgactacggctgaaccagggttcatggggacatggcaaaacgctgatactaacctcttattcagaatgtcccaacaggccatccgttgcacactggtaaactgcacatgtgaatgttttcagccagggaagattaacctgaggacttgtgatcagtgtaaacatggctgggtggcacatgaaaccctgaaatcgtgtctccaatgacttctgctcagaggtgaaacacagcattctttccggctgccttatactgtgcagtgtcctgggtgtggggcaatgaggaagtgacttgggttttctagtgtgtaattttcctctgaaatgcatggaacagcaacaaaactaccaagatacattgcccagaatggtttcatggtagcactgaatgcattctacctgtcattatgtcaataaaaaaatttttaatatctgctgctaaaaaataaccaaatgccaaaatcatgtattctctctaaaacagatttttagaaatttgttgacctcctttcttgaataaattatccttgttaacagca

SEQ ID NO: 2273 - DNA, 745 bp, Homo sapiens
  source 1..745: mol_type = unassigned DNA; mol_type = unassigned DNA
ccactagcatgaagctgatttgctgtgatggtcacttagaagggtttcgctttttcctaaactgtggctgtttaaagtcttggagtctggacaattaacagctgaagaaaatatgacaagacacacgcaaagaggttgggagatagagaggaggagtgcgccagaaaggagctgagctgccttcttgtgtaaactgcctgagagcgggccccctcccctggcctccgtccctgtccccccttccccaaggctgtgttctgctgtctgcccgaaggccaggactgatctgttaaccttgcaccactggctgggaggccgctgcagctcatggccatccgttgcacactggtaaactgcacatgtgaatgttttcagccagggaagattaacctgaggacttgtgatcagtgtaaacatggctgggtggcacatgaaaccctgaaatcgtgtctccaatgacttctgctcagaggtgaaacacagcattctttccggctgccttatactgtgcagtgtcctgggtgtggggcaatgaggaagtgacttgggttttctagtgtgtaattttcctctgaaatgcatggaacagcaacaaaactaccaagatacattgcccagaatggtttcatggtagcactgaatgcattctacctgtcattatgtcaataaaaaaatttttaatatctgctgctaaaaaataaccaaatgccaaaatcatgtattctctctaaaacagatttttaga

SEQ ID NO: 2274 - DNA, 561 bp, Homo sapiens
  source 1..561: mol_type = unassigned DNA; mol_type = unassigned DNA
tagagggagctattctttttgttgttgttcctgggaatatttcttatattaagggagtccaaaatagatgatgacttgaagttagtggtttcctttacttttaattttacagttaagggttcagcacggttttaaatattccttaagtatttgaaagatggccttagtgaatatgaggagttcaatttagtactgttcacattcacttgtttgagatgatttgccagttgacaatgtggcttttatggttattgtaagatggcatacttcaactgtattatttatagtcttctaaacaacctacgatccccaaatatccaatactaaattgcagtcagaagaggcagaagtggatgtgagagaaagagagacacagagagacagagagccaaagagggcaagagacttgactttaagagactcctgtactgacaactccatgcagttcggaaccagaacgactacggctgaaccagggttcatggggacatggcaaaacgctgatactaacctcttattcagaatgtcccaacaggccatccgttgcacactggtaaactg

SEQ ID NO: 2275 - DNA, 687 bp, Homo sapiens
  source 1..687: mol_type = unassigned DNA; mol_type = unassigned DNA
tagagggagctattctttttgttgttgttcctgggaatatttcttatattaagggagtccaaaatagatgatgacttgaagttagtggtttcctttacttttaattttacagttaagggttcagcacggttttaaatattccttaagtatttgaaagatggccttagtgaatatgaggagttcaatttagtactgttcacattcacttgtttgagatgatttgccagttgacaatgtggcttttatggttattgtaagatggcatacttcaactgtattatttatagtcttctaaacaacctacgatccccaaatatccaatactaaattgcaggcacaccttgggcccaccccacctccacatagccttaattacaaatcagaggacaggcttagtgagcaagactggccagcatatttcaaggtcccatgttgtggggttgatacatctcaaattgagtcagaagaggcagaagtggatgtgagagaaagagagacacagagagacagagagccaaagagggcaagagacttgactttaagagactcctgtactgacaactccatgcagttcggaaccagaacgactacggctgaaccagggttcatggggacatggcaaaacgctgatactaacctcttattcagaatgtcccaacaggccatccgttgcacactggtaaactg

SEQ ID NO: 2276 - DNA, 3750 bp, Homo sapiens
  source 1..3750: mol_type = unassigned DNA; mol_type = unassigned DNA
agacggagggagccagcggcggccgaggggctggtccaggcgcggccgctaagaggagaccaagaggcgggggctgcacttgacaaccagcatgccgagatgtcagaagaggcagaagtggatgtgagagaaagagagacacagagagacagagagccaaagagggcaagagacttgactttaagagactcctgtactgacaactccatgcagttcggaaccagaacgactacggctgaaccagggttcatggggacatggcaaaacgctgatactaacctcttattcagaatgtcccaacaggccatccgttgcacactggtaaactgcacatgtgaatgttttcagccagggaagattaacctgaggacttgtgatcagtgtaaacatggctgggtggcacatgccttggataagctcagcacgcagcacctgtaccaccccacccaagtggagattgtgcagtccaacgtcgtgtttgacatcagcagcctgatgctctatgggacacaagcagtgcctgtgcggctaaagatcctgctggaccgtctcttcagcgtcctgaagcaagaggaggtactgcacatactgcacggccttggctggactctgcgggactatgtccgaggatacatccttcaggatgctgctggcaaggtgctggaccgctgggccatcatgtctcgagaagaggaaatcatcacccttcagcagtttctgcggtttggagaaaccaaatccattgtggagctgatggcaattcaggagaaagaagggcaggccgtggctgtaccatcttcaaagacagactcagatataaggactttcattgagagcaataatcgcaccaggagtcccagcctccttgctcacttagagaacagcaatccttccagcattcatcacttcgaaaacatcccaaacagccttgcatttctgcttccattccagtacataaaccctgtctcagcaccactgctagggttgcctccaaatgggctactgttagagcaaccagggttgaggctgcgggaacccagcctttcaactcagaatgaatataatgagagcagcgaatccgaagtttctcccacaccttataagaatgatcaaacacccaatagaaatgccctgaccagcattactaatgtggagcccaaaaccgagccagcctgtgtctctcccattcagaattctgccccagtcagtgatctaaccaaaactgaacacccaaaaagctcattccggattcatcggatgagaaggatggggtcagcctctaggaaaggaagagtgttctgtaatgcatgtgggaagacattctatgacaaaggtactctcaaaattcattacaatgctgttcacctgaagatcaaacatcgatgcaccattgaaggttgcaacatggtctttagctccctccgaagtcgtaatcgccacagtgcaaaccccaatcctcgccttcacatgcctatgctaaggaataaccgagataaagatttaattcgggccacctcaggagctgccacccctgtcatagcaagtacaaaatcaaatctggcactcacaagccctggccgacccccaatgggttttaccactccccctctagaccctgtcttgcaaaatcctctccctagccagctagtattttctgggctaaagactgtacaaccagttcctccattttatagaagtttactcactccaggggaaatggtgagtcctccaacctccctcccaaccagtcccatcattccaaccagtggtaccatagagcagcaccccccgccaccctctgagccagtagtgccagcagtgatgatggccacccatgagcccagtgctgacctggcacccaagaaaaagcccaggaagtcaagcatgcctgtgaagattgagaaggaaattattgataccgccgatgagtttgatgatgaagatgatgaccccaatgatggtggagctgtggtcaatgacatgagccatgacaatcattgtcactcccaagaggagatgagcccaggcatgtctgtgaaggacttttctaagcataacaggacccggtgcatttcaaggactgaaataaggagggccgacagcatgacttctgaagaccaagaacctgagcgggactatgagaacgagtctgagtcttcggagcccaaactgggcgaggaatccatggaaggggatgagcacattcacagcgaagtgagtgaaaaagtcctgatgaatagtgagaggcctgatgagaaccacagtgagccctctcaccaggacgtcatcaaggtgaaggaagaatttacagaccccacttacgacatgttttacatgagccagtatggactgtacaatggtgggggtgccagcatggccgccttgcatgagagctttacatcgtctctgaattatggcagccctcaaaagttctccccagaaggtgacctatgttctagcccagaccccaaaatctgttatgtgtgcaagaagagtttcaaaagctcctacagtgtgaaacttcactacaggaacgttcacttgaaagagatgcacgtctgcacagtggctggttgcaatgctgcattcccctctcgccgaagccgagacagaaacagaaatttacggatggaaagaaccataggtccaggacatcgagacagcctgcatctcctgccaacataaacctacatcgtaaactgttgaccaaagaactcgatgacatgggcctggactcgtcgcagccctcccttagcaaggacctccgcgatgaatttttggtgaagatatatggtgcccagcaccccatggggctcgatgtcagggaagacgcctcctctcccgcagggactgaagactcccacctgaacgggtatgggagaggcatggcagaggactacatggtccttgacttgagcaccacctccagcctccagtccagcagcagtatccattcctccagagaatccgacgcaggcagcgatgaggggattcttctcgatgacattgacggggcgagtgacagtggggagtcggcacacaaggccgaggcccctgccctccctggcagcctaggggctgaagtttcaggatctcttatgttcagcagcttgtctgggagcaatggtgggatcatgtgcaacatttgccacaaaatgtacagcaacaaggggaccctgagagtgcactacaaaactgtgcatttgagagaaatgcacaagtgcaaagtcccaggttgcaatatgatgttttcctctgtacgaagccgaaatcggcacagtcagaaccctaatctccacaaaaacattcccttcacttcagtagattagtctcagaatggacactacaaatgccagctctcaccagatggcctacgtgtttgaactgccatagtcagtgtgcgcttatgtacttggggtgtgtgtgtgtgtgtgtgtgtgtgtgcatttatgtatgctctgtggctacatatacacacacgtatttccttgagataaacaagataaacactaggtgcttttgaatttttttcacttccctttatagttttgggaaaggagtgggatctttgatttcagggtgaaaacagagtacccctttaaacacacacacacacacatgcacatacacacacacacacacacacacacacagtgtgcaactagccccagttttgacagaataattcttggtcttccccaaagagacaatttgttgtacccatgactgttgcctgcaaaaataaaaggg

SEQ ID NO: 2277 - DNA, 582 bp, Homo sapiens
  source 1..582: mol_type = unassigned DNA; mol_type = unassigned DNA
aaccgaccgagggggtcgggggaggctgcgttaaggcttccctgagattggtttccttatcattttctccaccgccgctgtcccattttctgatgagtttgcttttaatgatttatccaacagtttgtcttgcagaagaagaagaccattgagagtttcagaacaagcttcctggaacccatgacccatgaagtcttgtcgacatttataccgtctgagggtagcagctcgaaagtagaagaagtggagtgttgccagggacggcagtatctctttgtgtgaccctggcggcttatgggacgttggcttcagacctttgtgatacaccatgctgcgtgggacgatgacggcgtggagaggaatgaggcctgaggtcacactggcttgcctcctcctagccacagcaggctgctttgctgacttgaacgaggtccctcaggtcaccgtccagcctgcgtccaccgtccagaagcccggaggcactgtgatcttgggctgcgtggtggaacctccaaggatgaatgtaacctggcgcctgaatggaaaggagctgaatggctcggatgatgctctgggtgtcct

SEQ ID NO: 2278 - DNA, 4646 bp, Homo sapiens
  source 1..4646: mol_type = unassigned DNA; mol_type = unassigned DNA
cctcctcctcctcctcgcacggtaatgggaggctcctaggcaggagaagcaaaagaaggaattgtttgcgagttcagtcatccaaaaagcttcttccatatggagggaccgggtgcgctgggcgcggcgtcccctgcgttgtcctcctgctgccgcccccgcggccgccgctttctgccgcggggaccctgagccccggcccgccggtgtcagccgccgcgcgcgcgcacagacacacacacagagacacacaaacacacacagaaaagacacacacgcgcacacacggcgcgcacaccctcacgcccgccacagccacaacacgcccgcacgcgccctccctctccggcccgcaacttctcggtcctcggctcctttgttgctccagccgcggccgctcgcccgtgttgtgtgtccccggtgtcaccgagcgtgttgtgtgtccgtgcggcgcggcgctgtgtggctccctcgcgcccaccacgctggcccccgggccccggctcgcccttcccaggcgccggctgcagcagagtttcagaacaagcttcctggaacccatgacccatgaagtcttgtcgacatttataccgtctgagggtagcagctcgaaagtagaagaaagtgttgccagggacggcagtatctctttgtgtgaccctggcggcttatgggacgttggcttcagacctttgtgatacaccatgctgcgtgggacgatgacggcgtggagaggaatgaggcctgaggtcacactggcttgcctcctcctagccacagcaggctgctttgctgacttgaacgaggtccctcaggtcaccgtccagcctgcgtccaccgtccagaagcccggaggcactgtgatcttgggctgcgtggtggaacctccaaggatgaatgtaacctggcgcctgaatggaaaggagctgaatggctcggatgatgctctgggtgtcctcatcacccacgggaccctcgtcatcactgcccttaacaaccacactgtgggacggtaccagtgtgtggcccggatgcctgcgggggctgtggccagcgtgccagccactgtgacactagccaatctccaggacttcaagttagatgtgcagcacgtgattgaagtggatgagggaaacacagcagtcattgcctgccacctgcctgagagccaccccaaagcccaggtccggtacagcgtcaaacaagagtggctggaggcctccagaggtaactacctgatcatgccctcagggaacctccagattgtgaatgccagccaggaggacgagggcatgtacaagtgtgcagcctacaacccagtgacccaggaagtgaaaacctccggctccagcgacaggctacgtgtgcgccgctccaccgctgaggctgcccgcatcatctaccccccagaggcccaaaccatcatcgtcaccaaaggccagagtctcattctggagtgtgtggccagtggaatcccacccccacgggtcacctgggccaaggatgggtccagtgtcaccggctacaacaagacgcgcttcctgctgagcaacctcctcatcgacaccaccagcgaggaggactcaggcacctaccgctgcatggccgacaatggggttgggcagcccggggcagcggtcatcctctacaatgtccaggtgtttgaaccccctgaggtcaccatggagctatcccagctggtcatcccctggggccagagtgccaagcttacctgtgaggtgcgtgggaaccccccgccctccgtgctgtggctgaggaatgctgtgcccctcatctccagccagcgcctccggctctcccgcagggccctgcgcgtgctcagcatggggcctgaggacgaaggcgtctaccagtgcatggccgagaacgaggttgggagcgcccatgccgtagtccagctgcggacctccaggccaagcataaccccaaggctatggcaggatgctgagctggctactggcacacctcctgtatcaccctccaaactcggcaaccctgagcagatgctgagggggcaaccggcgctccccagacccccaacgtcagtggggcctgcttccccgcagtgtccaggagagaaggggcagggggctcccgccgaggctcccatcatcctcagctcgccccgcacctccaagacagactcatatgaactggtgtggcggcctcggcatgagggcagtggccgggcgccaatcctctactatgtggtgaaacaccgcaaggtcacaaattcctctgacgattggaccatctctggcattccagccaaccagcaccgcctgaccctcaccagacttgaccccgggagcttgtatgaagtggagatggcagcttacaactgtgcgggagagggccagacagccatggtcaccttccgaactggacggcggcccaaacccgagatcatggccagcaaagagcagcagatccagagagacgaccctggagccagtccccagagcagcagccagccagaccacggccgcctctcccccccagaagctcccgacaggcccaccatctccacggcctccgagacctcagtgtacgtgacctggattccccgtgggaatggtgggttcccaatccagtccttccgtgtggagtacaagaagctaaagaaagtgggagactggattctggccaccagcgccatccccccatcgcggctgtccgtggagatcacgggcctagagaaaggcacctcctacaagtttcgagtccgggctctgaacatgctgggggagagcgagcccagcgccccctctcggccctacgtggtgtcgggctacagcggtcgcgtgtacgagaggcccgtggcaggtccttatatcaccttcacggatgcggtcaatgagaccaccatcatgctcaagtggatgtacatcccagcaagtaacaacaacaccccaatccatggcttttatatctattatcgacccacagacagtgacaatgatagtgactacaagaaggatatggtggaaggggacaagtactggcactccatcagccacctgcagccagagacctcctacgacattaagatgcagtgcttcaatgaaggaggggagagcgagttcagcaacgtgatgatctgtgagaccaaagctcggaagtcttctggccagcctggtcgactgccacccccaactctggccccaccacagccgccccttcctgaaaccatagagcggccggtgggcactggggccatggtggctcgctccagcgacctgccctatctgattgtcggggtcgtcctgggctccatcgttctcatcatcgtcaccttcatccccttctgcttgtggagggcctggtctaagcaaaaacatacaacagacctgggttttcctcgaagtgcccttccaccctcctgcccgtatactatggtgccattgggaggactcccaggccaccaggccagtggacagccctacctcagtggcatcagtggacgggcctgtgctaatgggatccacatgaataggggctgcccctcggctgcagtgggctacccgggcatgaagccccagcagcactgcccaggcgagcttcagcagcagagtgacaccagcagcctgctgaggcagacccatcttggcaatggatatgacccccaaagtcaccagatcacgaggggtcccaagtctagcccggacgagggctctttcttatacacactgcccgacgactccactcaccagctgctgcagccccatcacgactgctgccaacgccaggagcagcctgctgctgtgggccagtcaggggtgaggagagcccccgacagtcctgtcctggaagcagtgtgggaccctccatttcactcagggcccccatgctgcttgggccttgtgccagttgaagaggtggacagtcctgactcctgccaagtgagtggaggagactggtgtccccagcaccccgtaggggcctacgtaggacaggaacctggaatgcagctctccccggggccactggtgcgtgtgtcttttgaaacaccacctctcacaatttaggcagaagctgatatcccagaaagactatatattgttttttttttaaaaaaaaaaagaagaaaaaagagacagagaaaattggtatttatttttctattatagccatatttatatatttatgcacttgtaaataaatgtatatgttttataattctggagagacataaggagtcctacccgttgaggttggagagggaaaataaagaagctgccacctaacaggagtcacccaggaaagcaccgcacaggctggcgcgggacagactcctaacctggggcctctgcagtggcaggcgaggctgcaggaggcccacagataagctggcaagaggaaggatcccaggcacatggttcatcacgagcatgagggaacagcaaggggcacggtatcacagcctggagacacccacacagatggctggatccggtgctacgggaaacattttcctaagatgcccatgagaacagaccaagatgtgtacagcactatgagcattaaaaaaccttccagaatcaataatccgtggcaacatatctctgtaaaaacaaacactgtaacttctaaataaatgtttagtcttccctgtaaccttcaaa

SEQ ID NO: 2279 - DNA, 703 bp, Homo sapiens
  source 1..703: mol_type = unassigned DNA; mol_type = unassigned DNA
aagaaggaattgtttgcgagttcagtcatccaaaaagcttcttccatatggagggaccgggtgcgctgggcgcggcgtcccctgcgttgtcctcctgctgccgcccccgcggccgccgctttctgccgcggggaccctgagccccggcccgccggtgtcagccgccgcgcgcgcgcacagacacacacacagagacacacaaacacacacagaaaagacacacacgcgcacacacggcgcgcacaccctcacgcccgccacagccacaacacgcccgcacgcgccctccctctccggcccgcaacttctcggtcctcggctcctttgttgctccagccgcggccgctcgcccgtgttgtgtgtccccggtgtcaccgagcgtgttgtgtgtccgtgcggcgcggcgctgtgtggctccctcgcgcccaccacgctggcccccgggccccggctcgcccttcccaggcgccggctgcagcagagtttcagaacaagcttcctggaacccatgacccatgaagtcttgtcgacatttataccgtctgagggtagcagctcgaaagtagaagaagtggatctccaggacttcaagttagatgtgcagcacgtgattgaagtggatgagggaaacacagcagtcattgcctgccacctgcctgagagccaccccaaagcccaggtccggtacagcgtcaaacaagag

SEQ ID NO: 2280 - DNA, 2173 bp, Homo sapiens
  source 1..2173: mol_type = unassigned DNA; mol_type = unassigned DNA
aaaaagcttcttccatatggagggaccgggtgcgctgggcgcggcgtcccctgcgttgtcctcctgctgccgcccccgcggccgccgctttctgccgcggggaccctgagccccggcccgccggtgtcagccgccgcgcgcgcgcacagacacacacacagagacacacaaacacacacagaaaagacacacacgcgcacacacggcgcgcacaccctcacgcccgccacagccacaacacgcccgcacgcgccctccctctccggcccgcaacttctcggtcctcggctcctttgttgctccagccgcggccgctcgcccgtgttgtgtgtccccggtgtcaccgagcgtgttgtgtgtccgtgcggcgcggcgctgtgtggctccctcgcgcccaccacgctggcccccgggccccggctcgcccttcccaggcgccggctgcagcagagtttcagaacaagcttcctggaacccatgacccatgaagtcttgtcgacatttataccgtctgagggtagcagctcgaaagtagaagaagtggagtgttgccagggacggcagtatctctttgtgtgaccctggcggcttatgggacgttggcttcagacctttgtgatacaccatgctgcgtgggacgatgacggcgtggagaggaatgaggcctgaggtcacactggcttgcctcctcctagccacagcaggctgctttgctgacttgaacgaggtccctcaggtcaccgtccagcctgcgtccaccgtccagaagcccggaggcactgtgatcttgggctgcgtggtggaacctccaaggatgaatgtaacctggcgcctgaatggaaaggagctgaatggctcggatgatgctctgggtgtcctcatcacccacgggaccctcgtcatcactgcccttaacaaccacactgtgggacggtaccagtgtgtggcccggatgcctgcgggggctgtggccagcgtgccagccactgtgacactagccagtgagtctgctcctttgcctccctgccatggtgcggtccctcctcatctctcccaccctgaagcccccaccattcatgctgcctcttgttactcttagcataaaatgggccttaactgcagaaatgtcaaatcagaacagtagctgcctagtaatgcccagtgatgggggacccttgtgcccttggaaaacctcactccaagtagaggctgtatctggagtgagtgtctacagagaggggaattggtcagtgcatggcagaacttgacatggcagaactgttccgtgggccccagagcagggccgtgccgtgccttcctacttggtcatcctgtggctgtaggtgcactgtcccaactgctcacacaccttccagtcccctccctccattctcaccacagttacagtcggagcagggagagacaggacaccaagagacatgggcagggccacgtgtagtctggacagagcccacccagcccagacttggcctcctgtctctctgtgaggggcaagcatagtccgaaggcctggattataaatattagaacataatgaaaaggaaactgtgtggcaaagggataaagggatacagagaaaagaaacaaggaagagatgaggtgacagtttggaccaaggaaaatgccaagagaagacttcacactaccttttttttttctggttttgccattcttttattcatgttgttacactcagtataggatagtttattaaaatcattatgtctgtagacattctatttgtgatatagaaattgtgttatttctgacctctattttttcctattatgtgacaaagaacataggtcctcagaccaacatgtggaaaccaagggccaaatggcttctaaggtccctcccaactgaataattctggtaaattccatttccatgtgctcactgacggatggtcctaataaccgctcttatttcttttatgcttgtgaaagtcatagtttttacaaaattacttgagggtgtattataaagattcaacagagcaaagtaaaggccaagtgacttgacatagtcatagctggaagaggagccttaccaagacaggtgtttctagttgccattatacttattctaccttatgaggacccattgtatgaggctagatggaagtgagtaaacagacgtcctacctttg

SEQ ID NO: 2281 - DNA, 561 bp, Homo sapiens
  source 1..561: mol_type = unassigned DNA
gagctgcggccgaggctgggcgcgccgggcgccgggcgaagaagttggggcgaggcgggcagcgggggtcccgggggctgcagccgctacggggcccaggggcgccgcatctcgttccctgccgcagcggtctggccgggcgatggtggtttcgcctcagcggttcccagaagcttctcgggtggaagaaggatccagccagcctcccaaacttccaccgaaggttgacaccagcgccccggccccatgctccaggccgtggggggaacccgaggcgtggcggcaaatgcgtagagtcactcaacacgcactcggcctctttggaggtttcagaacaagcttcctggaacccatgacccatgaagtcttgtcgacatttataccgtctgagggtagcagctcgaaagtagaagaaagtgttgccagggacggcagtatctctttgtgtgaccctggcggcttatgggacgttggcttcagacctttgtgatacaccatgctgcgtgggacgatgacggcgtggagaggaatgaggcctgaggtcacactggcttgcctcct

SEQ ID NO: 2282 - DNA, 4276 bp, Homo sapiens
  source 1..4276: mol_type = unassigned DNA
gtttctcatagttggcgtcttctaaaggaaaaacactaaaatgaggaactcagcggaccgggagcgacgcagcttgagggaagcatccctagctgttggcgcagaggggcgaggctgaagccgagtggcccgaggtgtctgaggggctggggcaaaggtgaaagagtttcagaacaagcttcctggaacccatgacccatgaagtcttgtcgacatttataccgtctgagggtagcagctcgaaagtagaagaagtggagtgttgccagggacggcagtatctctttgtgtgaccctggcggcttatgggacgttggcttcagacctttgtgatacaccatgctgcgtgggacgatgacggcgtggagaggaatgaggcctgaggtcacactggcttgcctcctcctagccacagcaggctgctttgctgacttgaacgaggtccctcaggtcaccgtccagcctgcgtccaccgtccagaagcccggaggcactgtgatcttgggctgcgtggtggaacctccaaggatgaatgtaacctggcgcctgaatggaaaggagctgaatggctcggatgatgctctgggtgtcctcatcacccacgggaccctcgtcatcactgcccttaacaaccacactgtgggacggtaccagtgtgtggcccggatgcctgcgggggctgtggccagcgtgccagccactgtgacactagccaatctccaggacttcaagttagatgtgcagcacgtgattgaagtggatgagggaaacacagcagtcattgcctgccacctgcctgagagccaccccaaagcccaggtccggtacagcgtcaaacaagagtggctggaggcctccagaggtaactacctgatcatgccctcagggaacctccagattgtgaatgccagccaggaggacgagggcatgtacaagtgtgcagcctacaacccagtgacccaggaagtgaaaacctccggctccagcgacaggctacgtgtgcgccgctccaccgctgaggctgcccgcatcatctaccccccagaggcccaaaccatcatcgtcaccaaaggccagagtctcattctggagtgtgtggccagtggaatcccacccccacgggtcacctgggccaaggatgggtccagtgtcaccggctacaacaagacgcgcttcctgctgagcaacctcctcatcgacaccaccagcgaggaggactcaggcacctaccgctgcatggccgacaatggggttgggcagcccggggcagcggtcatcctctacaatgtccaggtgtttgaaccccctgaggtcaccatggagctatcccagctggtcatcccctggggccagagtgccaagcttacctgtgaggtgcgtgggaaccccccgccctccgtgctgtggctgaggaatgctgtgcccctcatctccagccagcgcctccggctctcccgcagggccctgcgcgtgctcagcatggggcctgaggacgaaggcgtctaccagtgcatggccgagaacgaggttgggagcgcccatgccgtagtccagctgcggacctccaggccaagcataaccccaaggctatggcaggatgctgagctggctactggcacacctcctgtatcaccctccaaactcggcaaccctgagcagatgctgagggggcaaccggcgctccccagacccccaacgtcagtggggcctgcttccccgcagtgtccaggagagaaggggcagggggctcccgccgaggctcccatcatcctcagctcgccccgcacctccaagacagactcatatgaactggtgtggcggcctcggcatgagggcagtggccgggcgccaatcctctactatgtggtgaaacaccgcaagcaggtcacaaattcctctgacgattggaccatctctggcattccagccaaccagcaccgcctgaccctcaccagacttgaccccgggagcttgtatgaagtggagatggcagcttacaactgtgcgggagagggccagacagccatggtcaccttccgaactggacggcggcccaaacccgagatcatggccagcaaagagcagcagatccagagagacgaccctggagccagtccccagagcagcagccagccagaccacggccgcctctcccccccagaagctcccgacaggcccaccatctccacggcctccgagacctcagtgtacgtgacctggattccccgtgggaatggtgggttcccaatccagtccttccgtgtggagtacaagaagctaaagaaagtgggagactggattctggccaccagcgccatccccccatcgcggctgtccgtggagatcacgggcctagagaaaggcacctcctacaagtttcgagtccgggctctgaacatgctgggggagagcgagcccagcgccccctctcggccctacgtggtgtcgggctacagcggtcgcgtgtacgagaggcccgtggcaggtccttatatcaccttcacggatgcggtcaatgagaccaccatcatgctcaagtggatgtacatcccagcaagtaacaacaacaccccaatccatggcttttatatctattatcgacccacagacagtgacaatgatagtgactacaagaaggatatggtggaaggggacaagtactggcactccatcagccacctgcagccagagacctcctacgacattaagatgcagtgcttcaatgaaggaggggagagcgagttcagcaacgtgatgatctgtgagaccaaagctcggaagtcttctggccagcctggtcgactgccacccccaactctggccccaccacagccgccccttcctgaaaccatagagcggccggtgggcactggggccatggtggctcgctccagcgacctgccctatctgattgtcggggtcgtcctgggctccatcgttctcatcatcgtcaccttcatccccttctgcttgtggagggcctggtctaagcaaaaacatacaacagacctgggttttcctcgaagtgcccttccaccctcctgcccgtatactatggtgccattgggaggactcccaggccaccaggccagtggacagccctacctcagtggcatcagtggacgggcctgtgctaatgggatccacatgaataggggctgcccctcggctgcagtgggctacccgggcatgaagccccagcagcactgcccaggcgagcttcagcagcagagtgacaccagcagcctgctgaggcagacccatcttggcaatggatatgacccccaaagtcaccagatcacgaggggtcccaagtctagcccggacgagggctctttcttatacacactgcccgacgactccactcaccagctgctgcagccccatcacgactgctgccaacgccaggagcagcctgctgctgtgggccagtcaggggtgaggagagcccccgacagtcctgtcctggaagcagtgtgggaccctccatttcactcagggcccccatgctgcttgggccttgtgccagttgaagaggtggacagtcctgactcctgccaagtgagtggaggagactggtgtccccagcaccccgtaggggcctacgtaggacaggaacctggaatgcagctctccccggggccactggtgcgtgtgtcttttgaaacaccacctctcacaatttaggcagaagctgatatcccagaaagactatatattgttttttttttaaaaaaaaaaagaagaaaaaagagacagagaaaattggtatttatttttctattatagccatatttatatatttatgcacttgtaaataaatgtatatgttttataattctggagagacataaggagtcctacccgttgaggttggagagggaaaataaagaagctgccacctaacaggagtcacccaggaaagcaccgcacaggctggcgcgggacagactcctaacctggggcctctgcagtggcaggcgaggctgcaggaggcccacagataagctggcaagaggaaggatcccaggcacatggttcatcacgagcatgagggaacagcaaggggcacggtatcacagcctggagacacccacacagatggctggatccggtgctacgggaaacattttcctaagatgcccatgagaacagaccaagatgtgtacagcactatgagcattaaaaaaccttccagaatcaataatccgtggcaacatatctctgtaaaaacaaacactgtaacttctaaataaatgtttagtcttccctgtaa

SEQ ID NO: 2283 - DNA, 544 bp, Homo sapiens
  source 1..544: mol_type = unassigned DNA
actaaaatgaggaactcagcggaccgggagcgacgcagcttgagggaagcatccctagctgttggcgcagaggggcgaggctgaagccgagtggcccgaggtgtctgaggggctggggcaaaggtgaaagagtttcagaacaagcttcctggaacccatgacccatgaagtcttgtcgacatttataccgtctgagggtagcagctcgaaagtagaagaagtgggtgaggttttctcttcagtctgatagctctggcctattaggtcagccatttgttcatgttttgtgttaccacttagagatagtttttctcatcctcaagtattgggagtccaactttgagtggaatctggactaaacttcagagtgttgccagggacggcagtatctctttgtgtgaccctggcggcttatgggacgttggcttcagacctttgtgatacaccatgctgcgtgggacgatgacggcgtggagaggaatgaggcctgaggtcacactggcttgcctcctcctagccacagcaggctgctttgctgacttga

SEQ ID NO: 2284 - DNA, 1616 bp, Homo sapiens
  source 1..1616: mol_type = unassigned DNA
agcggaccgggagcgacgcagcttgagggaagcatccctagctgttggcgcagaggggcgaggctgaagccgagtggcccgaggtgtctgaggggctggggcaaaggtgaaagagtttcagaacaagcttcctggaacccatgacccatgaagtcttgtcgacatttataccgtctgagggtagcagctcgaaagtagaagaagtggagtgttgccagggacggcagtatctctttgtgtgaccctggcggcttatgggacgttggcttcagacctttgtgatacaccatgctgcgtgggacgatgacggcgtggagaggaatgaggcctgaggtcacactggcttgcctcctcctagccacagcaggctgctttgctgacttgaacgaggtccctcaggtcaccgtccagcctgcgtccaccgtccagaagcccggaggcactgtgatcttgggctgcgtggtggaacctccaaggatgaatgtaacctggcgcctgaatggaaaggagctgaatggctcggatgatgctctgggtgtcctcatcacccacgggaccctcgtcatcactgcccttaacaaccacactgtgggacggtaccagtgtgtggcccggatgcctgcgggggctgtggccagcgtgccagccactgtgacactagccaatctccaggacttcaagttagatgtgcagcacgtgattgaagtggatgagggaaacacagcagtcattgcctgccacctgcctgagagccaccccaaagcccaggtccggtacagcgtcaaacaagagtggctggaggcctccagaggtaactacctgatcatgccctcagggaacctccagattgtgaatgccagccaggaggacgagggcatgtacaagtgtgcagcctacaacccagtgacccaggaagtgaaaacctccggctccagcgacaggctacgtgtgcgccgtaaggcccgggcccacctgctgggggatgggggatcactgatggaagggctcacaaagatggaaagggaggtagatacctggaggtgccacatccaagctccagttctgtgtgcactggctttggccagggggacagccaggggttctcagccagggattctctcccctctggccggcctcagggccagcatctcacagcacacagcaccaggcgactgcctgctgccacacctgcctgatgggaggtttccttcacggttactttgcgattgggatgggtcagaatgtgtgtgctgggacaggacggtgggtcttgtctcaagctcagcagcggacacagcatgtgcctagaacagatggccacgtgggaggcctccaggctgctgttctgccctatatgaggtccctgggcctgcactctctgcactgatgaggtgtgccctgcaccaccctctggtgagcttccgggaggcccacatgctctcaatgcacaggaaaacagcagctacctttctgtgcgcttgcctggatccctgccaattcaaaggagtgacatcttacacggagttaggcttagagttggcaccagagatggaatcactgtgaagctaatgaagttaaacttccatcgtctttcactcactgacagaagcctcaca

SEQ ID NO: 2285 - DNA, 1286 bp, Homo sapiens
  source 1..1286: mol_type = unassigned DNA
ttagagatagtttttctcatcctcaagtattgggagtccaactttgagtggaatctggactaaacttcagagtgttgccagggacggcagtatctctttgtgtgaccctggcggcttatgggacgttggcttcagacctttgtgatacaccatgctgcgtgggacgatgacggcgtggagaggaatgaggcctgaggtcacactggcttgcctcctcctagccacagcaggctgctttgctgacttgaacgaggtccctcaggtcaccgtccagcctgcgtccaccgtccagaagcccggaggcactgtgatcttgggctgcgtggtggaacctccaaggatgaatgtaacctggcgcctgaatggaaaggagctgaatggctcggatgatgctctgggtgtcctcatcacccacgggaccctcgtcatcactgcccttaacaaccacactgtgggacggtaccagtgtgtggcccggatgcctgcgggggctgtggccagcgtgccagccactgtgacactagccagtgagtctgctcctttgcctccctgccatggtgcggtccctcctcatctctcccaccctgaagcccccaccattcatgctgcctcttgttactcttagcataaaatgggccttaactgcagaaatgtcaaatcagaacagtagctgcctagtaatgcccagtgatgggggacccttgtgcccttggaaaacctcactccaagtagaggctgtatctggagtgagtgtctacagagaggggaattggtcagtgcatggcagaacttgacatggcagaactgttccgtgggccccagagcagggccgtgccgtgccttcctacttggtcatcctgtggctgtaggtgcactgtcccaactgctcacacaccttccagtcccctccctccattctcaccacagttacagtcggagcagggagagacaggacaccaagagacatgggcagggccacgtgtagtctggacagagcccacccagcccagacttggcctcctgtctctctgtgaggggcaagcatagtccgaaggcctggattataaatattagaacataatgaaaaggaaactgtgtggcaaagggataaagggatacagagaaaagaaacaaggaagagatgaggtgacagtttggaccaaggaaaatgccaagagaagacttcacactaccttttttttttctggttttgccattcttttattcatgttgttacactcagtataggatagtttattaaaatcattatgtctgtagacattcta

SEQ ID NO: 2286 - DNA, 561 bp, Homo sapiens
  source 1..561: mol_type = unassigned DNA
tttaatgacattgcaaaataggttctttttagtctctctccttcttcctctcccactcctcccttctggcctgctttcccctcctgcccacccccagatttctctctcctgtcttgactttgattttcagccctcatcccccagtctctttcatctcttccccaatcccagctttcttccactgctcaaatctgggtgtaaatcccacctcaactgaaaggaaaagaaagaaacaagatttaacaactaatgtgcttggcatctacaaagatctccaggacttcaagttagatgtgcagcacgtgattgaagtggatgagggaaacacagcagtcattgcctgccacctgcctgagagccaccccaaagcccaggtccggtacagcgtcaaacaagagtggctggaggcctccagaggtaactacctgatcatgccctcagggaacctccagattgtgaatgccagccaggaggacgagggcatgtacaagtgtgcagcctacaacccagtgacccaggaagtgaaaacctccggctccagcgacaggctacgtgtgcgcc

SEQ ID NO: 2287 - DNA, 5750 bp, Homo sapiens
  source 1..5750: mol_type = unassigned DNA
ctcaaggccaagtagaccttacttgacctgactccacagctcaaaatgtacaccttttaactgcttgagtccaggaggctaaggttgtagtgagccaagatcatgccactgcactctagcctgagtgacagagtgagactctgtctcaagaaaaaaaatatatatatatacctttaaaaatattctatagattttaagagtttttatcaactctttctggttatgaaaggaacatatgttcattatagaaaacttagagaatacagaaaactgttttcaaaaaggtaaaacacctaatccaaccactcagaactaactggagactaggggaagaagagcattaatccctgctgtccccagcagaaggttggcagcagcctctgggagaggcctgcctgtcccaccagggccaagggtttctcccactccatctggcacttgctaataagcagctcatacctgggtggcccagcagcaggcaggcaccaggcttggcaacagcacggctctcaggaggggccaccagggcaaagctcagcactgatggccatagctttacctgccaggaagccaaatgccacccgagttgctggggtgtccaggagctgtgactctgcctcctagctacagaatctgaacacccgtgaggcaccatcccagggcacctgtggaccaggagcagacagagcctaacaggcccctgatgtggaagaaaggatttcagtggcattcatggggaggacagtggttgaaagtcagaatattcctctccaagtagcagaaatgcaataatgaggcgattccgagtgatggctatgactggtgggaagatttgctcatcatttgggaagggagaatgatgggaagctccaaaatcaatttcctccttcctggaggcttgcaggaatgatctcatctctcatgtgtgcagcctgggcctctcaatccttacaatagccctgaggcagcatacattaagcctttttacaaatgaggaaactgtatcagagagattaattaacttgcccaagatcacacagctaatacccagcagacccagagtgtgagaccatggctgattccaaatcctgcttcctttctagcctcccttagctccctttaaagtataaaatgctcttctattgacctatgcactaagttgtggcagttagtcagtcagccagtctgttagctggttggttagttaccttttctctctggcactctgtcctgcttgttgcaaggttttatggggagaacggcatcttaggctttgtcttgtggggactcaggtggacatcagctcctagtgcctgcccagcctgttcctctccctccgtgcacctctcctttgtggaagctgcagagtgaagtattctggacccatcccatcttcccctggccctgccctttccacaggtaactacctgatcatgccctcagggaacctccagattgtgaatgccagccaggaggacgagggcatgtacaagtgtgcagcctacaacccagtgacccaggaagtgaaaacctccggctccagcgacaggctacgtgtgcgccgtaaggcccgggcccacctgctgggggatgggggatcactgatggaagggctcacaaagatggaaagggaggtagatacctggaggtgccacatccaagctccagttctgtgtgcactggctttggccagggggacagccaggggttctcagccagggattctctcccctctggccggcctcagggccagcatctcacagcacacagcaccaggcgactgcctgctgccacacctgcctgatgggaggtttccttcacggttactttgcgattgggatgggtcagaatgtgtgtgctgggacaggacggtgggtcttgtctcaagctcagcagcggacacagcatgtgcctagaacagatggccacgtgggaggcctccaggctgctgttctgccctatatgaggtccctgggcctgcactctctgcactgatgaggtgtgccctgcaccaccctctggtgagcttccgggaggcccacatgctctcaatgcacaggaaaacagcagctacctttctgtgcgcttgcctggatccctgccaattcaaaggagtgacatcttacacggagttaggcttagagttggcaccagagatggaatcactgtgaagctaatgaagttaaacttccatcgtctttcactcactgacagaagcctcacaaggccctaactttgtatgtatcattttccattctttttggggcctccgaaactgtataaatttcaggttttagaaaacctgggtgtgtccctggttggcatataaagcggaatcacacatagtccccttgctccttgaaggttgctgaggaacggcacacattagagagtaaacaggcctttcagtgagttctctgcagtttgtccacagtgttgaaaaaagattacagctttcccagctgtgcacctgaggaagtacataggtgatttgcatttggggaccttgcaatatgagaaatgcatgtgtttaaacagtggattccattcagctcagccggaggccggctctgagatgctcactgagagacagttgggcctgagaaccatagggtggggttgagagcatggcagattcttgtttcccatctcatcttcagcctcacagcgcacatactgagtgcaagcagaaagaaatatctgtaccatttaaactgcctctacactccctcacctttctctctttgccagcacacagttaactgtgcatatgttatgttgatgctgctgttcttctgtgttatctcatttcttactcataacagctccctgcagaagcagtccttgtttctgataaggacaccaagccccaagggaattctgtagcacgccccactctacataggttgaaagacccggaatggctgtttgatcccatctccatgctctctgggactgcctcctgggcatgctctacaggacatcctggtccacacgccttctgtccttgccctccttgcccctccaggctccaccgctgaggctgcccgcatcatctaccccccagaggcccaaaccatcatcgtcaccaaaggccagagtctcattctggagtgtgtggccagtggaatcccacccccacgggtcacctgggccaaggatgggtccagtgtcaccggctacaacaagacgcgcttcctgctgagcaacctcctcatcgacaccaccagcgaggaggactcaggcacctaccgctgcatggccgacaatggggttgggcagcccggggcagcggtcatcctctacaatgtccaggtgtttgaaccccctgaggtcaccatggagctatcccagctggtcatcccctggggccagagtgccaagcttacctgtgaggtgcgtgggaaccccccgccctccgtgctgtggctgaggaatgctgtgcccctcatctccagccagcgcctccggctctcccgcagggccctgcgcgtgctcagcatggggcctgaggacgaaggcgtctaccagtgcatggccgagaacgaggttgggagcgcccatgccgtagtccagctgcggacctccaggccaagcataaccccaaggctatggcaggatgctgagctggctactggcacacctcctgtatcaccctccaaactcggcaaccctgagcagatgctgagggggcaaccggcgctccccagacccccaacgtcagtggggcctgcttccccgcagtgtccaggagagaaggggcagggggctcccgccgaggctcccatcatcctcagctcgccccgcacctccaagacagactcatatgaactggtgtggcggcctcggcatgagggcagtggccgggcgccaatcctctactatgtggtgaaacaccgcaaggtcacaaattcctctgacgattggaccatctctggcattccagccaaccagcaccgcctgaccctcaccagacttgaccccgggagcttgtatgaagtggagatggcagcttacaactgtgcgggagagggccagacagccatggtcaccttccgaactggacggcggcccaaacccgagatcatggccagcaaagagcagcagatccagagagacgaccctggagccagtccccagagcagcagccagccagaccacggccgcctctcccccccagaagctcccgacaggcccaccatctccacggcctccgagacctcagtgtacgtgacctggattccccgtgggaatggtgggttcccaatccagtccttccgtgtggagtacaagaagctaaagaaagtgggagactggattctggccaccagcgccatccccccatcgcggctgtccgtggagatcacgggcctagagaaaggcacctcctacaagtttcgagtccgggctctgaacatgctgggggagagcgagcccagcgccccctctcggccctacgtggtgtcgggctacagcggtcgcgtgtacgagaggcccgtggcaggtccttatatcaccttcacggatgcggtcaatgagaccaccatcatgctcaagtggatgtacatcccagcaagtaacaacaacaccccaatccatggcttttatatctattatcgacccacagacagtgacaatgatagtgactacaagaaggatatggtggaaggggacaagtactggcactccatcagccacctgcagccagagacctcctacgacattaagatgcagtgcttcaatgaaggaggggagagcgagttcagcaacgtgatgatctgtgagaccaaagctcggaagtcttctggccagcctggtcgactgccacccccaactctggccccaccacagccgccccttcctgaaaccatagagcggccggtgggcactggggccatggtggctcgctccagcgacctgccctatctgattgtcggggtcgtcctgggctccatcgttctcatcatcgtcaccttcatccccttctgcttgtggagggcctggtctaagcaaaaacatacaacagacctgggttttcctcgaagtgcccttccaccctcctgcccgtatactatggtgccattgggaggactcccaggccaccaggccagtggacagccctacctcagtggcatcagtggacgggcctgtgctaatgggatccacatgaataggggctgcccctcggctgcagtgggctacccgggcatgaagccccagcagcactgcccaggcgagcttcagcagcagagtgacaccagcagcctgctgaggcagacccatcttggcaatggatatgacccccaaagtcaccagatcacgaggggtcccaagtctagcccggacgagggctctttcttatacacactgcccgacgactccactcaccagctgctgcagccccatcacgactgctgccaacgccaggagcagcctgctgctgtgggccagtcaggggtgaggagagcccccgacagtcctgtcctggaagcagtgtgggaccctccatttcactcagggcccccatgctgcttgggccttgtgccagttgaagaggtggacagtcctgactcctgccaagtgagtggaggagactggtgtccccagcaccccgtaggggcctacgtaggacaggaacctggaatgcagctctccccggggccactggtgcgtgtgtcttttgaaacaccacctctcacaatttaggcagaagctgatatcccagaaagactatatattgtttttttttt

SEQ ID NO: 2288 - DNA, 4882 bp, Homo sapiens
  source 1..4882: mol_type = unassigned DNA
ggaggtagatacctggaggtgccacatccaagctccagttctgtgtgcactggctttggccagggggacagccaggggttctcagccagggattctctcccctctggccggcctcagggccagcatctcacagcacacagcaccaggcgactgcctgctgccacacctgcctgatgggaggtttccttcacggttactttgcgattgggatgggtcagaatgtgtgtgctgggacaggacggtgggtcttgtctcaagctcagcagcggacacagcatgtgcctagaacagatggccacgtgggaggcctccaggctgctgttctgccctatatgaggtccctgggcctgcactctctgcactgatgaggtgtgccctgcaccaccctctggtgagcttccgggaggcccacatgctctcaatgcacaggaaaacagcagctacctttctgtgcgcttgcctggatccctgccaattcaaaggagtgacatcttacacggagttaggcttagagttggcaccagagatggaatcactgtgaagctaatgaagttaaacttccatcgtctttcactcactgacagaagcctcacaaggccctaactttgtatgtatcattttccattctttttggggcctccgaaactgtataaatttcaggttttagaaaacctgggtgtgtccctggttggcatataaagcggaatcacacatagtccccttgctccttgaaggttgctgaggaacggcacacattagagagtaaacaggcctttcagtgagttctctgcagtttgtccacagtgttgaaaaaagattacagctttcccagctgtgcacctgaggaagtacataggtgatttgcatttggggaccttgcaatatgagaaatgcatgtgtttaaacagtggattccattcagctcagccggaggccggctctgagatgctcactgagagacagttgggcctgagaaccatagggtggggttgagagcatggcagattcttgtttcccatctcatcttcagcctcacagcgcacatactgagtgcaagcagaaagaaatatctgtaccatttaaactgcctctacactccctcacctttctctctttgccagcacacagttaactgtgcatatgttatgttgatgctgctgttcttctgtgttatctcatttcttactcataacagctccctgcagaagcagtccttgtttctgataaggacaccaagccccaagggaattctgtagcacgccccactctacataggttgaaagacccggaatggctgtttgatcccatctccatgctctctgggactgcctcctgggcatgctctacaggacatcctggtccacacgccttctgtccttgccctccttgcccctccaggctccaccgctgaggctgcccgcatcatctaccccccagaggcccaaaccatcatcgtcaccaaaggccagagtctcattctggagtgtgtggccagtggaatcccacccccacgggtcacctgggccaaggatgggtccagtgtcaccggctacaacaagacgcgcttcctgctgagcaacctcctcatcgacaccaccagcgaggaggactcaggcacctaccgctgcatggccgacaatggggttgggcagcccggggcagcggtcatcctctacaatgtccaggtgtttgaaccccctgaggtcaccatggagctatcccagctggtcatcccctggggccagagtgccaagcttacctgtgaggtgcgtgggaaccccccgccctccgtgctgtggctgaggaatgctgtgcccctcatctccagccagcgcctccggctctcccgcagggccctgcgcgtgctcagcatggggcctgaggacgaaggcgtctaccagtgcatggccgagaacgaggttgggagcgcccatgccgtagtccagctgcggacctccaggccaagcataaccccaaggctatggcaggatgctgagctggctactggcacacctcctgtatcaccctccaaactcggcaaccctgagcagatgctgagggggcaaccggcgctccccagacccccaacgtcagtggggcctgcttccccgcagtgtccaggagagaaggggcagggggctcccgccgaggctcccatcatcctcagctcgccccgcacctccaagacagactcatatgaactggtgtggcggcctcggcatgagggcagtggccgggcgccaatcctctactatgtggtgaaacaccgcaagcaggtcacaaattcctctgacgattggaccatctctggcattccagccaaccagcaccgcctgaccctcaccagacttgaccccgggagcttgtatgaagtggagatggcagcttacaactgtgcgggagagggccagacagccatggtcaccttccgaactggacggcggcccaaacccgagatcatggccagcaaagagcagcagatccagagagacgaccctggagccagtccccagagcagcagccagccagaccacggccgcctctcccccccagaagctcccgacaggcccaccatctccacggcctccgagacctcagtgtacgtgacctggattccccgtgggaatggtgggttcccaatccagtccttccgtgtggagtacaagaagctaaagaaagtgggagactggattctggccaccagcgccatccccccatcgcggctgtccgtggagatcacgggcctagagaaaggcacctcctacaagtttcgagtccgggctctgaacatgctgggggagagcgagcccagcgccccctctcggccctacgtggtgtcgggctacagcggtcgcgtgtacgagaggcccgtggcaggtccttatatcaccttcacggatgcggtcaatgagaccaccatcatgctcaagtggatgtacatcccagcaagtaacaacaacaccccaatccatggcttttatatctattatcgacccacagacagtgacaatgatagtgactacaagaaggatatggtggaaggggacaagtactggcactccatcagccacctgcagccagagacctcctacgacattaagatgcagtgcttcaatgaaggaggggagagcgagttcagcaacgtgatgatctgtgagaccaaagctcggaagtcttctggccagcctggtcgactgccacccccaactctggccccaccacagccgccccttcctgaaaccatagagcggccggtgggcactggggccatggtggctcgctccagcgacctgccctatctgattgtcggggtcgtcctgggctccatcgttctcatcatcgtcaccttcatccccttctgcttgtggagggcctggtctaagcaaaaacatacaacagacctgggttttcctcgaagtgcccttccaccctcctgcccgtatactatggtgccattgggaggactcccaggccaccaggccagtggacagccctacctcagtggcatcagtggacgggcctgtgctaatgggatccacatgaataggggctgcccctcggctgcagtgggctacccgggcatgaagccccagcagcactgcccaggcgagcttcagcaggtagcgcattcttgggtgtgggcggcaggtatgggacacccaggagggagtggctgggctgccttggggggcctcctccctcctagggtctcaggctgggctgctgggccaggctttctttagtcaggagcagatgctcctgttgttgagtgaagactggaaagttacctggactccccggcgtggccgtctcattactcttccttttgagcagcagagtgacaccagcagcctgctgaggcagacccatcttggcaatggatatgacccccaaagtcaccagatcacgaggggtcccaagtctagcccggacgagggctctttcttatacacactgcccgacgactccactcaccagctgctgcagccccatcacgactgctgccaacgccaggagcagcctgctgctgtgggccagtcaggggtgaggagagcccccgacagtcctgtcctggaagcagtgtgggaccctccatttcactcagggcccccatgctgcttgggccttgtgccagttgaagaggtggacagtcctgactcctgccaagtgagtggaggagactggtgtccccagcaccccgtaggggcctacgtaggacaggaacctggaatgcagctctccccggggccactggtgcgtgtgtcttttgaaacaccacctctcacaatttaggcagaagctgatatcccagaaagactatatattgttttttttttaaaaaaaaaaagaagaaaaaagagacagagaaaattggtatttatttttctattatagccatatttatatatttatgcacttgtaaataaatgtatatgttttataattctggagagacataaggagtcctacccgttgaggttggagagggaaaataaagaagctgccacctaacaggagtcacccaggaaagcaccgcacaggctggcgcgggacagactcctaacctggggcctctgcagtggcaggcgaggctgcaggaggcccacagataagctggcaagaggaaggatcccaggcacatggttcatcacgagcatgagggaacagcaaggggcacggtatcacagcctggagacacccacacagatggctggatccggtgctacgggaaacattttcctaagatgcccatgagaacagaccaagatgtgtacagcactatgagcattaaaaaaccttccagaatcaataatccgtggcaacatatctctgtaaaaacaaacactgtaacttctaaataaatgtttagtcttccctgtaa

SEQ ID NO: 2289 - DNA, 663 bp, Homo sapiens
  source 1..663: mol_type = unassigned DNA
gggcaaccggcgctccccagacccccaacgtcagtggggcctgcttccccgcagtgtccaggagagaaggggcagggggctcccgccgaggctcccatcatcctcagctcgccccgcacctccaagacagactcatatgaactggtgtggcggcctcggcatgagggcagtggccgggcgccaatcctctactatgtggtgaaacaccgcaaggtcacaaattcctctgacgattggaccatctctggcattccagccaaccagcaccgcctgaccctcaccagacttgaccccgggagcttgtatgaagtggagatggcagcttacaactgtgcgggagagggccagacagccatggtcaccttccgaactggacggcggcccaaacccgagatcatggccagcaaagagcagcagatccagagagacgaccctggagccagtccccagagcagcagccagccagaccacggccgcctctcccgtaagccgctagcagcagggacggacgcgcagtcaggactggaactgcctcagaggcctgttcccatggctgaatggggtcttgcttctccccagaagctcccgacaggcccaccatctccacggcctccgagacctcagtgtacgtgacctggattccccgtgggaatggtgggttcc

SEQ ID NO: 2290 - DNA, 573 bp, Homo sapiens
  source 1..573: mol_type = unassigned DNA
accagcatgcctccatgttgctgtctgtggtgtttaccacagtcctaaagccttctgcctccctccagaagagcatccagagccatctcccctgcagctcagctctgacagtggcgggtgttcttgtgaggcctttgagaacttgctttggggaagggctgcccagaagacccctccaggtcctgggccttgaaaggccatgggagaatcagaaggtatttcccagctcctgagttcagtgagtgtccctctcaccaggcacctcctacaagtttcgagtccgggctctgaacatgctgggggagagcgagcccagcgccccctctcggccctacgtggtgtcgggctacagcggtcgcgtgtacgagaggcccgtggcaggtccttatatcaccttcacggatgcggtcaatgagaccaccatcatgctcaagtggatgtacatcccagcaagtaacaacaacaccccaatccatggcttttatatctattatcgacccacagacagtgacaatgatagtgactacaagaaggatatggtggaaggggacaagtactggcactccatcagcc

SEQ ID NO: 2291 - DNA, 564 bp, Homo sapiens
  source 1..564: mol_type = unassigned DNA
acgggcctgtgctaatgggatccacatgaataggggctgcccctcggctgcagtgggctacccgggcatgaagccccagcagcactgcccaggcgagcttcagcagcagagtgacaccagcagcctgctgaggcagacccatcttggcaatggatatgacccccaaagtcaccagatcacgagctgctgcagccccatcacgactgctgccaacgccaggagcagcctgctgctgtgggccagtcaggggtgaggagagcccccgacagtcctgtcctggaagcagtgtgggaccctccatttcactcagggcccccatgctgcttgggccttgtgccagttgaagaggtggacagtcctgactcctgccaagtgagtggaggagactggtgtccccagcaccccgtaggggcctacgtaggacaggaacctggaatgcagctctccccggggccactggtgcgtgtgtcttttgaaacaccacctctcacaatttaggcagaagctgatatcccagaaagactatatattgttttttttttaaaaaaaaaaagaagaaaaaag

SEQ ID NO: 2292 - DNA, 317 bp, Homo sapiens
  source 1..317: mol_type = unassigned DNA
ttcagcagcagagtgacaccagcagcctgctgaggcagacccatcttggcaatggatatgacccccaaagtcaccagatcacgagggcccccatgctgcttgggccttgtgccagttgaagaggtggacagtcctgactcctgccaagtgagtggaggagactggtgtccccagcaccccgtaggggcctacgtaggacaggaacctggaatgcagctctccccggggccactggtgcgtgtgtcttttgaaacaccacctctcacaatttaggcagaagctgatatcccagaaagactatatattgtttttttttt

SEQ ID NO: 2293 - DNA, 4278 bp, Homo sapiens
  source 1..4278: mol_type = unassigned DNA
gtttctcatagttggcgtcttctaaaggaaaaacactaaaatgaggaactcagcggaccgggagcgacgcagcttgagggaagcatccctagctgttggcgcagaggggcgaggctgaagccgagtggcccgaggtgtctgaggggctggggcaaaggtgaaagagtttcagaacaagcttcctggaacccatgacccatgaagtcttgtcgacatttataccgtctgagggtagcagctcgaaagtagaagaagtggagtgttgccagggacggcagtatctctttgtgtgaccctggcggcttatgggacgttggcttcagacctttgtgatacaccatgctgcgtgggacgatgacggcgtggagaggaatgaggcctgaggtcacactggcttgcctcctcctagccacagcaggctgctttgctgacttgaacgaggtccctcaggtcaccgtccagcctgcgtccaccgtccagaagcccggaggcactgtgatcttgggctgcgtggtggaacctccaaggatgaatgtaacctggcgcctgaatggaaaggagctgaatggctcggatgatgctctgggtgtcctcatcacccacgggaccctcgtcatcactgcccttaacaaccacactgtgggacggtaccagtgtgtggcccggatgcctgcgggggctgtggccagcgtgccagccactgtgacactagccaatctccaggacttcaagttagatgtgcagcacgtgattgaagtggatgagggaaacacagcagtcattgcctgccacctgcctgagagccaccccaaagcccaggtccggtacagcgtcaaacaagagtggctggaggcctccagaggtaactacctgatcatgccctcagggaacctccagattgtgaatgccagccaggaggacgagggcatgtacaagtgtgcagcctacaacccagtgacccaggaagtgaaaacctccggctccagcgacaggctacgtgtgcgccgctccaccgctgaggctgcccgcatcatctaccccccagaggcccaaaccatcatcgtcaccaaaggccagagtctcattctggagtgtgtggccagtggaatcccacccccacgggtcacctgggccaaggatgggtccagtgtcaccggctacaacaagacgcgcttcctgctgagcaacctcctcatcgacaccaccagcgaggaggactcaggcacctaccgctgcatggccgacaatggggttgggcagcccggggcagcggtcatcctctacaatgtccaggtgtttgaaccccctgaggtcaccatggagctatcccagctggtcatcccctggggccagagtgccaagcttacctgtgaggtgcgtgggaaccccccgccctccgtgctgtggctgaggaatgctgtgcccctcatctccagccagcgcctccggctctcccgcagggccctgcgcgtgctcagcatggggcctgaggacgaaggcgtctaccagtgcatggccgagaacgaggttgggagcgcccatgccgtagtccagctgcggacctccaggccaagcataaccccaaggctatggcaggatgctgagctggctactggcacacctcctgtatcaccctccaaactcggcaaccctgagcagatgctgagggggcaaccggcgctccccagacccccaacgtcagtggggcctgcttccccgcagtgtccaggagagaaggggcagggggctcccgccgaggctcccatcatcctcagctcgccccgcacctccaagacagactcatatgaactggtgtggcggcctcggcatgagggcagtggccgggcgccaatcctctactatgtggtgaaacaccgcaaggtcacaaattcctctgacgattggaccatctctggcattccagccaaccagcaccgcctgaccctcaccagacttgaccccgggagcttgtatgaagtggagatggcagcttacaactgtgcgggagagggccagacagccatggtcaccttccgaactggacggcggcccaaacccgagatcatggccagcaaagagcagcagatccagagagacgaccctggagccagtccccagagcagcagccagccagaccacggccgcctctcccccccagaagctcccgacaggcccaccatctccacggcctccgagacctcagtgtacgtgacctggattccccgtgggaatggtgggttcccaatccagtccttccgtgtggagtacaagaagctaaagaaagtgggagactggattctggccaccagcgccatccccccatcgcggctgtccgtggagatcacgggcctagagaaaggcacctcctacaagtttcgagtccgggctctgaacatgctgggggagagcgagcccagcgccccctctcggccctacgtggtgtcgggctacagcggtcgcgtgtacgagaggcccgtggcaggtccttatatcaccttcacggatgcggtcaatgagaccaccatcatgctcaagtggatgtacatcccagcaagtaacaacaacaccccaatccatggcttttatatctattatcgacccacagacagtgacaatgatagtgactacaagaaggatatggtggaaggggacaagtactggcactccatcagccacctgcagccagagacctcctacgacattaagatgcagtgcttcaatgaaggaggggagagcgagttcagcaacgtgatgatctgtgagaccaaagctcggaagtcttctggccagcctggtcgactgccacccccaactctggccccaccacagccgccccttcctgaaaccatagagcggccggtgggcactggggccatggtggctcgctccagcgacctgccctatctgattgtcggggtcgtcctgggctccatcgttctcatcatcgtcaccttcatccccttctgcttgtggagggcctggtctaagcaaaaacatacaacagacctgggttttcctcgaagtgcccttccaccctcctgcccgtatactatggtgccattgggaggactcccaggccaccaggccagtggacagccctacctcagtggcatcagtggacgggcctgtgctaatgggatccacatgaataggggctgcccctcggctgcagtgggctacccgggcatgaagccccagcagcactgcccaggcgagcttcagcagcagagtgacaccagcagcctgctgaggcagacccatcttggcaatggatatgacccccaaagtcaccagatcacgaggggtcccaagtctagcccggacgagggctctttcttatacacactgcccgacgactccactcaccagctgctgcagccccatcacgactgctgccaacgccaggagcagcctgctgctgtgggccagtcaggggtgaggagagcccccgacagtcctgtcctggaagcagtgtgggaccctccatttcactcagggcccccatgctgcttgggccttgtgccagttgaagaggtggacagtcctgactcctgccaagtgagtggaggagactggtgtccccagcaccccgtaggggcctacgtaggacaggaacctggaatgcagctctccccggggccactggtgcgtgtgtcttttgaaacaccacctctcacaatttaggcagaagctgatatcccagaaagactatatattgttttttttttaaaaaaaaaaagaagaaaaaagagacagagaaaattggtatttatttttctattatagccatatttatatatttatgcacttgtaaataaatgtatatgttttataattctggagagacataaggagtcctacccgttgaggttggagagggaaaataaagaagctgccacctaacaggagtcacccaggaaagcaccgcacaggctggcgcgggacagactcctaacctggggcctctgcagtggcaggcgaggctgcaggaggcccacagataagctggcaagaggaaggatcccaggcacatggttcatcacgagcatgagggaacagcaaggggcacggtatcacagcctggagacacccacacagatggctggatccggtgctacgggaaacattttcctaagatgcccatgagaacagaccaagatgtgtacagcactatgagcattaaaaaaccttccagaatcaataatccgtggcaacatatctctgtaaaaacaaacactgtaacttctaaataaatgtttagtcttccctgtaaccttc

SEQ ID NO: 2294 - DNA, 3558 bp, Homo sapiens
  source 1..3558: mol_type = unassigned DNA
agcggggagcaagagaatttgaaaagagacatccgctccctctcacacgctgagggggaggcattcgcgtttccccaaatgagaaagaaccacaagaaatcatgaagtaaaaactttggaaagctgccactggagatgttgcacaaaaacctggaatcttttaggagtctcctcccagtcgttgaaggtttggggagcagctgatacagcaaggagggctcttgcaaggattcaagctccgagccctggaggagcagcacggagcgggagagcgtggcgagagaatgaagaaaccaatcgcccgggagaagcatgaggtggcagtgtggcactcggtttagagggcttcggccggcggtggccccatggacagccctgctggcactgggcctgcctggctgggtgttggctgtctcagccacggcggctgctgtggtccccgagcagcatgcctccgtagctggccagcatcccctggactggctgctcacagaccggggccccttccaccgcgctcaggagtatgctgacttcatggagcggtaccgccagggtttcaccaccaggtacaggatttatagggagtttgcccgttggaaggtgaacaacttggctctggaaaggaaggacttcttcagtttgccattgcctcttgccccagagtttatccggaacattcgcctccttggaaggagacccaatctgcaacaggttacagaaaatctgattaaaaagtacggcactcatttcttactttctgccacccttggaggagaagagtccctgaccatttttgtggacaagcagaaactgggaagaaagacagagacaacaggaggtgcctctataatcgggggcagtgggaacagcacagctgtgtccctggagaccctgcaccagctggccgcctcctacttcatcgacagagagagcacgctgcgacggctgcaccatatccagatagccacgggggccatcaaggtcaccgagaccaggaccggtcctctgggctgcagcaactatgacaatctggactcagtcagttctgtcttggtacagagtccagagaacaaagtacagttacttggccttcaggtgctgctgcctgagtatctgcgtgagcgctttgtagctgcagcactcagctacatcacatgcagctctgagggtgagctcgtctgcaaggagaatgactgctggtgcaagtgcagccccaccttccctgaatgcaactgccctgatgctgacatccaggccatggaggacagcctgctgcagatccaggactcctgggccactcacaaccggcagtttgaagagtcagaagagttccaggccctgctgaaaaggctgcccgatgaccggttcctgaactccacagctatctcccagttctgggccatggacaccagccttcagcaccgctaccagcagctgggagctggcttgaaagtgctgttcaaaaagacccatcggatcctacgccggctcttcaacctctgcaagcgctgccatcgccagcctcgcttccgcctgcccaaggagaggtccttgtcctactggtggaaccgaatccagtccctcctctactgtggggaaagcacctttcctggcactttcctggaacagagccacagctgcacctgcccctatgaccaatcttcctgccagggccccatcccatgtgccttgggcgaagggcccgcgtgtgcccactgtgctccagacaatagcacacgctgtgggagctgcaacccgggctatgtgctggcccaggggctgtgccggccagaggtggccgagtccctggaaaactttcttgggctggagacagacttgcaggacctggagctaaagtacctgctgcagaagcaggatagccgcattgaggtacactccatcttcatcagcaatgacatgcggctgggcagctggtttgacccttcctggaggaagcgcatgctgctcaccctgaagagcaacaagtacaagcctgggctggtgcacgtgatgttggccttgtccttgcagatctgtctcaccaagaacagcaccctggagcctgtcatggccatctacgtcaacccctttgggggcagccactctgagagctggttcatgcctgtgaatgagggcagctttcctgactgggaaaggactaacgtggatgcagctgcccagtgccaaaactggactatcaccttggggaataggtggaagactttctttgagacagttcatgtttacctacggagccgaatcaagtccctggatgacagctccaatgagacaatctactatgagcccctggagatgactgatccctctaagaatttgggttacatgaaaattaacaccttgcaggtctttggctacagcctgccctttgacccagatgctatccgggacttaattctccagttggactacccatatactcaaggttcccaggactctgcactcttgcagctcattgagctcagggaccgggtgaaccagctttctccacctggcaaagtccgacttgaccttttctcctgcttgctccggcatcggcttaagctggccaacaatgaggtgggcaggatccagtcctccctgagggctttcaattctaagctgccaaaccctgtggaatatgagaccggcaaactctgtagctaatgggcggcccacttcagcactgggcaaggaggggatccatgaatctggggtacaaagataatctaagccctcaccttagtgccaacagggtgtgctcccacgagactttcagcatccagtagatgggacctcgaggctcgagctgaagcaggcgagagagaaacagctactgcgtgcgtgcgcgcacgcatacacacacacacacacacactggcacagggaggctacaactaagcagcctcagatctgtaaagttgattggtgctttctaaaatgaatgcaattgaaagaaaggagccaaggaagagattaagaaaaagaaccagctgaaccatgaaacaaacaaaaatcctaaaagtgattcttgtcattcaagaaagcaagaggggacaacaatgggaggggtcggagctcttccttcccctctgtggagtcacttttgtattctttttaaccagatttcttaaaatgttgttgttttgtgaatcctgacattggttcttacttttgtatgctgcctcctctgtgccctcccagacgctgactgggaaacacaagaagtacaaccaacaggaaccagcgccaagggcaggcagcggcctccttgctcccctcccttactcctccctctgctgcctcctccccccaccaagtttcagggccctggattgttcccagttcccattgtggtcccttcagagctcctttccaacagcatctctctgtcgaagaaagaagctctgtcaagttagagagagacaatgtgtaggaaatgttcttttttaaaaaaaaataacaaaaacaaaacaaaactatttattttgtgattgttttccttgttaatctgctccaaccacctgaacatctaagtaaacatttatctggtttaatata

SEQ ID NO: 2295 - DNA, 2494 bp, Homo sapiens
  source 1..2494: mol_type = unassigned DNA
acttgagagagagaattgtgtctcccctatgaagatggattgcttgagacagagttcaatagaagatgttaaacagataagctgagggcagggggactgagctttggaagagggcctttcaggcagcgaggccgctggcctgtggctccctctgatgagcttcttctaaagatggtaagggctgggggaagagcttggcagcaggggctgcactctctctcagctgtgtctatcttggccaagggttttatgttcctattggtaggggattcgagagcagagagcgtcaccaatacactcgtgttgttcaccataggagaagagtccctgaccatttttgtggacaagcagaaactgggaagaaagacagagacaacaggaggtgcctctataatcgggggcagtgggaacagcacagctgtgtccctggagaccctgcaccagctggccgcctcctacttcatcgacagagagagcacgctgcgacggctgcaccatatccagatagccacgggggccatcaaggtcaccgagaccaggaccggtcctctgggctgcagcaactatgacaatctggactcagtcagttctgtcttggtacagagtccagagaacaaagtacagttacttggccttcaggtgctgctgcctgagtatctgcgtgagcgctttgtagctgcagcactcagctacatcacatgcagctctgagggtgagctcgtctgcaaggagaatgactgctggtgcaagtgcagccccaccttccctgaatgcaactgccctgatgctgacatccaggccatggaggacagcctgctgcagatccaggactcctgggccactcacaaccggcagtttgaagagtcagaagagttccaggccctgctgaaaaggctgcccgatgaccggttcctgaactccacagctatctcccagttctgggccatggacaccagccttcagcaccgctaccagcagctgggagctggcttgaaagtgctgttcaaaaagacccatcggatcctacgccggctcttcaacctctgcaagcgctgccatcgccagcctcgcttccgcctgcccaaggagaggtccttgtcctactggtggaaccgaatccagtccctcctctactgtggggaaagcacctttcctggcactttcctggaacagagccacagctgcacctgcccctatgaccaatcttcctgccagggccccatcccatgtgccttgggcgaagggcccgcgtgtgcccactgtgctccagacaatagcacacgctgtgggagctgcaacccgggctatgtgctggcccaggggctgtgccggccagaggtggccgagtccctggaaaactttcttgggctggagacagacttgcaggacctggagctaaagtacctgctgcagaagcaggatagccgcattgaggtacactccatcttcatcagcaatgacatgcggctgggcagctggtttgacccttcctggaggaagcgcatgctgctcaccctgaagagcaacaagtacaagcctgggctggtgcacgtgatgttggccttgtccttgcagatctgtctcaccaagaacagcaccctggagcctgtcatggccatctacgtcaacccctttgggggcagccactctgagagctggttcatgcctgtgaatgagggcagctttcctgactgggaaaggactaacgtggatgcagctgcccagtgccaaaactggactatcaccttggggaataggtggaagactttctttgagacagttcatgtttacctacggagccgaatcaagtccctggatgacagctccaatgagacaatctactatgagcccctggagatgactgatccctctaagaatttgggttacatgaaaattaacaccttgcaggtctttggctacagcctgccctttgacccagatgctatccgggacttaattctccagttggactacccatatactcaaggttcccaggactctgcactcttgcagctcattgagctcagggaccgggtgaaccagctttctccacctggcaaagtccgacttgaccttttctcctgcttgctccggcatcggcttaagctggccaacaatgaggtgggcaggatccagtcctccctgagggctttcaattctaagctgccaaaccctgtggaatatgagaccggcaaactctgtagctaatgggcggcccacttcagcactgggcaaggaggggatccatgaatctggggtacaaagataatctaagccctcaccttagtgccaacagggtgtgctcccacgagactttcagcatccagtagatgggacctcgaggctcgagctgaagcaggcgagagagaaacagctactgcgtgcgtgcgcgcacgcatacacacacacacacacacactggcacagggaggctacaactaagcagcctcagatctgtaaagttgattggtgctttctaaaatgaatgcaattg

SEQ ID NO: 2296 - DNA, 373 bp, Homo sapiens
  source 1..373: mol_type = unassigned DNA
ggggaggagggagatgccccttcaaggcttttgcccttcctgagggagcagaaaaagccacgaagactcctcgtaaacaacttgagagagagaattgtgtctcccctatgaagatggattgcttgagacagagttcaatagaagatgttaaacagataagctgagggcagggggactgagctttggaagagggcctttcaggcagcgaggccgctggcctgtggctccctctgatgagcttcttctaaagatggagaagagtccctgaccatttttgtggacaagcagaaactgggaagaaagacagagacaacaggaggtgcctctataatcgggggcagtgggaacagcacagctgtgtccctggagaccc

SEQ ID NO: 2297 - DNA, 3142 bp, Homo sapiens
  source 1..3142: mol_type = unassigned DNA
atgactacagccttgctcactagttctctctttatctcgttgtcttcaacacatccttttacttctctttgcagatttatctgtattccacctcctgttctctggggttacacagcttctgcctttccccactgtatggggatgtgcagcctgtaaattttcactttgcttaaggatcaccacgaatcaccccccaccattccccacccccccatataaagcattttcacattctgctttcttgccttgggggttcgtggctctctgtgtaactggtttttacttggttacatgccaccaggaactgctgattattttaaagtcctactaccctgcagctcactactttaccttgatttggaagatcatggaatatctatttgaatcctggatgtatttttctcacagtcttcttgcttcctgaaatttcctctggtgttgagggaaagctgagagaatgaaggctctaaatccccagtggaagcatgatatggcgaagcagagctggtgctgaattgttctctctgatggctctatgggagtggatagcactgagtcttcattgctgggttttagcggttgctgctgtttcggatcagcatgccacaagccccttcgactggctcctctctgataagggacccttccatcgctcacaggaatacacagattttgtggacagaagccggcagggatttagcacaagatacaagatatacagggagtttggccgctggaaagtaaataaccttgcagttgagagaagaaatttccttggctctcctctgcctcttgcccctgaattcttccgcaacataagacttttgggacgtcgacctacccttcagcaaatcacagaaaaccttatcaagaaatatgggacacatttcttgctatctgctactctgggaggagaggagtcactcacaatttttgtggacaagcggaagttgagcaaacgagctgaaggaagtgattccaccaccaatagctcttcggtcactctggagacgctacatcagctagccgcttcttatttcattgacagggacagcacccttcggagacttcaccacattcaaattgcatccactgccataaaggtaacagaaacacggactggtcctcttggctgcagtaactatgacaacctagattctgtcagttctgttctggttcagagtcctgagaataagattcagttgcaagggcttcaagtacttctcccagactatcttcaggaacgttttgtacaagcagctttgagctacattgcttgcaattcagagggagagtttatctgcaaggaaaatgactgctggtgtcactgtggtcccaaatttccagaatgcaactgcccctccatggacattcaagccatggaagagaatcttcttcgaataactgaaacctggaaagcttacaacagtgactttgaggaatcagatgaattcaagttatttatgaaaaggctacctatgaattatttcctcaacacatctactataatgcatttgtggacaatggattctaattttcagcgccgttatgaacaactggagaacagcatgaaacaacttttcctaaaggcgcagaaaattgtacacaagctttttagccttagcaagaggtgtcataaacaacccctcatcagcctgccaagacaaagaacctcaacctactggcttactcgcatccagtcttttctctactgcaatgagaacggcctcctaggcagcttttcagaagagacgcactcgtgcacgtgtccgaatgaccaggtggtctgcaccgcgttcctgccctgcacagtgggagacgcctctgcctgcctgacatgcgcaccagacaaccgcacccgctgcggcacctgcaacaccggctacatgctcagccaggggctctgcaagcctgaagtcgccgagtccaccgatcactatattggctttgaaactgacctgcaagatctcgagatgaaatatctgctgcagaaaacggacagacgaatagaagtccatgccatttttatcagcaatgacatgcgcctcaatagctggtttgatccctcctggcgtaagcggatgctcctcaccttgaagagcaataagtacaagtcaagtctggtccatatgattttgggtctctctttacagatttgcttaactaaaaacagcaccttggagccagtgttggctgtttatgtcaatcccttcggaggcagccactctgagagctggtttatgcctgtgaatgaaaacagctttccagactgggagcggactaagttggacctacccctgcagtgttataactggacattaactctggggaacaaatggaagacattttttgagacagtacacatctacctgagaagtcgcatcaagtccaatggtcccaatggtaatgagagcatttactatgaacctctggagtttattgacccttcccggaacctgggctatatgaaaatcaataacattcaagtgtttggctacagcatgcactttgaccctgaagcaattcgggacctgattttgcagctggactacccctatactcagggatcccaggattcagcacttttgcaactactagagatcagagaccgtgtaaataaactctccccacctggtcagcgtcgtctagatcttttctcttgcttgcttcgtcatagactcaagctgtctactagtgaggtggtgaggatccaatctgctctgcaggcgtttaatgccaaattgccaaacacaatggattatgacacgaccaaattatgtagttaaccataaatgtcaagcacaacccaaaatcttgaaggagtttttacagtgcttttgtggaacagtttatgtttggaagagtaaatttaaattgtcttttcaatatctgtcttatatcagtcaataacattggatggcaatttacacacatgaacttgctgacaatgaatatattatacagcagttttggtttatgaatgacataaatactgacaccagtctagaagacattctactttttacaataaatttcatttgtaattttatatgttccgtggcaatgcttttgtgcattacatcctctagagggaacataaaaagataccaataaaattttgtagctgaacagttattaaaaa

SEQ ID NO: 2298 - DNA, 238 bp, Homo sapiens
  source 1..238: mol_type = unassigned DNA
ggtcccaaatttccagaatgcaactgcccctccatggacattcaagccatggaagagaatcttcttcgaataactgaaacctggaaagcttacaacagtgactttgaggaatcaggcttgaaattcaaatcctgttatactctacatagacaataaaaattggaatggagttttaggttactttcaaaggctgattcaatgtaatgtgaaaaattaaacaaatgcaagtaaataactt

SEQ ID NO: 2299 - DNA, 729 bp, Homo sapiens
  source 1..729: mol_type = unassigned DNA
ccggtcgtcctgcctgacaagccagtgccatcagagtccgtgacttcatttgaagaaaggagggcttcatataattcaattcaaacattctctttggaggactgctgttgttgcgcaagggtggagggaggaaaaaaaaaagaaaaagaaaaaaaaaactttcagtacagtcagatccagtaaggaacagacagtcagtatttaggtgttgagggaaagctgagagaatgaaggctctaaatccccagtggaagcatgatatggcgaagcagagctggtgctgaattgttctctctgatggctctatgggagtggatagcactgagtcttcattgctgggttttagcggttgctgctgtttcggatcagcatgccacaagccccttcgactggctcctctctgataagggacccttccatcgctcacaggaatacacagattttgtggacagaagccggcagggatttagcacaagatacaagatatacagggagtttggccgctggaaagtaaataaccttgcagttgagagaagaaatttccttggctctcctctgcctcttgcccctgaattcttccgcaacataagacttttgggacgtcgacctacccttcagcaaatcacagaaaaccttatcaagaaatatgggacacatttcttgctatctgctactctgggaggagaggagtcactcacaatttttgtggacaagcggaagttgagcaaa

SEQ ID NO: 2300 - DNA, 528 bp, Homo sapiens
  source 1..528: mol_type = unassigned DNA
ctgatggctgttctcctagtccccaagagttgaaccggagaggcttttactttgcaccaggtcgagaacgtgatcagccctttagagaaggaacctccttgtaacaggaattctgctgggaaacgccgtgtaggcactacctccgaagataagatgcatgtttggagctgtgtaaaatgcccactggctgtttgaaagaaggaaaaggtgactagggttgcaaattaaccttagtatcacttaaaaatattctatctagtcaaatgtacgtaagcaaagaagagagcaccaggatataaaactgccacagcagcttggaagacagatgattcagattttggggactttcttttgcgtgttacatagatttgtttgtcatcatgcagttaagcaggtgttgagggaaagctgagagaatgaaggctctaaatccccagtggaagcatgatatggcgaagcagagctggtgctgaattgttctctctgatggctctatgggagtggatagcactgagtcttcattgctgg

SEQ ID NO: 2301 - DNA, 557 bp, Homo sapiens
  source 1..557: mol_type = unassigned DNA
aattgtcttgagtcacaggcagcaggaacgccaaagaagtgggacctgggagggctgctgccgccgctgctgcatctaaccacggttccccgtccccttgcctaagcctcaccggcacagcgcccccgaaagcgcctagcgactcggcctcctccgcatcttcagcccttcgatcaccgcccgcaccccccaccccccaccgcctcgtgcaaatcgctgatgatttggtcatcgtaatgtgaccggtcgtagtggtttatttggggagtgggggaattggttgtgttgggcttccttactacgcctccctcagttgctgcaagtgaaaatgttcaagggaaatactagtgaaatgcactgatggaatactattaatcctaatgataatggtcccaacgcaggaactgctgattattttaaagtcctactaccctgcagctcactactttaccttgatttggaagatcatggaatatctatttgaatcctggatgtatttttctcacagtcttcttgcttcctgaaatttcctctggtaagttattctctttatctgt

SEQ ID NO: 2302 - DNA, 1795 bp, Homo sapiens
  source 1..1795: mol_type = unassigned DNA
cccgccagtgtagccacattcctgcccctttccagttagcccttcgcgttcggcttagtctgcggtcctcttgcattgcgactccgagtttaacttccaacacacactttcaacctccaagagacgcccccacctgtgtcgccccaatagcgacttttctcaccgtggtcgccgcggaacttcaagggtccttcctacccgcgttgctgagagtctgggtttacgcgtcacctcgggcgggacccgatcctccgctcctgaggcccccacaatgaagcagtcggacgcgtctccccaagaaagccggcacagtcttcactaccgtagaagaccttggctccaagatactcctcacctgctccttgaatgacagcgccacagaggtcacagggcaccgctggctgaaggggggcgtggtgctgaaggaggacgcgctgcccggccagaaaacggagttcaaggtggactccgacgaccagtggggagagtactcctgcgtcttcctccccgagcccatgggcacggccaacatccagctccacgggcctcccagagtgaaggctgtgaagtcgtcagaacacatcaacgagggggagacggccatgctggtctgcaagtcagagtccgtgccacctgtcactgactgggcctggtacaagatcactgactctgaggacaaggccctcatgaacggctccgagagcaggttcttcgtgagttcctcgcagggccggtcagagctacacattgagaacctgaacatggaggccgaccccggccagtaccggtgcaacggcaccagctccaagggctccgaccaggccatcatcacgctccgcgtgcgcagccacctggccgccctctggcccttcctgggcatcgtggctgaggtgctggtgctggtcaccatcatcttcatctacgagaagcgccggaagcccgaggacgtcctggatgatgacgacgccggctctgcacccctgaagagcagcgggcagcaccagaatgacaaaggcaagaacgtccgccagaggaactcttcctgaggcaggtggcccgaggacgctccctgctccacgtctgcgccgccgccggagtccactcccagtgcttgcaagattccaagttctcacctcttaaagaaaacccaccccgtagattcccatcatacacttccttcttttttaaaaaagttgggttttctccattcaggattctgttccttaggtttttttccttctgaagtgtttcacgagagcccgggagctgctgccctgcggccccgtctgtggctttcagcctctgggtctgagtcatggccgggtgggcggcacagccttctccactggccggagtcagtgccaggtccttgccctttgtggaaagtcacaggtcacacgaggggccccgtgtcctgcctgtctgaagccaatgctgtctggttgcgccatttttgtgcttttatgtttaattttatgagggccacgggtctgtgttcgactcagcctcagggacgactctgacctcttggccacagaggactcacttgcccacaccgagggcgaccccgtcacagcctcaagtcactcccaagccccctccttgtctgtgcatccgggggcagctctggagggggtttgctggggaactggcgccatcgccgggactccagaaccgcagaagcctccccagctcacccctggaggacggccggctctctatagcaccagggctcacgtgggaacccccctcccacccaccgccacaataaagatcgcccccacctccaccctca

SEQ ID NO: 2303 - DNA, 1605 bp, Homo sapiens
  source 1..1605: mol_type = unassigned DNA
agttagcccttcgcgttcggcttagtctgcggtcctcttgcattgcgactccgagtttaacttccaacacacactttcaacctccaagagacgcccccacctgtgtcgccccaatagcgacttttctcaccgtggtcgccgcggaacttcaagggtccttcctacccgcgttgctgagagtctgggtttacgcgtcacctcgggcgggacccgatcctccgctcctgaggcccccacaatgaagcagtcggacgcgtctccccaagaaagggtggactccgacgaccagtggggagagtactcctgcgtcttcctccccgagcccatgggcacggccaacatccagctccacgggcctcccagagtgaaggctgtgaagtcgtcagaacacatcaacgagggggagacggccatgctggtctgcaagtcagagtccgtgccacctgtcactgactgggcctggtacaagatcactgactctgaggacaaggccctcatgaacggctccgagagcaggttcttcgtgagttcctcgcagggccggtcagagctacacattgagaacctgaacatggaggccgaccccggccagtaccggtgcaacggcaccagctccaagggctccgaccaggccatcatcacgctccgcgtgcgcagccacctggccgccctctggcccttcctgggcatcgtggctgaggtgctggtgctggtcaccatcatcttcatctacgagaagcgccggaagcccgaggacgtcctggatgatgacgacgccggctctgcacccctgaagagcagcgggcagcaccagaatgacaaaggcaagaacgtccgccagaggaactcttcctgaggcaggtggcccgaggacgctccctgctccacgtctgcgccgccgccggagtccactcccagtgcttgcaagattccaagttctcacctcttaaagaaaacccaccccgtagattcccatcatacacttccttcttttttaaaaaagttgggttttctccattcaggattctgttccttaggtttttttccttctgaagtgtttcacgagagcccgggagctgctgccctgcggccccgtctgtggctttcagcctctgggtctgagtcatggccgggtgggcggcacagccttctccactggccggagtcagtgccaggtccttgccctttgtggaaagtcacaggtcacacgaggggccccgtgtcctgcctgtctgaagccaatgctgtctggttgcgccatttttgtgcttttatgtttaattttatgagggccacgggtctgtgttcgactcagcctcagggacgactctgacctcttggccacagaggactcacttgcccacaccgagggcgaccccgtcacagcctcaagtcactcccaagccccctccttgtctgtgcatccgggggcagctctggagggggtttgctggggaactggcgccatcgccgggactccagaaccgcagaagcctccccagctcacccctggaggacggccggctctctatagcaccagggctcacgtgggaacccccctcccacccaccgccacaataaagatcgcccccacctccaccctca

SEQ ID NO: 2304 - DNA, 1974 bp, Homo sapiens
  source 1..1974: mol_type = unassigned DNA; mol_type = unassigned DNA
gctttttatagcggccgcgggcggcggcggcagcggttggaggttgtaggaccggcgaggaataggaatcatggcggctgcgctgttcgtgctgctgggattcgcgctgctgggcacccacggagcctccggggctgccggcttcgtccaggcgccgctgtcccagcagaggtgggtggggggcagtgtggagctgcactgcgaggccgtgggcagcccggtgcccgagatccagtggtggtttgaagggcagggtcccaacgacacctgctcccagctctgggacggcgcccggctggaccgcgtccacatccacgccacctaccaccagcacgcggccagcaccatctccatcgacacgctcgtggaggaggacacgggcacttacgagtgccgggccagcaacgacccggatcgcaaccacctgacccgggcgcccagggtcaagtgggtccgcgcccaggcagtcgtgctagtcctggaacccggcacagtcttcactaccgtagaagaccttggctccaagatactcctcacctgctccttgaatgacagcgccacagaggtcacagggcaccgctggctgaaggggggcgtggtgctgaaggaggacgcgctgcccggccagaaaacggagttcaaggtggactccgacgaccagtggggagagtactcctgcgtcttcctccccgagcccatgggcacggccaacatccagctccacgggcctcccagagtgaaggctgtgaagtcgtcagaacacatcaacgagggggagacggccatgctggtctgcaagtcagagtccgtgccacctgtcactgactgggcctggtacaagatcactgactctgaggacaaggccctcatgaacggctccgagagcaggttcttcgtgagttcctcgcagggccggtcagagctacacattgagaacctgaacatggaggccgaccccggccagtaccggtgcaacggcaccagctccaagggctccgaccaggccatcatcacgctccgcgtgcgcagccacctggccgccctctggcccttcctgggcatcgtggctgaggtgctggtgctggtcaccatcatcttcatctacgagaagcgccggaagcccgaggacgtcctggatgatgacgacgccggctctgcacccctgaagagcagcgggcagcaccagaatgacaaaggcaagaacgtccgccagaggaactcttcctgaggcaggtggcccgaggacgctccctgctccacgtctgcgccgccgccggagtccactcccagtgcttgcaagattccaagttctcacctcttaaagaaaacccaccccgtagattcccatcatacacttccttcttttttaaaaaagttgggttttctccattcaggattctgttccttaggtttttttccttctgaagtgtttcacgagagcccgggagctgctgccctgcggccccgtctgtggctttcagcctctgggtctgagtcatggccgggtgggcggcacagccttctccactggccggagtcagtgccaggtccttgccctttgtggaaagtcacaggtcacacgaggggccccgtgtcctgcctgtctgaagccaatgctgtctggttgcgccatttttgtgcttttatgtttaattttatgagggccacgggtctgtgttcgactcagcctcagggacgactctgacctcttggccacagaggactcacttgcccacaccgagggcgaccccgtcacagcctcaagtcactcccaagccccctccttgtctgtgcatccgggggcagctctggagggggtttgctggggaactggcgccatcgccgggactccagaaccgcagaagcctccccagctcacccctggaggacggccggctctctatagcaccagggctcacgtgggaacccccctcccacccaccgccacaataaagatcgcccccacctccaccc

SEQ ID NO: 2305 - DNA, 611 bp, Homo sapiens
  source 1..611: mol_type = unassigned DNA; mol_type = unassigned DNA
atagcggccgcgggcggcggcggcagcggttggaggttgtaggaccggcgaggaataggaatcatggcggctgcgctgttcgtgctgctgggattcgcgctgctgggcacccacggagcctccggggctgccggcacagtcttcactaccgtagaagaccttggctccaagatactcctcacctgctccttgaatgacagcgccacagaggtcacagggcaccgctggctgaaggggggcgtggtgctgaaggaggacgcgctgcccggccagaaaacggagttcaagtgagtgcctgaccacgccatgccgccacctgccccttctcacggctctcttgccgccagcggcctgtggtccgtgagaacaaaagaccggtcggcaggcttgatccaggcggaagttagggaccagctccgcgcagacccccagagggaaaccccagggaggggtctgaggggcgtccttgtgaggcagggggctccagcagccctggcaggagtccccattgcttgctcctcactaggtcccgggcacgaaagggcgccacactgccaggtcccgggcacgtgtgcgggcctcccaggctctgtgctcctggcacaagaggg

SEQ ID NO: 2306 - DNA, 545 bp, Homo sapiens
  source 1..545: mol_type = unassigned DNA; mol_type = unassigned DNA
atagcggccgcgggcggcggcggcagcggttggaggttgtaggaccggcgaggaataggaatcatggcggctgcgctgttcgtgctgctgggattcgcgctgctgggcacccacggagcctccggggctgaagaccttggctccaagatactcctcacctgctccttgaatgacagcgccacagaggtcacagggcaccgctggctgaaggggggcgtggtgctgaaggaggacgcgctgcccggccagaaaacggagttcaaggtggactccgacgaccagtggggagagtactcctgcgtcttcctccccgagcccatgggcacggccaacatccagctccacgggcctcccagagtgaaggctgtgaagtcgtcagaacacatcaacgagggggagacggccatgctggtctgcaagtcagagtccgtgccacctgtcactgactgggcctggtacaagatcactgactctgaggacaaggccctcatgaacggctccgagagcaggttcttcgtgagttcctcgcagggccggtcagagct

SEQ ID NO: 2307 - DNA, 1616 bp, Homo sapiens
  source 1..1616: mol_type = unassigned DNA; mol_type = unassigned DNA
gccgcgggcggcggcggcagcggttggaggttgtaggaccggcgaggaataggaatcatggcggctgcgctgttcgtgctgctgggattcgcgctgctgggcacccacggagcctccggggctgccggcacagtcttcactaccgtagaagaccttggctccaagatactcctcacctgctccttgaatgacagcgccacagaggtcacagggcaccgctggctgaaggggggcgtggtgctgaaggaggacgcgctgcccggccagaaaacggagttcaaggtggactccgacgaccagtggggagagtactcctgcgtcttcctccccgagcccatgggcacggccaacatccagctccacgggcctcccagagtgaaggctgtgaagtcgtcagaacacatcaacgagggggagacggccatgctggtctgcaagtcagagtccgtgccacctgtcactgactgggcctggtacaagatcactgactctgaggacaaggccctcatgaacggctccgagagcaggttcttcgtgagttcctcgcagggccggtcagagctacacattgagaacctgaacatggaggccgaccccggccagtaccggtgcaacggcaccagctccaagggctccgaccaggccatcatcacgctccgcgtgcgcagccacctggccgccctctggcccttcctgggcatcgtggctgaggtgctggtgctggtcaccatcatcttcatctacgagaagcgccggaagcccgaggacgtcctggatgatgacgacgccggctctgcacccctgaagagcagcgggcagcaccagaatgacaaaggcaagaacgtccgccagaggaactcttcctgaggcaggtggcccgaggacgctccctgctccacgtctgcgccgccgccggagtccactcccagtgcttgcaagattccaagttctcacctcttaaagaaaacccaccccgtagattcccatcatacacttccttcttttttaaaaaagttgggttttctccattcaggattctgttccttaggtttttttccttctgaagtgtttcacgagagcccgggagctgctgccctgcggccccgtctgtggctttcagcctctgggtctgagtcatggccgggtgggcggcacagccttctccactggccggagtcagtgccaggtccttgccctttgtggaaagtcacaggtcacacgaggggccccgtgtcctgcctgtctgaagccaatgctgtctggttgcgccatttttgtgcttttatgtttaattttatgagggccacgggtctgtgttcgactcagcctcagggacgactctgacctcttggccacagaggactcacttgcccacaccgagggcgaccccgtcacagcctcaagtcactcccaagccccctccttgtctgtgcatccgggggcagctctggagggggtttgctggggaactggcgccatcgccgggactccagaaccgcagaagcctccccagctcacccctggaggacggccggctctctatagcaccagggctcacgtgggaacccccctcccacccaccgccacaataaagatcgcccccacctccaccctca

SEQ ID NO: 2308 - DNA, 582 bp, Homo sapiens
  source 1..582: mol_type = unassigned DNA; mol_type = unassigned DNA
gcagcggttggaggttgtaggaccggcgaggaataggaatcatggcggctgcgctgttcgtgctgctgggattcgcgctgctgggcacccacggagcctccggggctgccggcacagtcttcactaccgtagaagaccttggctccaagatactcctcacctgctccttgaatgacagcgccacagaggtcacagggcaccgctggctgaaggggggcgtggtgctgaaggaggacgcgctgcccggccagaaaacggagttcaaggtggactccgacgaccagtggggagagtactcctgcgtcttcctccccgagcccatgggcacggccaacatccagctccacggtgagtcctgcagccaggggtaccgggcaccaccgactgtcgggagaagttgttggcctgaggcacccggcacatcccagagccctggccccctgctccctggaggggaacagccctcctgcgggaggccggggatgggggcgggcctgcggttccaggctcctctctctcaccctcctgtcagggcctcccagagtgaaggctgtgaagtcgtcagaacacatcaacgagggg

SEQ ID NO: 2309 - DNA, 545 bp, Homo sapiens
  source 1..545: mol_type = unassigned DNA; mol_type = unassigned DNA
agcggttggaggttgtaggaccggcgaggaataggaatcatggcggctgcgctgttcgtgctgctgggattcgcgctgctgggcacccacggagcctccggggctgccggcttcgtccaggcgccgctgtcccagcagaggtgggtggggggcagtgtggagctgcactgcgaggccgtgggcagcccggtgcccgagatccagtggtggtttgaagggcagggtcccaacgacacctgctcccagctctgggacggcgcccggctggaccgcgtccacatccacgccacctaccaccagcacgcggccagcaccatctccatcgacacgctcgtggaggaggacacgggcacttacgagtgccgggccagcaacgacccggatcgcaaccacctgacccgggcgcccagggtcaagtgggtccgcgcccaggcagtcgtgctagtcctggaacgtgagtggcgggcacctccctccccgcctccctcagtttccctcctgtgccgctcgcctcccggctcctgctcagtagaacccagacgcct

SEQ ID NO: 2310 - DNA, 689 bp, Homo sapiens
  source 1..689: mol_type = unassigned DNA; mol_type = unassigned DNA
gtaggaccggcgaggaataggaatcatggcggctgcgctgttcgtgctgctgggattcgcgctgctgggcacccacggagcctccggggctgtcttcactaccgtagaagaccttggctccaagatactcctcacctgctccttgaatgacagcgccacagaggtcacagggcaccgctggctgaaggggggcgtggtgctgaaggaggacgcgctgcccggccagaaaacggagttcaaggtggactccgacgaccagtggggagagtactcctgcgtcttcctccccgagcccatgggcacggccaacatccagctccacgggcctcccagagtgaaggctgtgaagtcgtcagaacacatcaacgagggggagacggccatgctggtctgcaagtcagagtccgtgccacctgtcactgactgggcctggtacaagatcactgactctgaggacaaggccctcatgaacggctccgagagcaggttcttcgtgagttcctcgcagggccggtcagagctacacattgagaacctgaacatggaggccgaccccggccagtaccggtgcaacggcaccagctccaagggctccgaccaggccatcatcacgctccgcgtgcgcagccacctggccgccctctggcccttcctgggcatcgtggctgaggtgctggtgctggtcacca

SEQ ID NO: 2311 - DNA, 1329 bp, Homo sapiens
  source 1..1329: mol_type = unassigned DNA; mol_type = unassigned DNA
gcgaggaataggaatcatggcggctgcgctgttcgtgctgctgggattcgcgctgctgggcacccacggagcctccggggctgggcctcccagagtgaaggctgtgaagtcgtcagaacacatcaacgagggggagacggccatgctggtctgcaagtcagagtccgtgccacctgtcactgactgggcctggtacaagatcactgactctgaggacaaggccctcatgaacggctccgagagcaggttcttcgtgagttcctcgcagggccggtcagagctacacattgagaacctgaacatggaggccgaccccggccagtaccggtgcaacggcaccagctccaagggctccgaccaggccatcatcacgctccgcgtgcgcagccacctggccgccctctggcccttcctgggcatcgtggctgaggtgctggtgctggtcaccatcatcttcatctacgagaagcgccggaagcccgaggacgtcctggatgatgacgacgccggctctgcacccctgaagagcagcgggcagcaccagaatgacaaaggcaagaacgtccgccagaggaactcttcctgaggcaggtggcccgaggacgctccctgctccacgtctgcgccgccgccggagtccactcccagtgcttgcaagattccaagttctcacctcttaaagaaaacccaccccgtagattcccatcatacacttccttcttttttaaaaaagttgggttttctccattcaggattctgttccttaggtttttttccttctgaagtgtttcacgagagcccgggagctgctgccctgcggccccgtctgtggctttcagcctctgggtctgagtcatggccgggtgggcggcacagccttctccactggccggagtcagtgccaggtccttgccctttgtggaaagtcacaggtcacacgaggggccccgtgtcctgcctgtctgaagccaatgctgtctggttgcgccatttttgtgcttttatgtttaattttatgagggccacgggtctgtgttcgactcagcctcagggacgactctgacctcttggccacagaggactcacttgcccacaccgagggcgaccccgtcacagcctcaagtcactcccaagccccctccttgtctgtgcatccgggggcagctctggagggggtttgctggggaactggcgccatcgccgggactccagaaccgcagaagcctccccagctcacccctggaggacggccggctctctatagcaccagggctcacgtgggaacccccctcccacccaccgccacaataaagatcgcccccacctcca

SEQ ID NO: 2312 - DNA, 960 bp, Homo sapiens
  source 1..960: mol_type = unassigned DNA; mol_type = unassigned DNA
ggaataggaatcatggcggctgcgctgttcgtgctgctgggattcgcgctgctgggcacccacggagcctccggggctgccggcacagtcttcactaccgtagaagaccttggctccaagatactcctcacctgctccttgaatgacagcgccacagagcagcgggcagcaccagaatgacaaaggcaagaacgtccgccagaggaactcttcctgaggcaggtggcccgaggacgctccctgctccacgtctgcgccgccgccggagtccactcccagtgcttgcaagattccaagttctcacctcttaaagaaaacccaccccgtagattcccatcatacacttccttcttttttaaaaaagttgggttttctccattcaggattctgttccttaggtttttttccttctgaagtgtttcacgagagcccgggagctgctgccctgcggccccgtctgtggctttcagcctctgggtctgagtcatggccgggtgggcggcacagccttctccactggccggagtcagtgccaggtccttgccctttgtggaaagtcacaggtcacacgaggggccccgtgtcctgcctgtctgaagccaatgctgtctggttgcgccatttttgtgcttttatgtttaattttatgagggccacgggtctgtgttcgactcagcctcagggacgactctgacctcttggccacagaggactcacttgcccacaccgagggcgaccccgtcacagcctcaagtcactcccaagccccctccttgtctgtgcatccgggggcagctctggagggggtttgctggggaactggcgccatcgccgggactccagaaccgcagaagcctccccagctcacccctggaggacggccggctctctatagcaccagggctcacgtgggaacccccctcccacccaccgccacaataaagatcgcccccacctcca

SEQ ID NO: 2313 - DNA, 559 bp, Homo sapiens
  source 1..559: mol_type = unassigned DNA; mol_type = unassigned DNA
gtgcatttgtgcaggagactgagaagggtttcttctgagcagaaagcttagcctggggcttactggccagagctgcctgcagcctgggaagcagccggcacagtcttcactaccgtagaagaccttggctccaagatactcctcacctgctccttgaatgacagcgccacagaggtcacagggcaccgctggctgaaggggggcgtggtgctgaaggaggacgcgctgcccggccagaaaacggagttcaaggtggactccgacgaccagtggggagagtactcctgcgtcttcctccccgagcccatgggcacggccaacatccagctccacgggcctcccagagtgaaggctgtgaagtcgtcagaacacatcaacgagggggagacggccatgctggtctgcaagtcagagtccgtgccacctgtcactgactgggcctggtacaagatcactgactctgaggacaaggccctcatgaacggctccgagagcaggttcttcgtgagttcctcgcagggccggtcagagctacacattgagaacctgaacatggagg

SEQ ID NO: 2314 - DNA, 570 bp, Homo sapiens
  source 1..570: mol_type = unassigned DNA; mol_type = unassigned DNA
gcatttgtgcaggagactgagaagggtttcttctgagcagaaagcttagcctggggcttactggccagagctgcctgcagcctgggaagcagccggcttcgtccaggcgccgctgtcccagcagaggtgggtggggggcagtgtggagctgcactgcgaggccgtgggcagcccggtgcccgagatccagtggtggtttgaagggcagggtcccaacgacacctgctcccagctctgggacggcgcccggctggaccgcgtccacatccacgccacctaccaccagcacgcggccagcaccatctccatcgacacgctcgtggaggaggacacgggcacttacgagtgccgggccagcaacgacccggatcgcaaccacctgacccgggcgcccagggtcaagtgggtccgcgcccaggcagtcgtgctagtcctggaacccggcacagtcttcactaccgtagaagaccttggctccaagatactcctcacctgctccttgaatgacagcgccacagaggtcacagggcaccgctggctgaaggggggcgtggtgctgaaggaggacgc

SEQ ID NO: 2315 - DNA, 544 bp, Homo sapiens
  source 1..544: mol_type = unassigned DNA; mol_type = unassigned DNA
gaaaccccacttttgctggggactgactcgtgaagaccacaaggtctgggcaacacagccttggcccgtgtggggtggacactgctgtttgctctgtgaattcgtgactgtgtttgcctctcctgaaacttgcttcaggggcgtctgcgggttggtggggcacagccgggtgggccggcacagtcttcactaccgtagaagaccttggctccaagatactcctcacctgctccttgaatgacagcgccacagaggtcacagggcaccgctggctgaaggggggcgtggtgctgaaggaggacgcgctgcccggccagaaaacggagttcaaggtggactccgacgaccagtggggagagtactcctgcgtcttcctccccgagcccatgggcacggccaacatccagctccacgggcctcccagagtgaaggctgtgaagtcgtcagaacacatcaacgagggggagacggccatgctggtctgcaagtcagagtccgtgccacctgtcactgactgggcctggtacaagatcactgactctga

SEQ ID NO: 2316 - DNA, 2155 bp, Homo sapiens
  source 1..2155: mol_type = unassigned DNA; mol_type = unassigned DNA
ttcttctgcctcagcctcctgagtagctgggattacaggcatgagccaacatgcccagctaattttttgtatttttagaagagacggggtttcaccgtgttagccaggatggtctcgatctcccgacctcgagatccacccgccttggcctcccaaagtgctgggattacaggcgtgagcctccgcgcccggccaccaccgcgcccagctggctacgtttttagaaaagaatttccagtttgtgctggggctgctacaagagctcgatgccctggtccctgctcagggacgtgggtgggtgccttgtctgtccccacaccctggtcccagcctcgtgtgtctctgggcaggaacatcgccaggcggggcctctgggttcccagcgccttagcccagggcccgccagctgccagcgaagggtgccttcccgaagggggtgccttcccgaaggggcctcctcagcaggcgctgggctcttcccttcccggaggcgtggccagaagttccccttgggcctccggtcctcggggcgtaagggccacggtgtatttttgggatgaaaaccagtccttcccggggaggagccgcaggttcctgggggtcaggcaggcagcgcgggccgtgctcctccactctgctgaccgcgtctcgccgggccttgcagccggcacagtcttcactaccgtagaagaccttggctccaagatactcctcacctgctccttgaatgacagcgccacagaggtcacagggcaccgctggctgaaggggggcgtggtgctgaaggaggacgcgctgcccggccagaaaacggagttcaaggtggactccgacgaccagtggggagagtactcctgcgtcttcctccccgagcccatgggcacggccaacatccagctccacgggcctcccagagtgaaggctgtgaagtcgtcagaacacatcaacgagggggagacggccatgctggtctgcaagtcagagtccgtgccacctgtcactgactgggcctggtacaagatcactgactctgaggacaaggccctcatgaacggctccgagagcaggttcttcgtgagttcctcgcagggccggtcagagctacacattgagaacctgaacatggaggccgaccccggccagtaccggtgcaacggcaccagctccaagggctccgaccaggccatcatcacgctccgcgtgcgcagccacctggccgccctctggcccttcctgggcatcgtggctgaggtgctggtgctggtcaccatcatcttcatctacgagaagcgccggaagcccgaggacgtcctggatgatgacgacgccggctctgcacccctgaagagcagcgggcagcaccagaatgacaaaggcaagaacgtccgccagaggaactcttcctgaggcaggtggcccgaggacgctccctgctccacgtctgcgccgccgccggagtccactcccagtgcttgcaagattccaagttctcacctcttaaagaaaacccaccccgtagattcccatcatacacttccttcttttttaaaaaagttgggttttctccattcaggattctgttccttaggtttttttccttctgaagtgtttcacgagagcccgggagctgctgccctgcggccccgtctgtggctttcagcctctgggtctgagtcatggccgggtgggcggcacagccttctccactggccggagtcagtgccaggtccttgccctttgtggaaagtcacaggtcacacgaggggccccgtgtcctgcctgtctgaagccaatgctgtctggttgcgccatttttgtgcttttatgtttaattttatgagggccacgggtctgtgttcgactcagcctcagggacgactctgacctcttggccacagaggactcacttgcccacaccgagggcgaccccgtcacagcctcaagtcactcccaagccccctccttgtctgtgcatccgggggcagctctggagggggtttgctggggaactggcgccatcgccgggactccagaaccgcagaagcctccccagctcacccctggaggacggccggctctctatagcaccagggctcacgtgggaacccccctcccacccaccgccacaataaagatcgcccccacctccaccctc

SEQ ID NO: 2317 - DNA, 769 bp, Homo sapiens
  source 1..769: mol_type = unassigned DNA; mol_type = unassigned DNA
ccggcccctcgtgccccaggaagagcagcgggcagcaccagaatgacaaaggcaagaacgtccgccagaggaactcttcctgaggcaggtggcccgaggacgctccctgctccacgtctgcgccgccgccggagtccactcccagtgcttgcaagattccaagttctcacctcttaaagaaaacccaccccgtagattcccatcatacacttccttcttttttaaaaaagttgggttttctccattcaggattctgttccttaggtttttttccttctgaagtgtttcacgagagcccgggagctgctgccctgcggccccgtctgtggctttcagcctctgggtctgagtcatggccgggtgggcggcacagccttctccactggccggagtcagtgccaggtccttgccctttgtggaaagtcacaggtcacacgaggggccccgtgtcctgcctgtctgaagccaatgctgtctggttgcgccatttttgtgcttttatgtttaattttatgagggccacgggtctgtgttcgactcagcctcagggacgactctgacctcttggccacagaggactcacttgcccacaccgagggcgaccccgtcacagcctcaagtcactcccaagccccctccttgtctgtgcatccgggggcagctctggagggggtttgctggggaactggcgccatcgccgggactccagaaccgcagaagcctccccagctcacccctggaggacggccggctctctatagcaccaggg

SEQ ID NO: 2318 - DNA, 15955 bp, Homo sapiens
  source 1..15955: mol_type = unassigned DNA; mol_type = unassigned DNA
gagccgagctgggagatggcggcggcagcggcggcgccgagagtgtgagcaccgcccgggagccgccggcccgggcgcagcgcgaccccgaccccgcccgcccgcctgcccgccatgggcaacgaggtcagcctggagggcggcgctggcgacgggccgctgccgcccggcggcgccggccccggcccgggccccggccccggccccggcgcaggaaagccgccttcagcaccggccggtggcggacagctccccgcggcgggagcagcgcggtcgaccgcggtaccaccggtccctggccccggccccggccccggtcccggccctggcccgggcagcacttcccggagactggaccccaaggaacccctgggtaaccagagagcagcttccccaactccgaagcaggcttctgctaccactcctggccatgagagcccccgagagacaagggcacagggaccagcaggccaggaggctgatggtccccgcaggacgctgcaggtagacagcaggacacagagatcagggcggtccccctcagtgtcaccggacagaggcagcacccccacatcaccctactccgtccctcagatcgccccccttcccagcagcacgctgtgtcccatatgcaagacttcggacctcacgtcgacccccagccagccaaacttcaacacctgcacccagtgtcacaacaaggtctgcaaccagtgtgggttcaaccccaaccctcatctcacccaggtgaaggagtggctctgtctgaactgtcagatgcagagggctctgggaatggacatgaccactgcacctcgctccaagagccagcagcagctgcactccccagccctgtctcctgcccactccccggccaaacagcccctggggaagccagaccaagagagatctcggggcccaggaggaccacagcctgggtcccgccaggctgagacagccagggccacctcagtgccggggcctgcccaagcagctgcccctccagaggtggggagggtgtctcctcagccccctcaacccaccaagccttccacagctgagcccaggccacctgcaggagaggccccggccaaaagtgccaccgcagtgcccgctgggcttggtgccactgagcagacccaggagggcctcactggtaagctcttcggccttggcgcgtcactgctaacccaggcgagcaccctcatgtctgtgcagcccgaggctgacacccagggccagcctgcccccagcaaggggacacctaagatcgtcttcaatgatgccagcaaggaggctggcccaaaacccttgggctcagggcccgggcctgggccagcacctggagccaaaactgagcctggggctagaatgggtcctggatctggacctggagccctgccgaaaactgggggaacaaccagtccaaagcatggcagagcagaacatcaggcagcatcgaaggctgctgccaagccaaagaccatgccgaaggaaagggccatctgcccactgtgccaagccgagctcaacgtgggcagcaagagcccagccaactataacacatgcaccacctgcaggctccaggtgtgcaacctgtgtggcttcaacccaacaccccacctggtggagaaaacagagtggctctgtctgaactgccaaaccaagcggctactggagggcagcctaggagagccgacccccctgccgccgcccacctcacagcagccccctgtaggggcccctcaccgtgcatctggaacatcccctctgaagcagaaagggccacaggggctgggccagccttcaggccccctgcctgccaaggccagccctctatccaccaaggccagccctctgcccagcaaggccagcccccaggccaagcccctcagggcttctgaacccagcaagaccccaagcagtgtccaggaaaagaagacccgagtccccactaaagctgagcccatgccgaagccacctccagagactaccccaacccctgcgactcctaaagtaaagagtggggtgaggagggctgaacctgccacccctgtcgtcaaggctgttccagaagcccccaagggtggggaggcggaggacctggtgggcaagccttactctcaggatgcgtctcggagcccacagagcctcagtgacacaggctattcctctgacggcatctctagctcccagagtgagatcacaggagtcgtgcagcaggaggtggaacagctggacagtgcaggggtgacagggccacatccacccagcccctccgagatccacaaggtggggagcagcatgcggcctttgctgcaggcccagggcctggccccaagtgagcggagcaagccactctccagcggtactggcgaggagcagaagcagcggccccactccttgtccatcacgcctgaggcctttgactctgatgaggagctggaggatatcctggaggaagacgaagactctgctgagtggaggcgccggagagagcagcaggacactgccgagtcctcagacgactttggcagccaattgaggcacgactatgtggaggacagcagtgagggtggcctgtcccctcttccaccccagcccccagcccgggcagcagaactgactgatgaggatttcatgcgacggcagattctcgagatgagcgccgaggaagacaacctggaggaggatgacactgccacctccgggcgtggcctggccaaacatggcacccagaaaggtggccccagacccaggcctgagcctagccaagaaccagcagcactgcccaagaggcgcctgccccacaatgccaccacgggctatgaggagctgctccctgagggaggctcagcagaggctaccgatggcagtgggaccctgcagggtgggctccgtcgcttcaagaccattgagctcaacagcacgggaagttatggtcatgagttggacctgggccaaggcccagaccccagtctggaccgggagcctgagctggagatggagagcctaacgggctcccctgaggaccgctcccgtggtgagcactcctctacattgcctgcctccacacccagctacacctcgggcacctctcccacctctctgtcctccctagaggaggacagtgacagcagccccagccgcaggcagcgtctagaagaagcaaagcagcagcgcaaggcccggcaccgctcccacgggcccctgctacccaccatcgaggactcctcagaggaggaggagctgcgggaggaagaggagctgcttcgtgagcaagagaagatgcgggaggtggagcagcagcgcatccgcagcacggcccgcaagacccggcgggacaaggaagaactgcgggcccagcggaggcgagagcgctccaagacaccacccagtaacttgtcacccatcgaggatgcctccccgacggaggagctgaggcaggcggccgagatggaggagctacaccgctcctcctgctctgagtactcaccctcaccctcccttgactctgaggctgaggccttggatggtggccctagccggctttacaagtcaggcagtgagtacaacctgcccaccttcatgtccctctactcaccaaccgagacaccctccggcagctccaccactcccagttccggacggccgctcaagagcgctgaggaggcttatgaggagatgatgcgcaaagctgagctgctccagaggcagcaaggccaggcagcaggggcccggggaccccatggcggcccctctcagcccacaggcccccggggcctgggctccttcgaatatcaagacactacagaccgtgagtatggccaggctgctcagcctgccgcagagggcacgccagccagcctgggagcagccgtgtacgaagaaatccttcagacatcacagagcatagtccgcatgcggcaggcctcctcacgagacctggcttttgctgaggacaaaaagaaggagaagcagtttctaaatgctgagagtgcatacatggacccaatgaagcaaaatggtggcccccttacccctggtaccagtcccacccagctcgctgcccctgtgtccttctctacccccacctcctcagacagcagcgggggccgagttattcccgatgtccgtgtcactcagcattttgcaaaggagactcaggaccccctcaagctgcacagctctcctgcctcccccagctcagcctccaaggagataggcatgcccttttcccagggccctgggaccccagccaccacagctgtggctccttgtccagctgggctgccacgaggatatatgactccagcctccccagcaggctccgagcgtagtccttcaccatcttccacagcccacagctatggacacagcccaaccactgcaaactatgggtcccaaactgaggatctaccccaggcccccagtggccttgctgcagctggacgagctgctagagagaagcccttgagtgcgagtgacggtgagggtggcactcctcagccttcccgggcatattcctactttgcaagctccagcccacctctctccccgtcttccccctcagagagtcccacattctcccctggcaagatgggcccaagggccacagcagagttctctacacagacgccaagtccagcccctgcctcagacatgccacggagccctggtgcccccactccatcacctatggtagcccagggtacacaaacaccacatcgacccagcacgcctcgcctggtgtggcaggagtcctctcaagaggctccctttatggtcatcacgctggcatctgacgcctccagccagaccaggatggtacatgccagtgcctccacctccccgctctgctcacctactgaaacccagcccaccacccatggctacagccagacaacacctccgagtgtgtctcagctgcccccagagccacctgggccacctggctttccacgggtgcccagtgctggtgcagatgggcccctggcactatatggctggggtgccctccctgctgagaacatctccctgtgccggatctcctctgtccctgggacgtctagggttgagccaggccccaggacccctggcactgcagtggtagacctccgtacagctgtcaagcccactcccatcatcctcactgaccagggcatggacctcacctctcttgctgtggaagcgaggaagtatggtcttgccctggatccaatcccaggacggcagtcgaccgccgtgcagcccttggttatcaacctcaatgcccaggagcataccttccttgctactgccaccaccgtgagcatcaccatggcctcgtctgtgttcatggctcaacaaaagcagcctgtggtctatggagacccctaccagagccgccttgactttggccagggtgggggtagccctgtgtgcctggcccaggtcaaacaagtagagcaggctgtccagacagccccataccgaagtgggccccggggaagacccagggaggccaagtttgccagatataacctacccaaccaagtagctcctctggccagaagagacgttttgatcactcagatgggcaccgcccagagcattggcctcaagccaggcccagtgccagagccaggtgccgagccccaccgggccacccctgcagagctgcggtcacatgctctgccaggtgccaggaagccacacacagtggtggtgcagatgggagagggcacagcaggcactgtgaccacactgctcccagaggagcctgcgggtgccctggaccttaccgggatgaggcctgagagccagctggcatgctgtgacatggtctacaagctcccctttggcagcagctgcactggcaccttccacccggcccccagtgtgcctgagaagagcatggcagatgctgccccacctggccaaagcagcagccccttctatggtccccgggaccctgagcctcctgagcccccaacctaccgggcacagggggtggtggggcctgggccccatgaggagcagaggccctacccacaaggcctgcctggtaggctgtactcctccatgtctgacaccaatttggctgaggctggcctcaactaccatgcccagaggatcgggcagctcttccagggtcctggacgagactcggctatggacctcagctcactgaagcactcctacagcctgggctttgcggatggacgctacctagggcagggcttgcagtatggctcagtcacggacctgcgtcatcctacagaccttttggctcacccgcttcccatgcggcgctatagctcagtgtcgaacatctactcagaccacaggtacggcccacggggagatgcagttggcttccaggaggccagcctggcccagtacagtgccaccacagcccgtgaaatcagtcgcatgtgcgctgccctcaactccatggaccagtatggtgggcggcatggcagtggtggtggtggccctgaccttgtgcagtaccagccccagcacgggcccgggctcagtgctccacagagtctggttcccctcagacctggactccttggtaaccccacctttccagagggccacccaagtcctgggaacttggcccagtatgggcctgcagcaggccaaggaacagcagtcagacagctgctgccgtccacagccactgtacgtgcagctgatggcatgatctactcgactatcaataccccaattgctgcaacactgcccatcaccacccagcctgcctcagtcctgcggcccatggtgcgtggtggcatgtacaggccttacgcatctggtggaatcacagccgtgccactcaccagtctgacacgtgtgcccatgattgccccccgggtacctcttggacccacagggctgtaccgctatcctgcaccaagtagatttcccattgcttccagtgttccacctgcagaagggcctgtctatctggggaaacctgctgctgccaaggcccctggggctgggggcccttcaaggccagagatgccagtaggggctgcacgggaagagcctcttcccacaaccacccctgctgccatcaaggaggctgcaggagccccagctcctgccccactagctggccagaagccaccagcagatgctgctcctgggggtggcagtggggccctcagccggccagggttcgagaaagaggaagcatcacaggaggagaggcagcggaagcaacaggagcagctgctccagctagagcgggagcgggtggagttggagaagctgcgacaacttcggctgcaagaggagctagagcgggaacgtgtggagctgcagaggcaccgtgaggaggagcagctgctggtgcagcgggagttgcaggagctgcagaccatcaagcaccatgtgctgcagcagcagcaagaggaacgccaggctcaatttgcactgcagcgggaacagctagcgcagcagcgtctgcagctggagcagatccagcagctgcagcagcagctgcagcagcagctagaggagcagaagcagcggcagaaggctccctttcctgcagcctgtgaggcacctggccgagggcctcccctagcggctgctgagttggcccagaatggccagtattggcccccccttacacatgcagccttcattgccatggcagggcctgaaggacttgggcagcctcgtgagcctgtgctgcaccggggtctccccagctctgcctcagacatgtcactgcaaacggaggagcagtgggaggccagccgtagtggcatcaagaagcggcactccatgccacgcctgcgggatgcctgtgagctagagtctgggactgagccctgtgtggtcaggaggattgccgacagcagcgtgcagacagacgatgaggatggggagagccgctacctcttgagtcggcgacgccgggcacggcggagtgctgactgcagtgtgcagacggacgacgaagacagtgctgagtgggagcagccagtgcgccgccgcaggtctcgtcttccccgccactcagactcaggctctgacagcaagcacgatgccactgcctcatcatccagtgctgctgccactgtgagggccatgagcagcgtgggcatccagaccatcagtgactgctccgtgcagacggagcctgaccagctgcccagggtctctccagccatccacatcacagctgccaccgatcccaaggtggagatcgtcaggtacatatcggcgccagagaagactgggcgtggggagagcctggcctgccagacggagccagatgggcaggcccagggtgtagccgggccgcagcttgtagggccaactgccatcagcccctacctgcctggcatccagatcgtcaccccagggcctctgggcagatttgaaaaaaagaagccagatcccctggagattgggtaccaggcccacctgcctccggagtctctctcacagcttgtgagccgccagcctcccaagtcccctcaggtcctctactcaccagtctcacccctgtcccctcaccggctcctggacacctcctttgcttccagtgagaggctgaacaaagctcacgtgagtccccagaagcacttcacggctgacagcgctctccgccagcagacgctgcctcgccccatgaagaccctgcagcggtccctgtctgaccctaagcccctcagccccaccgccgaagagtctgccaaagagagattctccctctaccagcaccaggggggactgggtagccaggtgtcggcgttgccacccaacagcctggtccgcaaggtgaagcggacactgcccagcccccctccagaggaggctcaccttcccctggctggccaggcctccccacagctgtatgcagccagcctgctgcagcgagggctgacggggcccaccactgtccctgctaccaaggccagcctgctccgggagctggaccgggacctgcggctggtggagcatgagtccaccaaactgcgcaagaagcaggcagagctggatgaggaggagaaggagattgacgccaagctcaagtacctggagttgggtatcacacaacgcaaagagtctttggccaaagaccggggtggccgtgactacccacccttgcgtggtcttggcgagcatcgtgactacctatcggacagtgagctcaaccagctgcggctccagggctgcaccactcccgctggccagtttgtggacttccctgccactgccgctgctcctgccaccccctctggtcccactgccttccagcagccccgcttccagcctccagccccacagtattctgcaggcagtggtgggccaactcagaacggattcccagcccaccaggcccccacctaccctggccccagcacgtacccagctcctgcctttcctcctggtgccagttacccagctgagcctggcctgccaaaccagcaggctttccgccccacaggccactatgcaggccaaacacccatgccaaccacacagagcaccctttttccagtccccgctgatagccgtgccccactgcagaagccacgccagacatcgctagccgacttggagcagaaggtgcccaccaactatgaggtgatcgccagccccgttgtgcccatgtcttcagccccatctgaaaccagctacagtggcccagcagtgagcagcggctatgagcagggcaaggtccctgaggtgccccgggctggtgaccgtggcagtgtgagccagagcccagcccccacctacccctctgactcacactataccagtctggagcagaacgttcctcgaaactacgtaatgattgatgacatcagtgaactgaccaaggacagcacctctactgctcctgatagccaacggctggagcccctggggccaggcagcagtgggcgtccagggaaggagcctggagaaccaggtgtccttgacgggcccacactgccctgctgctatgccagaggagaagaggaatctgaggaggactcatacgatccccgcgggaagggtggccacctccggagcatggagagcaatggtcgaccagccagtacccactactatggtgacagtgactacaggcatggggctcgagtagagaagtatggtccagggcccatggggcccaagcatccctccaagagcctggctccagctgccatctcctcaaagcgcagcaagcaccggaagcagggcatggagcaaaagatatccaagttctcgcctattgaagaggccaaagacgtagagtcagacctggcgtcctaccccccacctgcagtcagcagcagcctggtctctcggggcaggaagttccaggatgaaatcacctatgggctcaagaagaacgtgtatgagcagcaaaaatactatgggatgtccagccgggacgcagtggaggacgaccgcatttatggcgggagcagccggtcccgggcaccttctgcatacagtggggagaagctgtccagccacgacttcagtggctggggcaaggggtacgaaagggaacgggaggctgtggagcgacttcaaaaagcgggccccaagccctcatccctaagtatggcccacagccgggtacgaccccccatgcggagccaggcctctgaagaggagagccccgtcagtcctttggggaggccccgccctgccggagggcccctccctcccggcggggatacctgcccacagttctgctccagccactccatgcctgatgtccaggaacatgtcaaggacggacctcgggcccacgcatataagcgtgaggagggctacatcctggatgattcccattgcgtggtttccgacagcgaagcgtatcacctgggccaggaggagacggactggtttgataagccccgggatgcccgctctgaccggttcaggcaccacgggggccatgcagtttcctcctcctcccagaagcgaggccctgccaggcacagctaccatgactacgatgaaccccctgaggagggcctgtggcctcatgatgagggtggcccaggccgccatgcctcagccaaggaacaccggcacggtgaccacgggcggcactcaggccgccacactggtgaggagccgggacggcgtgctgccaaaccacacgctcgggacctgggtcgccatgaggcccggccccactctcagcccagctctgctccagctatgccgaagaagggtcagcctgggtatcccagctctgctgagtactcacagccatcccgtgcttcatccgcataccatcatgcctctgacagcaagaagggctcccggcaagcccactccgggcccgctgcactgcagtcaaaggcagaaccccaggcgcagccgcagctgcaaggtcggcaggcagctccaggaccacagcagtcacagtcaccatcatccaggcaaataccctctggggcagcatcacgccagccacagacacagcagcagcagcaaggtcttgggctgcagcccccacagcaggctctgacacaggctcggctgcagcaacagagccagccaaccacccggggctcagcccctgctgccagccagcctgcagggaagcctcagccaggccccagcacagccacaggtcctcaaccagcaggaccgccacgggcagaacagacaaatggctctaaagggacagccaaagcaccgcaacaggggagggctcctcaggcccagccagcaccaggacctggacctgcaggtgtgaaggctggagccaggcctggaggaaccccaggggctcccgccggccagccaggtgccgatggggagagcgtgttctccaagatcctccctggcggggcagccgagcaagctggcaaactgacggaagctgtctctgcttttggcaaaaaattttcctcattctggtgaccatgcccagcatggctcttgaagaaatgaagagaggtatcattgctgtggaaaaatctctggagtcagaggcctgggcgcagctctggactctgcgtataacacatctacaatctggcaaacccttggcccaaagactcaccaggtgggacgtggcaggcaggcctcagttgaggacgtgatgttttctcacagcagctgcctgggtgaagcatctgctggacaagtcggaccactggccaggggacctttgattgtctttccagagatgctgctctctgcagggcaccaccttcaaggcacagcccttgttgggagggagaaccctctccagaaaccctgccaccatggtgtcttgccgtacttcccacagccgcctttttgcggcctggccggccaggcttcccgtgcgttatacacagagtttgggcacacactgccctccctccgagatgccagaagtttttccacagccttggagaggggctttgactgagggctgggggccctgggctccgtttccttcacattccagctggcccggatccctctgtggcacagggccctgcccgtcacatgccctctgggtgacatcggagcagacctccatgtggccaggggttgggagaactttacaaacattaggacctaacactgtctcatcgctgaaataagaggccatagcaccgaaaagcagcgtgggcgccggctgaggcttctcccagcccgtgggtggcagcgtgctagcacactgccaccatctcaaagccatccccctagccatcgtgagcatcccagcggcaccgccattgtctcaaccagccggctcctcgtctgtacacctggggatttcttttgatttcaagaacagccttaatcattccagtttgatttacgtgtatacctcataaacatttttcttttgtttctctctccccctttctctcttctcttggctcactcccttgcctctccccctccaccaccaccttgtgactgatggtttggtttcctctctgctctgcccctgctcagcacagggagaatgttgacttagaagcaatagggggcagcaggccaccaagagcacaaccccagggcgaggtctggggaggcctcccagcccgcctctgtttactgtgcaattccagtcgttcttaagccatcaccagtgggtgtactcagagcagaggggccaggacttctgccagccaagggaaaggcccagagccctgtgcgggggaatgtggcactgtctatccatccggtggactgggcagcattcctccccagggctcttcccttgggggcctcctttcatctggggcacagccacaagtctcatctctaacgttctatgcaatgaaatataaaccctcaatgacaactgttaatatttaataaattccatgttatgtataaggagttaattgcaaacatgcaattgagaaactggatagatacactcataaaacccccacccctccccaccccacccctgctcccattgtgtgtgtgaaattctcagtctgtggcatgtttgacctgtggcaggactcgctgctgccaggtgagtcaccgcctgtcctgcagtggagcatgcacagctcgcagcctctttgcacgatttcatccattttaaatgcttgaccctcttgcttggagttctttttgcctcagaacctctccttcaggagcacttctagctgacttctgcacaagctagtgaggacctgccagaattgttgcctgagcgtgccaggctgcagggcaggcagtaaaaggcccccacataccctgcagttttctctgtccaggacagcaggtaaaaaggaatccccagagcagacgcaatggtaggagcctgcacaggatgtgtgtgtatggacattctgaaggtttgctgtaggatatctgtctgtctgtcattttcccttcctaccccaaccctgagccagaggcatctgacagccctttcccagagggcaccacgcaagggcagagctgggcggcatccacagccagagaggcagaggcaagagcagagccaggctgtgcccgagggaccccagctcttgactgcacctgtttcatgcctctcctctgtggctaggaggctcaaaggactgtgagccaggagatctgggctggagctagggggtcaatggatgctcaggaagagctgggcctttggcacttgtggtgagaacagttgacagtggtcatctggaactgttcatataaacagtggcttcaagctaagtttcttgtgaagtttctcaatagcaaatcttacagaaggtcctgtgtgaccctctctgcatctgtccccaggacctatgctccctgctcacccccttctccaaagcccaagcgtcccgctgctcatcagcttttttaccattgagccaggagtgcggcaggcagtacctgcctgacccttcaaggcctgaccttcgtccagagtgctctggtttgcaccatgcatttctcaggggtccgcatttctcatgcttttctataagatctacacaccccttcagagagggctcctcgctcacctctggtagctatggatgggacaggaagctgccaacctttgtgttggacttaacacccttgcctttctgggacttggcctcaccccacccatggaatacctgcctcatcccaaagatcaggtatgggctgaatgcagccatctgagcaagggctgagggaagccatcacctaacacctctggccacccaggaccaggtctgtgtggggatgtgccttggagaccaaggcaatagtcctttccactacaggccaggggatgggacaagaagtagggaacaggcagggaaatgttaggaggtcagcctccagcaggcctagtctcaggctctaaagtactgacttttcagcaaatttcctttctggccaagccctctgagtttgaaattctgacatctgccactcctcatcccccactgtacccacaggatacatcatcgcccctctgtgaaggtggctggagcaggcctctggtccatggactgtccttcctggcccttgcatggatgcagttgtgactctggggacaatgcagccagaagctgagggaccagcacttggtgccttggaaagtagagagcaacagacacatctccaaatgggcaaggagtctctagcatgcagcccaggccttctccatacccctctccccagcatcatgagcaagggcattgcctcctctctctgctcacttcagggcccagtgcactcacttcacagtgacagccctcccctacaatccttgggcagagcatgtggtctgagggcccacagtgaaagaacagcagtggtggcaactatgccttgccttctggagcctgtagggagttttccaggcaggtcctttgccaggacagcatggtcctgccctgttgtcccgtctgctctcctcttacccacccccatgctgtaaatacttgtcatcatggactccaacagggttagagggacaggcctaatcaactgaaactcctcggagatgccatctctgtctccctgggtgccagcagccctgctgccatgtgcactggggtggcactggagagccatggcagtcgtgagatattgtatgtgtatgcacatgatcatgtgtgtatgtgcgtgcgtgcgtgcgtgtgtgtgtgtgtgtgtgtttctgcctcattcagtttctggggtcaaatcagctccttctctccaagtgcactaccctggagagtggtggccactcaataccttttcctctagctttcatgtcttgtttttgctttccccttcctcctccctctctccctttctttccttctctccttctttatttgaggggggaagagtgctgtacaaagtcaaacaaacaagtttacagttgtaagtgcaatgacccgagtcctccacatgaccttgtgaattgtgtgctgtccttctgtgctctgtgagaactcgtggtacttcagtgtccctccccctgtattgtgacaaggtaattctgtggtatcagaataaaaggacttgatataaacaa

SEQ ID NO: 2319 - DNA, 862 bp, Homo sapiens
  source 1..862: mol_type = unassigned DNA; mol_type = unassigned DNA
cccactgtgccaagccgagctcaacgtgggcagcaagagcccagccaactataacacatgcaccacctgcaggctccaggtgtgcaacctgtgtggcttcaacccaacaccccacctggtggagaaaacagagtggctctgtctgaactgccaaaccaagcggctactggagggcagcctaggagagccgacccccctgccgccgcccacctcacagcagccccctgtaggggcccctcaccgtgcatctggaacatcccctctgaagcagaaagggccacaggggctgggccagccttcaggccccctgcctgccaaggccagccctctatccaccaaggccagccctctgcccagcaaggccagcccccaggccaagcccctcagggcttctgaacccagcaagaccccaagcagtgtccaggaaaagaagacccgagtccccactaaagctgagcccatgccgaagccacctccagagactaccccaacccctgcgactcctaaagtaaagagtggggtgaggagggctgaacctgccacccctgtcgtcaaggctgttccagaagcccccaagggtggggaggcggaggtcagtcccattcacttcccagagaccctagctttcagacaggacagtctatggaaaggcttgcctccctgggtggctgaggctgtaggctcaggacaggtgccttggggccacacaggagggaagggacacagtagaaggaaagtctagatgaggttctggcacgcttggagactgtgggttttacactggtgctgtgtctggcaccttgtcagatgctttgctgggttttgataccctttgatctagtaaagtttctctttgaagacc

SEQ ID NO: 2320 - DNA, 7250 bp, Homo sapiens
  source 1..7250: mol_type = unassigned DNA; mol_type = unassigned DNA
cagttgtgcgtgccgacgcccgcgtcagcaaagagcggagctgagggtacccggtttgaagtcgtgcgggtcggaggactgccgcctccgctaccgtcttggacccctgcttaccggccgccgcggggacgagctcgggtaggcggcagggcagatgcccgagggcctgcgctggaacgccccacgccgcaccggccgctcccctgtgctccgcggcctgggcctgcgccgctcagctctctggaaactagcgcctcagctgcgcggcgcgtaggtcgcggggagctccgaaccgccggcgcccggccatggcggtctccaggctagatcgcctttttattttactggatactggcactactcctgttacaagaaaagctgctgcacagcaacttggagaagtggtgaagcttcatccccatgaactaaataatctcctgtctaaagtgttgatatatttaaggagtgcaaattgggatacccggattgcagcaggacaagctgttgaagctatagtgaaaaatgtacctgagtggaatccagtgccgagaaccagacaagaacctacttccgaaagttctatggaagattcacctactacagagcgattgaattttgacagatttgatatatgtagattgttacaacatggtgcatcactcctgggatctgctggtgccgaatttgaagtccaagatgaaaaatcaggtgaagtggatcctaaagagaggatagcacgccaacgaaaattattacagaagaaacttggccttaatatgggagaagcaattggaatgagtactgaagaacttttcaatgatgaggatttggattataccccaacttcagcatcctttgttaacaaacaacctactcttcaggcagctgaattgattgactcagagtttcgagcaggaatgagcaatagacaaaagaacaaagctaaaagaatggccaagttatttgcaaaacagagatccagggatgcagtggaaactaatgagaagagcaatgatagcactgatggggagccagaagaaaagagacggaaaatagcaaatgttgttattaatcagtctgcaaatgattccaaagtcttgattgataatattccagacagctcttccttaattgaagagacaaatgaatggcctttggaaagcttttgtgaagaactttgcaatgacctttttaatccctcctgggaggttcgacatggtgcaggcactggacttagggaaattcttaaagctcatgggaaaagtggtggtaaaatgggtgacagcactttagaagagatgattcagcagcatcaagagtggttggaagacttggttattagactcctttgtgtttttgcattagacagatttggagactttgtttctgatgaagttgtggcaccagttcgtgaaacttgtgctcaaacattaggtgtggttttaaaacacatgaacgaaacaggagttcataagactgtggatgtgctgctaaaattacttacacaagaacaatgggaagttagacatggtggtctgctgggaataaaatatgctttggcagtccgtcaggatgtaattaatactttattgcctaaagttttaactagaataattgaaggactccaggatcttgatgatgatgtcagagctgttgctgcagcatcattagtgcctgtagtagaaagccttgtctatcttcagacacaaaaggtgcccttcattataaatacattgtgggatgctcttctggaattagatgatctaacagcttcaacaaatagtattatgactctcctttcatccttgttaacttaccctcaggtccaacaatgcagtattcagcagtcactgacagttttagttccacgtgtctggccttttttgcatcacactatatcatcagttcgaagagcagcattggaaactctgtttacgttattatcaacacaggaccagaactcttcatcttggcttatacctatactgcctgatatgctccgacacatttttcagttctgtgttttggaaagcagccaggaaattctggaccttattcacaaggtttggatggaactgttgagtaaggcttcagttcagtatgtggtagcagctgcttgcccatggatgggtgcttggctttgcttgatgatgcagccttctcatttacctatcgatttaaatatgttgctagaagtaaaagctagagccaaggaaaaaacaggtggtaaggtgcgccaaggccaaagccagaataaagaagtacttcaggagtatattgcaggtgccgacaccatcatggaagacccagccaccagggattttgtagttatgcgggccagaatgatggcagccaagttgttaggagcactttgttgctgtatttgtgatccaggtgtaaatgtggtaactcaagaaattaaaccagctgaatccctgggccagttactactcttccatttgaactccaagtctgctttacagaggattagtgtagctttggtaatctgtgaatgggctgctttacaaaaggagtgtaaagctgttaccttagctgtgcagccgcgtttacttgatatcctttcagaacatttatattatgacgaaattgccgttccattcacacgaatgcagaatgaatgtaaacaacttatatcatcattagctgatgtacatattgaagttggtaatcgagtaaacaacaatgttttaacaatagatcaagctagtgacttggtcactactgtttttaatgaagccacatcatctttcgatttaaatcctcaagtgttacaacagttagatagtaaacgacagcaggtccaaatgacagttacagagaccaaccaggagtggcaagtgttgcagttgagagtgcatacttttgctgcctgtgcagttgtgagcttgcagcagcttccggagaaattaaatcctatcataaaaccattaatggagacaattaaaaaagaagagaatacactagtgcaaaactatgcagctcagtgcatagctaaactccttcagcagtgcacaacaaggacgccctgtcccaattcaaaaattattaaaaacctctgtagctcactttgtgtggacccatatctaactccttgtgtcacatgtccagtaccaacacaaagtggccaggaaaattctaaaggatccacctcagaaaaagatggaatgcaccatactgtcaccaagcacagaggtataattacactctacaggcaccagaaagctgcctttgctatcacaagtaggcgaggtcctacccccaaagcagtaaaagctcaaatagcagatcttcctgcaggaagtagtggaaatattcttgttgaacttgatgaggcccagaagccttacctggtacaacggagaggagctgaatttgctttgacaactatagtaaagcattttggtggtgaaatggcagtgaagttgccacatctctgggatgctatggttggcccattgaggaatacaatcgacataaataattttgatggaaaatccctcctggataagggagatagccctgctcaagaattggtgaattctctgcaggtttttgaaacagcagcagcttcaatggattctgagcttcatcccttgttggtccagcatttgccacatctttatatgtgccttcaataccccagtactgcagtgaggcacatggctgctcgttgtgtaggtgtcatgagcaaaatagctaccatggaaacaatgaatatttttttggagaaggttcttccgtggctgggagcaattgatgacagtgtcaaacaagagggtgcaattgaagcacttgcctgtgtaatggaacaactagatgttggtattgttccatatattgtccttttagttgttcctgtattaggaagaatgagtgatcagacagacagtgtgagattcatggccacgcagtgctttgcaacgctaattagactcatgccacttgaggcaggcattccagaccctccaaacatgtcagcagaattaatccaattgaaagccaaggagcgacactttttggagcaattgttagatgggaaaaaattggaaaattataaaattccagtaccaatcaatgctgaactcagaaaatatcagcaggatggtgtgaactggttagcatttcttaataagtataaacttcatggaattctgtgtgatgacatgggtttaggaaaaactttacagtccatctgcattctagcaggagatcattgtcatagggcccaggaatatgcaagatcaaaattagcagaatgtatgccacttccttccttagtggtttgtccgccaacattaacaggccattgggtggatgaagtaggtaaattttgctctagagaatatctcaacccgttgcattacactggacctcccactgaaagaataaggttacagcaccaagtaaaaaggcacaatctaatagtggcttcatatgatgttgtgaggaatgacatagatttctttagaaatattaaatttaactactgcattcttgatgaaggccatgtcatcaaaaatggaaaaacaaagttgtcaaaagcagtaaaacaactgactgctaattataggattattctttctggaacaccaatccagaacaacgttttggagctgtggtcattatttgatttcctcatgccaggatttttgggtactgaacgccagtttgctgctcgatatggtaaacctatattagcaagtagggatgctcgaagctccagtcgagagcaagaagcaggtgttcttgctatggatgcgctgcaccgccaagtactaccgtttcttttgagaagaatgaaagaagatgttttgcaggatcttccacctaaaattattcaagactattattgtactcttagtcctctccaggttcagctctatgaagattttgctaagtctcgtgccaagtgtgatgttgatgaaacagtttcttcagctacactttctgaagaaactgaaaaaccaaagcttaaagctacaggccacgtattccaggcattacagtacttacgtaaactgtgcaaccatccagcattagtcttaacacctcaacatccagaattcaagaccactgccgaaaaactggcagttcagaattcttctctacatgatattcaacatgcccctaagctctcagctttgaaacaattgctgttggactgcggtttgggaaatggcagcacttccgagagtggcacagagtctgttgtggcccagcacaggatactgatattctgtcagctgaaaagcatgcttgatatagtagagcatgatctcctcaaacctcacttgccctctgtcacttatttgagattagatggcagcatacctcctggtcagaggcattccattgtttcccggtttaataatgatccatctatagacgttctgttacttaccactcacgttggtggcctgggacttaatttgacaggcgctgacacagtagtatttgtggagcatgactggaatcctatgcgagatctacaagccatggaccgggcccatcgcattgggcagaaacgtgtggttaacgtataccgattgataaccagaggaacattggaagaaaaaataatggggttgcagaaattcaagatgaacatagcgaatactgttattagccaagagaattctagtttgcagagcatggggactgatcagcttcttgatctgtttactcttgataaggatggcaaagcagaaaaagctgacacctctacttctgggaaagcaagtatgaaatcaattcttgaaaacctgagtgatctttgggatcaagagcagtatgattcagagtacagcctggaaaattttatgcattctctcaagtaactatcaaatattgtaaatgcaattgctgctagttcagttacatttctgctgatattcagcaaatttctaagtttatggtgaacttttaactcaatgtgtaaatagatctggagaatattcagcataatgctggctcttgtttcactgggggaaacaagttattctcaaatatttgcactgtattaaatttaaatgttaatgtgaaatggtttaaattttacatgctgaaaagctgcagagcagaggaaccaaaccaggtttatttgtgctaccaggaggtgttcttaatgggaacaggcctcctatctttagtcactttgtacaggatgatatccatgagtactttagtgtttgtatatgttttttcttttaaatagaacttgtttttataattgatttaaaatagggctttttttctataaaagccttaatgagccataattttaagaatataagaataatgactatgatattggtcagtcttagaacatgaaaatgtcagacaatgaatttaatcgggcccttggtggaaacatttatatatttaatgcagatgcatagtgtttttcaaatctttaacatcattttttcaacttttaagatataatatcaactattctaaatacaggtaatggtatatttaaggctaccataacatcctatttagagggtggttttttttaatttatctaatggctacgatatagccagattcaaataacatatgtactcaataggtttcaatcatatatataatatattttttgtaactatgaacatacacagttttccagaaatagattttacactgtttagaattccaacacctacagtggaaagactgtttattgtagtaatgcatggctgaagcataaaagggagagagaatttctttatatacacaaacatacatgaatatgcatatctatatgcatagatgtacctatcctgcacccaaaaaggtgcctggtattggcactaaaatcatgtagttatactgggcagcaataataattgggcatgaggctgattactcaatggtgagggtaggtatatgtagatagatgtgcatgtatgtgtttgtatatataattttataagtttcacgcataaattaatacatgcctgtgtgcatacatatgtatgggatatatttgtatatatatgtacaggtaataaacatccccaaggtttgtggctggccatacacataggcatcagtttaacaaccatcagacctcagctgtacaataacaggtgttttgtttaattaaaattatactgttctgcagcatttagacatttgtcacatttcattagctttgacaaccatactgtaacattaaacctagcattccacaagagaataaatataagattgaaactgtaaaa

SEQ ID NO: 2321 - DNA, 2003 bp, Homo sapiens
  source 1..2003: mol_type = unassigned DNA; mol_type = unassigned DNA
tgataatattccagacagctcttccttaattgaagagacaaatgaatggcctttggaaagcttttgtgaagaactttgcaatgacctttttaatccctcctgggaggttcgacatggtgcaggcactggacttagggaaattcttaaagctcatgggaaaagtggtggtaaaatgggtgacagcactttagaagaggtaagtgtattaatgcaacaattatcaccaagtattaatagttggcatctttttccaatgtagggaagtaacgagtatgtgccgtgaagtaggaatgagaggtaaataagaggaagagatatgaaaagatgattcagcagcatcaagagtggttggaagacttggttattagactcctttgtgtttttgcattagacagatttggagactttgtttctgatgaagttgtggcaccagttcgtgaaacttgtgctcaaacattaggtgtggttttaaaacacatgaacgaaacaggagttcataagactgtggatgtgctgctaaaattacttacacaagaacaatgggaagttagacatggtggtctgctgggaataaaatatgctttggcagtccgtcaggatgtaattaatactttattgcctaaagttttaactagaataattgaaggactccaggatcttgatgatgatgtcagagctgttgctgcagcatcattagtgcctgtagtagaaagccttgtctatcttcagacacaaaaggtgcccttcattataaatacattgtgggatgctcttctggaattagatgatctaacagcttcaacaaatagtattatgactctcctttcatccttgttaacttaccctcaggtccaacaatgcagtattcagcagtcactgacagttttagttccacgtgtctggccttttttgcatcacactatatcatcagttcgaagagcagcattggaaactctgtttacgttattatcaacacaggaccagaactcttcatcttggcttatacctatactgcctgatatgctccgacacatttttcagttctgtgttttggaaagcagccaggaaattctggaccttattcacaaggtttggatggaactgttgagtaaggcttcagttcagtatgtggtagcagctgcttgcccatggatgggtgcttggctttgcttgatgatgcagccttctcatttacctatcgatttaaatatgttgctagaagtaaaagctagagccaaggaaaaaacaggtggtaaggtgcgccaaggccaaagccagaataaagaagtacttcaggagtatattgcaggtgccgacaccatcatggaagacccagccaccagggattttgtagttatgcgggccagaatgatggcagccaagttgttaggagcactttgttgctgtatttgtgatccaggtgtaaatgtggtaactcaagaaattaaaccagctgaatccctgggccagttactactcttccatttgaactccaagtctgctttacagaggattagtgtagctttggtaatctgtgaatgggctgctttacaaaaggagtgtaaagctgttaccttagctgtgcagccgcgtttacttgatatcctttcagaacatttatattatgacgaaattgccgttccattcacacgaatgcagaatgaatgtaaacaacttatatcatcattagctgatgtacatattgaagttggtaatcgagtaaacaacaatgttttaacaatagatcaagctagtgacttggtcactactgtttttaatgaagccacatcatctttcgatttaaatcctcaagtgttacaacagttagatagtaaacgacagcaggtccaaatgacagttacagagaccaaccaggagtggcaagtgttgcagttgagagtgcatacttttgctgcctgtgcagttgtgagcttgcagcagcttccggagaaattaaatcctatcataaaaccattaatggagacaattaaaaaagaagagaa

SEQ ID NO: 2322 - DNA, 522 bp, Homo sapiens
  source 1..522: mol_type = unassigned DNA; mol_type = unassigned DNA
ttggaaagcagccaggaaattctggaccttattcacaaggtttggatggaactgttgagtaaggcttcagttcagtatgtggtagcagctgcttgcccatggatgggtgcttggctttgcttgatgatgcagccttctcatttacctatcgatttaaatatgttgctagaagtaaaagctagagccaaggaaaaaacaggtggtaaggtgcgccaaggccaaagccagaataaagaagtacttcaggagtatattgcaggtgccgacaccatcatggaagacccagccaccagggattttgtagttatgcgggccagaatgatggcagccaagtgagtgtacattaagtgtcaggtagtcatacatttacaagtctggctttcaaaggttatttaaccaacagaagattcctctgctgtctccatcagtccttccttccttcatcacactaattatagcctaaggaaaaattagagtaagcaaatacttctaattattttaaagctttaaaataggatttat

SEQ ID NO: 2323 - DNA, 6938 bp, Homo sapiens
  source 1..6938: mol_type = unassigned DNA; mol_type = unassigned DNA
atgggagtattcaggctagatcgcctttttattttactggatactggcactactcctgttacaagaaaagctgctgcacagcaacttggagaagtggtgaagcttcatccccatgaactaaataatctcctgtctaaagtgttgatatatttaaggagtgcaaattgggatacccggattgcagcaggacaagctgttgaagctatagtgaaaaatgtacctgagtggaatccagtgccgagaaccagacaagaacctacttccgaaagttctatggaagattcacctactacagagcgattgaattttgacagatttgatatatgtagattgttacaacatggtgcatcactcctgggatctgctggtgccgaatttgaagtccaagatgaaaaatcaggtgaagtggatcctaaagagaggatagcacgccaacgaaaattattacagaagaaacttggccttaatatgggagaagcaattggaatgagtactgaagaacttttcaatgatgaggatttggattataccccaacttcagcatcctttgttaacaaacaacctactcttcaggcagctgaattgattgactcagagtttcgagcaggaatgagcaatagacaaaagaacaaagctaaaagaatggccaagttatttgcaaaacagagatccagggatgcagtggaaactaatgagaagagcaatgatagcactgatggggagccagaagaaaagagacggaaaatagcaaatgttgttattaatcagtctgcaaatgattccaaagtcttgattgataatattccagacagctcttccttaattgaagagacaaatgaatggcctttggaaagcttttgtgaagaactttgcaatgacctttttaatccctcctgggaggttcgacatggtgcaggcactggacttagggaaattcttaaagctcatgggaaaagtggtggtaaaatgggtgacagcactttagaagagatgattcagcagcatcaagagtggttggaagacttggttattagactcctttgtgtttttgcattagacagatttggagactttgtttctgatgaagttgtggcaccagttcgtgaaacttgtgctcaaacattaggtgtggttttaaaacacatgaacgaaacaggagttcataagactgtggatgtgctgctaaaattacttacacaagaacaatgggaagttagacatggtggtctgctgggaataaaatatgctttggcagtccgtcaggatgtaattaatactttattgcctaaagttttaactagaataattgaaggactccaggatcttgatgatgatgtcagagctgttgctgcagcatcattagtgcctgtagtagaaagccttgtctatcttcagacacaaaaggtgcccttcattataaatacattgtgggatgctcttctggaattagatgatctaacagcttcaacaaatagtattatgactctcctttcatccttgttaacttaccctcaggtccaacaatgcagtattcagcagtcactgacagttttagttccacgtgtctggccttttttgcatcacactatatcatcagttcgaagagcagcattggaaactctgtttacgttattatcaacacaggaccagaactcttcatcttggcttatacctatactgcctgatatgctccgacacatttttcagttctgtgttttggaaagcagccaggaaattctggaccttattcacaaggtttggatggaactgttgagtaaggcttcagttcagtatgtggtagcagctgcttgcccatggatgggtgcttggctttgcttgatgatgcagccttctcatttacctatcgatttaaatatgttgctagaagtaaaagctagagccaaggaaaaaacaggtggtaaggtgcgccaaggccaaagccagaataaagaagtacttcaggagtatattgcaggtgccgacaccatcatggaagacccagccaccagggattttgtagttatgcgggccagaatgatggcagccaagttgttaggagcactttgttgctgtatttgtgatccaggtgtaaatgtggtaactcaagaaattaaaccagctgaatccctgggccagttactactcttccatttgaactccaagtctgctttacagaggattagtgtagctttggtaatctgtgaatgggctgctttacaaaaggagtgtaaagctgttaccttagctgtgcagccgcgtttacttgatatcctttcagaacatttatattatgacgaaattgccgttccattcacacgaatgcagaatgaatgtaaacaacttatatcatcattagctgatgtacatattgaagttggtaatcgagtaaacaacaatgttttaacaatagatcaagctagtgacttggtcactactgtttttaatgaagccacatcatctttcgatttaaatcctcaagtgttacaacagttagatagtaaacgacagcaggtccaaatgacagttacagagaccaaccaggagtggcaagtgttgcagttgagagtgcatacttttgctgcctgtgcagttgtgagcttgcagcagcttccggagaaattaaatcctatcataaaaccattaatggagacaattaaaaaagaagagaatacactagtgcaaaactatgcagctcagtgcatagctaaactccttcagcagtgcacaacaaggacgccctgtcccaattcaaaaattattaaaaacctctgtagctcactttgtgtggacccatatctaactccttgtgtcacatgtccagtaccaacacaaagtggccaggaaaattctaaaggatccacctcagaaaaagatggaatgcaccatactgtcaccaagcacagaggtataattacactctacaggcaccagaaagctgcctttgctatcacaagtaggcgaggtcctacccccaaagcagtaaaagctcaaatagcagatcttcctgcaggaagtagtggaaatattcttgttgaacttgatgaggcccagaagccttacctggtacaacggagaggagctgaatttgctttgacaactatagtaaagcattttggtggtgaaatggcagtgaagttgccacatctctgggatgctatggttggcccattgaggaatacaatcgacataaataattttgatggaaaatccctcctggataagggagatagccctgctcaagaattggtgaattctctgcaggtttttgaaacagcagcagcttcaatggattctgagcttcatcccttgttggtccagcatttgccacatctttatatgtgccttcaataccccagtactgcagtgaggcacatggctgctcgttgtgtaggtgtcatgagcaaaatagctaccatggaaacaatgaatatttttttggagaaggttcttccgtggctgggagcaattgatgacagtgtcaaacaagagggtgcaattgaagcacttgcctgtgtaatggaacaactagatgttggtattgttccatatattgtccttttagttgttcctgtattaggaagaatgagtgatcagacagacagtgtgagattcatggccacgcagtgctttgcaacgctaattagactcatgccacttgaggcaggcattccagaccctccaaacatgtcagcagaattaatccaattgaaagccaaggagcgacactttttggagcaattgttagatgggaaaaaattggaaaattataaaattccagtaccaatcaatgctgaactcagaaaatatcagcaggatggtgtgaactggttagcatttcttaataagtataaacttcatggaattctgtgtgatgacatgggtttaggaaaaactttacagtccatctgcattctagcaggagatcattgtcatagggcccaggaatatgcaagatcaaaattagcagaatgtatgccacttccttccttagtggtttgtccgccaacattaacaggccattgggtggatgaagtaggtaaattttgctctagagaatatctcaacccgttgcattacactggacctcccactgaaagaataaggttacagcaccaagtaaaaaggcacaatctaatagtggcttcatatgatgttgtgaggaatgacatagatttctttagaaatattaaatttaactactgcattcttgatgaaggccatgtcatcaaaaatggaaaaacaaagttgtcaaaagcagtaaaacaactgactgctaattataggattattctttctggaacaccaatccagaacaacgttttggagctgtggtcattatttgatttcctcatgccaggatttttgggtactgaacgccagtttgctgctcgatatggtaaacctatattagcaagtagggatgctcgaagctccagtcgagagcaagaagcaggtgttcttgctatggatgcgctgcaccgccaagtactaccgtttcttttgagaagaatgaaagaagatgttttgcaggatcttccacctaaaattattcaagactattattgtactcttagtcctctccaggttcagctctatgaagattttgctaagtctcgtgccaagtgtgatgttgatgaaacagtttcttcagctacactttctgaagaaactgaaaaaccaaagcttaaagctacaggccacgtattccaggcattacagtacttacgtaaactgtgcaaccatccagcattagtcttaacacctcaacatccagaattcaagaccactgccgaaaaactggcagttcagaattcttctctacatgatattcaacatgcccctaagctctcagctttgaaacaattgctgttggactgcggtttgggaaatggcagcacttccgagagtggcacagagtctgttgtggcccagcacaggatactgatattctgtcagctgaaaagcatgcttgatatagtagagcatgatctcctcaaacctcacttgccctctgtcacttatttgagattagatggcagcatacctcctggtcagaggcattccattgtttcccggtttaataatgatccatctatagacgttctgttacttaccactcacgttggtggcctgggacttaatttgacaggcgctgacacagtagtatttgtggagcatgactggaatcctatgcgagatctacaagccatggaccgggcccatcgcattgggcagaaacgtgtggttaacgtataccgattgataaccagaggaacattggaagaaaaaataatggggttgcagaaattcaagatgaacatagcgaatactgttattagccaagagaattctagtttgcagagcatggggactgatcagcttcttgatctgtttactcttgataaggatggcaaagcagaaaaagctgacacctctacttctgggaaagcaagtatgaaatcaattcttgaaaacctgagtgatctttgggatcaagagcagtatgattcagagtacagcctggaaaattttatgcattctctcaagtaactatcaaatattgtaaatgcaattgctgctagttcagttacatttctgctgatattcagcaaatttctaagtttatggtgaacttttaactcaatgtgtaaatagatctggagaatattcagcataatgctggctcttgtttcactgggggaaacaagttattctcaaatatttgcactgtattaaatttaaatgttaatgtgaaatggtttaaattttacatgctgaaaagctgcagagcagaggaaccaaaccaggtttatttgtgctaccaggaggtgttcttaatgggaacaggcctcctatctttagtcactttgtacaggatgatatccatgagtactttagtgtttgtatatgttttttcttttaaatagaacttgtttttataattgatttaaaatagggctttttttctataaaagccttaatgagccataattttaagaatataagaataatgactatgatattggtcagtcttagaacatgaaaatgtcagacaatgaatttaatcgggcccttggtggaaacatttatatatttaatgcagatgcatagtgtttttcaaatctttaacatcattttttcaacttttaagatataatatcaactattctaaatacaggtaatggtatatttaaggctaccataacatcctatttagagggtggttttttttaatttatctaatggctacgatatagccagattcaaataacatatgtactcaataggtttcaatcatatatataatatattttttgtaactatgaacatacacagttttccagaaatagattttacactgtttagaattccaacacctacagtggaaagactgtttattgtagtaatgcatggctgaagcataaaagggagagagaatttctttatatacacaaacatacatgaatatgcatatctatatgcatagatgtacctatcctgcacccaaaaaggtgcctggtattggcactaaaatcatgtagttatactgggcagcaataataattgggcatgaggctgattactcaatggtgagggtaggtatatgtagatagatgtgcatgtatgtgtttgtatatataattttataagtttcacgcataaattaatacatgcctgtgtgcatacatatgtatgggatatatttgtatatatatgtacaggtaataaacatccccaaggtttgtggctggccatacacataggcatcagtttaacaaccatcagacctcagctgtacaataacaggtgttttgtttaattaaaattatactgttctgcagcatttagacatttgtcacatttcattagctttgacaaccatactgtaacattaaacctagcattccacaagagaataaatataagattgaaactgt

SEQ ID NO: 2324 - DNA, 3297 bp, Homo sapiens
  source 1..3297: mol_type = unassigned DNA; mol_type = unassigned DNA
agtcctgttacacctcccgcggccgcgcacagcggcaacccgggcgtgcgggggcgcgcgcggtcagggaggggcctgcggaggcgcgaggcccccggaagcgcctttcccggaaggcagggaggcagcgccggcctccggaggcggcctgggcgatggcggcggagttttgtccataacgtgggcaaccgcgcagctggaggatggcctcactcgggcctgccgcagctggggagcaggcgtcgggggctgaggcggagccgggccccgcggggccgccgccgccgccctcaccgtcctctctggggcccctgctccccctgcagcgggaacctctctacaactggcaggcgaccaaggcgtcgctgaaggagcgcttcgccttcctcttcaactcggagctgctgagcgatgtgcgcttcgtactgggcaagggtcgcggcgccgccgccgctgggggcccgcagcgcatccccgcccaccgcttcgtgctggcggccggcagcgccgtctttgacgccatgttcaacggcggcatggccaccacgtcggccgagatcgagctgccggacgtggagcccgcagccttcctggcgctgctgagatttctatattcagatgaagttcaaattggtccagaaacagttatgaccactctttatactgccaagaaatacgcagtcccagccttggaagcacactgtgtagaatttctcaccaaacatcttagggcagataatgcctttatgttacttactcaggctcgattatttgatgaacctcagcttgctagtctttgtctagatacaatagacaaaagcacaatggatgcaataagtgcagaagggtttactgatattgatatagatacactctgtgcagttttagagagagacacactcagtattcgagaaagtcgactttttggagctgttgtacgctgggcagaagcagaatgtcagagacaacaattacctgtgacttttgggaataaacaaaaagttctaggaaaagcactttccttaatccggttcccactgatgacaattgaggaatttgcagcaggtcctgctcaatctggaattttgtcagatcgtgaagtggtaaacctctttcttcattttactgtcaaccctaaaccccgagttgaatacattgaccgaccaagatgctgtctcaggggaaaggaatgctgcatcaatagattccagcaagtagaaagccgctggggttacagtgggacgagtgatcgaatcagattcacagttaatagaaggatctctatagttggatttggcttgtatggatctattcatggccctacagattatcaagtgaatatacagatcattgaatatgagaaaaagcaaaccctgggacagaatgataccggctttagttgtgatgggacagctaacacattcagggtcatgttcaaggaacccatagagatcctgcccaatgtgtgctacacagcatgtgcaacactcaaaggtccagattcccactatggcacaaaaggattgaagaaagtagtgcatgagacacctgctgcaagcaagactgtttttttcttttttagttcccctggcaataataatggcacttcaatagaagatggacaaattccagaaatcatattttatacataatttagcattataatacatcttggctaaataataccatacaatctagtgtcaaaaacataaatggccacaaaaaagtagtttgagtgttatgaatatttaaaattgtaagataagaaacagtttcttagagcagatagaaaaatgcttatttaaatctttgcatgatttaaaaacagattttccattttcttacaactttaagagaaaagaactgggtttaatggtttaaaaaaaagcacagctttttcaccttcatcttgtataatttcatagattggctgacttagggtctttcaatagtttgggaattgaaagattcttgttatatatagctagtttgggtttgtttttgttttaactattttgaaggttaggtgagatgggcaaataggcttaactattttgaaggttggatgaaaagagatgggtcagtattcctacagaattcttattaactcaaataactaaatttcagaaaattaagaagctgactttatatttggtggtttgaagtatcttgttgttagcatttgtaataatgctaaaaaaggcctaataaaatgcccaagaaaatattcagtgcatttatagagaaggatattttgtagtagtatagtaatgtgttatgtagtacagttttaaagctataaatggaattttgtgtaaattcacaaaaatgtgatataaacaggatctaagactggattccctgtcactaaactgcaccactatacctgtctctctgtgtgggggacactgctgatgattcccaagattgagatgatgacggtgatgacgactgggtgaacagccatcacttcaacattgtgataatccttcacagcaagaaaccgaataaaatactaacatttctaacaactgctctgacattgtaaagagatccaacagaatcactcctgctgaaaaatacgctttctgccacctacacatttctatttaggaagtaaaatttgcttcatggtcatgaccccattagtcagtgttacagctgtgttggggataggaagtatatctggcagattgatatttatacacttttttataaagcagattttaaaatatagtaacatccatttttttcccttgaaagtgattctcttataaaaaatgaaagtggagtttaaggtatatcaaatcgttgtggaaggtgattaaaaatcaaaattcttttaaatatcaacttaattttttctaagtaagatacaaaaaattttcatctaaagtaatatttcactttatattgtaaagaaggtaggtatattggtggctgaggtctcttgaaattgctaaagggaaatttttctatggtaatgctcttacggatataaacctcagttaaatggaattatctatgggatgtgtggttctggttaactaaaaattaaccagtaaacactctgtagtaaccattacagaaaatacttctgccttaaaaaatatgatatgccagagatgagttagtgtttcttgacgttggagaccttttaaatgcctcatctgttgtactgaacaattgaaactgcatgcagccataaaagggacaagaaacagaactgtttactaactttgggacatcccctggagtttttaaaaataaataaatatatatatatataaaaaaaac

SEQ ID NO: 2325 - DNA, 1467 bp, Homo sapiens
  source 1..1467: mol_type = unassigned DNA; mol_type = unassigned DNA
atggcctcactcgggcctgccgcagctggggagcaggcgtcgggggctgaggcggagccgggccccgcggggccgccgccgccgccctcaccgtcctctctggggcccctgctccccctgcagcgggaacctctctacaactggcaggcgaccaaggcgtcgctgaaggagcgcttcgccttcctcttcaactcggagctgctgagcgatgtgcgcttcgtactgggcaagggtcgcggcgccgccgccgctgggggcccgcagcgcatccccgcccaccgcttcgtgctggcggccggcagcgccgtctttgacgccatgttcaacggcggcatggccaccacgtcggccgagatcgagctgccggacgtggagcccgcagccttcctggcgctgctgagatttctatattcagatgaagttcaaattggtccagaaacagttatgaccactctttatactgccaagaaatacgcagtcccagccttggaagcacactgtgtagaatttctcaccaaacatcttagggcagataatgcctttatgttacttactcaggctcgattatttgatgaacctcagcttgctagtctttgtctagatacaatagacaaaagcacaatggatgcaataagtgcagaagggtttactgatattgatatagatacactctgtgcagttttagagagagacacactcagtattcgagaaagtcgactttttggagctgttgtacgctgggcagaagcagaatgtcagagacaacaattacctgtgacttttgggaataaacaaaaagttctaggaaaagcactttccttaatccggttcccactgatgacaattgaggaatttgcagcaggtcctgctcaatctggaattttgtcagatcgtgaagtggtaaacctctttcttcattttactgtcaaccctaaaccccgagttgaatacattgaccgaccaagatgctgtctcaggggaaaggaatgctgcatcaatagattccagcaagtagaaagccgctggggttacagtgggacgagtgatcgaatcagatcattgaatatgagaaaaagcaaaccctgggacagaatgataccggctttagttgtgatgggacagctaacacattcagggtcatgttcaaggaacccatagagatcctgcccaatgtgtgctacacagcatgtgcaacactcaaaggtccagattcccactatggcacaaaaggattgaagaaagtagtgcatgagacacctgctgcaagcaagactgtttttttcttttttagttcccctggcaataataatggcacttcaatagaagatggacaaattccagaaatcatattttatacataatttagcattataatacatcttggctaaataataccatacaatctagtgtcaaaaacataaatggccacaaaaaagtagtttgagtgttatgaatatttaaaattgt

SEQ ID NO: 2326 - DNA, 797 bp, Homo sapiens
  source 1..797: mol_type = unassigned DNA; mol_type = unassigned DNA
gaaatacgcagtcccagccttggaagcacactgtgtagaatttctcaccaaacatcttagggcagataatgcctttatgttacttactcagatacactctgtgcagttttagagagagacacactcagtattcgagaaagtcgactttttggagctgttgtacgctgggcagaagcagaatgtcagagacaacaattacctgtgacttttgggaataaacaaaaagttctaggaaaagcactttccttaatccggttcccactgatgacaattgaggaatttgcagcaggtcctgctcaatctggaattttgtcagatcgtgaagtggtaaacctctttcttcattttactgtcaaccctaaaccccgagttgaatacattgaccgaccaagatgctgtctcaggggaaaggaatgctgcatcaatagattccagcaagtagaaagccgctggggttacagtgggacgagtgatcgaatcaggcaaatataaattatcaaaattgactgaagaagaaaagcctgaatagaccaattaccatggaaggaattaaaagttatcaaagaactgtcccttcacaaggtggtttttacagattcacagttaatagaaggatctctatagttggatttggcttgtatggatctattcatggccctacagattatcaagtgaatatacagatcattgaatatgagaaaaagcaaaccctgggacagaatgataccggctttagttgtgatgggacagctaacacattcagggtcatgttcaaggaacccatagagatcctgccc

SEQ ID NO: 2327 - DNA, 648 bp, Homo sapiens
  source 1..648: mol_type = unassigned DNA
cattcatttgtttttgtttttgttgcatttgcttttgggttcttagtcatgaattctttacctaagccaatgtcttgaagagtttttttgatgctatcttctagaatttttatggtttcttagatttaagtctttgatccatcttgagttgatttttgtataaggtgagaaaggaggattcctggcatccatgaggaatagcatttattcctggatctaagttttgactaattaatgcttttaacattttaattaatgtgtttaacctcaaatggatttattgaaaccttaaaatatatgcaaaaattatatatgctaagatttttttcccctatttttatgttacgtcctctagatttgaatttacgttaagtgaattccaaagttaggaattgaaatcaaattcctttttttaggcttatgtttttatttccacaggtcctgctcaatctggaattttgtcagatcgtgaagtggtaaacctctttcttcattttactgtcaaccctaaaccccgagttgaatacattgaccgaccaagatgctgtctcaggggaaaggaatgctgcatcaatagattccagcaagtagaaagccgctggggttacagtgggacgagtgatcgaatcagattcacagttaatagaa

SEQ ID NO: 2328 - DNA, 608 bp, Homo sapiens
  source 1..608: mol_type = unassigned DNA
ttacctgtgacttttgggaataaacaaaaagttctaggaaaagcactttccttaatccggttcccactgatgacaattgaggaatttgcagcaggtcctgctcaatctggaattttgtcagatcgtgaagtggtaaacctctttcttcattttactgtcaaccctaaaccccgagttgaatacattgaccgaccaagatgctgtctcaggggaaaggaatgctgcatcaatagattccagcaagtagaaagccgctggggttacagtgggacgagtgatcgaatcagatggagtcgctctgtcactcaggctggagtgcagtggtgggatctctcacactgcaacctccgccttctgggttcaagcgatcctcccacctcagcctcctgagtaacctgtaaggcatgcatcaccacgcccagctaatctttttggatttttagtagagacggggtttcaccatgttgtccaggctggtctcgaactactgacctcaagtgatccacctgcttcagccttccaaagtgctggggttacaggggtgagccaccacgcccagctgttacatgatttttgtttggatcaccactgccagtgggctgagttct

SEQ ID NO: 2329 - DNA, 5767 bp, Homo sapiens
  source 1..5767: mol_type = unassigned DNA
ggttcggcaaggtttgcagccgccacggccgctgctgcgctccggtgcagggcaggctggcgccgagcgaaccagggccgggaactgggagccgggagccgggagccagctgcccgcggagctgcggcggcggcggcatctggggtggtctcagtcccacgaacaccgtggccggcgcccggtggctactgcgcccagcggggctcagggaagagcggtctagacactttttattttggaagaaaggggcaagccccggcgggagcttccttcccggcctggctcgctccccattgcgcccagctccggcccggactctggaagatgactccagggtctgctctgtatattccagcggcggcagttccgggaggcagccgaaagtactaacagttggtagcagcggctagtggaaaagtgagccaaggcggcgcggactcggctctccccgcgccccgcggcactcgctgctcctcgccgctccttccctttggctcccaggcggctgcagcatgaagtggcgcagcgatggccaggagaggtaagaagcccgtggtgagaacgctggaggatctgacgctggactcgggttatggtggcgcggcggactcggtgcgctcctccaacttgtctttgtgctgttccgactcgcacccggcgtccccgtatggcgggagctgctggccgcctctagctgactccatgcacagccggcacaacagctttgacactgtcaacactgccctggtggaagactccgaggggctggactgcgccggccagcactgctcgcggctgctgccggacctagacgaggtcccctggactctccaggagctggaggcgctgctgctgcgttcgcgggatccccgggcaggcccggcggtccccggcggcctgcccaaggacgcgctggccaagctgtcgacgctggtgagccgggcgctggtgcgcatagccaaagaggcgcagcgcctgagcctgcgcttcgccaagtgcaccaagtacgagatccagagcgccatggagatcgtgctgtcctggggcctggccgcgcactgtacggcggctgcgctggccgcactgtccctctacaacatgagcagcgccggcggcgaccgcctgggccgcggcaagtcggcccgctgcggcctcaccttctccgtgggccgcgtgtatcgctggatggtggacagccgcgtggcgctgcgcatccacgagcacgccgccatctacctgacagcctgcatggagagcctcttccgggacatctactcgcgggtcgtggcctccggggtgccccggagctgcagtggccctgggtcaggctcgggctccggcccaggcccgagctcgggccctggtgcggcccccgcggcggataaagagcgggaggcgcccgggggaggagcggcgagcggcggcgcctgcagcgcagccagcagcgccagcgggggcagcagctgttgcgccccgccggccgccgcggccgccgcagtcccgccggcagccgccgccaaccaccaccatcaccaccaccatgcgctccacgaggcgcccaagttcaccgtggagaccctggagcacacggtcaacaacgactcggagatctggggtctcctgcagccctaccagcacctgatctgcgggaagaacgccagcggggtgctgtgcctaccagacagcctgaatcttcacagagacccacagcggtcaaacaagccaggggaactgcccatgttcagccagtcggagctgaggaccatcgagcagtctttgctggccacgcgcgtaggcagcatcgccgaattgagtgacctggtgtcccgtgcaatgcatcacctgcagcccctcaatgccaagcaccacggcaatggcacccccctgcaccacaagcagggggcactgtactgggagcccgaggccctgtacaccctttgctatttcatgcactgcccacaaatggaatgggaaaaccccaacgtggagccttccaaagtcaacctccaggtggaaaggcccttcctcgtgctgccgccgctgatggagtggatccgggtggccgtggcgcacgccggccaccgccgcagcttctccatggacagcgacgacgtccgccaggcggcccggctgctgctgcccggcgtggactgcgagccgcgccagctcagggccgacgactgcttttgtgcatctcgaaagctggatgcggtggccatcgaagccaagtttaagcaggacctgggtttccggatgctgaactgtggacgaacagacctggtgaagcaggcagtgtctctgctggggcccgatgggatcaacaccatgagcgaacagggcatgactcccctgatgtatgcctgcgtccgtggggacgaggcgatggttcagatgctgctggatgccggagctgacctgaatgtggaggttgtcagtactcctcataaatatccatccgtccaccccgagacccgccattggacggctctgacttttgctgtgttgcatggacatattcctgtagttcagctcctcctggatgctggggccaaggtggaaggctcagtggagcatggcgaggagaactactcggaaacacccctccagctggcagctgctgtaggaaattttgagctggttagtttgctgttggagcgtggtgccgatcccctgataggaaccatgtacaggaatggaatttctacaaccccccagggtgatatgaactctttcagccaggctgcagcccacggacacaggaatgtgttccgcaaactgctcgcccagccagagaaggagaagagtgatatcctgtccctggaggagattctggccgaggggactgacctggcggagacagccccgccccccttgtgcgccagccgcaacagcaaggccaaactgagggccctgagggaggccatgtatcacagcgctgagcatggctacgtggatgtcacaattgatatcaggagcataggcgtcccgtggactctgcacacgtggctggagtctttgcggatcgccttccagcagcaccgcaggcctctcatccagtgcttgttaaaggagtttaagaccattcaggaggaggaatacacggaggagctcgttacccaaggcctgcccctgatgtttgagatcctgaaagcgagcaagaatgaagtgatcagccagcagctgtgcgtcatcttcacacactgctacgggccctaccccatccccaagctcacagaaatcaaacggaaacagacctcgcgcttggatcctcattttcttaacaataaagaaatgtctgatgttacatttctggtagaaggaagaccattttatgctcacaaagtgctgttatttacagcctctccaaggttcaaagcactcctctccagcaagccgacaaatgatggcacctgcatagagattggttatgtgaaatactccatctttcagctggttatgcagtatctctactatggtggcccagagtcactgctcattaaaaacaatgagatcatggagcttctgtctgctgctaagtttttccagctggaggctttgcagcgacactgtgagattatctgtgcgaaaagcatcaataccgacaactgtgtggatatttacaaccatgccaagtttcttggagtcacagagctctcagcatattgcgaaggctactttctcaaaaacatgatggtcctcattgaaaacgaagcattcaagcagctcctgtatgacaaaaatggtgaagggaccggccaggatgtgctccaggacttacagaggacgttggccatcagaattcagtccatccacttgtcgtcttccaaaggttccgtggtatgaaacgcctagtgcagggaatgcttcccgggaactttccagttctcctgccgcattggctttacacaaacacagacaaattccacctggcacctgtttttggctgggccaaggagctgcctctactgctcccacgtgttcctgttgaaaaacaaaggactttccactggtctgcagatcagatcagctgggtccagagtttaatgggcaactggacaaccaagttaaccccaattgaaagcacccctaggaccattgaacacccactgccggggaccactgtccagtgaatggattgaggccttttaaaggtcactcaggttccaggttgacagttggaggacttcaccgtaccaaccctgaagagattgtattacacattaaggaccttggtagctgtgcttcagcaaacgtcaaccatggtagcaaattggtgaggctgtgaccaataatgaggaaataatctggcaaatttttaggggtgggaacttttttaaatgttcatttaaaaaaaaacaaaaacagggcagtcttgtagtttaaaatatatttctaaaagcttaacagttcgttttcaactaaattgtgtttagggatctgtgtttgagatttttctttatttcttttttttttttaaatagtaagtcacaggtccacactgtgtaaacatgcatctgataagatactgctgatattctaaacaagttgaaataatcttgccttagtgatcatgattacacaaaagaggtgcactgccaataagtatctctaattcaatagttgaaagcaacctgcatgctaatcgtggtttcggggtgagaataaaacacccccacataacatgcatttgcatgggcccgaacctgtgaaatgttacgtttgtgcttcatttttgccaaggtaaaaatgttccatcatttctagctaaaactccatttggtgaaaccaacatatccatttcttttcctagttacggatgatttggggatgcttttgcagaaatgtgttcatagatgatgctgaatgggggaggggggcagcacgtcagagaatttactattaatcccagagttttctctgtattctcagaagatgttaatagtttgttactagccagagagtatgactatgttagattatttttaaagatgaaacatgtatgataggatggattctttctgtattctgagagtgtacagtacaggattattataatgaaagtttatatcaacagggtttcgttggctctgccatatattataagcaaaagagattggtaaagtgccacagtattccagataacttttcagttgcggcctttcttctcgttctttaatttgaaacctagatacatgcagtaaaaactaggagaatgacttttacccttggggacagccaagttttgttgataaacctatttcctagcatgccttcaggaagttgtgccagaccctagattgtgaaggacccactgttcttctgttgtacgagctccctgaaccattgttcagaggaccaatgtcacatcgcttcatgggcatggcccatggagcatctgggtgatatctgtctacagtattggctcttctgcgaggctgatacacaaggcctctcttccacatgatcatttgcaaacctcccccagcccctaccatccaatgtggaaggaaaacaagaactgcctgaagaagagtccaagctacagatacacagcgtgtgcattgcggctgtcaccttcctcctcccacttctgtatcctcagagatgctgcgtggatgtttccttaacctcagctgacttccctgtgaatgtctaatgctagttcagggcctccaggcattgatttgtacagtggtaactcccaatgaggcttctgttatcatttggtgtgctttctctgtcattaaaagaaatgattttcccaggc

SEQ ID NO: 2330 - DNA, 3478 bp, Homo sapiens
  source 1..3478: mol_type = unassigned DNA
aaggtttgcagccgccacggccgctgctgcgctccggtgcagggcaggctggcgccgagcgaaccagggccgggaactgggagccgggagccgggagccagctgcccgcggagctgcggcggcggcggcatctggggtggtctcagtcccacgaacaccgtggccggcgcccggtggctactgcgcccagcggggctcagggaagagcggtctagacactttttattttggaagaaaggggcaagccccggcgggagcttccttcccggcctggctcgctccccattgcgcccagctccggcccggactctggaagatgactccagggtctgctctgtatattccagcggcggcagttccgggaggcagccgaaagtactaacagttggtagcagcggctagtggaaaagtgagccaaggcggcgcggactcggctctccccgcgccccgcggcactcgctgctcctcgccgctccttccctttggctcccaggcggctgcagcatgaagtggcgcagcgatggccaggagaggtaagaagcccgtggtgagaacgctggaggatctgacgctggactcgggttatggtggcgcggcggactcggtgcgctcctccaacttgtctttgtgctgttccgactcgcacccggcgtccccgtatggcgggagctgctggccgcctctagctgactccatgcacagccggcacaacagctttgacactgtcaacactgccctggtggaagactccgaggggctggactgcgccggccagcactgctcgcggctgctgccggacctagacgaggtcccctggactctccaggagctggaggcgctgctgctgcgttcgcgggatccccgggcaggcccggcggtccccggcggcctgcccaaggacgcgctggccaagctgtcgacgctggtgagccgggcgctggtgcgcatagccaaagaggcgcagcgcctgagcctgcgcttcgccaagtgcaccaagtacgagatccagagcgccatggagatcgtgctgtcctggggcctggccgcgcactgtacggcggctgcgctggccgcactgtccctctacaacatgagcagcgccggcggcgaccgcctgggccgcggcaagtcggcccgctgcggcctcaccttctccgtgggccgcgtgtatcgctggatggtggacagccgcgtggcgctgcgcatccacgagcacgccgccatctacctgacagcctgcatggagagcctcttccgggacatctactcgcgggtcgtggcctccggggtgccccggagctgcagtggccctgggtcaggctcgggctccggcccaggcccgagctcgggccctggtgcggcccccgcggcggataaagagcgggaggcgcccgggggaggagcggcgagcggcggcgcctgcagcgcagccagcagcgccagcgggggcagcagctgttgcgccccgccggccgccgcggccgccgcagtcccgccggcagccgccgccaaccaccaccatcaccaccaccatgcgctccacgaggcgcccaagttcaccgtggagaccctggagcacacggtcaacaacgactcggagatctggggtctcctgcagccctaccagcacctgatctgcgggaagaacgccagcggggtgctgtgcctaccagacagcctgaatcttcacagagacccacagcggtcaaacaagccaggggaactgcccatgttcagccagtcggagctgaggaccatcgagcagtctttgctggccacgcgcgtaggcagcatcgccgaattgagtgacctggtgtcccgtgcaatgcatcacctgcagcccctcaatgccaagcaccacggcaatggcacccccctgcaccacaagcagggggcactgtactgggagcccgaggccctgtacaccctttgctatttcatgcactgcccacaaatggaatgggaaaaccccaacgtggagccttccaaagtcaacctccaggtggaaaggcccttcctcgtgctgccgccgctgatggagtggatccgggtggccgtggcgcacgccggccaccgccgcagcttctccatggacagcgacgacgtccgccaggcggcccggctgctgctgcccggcgtggactgcgagccgcgccagctcagggccgacgactgcttttgtgcatctcgaaagctggatgcggtggccatcgaagccaagtttaagcaggacctgggtttccggatgctgaactgtggacgaacagacctggtgaagcaggcagtgtctctgctggggcccgatgggatcaacaccatgagcgaacagggcatgactcccctgatgtatgcctgcgtccgtggggacgaggcgatggttcagatgctgctggatgccggagctgacctgaatgtggaggttgtcagtactcctcataaatatccatccgtccaccccgagacccgccattggacggctctgacttttgctgtgttgcatggacatattcctgtagttcagctcctcctggatgctggggccaaggtggaaggctcagtggagcatggcgaggagaactactcggaaacacccctccagctggcagctgctgtaggcgtcccgtggactctgcacacgtggctggagtctttgcggatcgccttccagcagcaccgcaggcctctcatccagtgcttgttaaaggagtttaagaccattcaggaggaggaatacacggaggagctcgttacccaaggcctgcccctgatgtttgagatcctgaaagcgagcaagaatgaagtgatcagccagcagctgtgcgtcatcttcacacactgctacgggccctaccccatccccaagctcacagaaatcaaacggaaacagacctcgcgcttggatcctcattttcttaacaataaagaaatgtctgatgttacatttctggtagaaggaagaccattttatgctcacaaagtgctgttatttacagcctctccaaggttcaaagcactcctctccagcaagccgacaaatgatggcacctgcatagagattggttatgtgaaatactccatctttcagctggttatgcagtatctctactatggtggcccagagtcactgctcattaaaaacaatgagatcatggagcttctgtctgctgctaagtttttccagctggaggctttgcagcgacactgtgagattatctgtgcgaaaagcatcaataccgacaactgtgtggatatttacaaccatgccaagtttcttggagtcacagagctctcagcatattgcgaaggctactttctcaaaaacatgatggtcctcattgaaaacgaagcattcaagcagctcctgtatgacaaaaatggtgaagggaccggccaggatgtgctccaggacttacagaggacgttggccatcagaattcagtccatccacttgtcgtcttccaaaggttccgtggtatga

SEQ ID NO: 2331 - DNA, 4614 bp, Homo sapiens
  source 1..4614: mol_type = unassigned DNA
atggccaggagaggtaagaagcccgtggtgagaacgctggaggatctgacgctggactcgggttatggtggcgcggcggactcggtgcgctcctccaacttgtctttgtgctgttccgactcgcacccggcgtccccgtatggcgggagctgctggccgcctctagctgactccatgcacagccggcacaacagctttgacactgtcaacactgccctggtggaagactccgaggggctggactgcgccggccagcactgctcgcggctgctgccggacctagacgaggtcccctggactctccaggagctggaggcgctgctgctgcgttcgcgggatccccgggcaggcccggcggtccccggcggcctgcccaaggacgcgctggccaagctgtcgacgctggtgagccgggcgctggtgcgcatagccaaagaggcgcagcgcctgagcctgcgcttcgccaagtgcaccaagtacgagatccagagcgccatggagatcgtgctgtcctggggcctggccgcgcactgtacggcggctgcgctggccgcactgtccctctacaacatgagcagcgccggcggcgaccgcctgggccgcggcaagtcggcccgctgcggcctcaccttctccgtgggccgcgtgtatcgctggatggtggacagccgcgtggcgctgcgcatccacgagcacgccgccatctacctgacagcctgcatggagagcctcttccgggacatctactcgcgggtcgtggcctccggggtgccccggagctgcagtggccctgggtcaggctcgggctccggcccaggcccgagctcgggccctggtgcggcccccgcggcggataaagagcgggaggcgcccgggggaggagcggcgagcggcggcgcctgcagcgcagccagcagcgccagcgggggcagcagctgttgcgccccgccggccgccgcggccgccgcagtcccgccggcagccgccgccaaccaccaccatcaccaccaccatgcgctccacgaggcgcccaagttcaccgtggagaccctggagcacacggtcaacaacgactcggagatctggggtctcctgcagccctaccagcacctgatctgcgggaagaacgccagcggggtgctgtgcctaccagacagcctgaatcttcacagagacccacagcggtcaaacaagccaggggaactgcccatgttcagccagtcggagctgaggaccatcgagcagtctttgctggccacgcgcgtaggcagcatcgccgaattgagtgacctggtgtcccgtgcaatgcatcacctgcagcccctcaatgccaagcaccacggcaatggcacccccctgcaccacaagcagggggcactgtactgggagcccgaggccctgtacaccctttgctatttcatgcactgcccacaaatggaatgggaaaaccccaacgtggagccttccaaagtcaacctccaggtggaaaggcccttcctcgtgctgccgccgctgatggagtggatccgggtggccgtggcgcacgccggccaccgccgcagcttctccatggacagcgacgacgtccgccaggcggcccggctgctgctgcccggcgtggactgcgagccgcgccagctcagggccgacgactgcttttgtgcatctcgaaagctggatgcggtggccatcgaagccaagtttaagcaggacctgggtttccggatgctgaactgtggacgaacagacctggtgaagcaggcagtgtctctgctggggcccgatgggatcaacaccatgagcgaacagggcatgactcccctgatgtatgcctgcgtccgtggggacgaggcgatggttcagatgctgctggatgccggagctgacctgaatgtggaggttgtcagtactcctcataaatatccatccgtccaccccgagacccgccattggacggctctgacttttgctgtgttgcatggacatattcctgtagttcagctcctcctggatgctggggccaaggtggaaggctcagtggagcatggcgaggagaactactcggaaacacccctccagctggcagctgctgtaggaaattttgagctggttagtttgctgttggagcgtggtgccgatcccctgataggaaccatgtacaggaatggaatttctacaaccccccagggtgatatgaactctttcagccaggctgcagcccacggacacaggaatgtgttccgcaaactgctcgcccagccagagaaggagaagagtgatatcctgtccctggaggagattctggccgaggggactgacctggcggagacagccccgccccccttgtgcgccagccgcaacagcaaggccaaactgagggccctgagggaggccatgtatcacagcgctgagcatggctacgtggatgtcacaattgatatcaggagcataggcgtcccgtggactctgcacacgtggctggagtctttgcggatcgccttccagcagcaccgcaggcctctcatccagtgcttgttaaaggagtttaagaccattcaggaggaggaatacacggaggagctcgttacccaaggcctgcccctgatgtttgagatcctgaaagcgagcaagaatgaagtgatcagccagcagctgtgcgtcatcttcacacactgctacgggccctaccccatccccaagctcacagaaatcaaacggaaacagacctcgcgcttggatcctcattttcttaacaataaagaaatgtctgatgttacatttctggtagaaggaagaccattttatgctcacaaagtgctgttatttacagcctctccaaggttcaaagcactcctctccagcaagccgacaaatgatggcacctgcatagagattggttatgtgaaatactccatctttcagctggttatgcagtatctctactatggtggcccagagtcactgctcattaaaaacaatgagatcatggaggtaagggatccattgtggtgttggctatcataggtcccttgggtgagtggcacttctgtaaactcgggtcaccagcctgcatggaagtgtctggaaggacccgtgttgggttttcatttggatgaagacttggggctcttgttccttcctgactcctcagtcctcccaaacaggaagggcttctcatcagagaccttccctggcaggctggggtgctagtgcacttgcttgcctgactgcttttagtagccactgagtgaaacccaattttaactggcattggtggtaagggggcagggaagggaaggaatttgactgaaaagtctgaggctacagctgaggcgttaatagtgatatcatcaggaaatatcctagatgacgtcttctcccttgtcactaataaaagaattatatcccctaaaaacatccctcaaatcacaacactgtctgttcttccaagatatagaagctgagggcagattacagtctcctcctggctttcctcaaactgagcatcccacagtcatgaagcccacgcctgcttccttcactctccccagccccctgtctgcctcttgtaattcaactggttctagccccgcctgtctaggagtcttgtttctgcctgcttttgtccaaagccaagattttcccctgttccttgccaaaagtggaaatcttgttcattttcctaattgaaactgggagctttgaaccagaagccaaaaatcacccccaattaatcctcagcaaaagagccaggatctcggtcagttatctgacgtctggggggtacctggctgatgagagatgtcaggacacaatcaactgttcaagagcagacctcacacagtggttacaacacggaagctgggccagactagtctaaatccaggctccactgcttctgagctgtgtgactgtggacaagttatttaacctcatatcctcagcttccttacccataaaatggggataactatctacctcactgggttttttagaggatcttaaaatatgctaaggtgcttagaacagtgcctggcacacagtgatcgccaataggactatgtattcactgcaggcccacttatcctttcttcctattctgtgaaaccttccgtggtcactctctccccacccaaacacacacatggacacacagtgactctcttgtctccctggactactcctctgatggttttagtctcgaggatgtgggcttatttgtaaacaaaagtgcgctggtgtttacaactaatttttgtgtgtgtgtgaaacagtctcactctgcccccaggctggagtgcagtggtgcaatttcggctcactgcaacctctgcctcctgggttcacaccattctcctgcctcggcctcccgagtagctaggattacaggcacctgccaccacacccagctaatttgttgtatttttagtagagacggggtttcaccatgttggccagatggtctcgaactcctgacctcagcctcccaaagtgttgggattacaggcatgagccactgcacacggctgtttacaactaactgatcacaaccagttatggatttctgtattccttctccactcccactgcttcatttgtctagccttaacaaaa

SEQ ID NO: 2332 - DNA, 667 bp, Homo sapiens
  source 1..667: mol_type = unassigned DNA; mol_type = unassigned DNA
gcggccgccgcagtcccgccggcagccgccgccaaccaccaccatcaccaccaccatgcgctccacgaggcgcccaagttcaccgtggagaccctggagcacacggtcaacaacgactcggagatctggggtctcctgcagccctaccagcacctgatctgcgggaagaacgccagcggtgacctggtgtcccgtgcaatgcatcacctgcagcccctcaatgccaagcaccacggcaatggcacccccctgcaccacaagcagggggcactgtactgggagcccgaggccctgtacaccctttgctatttcatgcactgcccacaaatggaatgggaaaaccccaacgtggagccttccaaagtcaacctccaggtggaaaggcccttcctcgtgctgccgccgctgatggagtggatccgggtggccgtggcgcacgccggccaccgccgcagcttctccatggacagcgacgacgtccgccaggcggcccggctgctgctgcccggcgtggactgcgagccgcgccagctcagggccgacgactgcttttgtgcatctcgaaagctggatgcggtggccatcgaagccaagtttaagcaggacctgggtttccggatgctgaactgtggacgaacagacctggtgaagcaggcagtgtctctgc

SEQ ID NO: 2333 - DNA, 723 bp, Homo sapiens
  source 1..723: mol_type = unassigned DNA; mol_type = unassigned DNA
gtaccggctgaatggttgaaagcttgcacggcctagacagtcgtaaaggggtgctgtgcctaccagacagcctgaatcttcacagagacccacagcggtcaaacaagccaggggaactgcccatgttcagccagtcggagctgaggaccatcgagcagtctttgctggccacgcgcgtaggcagcatcgccgaattgagtgacctggtgtcccgtgcaatgcatcacctgcagcccctcaatgccaagcaccacggcaatggcacccccctgcaccacaagcagggggcactgtactgggagcccgaggccctgtacaccctttgctatttcatgcactgcccacaaatggaatgggaaaaccccaacgtggagccttccaaagtcaacctccaggtggaaaggcccttcctcgtgctgccgccgctgatggagtggatccgggtggccgtggcgcacgccggccaccgccgcagcttctccatggacagcgacgacgtccgccaggcggcccggctgctgctgcccggcgtggactgcgagccgcgccagctcagggccgacgactgcttttgtgcatctcgaaagctggatgcggtggccatcgaagccaagtttaagcaggacctgggtttccggatgctgaactgtggacgaacagacctggtgaagcaggcagtgtctctgctggggcccgatgggatcaacaccatgagcgaacagg

SEQ ID NO: 2334 - DNA, 4107 bp, Homo sapiens
  source 1..4107: mol_type = unassigned DNA
aaagagctccagaaagacgacagggacgaggctgcagatgggaagggagtgctagcggacaccttaggcttgggtccacaatcagggagccccaaatagaaataacacggggcgctgattggttttccgccgctccagaccctgcgcttggtgcttcaagtgactcatccttatgttcacatgatcgccgagagggataatattcccagatcagttacctcctagcctttcctagtcacattatccccaggctacagatgaggaaactgaggcccaaggattccagagagcctgccccggggtcaccggtgcggtccggatgtctccaaaggctctcccactactctggaattcagaggcccttcctcgtgctgccgccgctgatggagtggatccgggtggccgtggcgcacgccggccaccgccgcagcttctccatggacagcgacgacgtccgccaggcggcccggctgctgctgcccggcgtggactgcgagccgcgccagctcagggccgacgactgcttttgtgcatctcgaaagctggatgcggtggccatcgaagccaagtttaagcaggacctgggtttccggatgctgaactgtggacgaacagacctggtgaagcaggcagtgtctctgctggggcccgatgggatcaacaccatgagcgaacagggcatgactcccctgatgtatgcctgcgtccgtggggacgaggcgatggttcagatgctgctggatgccggagctgacctgaatgtggaggttgtcagtactcctcataaatatccatccgtccaccccgagacccgccattggacggctctgacttttgctgtgttgcatggacatattcctgtagttcagctcctcctggatgctggggccaaggtggaaggctcagtggagcatggcgaggagaactactcggaaacacccctccagctggcagctgctgtaggaaattttgagctggttagtttgctgttggagcgtggtgccgatcccctgataggaaccatgtacaggaatggaatttctacaaccccccagggtgatatgaactctttcagccaggctgcagcccacggacacaggaatgtgttccgcaaactgctcgcccagccagagaaggagaagagtgatatcctgtccctggaggagattctggccgaggggactgacctggcggagacagccccgccccccttgtgcgccagccgcaacagcaaggccaaactgagggccctgagggaggccatgtatcacagcgctgagcatggctacgtggatgtcacaattgatatcaggagcataggcgtcccgtggactctgcacacgtggctggagtctttgcggatcgccttccagcagcaccgcaggcctctcatccagtgcttgttaaaggagtttaagaccattcaggaggaggaatacacggaggagctcgttacccaaggcctgcccctgatgtttgagatcctgaaagcgagcaagaatgaagtgatcagccagcagctgtgcgtcatcttcacacactgctacgggccctaccccatccccaagctcacagaaatcaaacggaaacagacctcgcgcttggatcctcattttcttaacaataaagaaatgtctgatgttacatttctggtagaaggaagaccattttatgctcacaaagtgctgttatttacagcctctccaaggttcaaagcactcctctccagcaagccgacaaatgatggcacctgcatagagattggttatgtgaaatactccatctttcagctggttatgcagtatctctactatggtggcccagagtcactgctcattaaaaacaatgagatcatggagcttctgtctgctgctaagtttttccagctggaggctttgcagcgacactgtgagattatctgtgcgaaaagcatcaataccgacaactgtgtggatatttacaaccatgccaagtttcttggagtcacagagctctcagcatattgcgaaggctactttctcaaaaacatgatggtcctcattgaaaacgaagcattcaagcagctcctgtatgacaaaaatggtgaagggaccggccaggatgtgctccaggacttacagaggacgttggccatcagaattcagtccatccacttgtcgtcttccaaaggttccgtggtatgaaacgcctagtgcagggaatgcttcccgggaactttccagttctcctgccgcattggctttacacaaacacagacaaattccacctggcacctgtttttggctgggccaaggagctgcctctactgctcccacgtgttcctgttgaaaaacaaaggactttccactggtctgcagatcagatcagctgggtccagagtttaatgggcaactggacaaccaagttaaccccaattgaaagcacccctaggaccattgaacacccactgccggggaccactgtccagtgaatggattgaggccttttaaaggtcactcaggttccaggttgacagttggaggacttcaccgtaccaaccctgaagagattgtattacacattaaggaccttggtagctgtgcttcagcaaacgtcaaccatggtagcaaattggtgaggctgtgaccaataatgaggaaataatctggcaaatttttaggggtgggaacttttttaaatgttcatttaaaaaaaaacaaaaacagggcagtcttgtagtttaaaatatatttctaaaagcttaacagttcgttttcaactaaattgtgtttagggatctgtgtttgagatttttctttatttcttttttttttttaaatagtaagtcacaggtccacactgtgtaaacatgcatctgataagatactgctgatattctaaacaagttgaaataatcttgccttagtgatcatgattacacaaaagaggtgcactgccaataagtatctctaattcaatagttgaaagcaacctgcatgctaatcgtggtttcggggtgagaataaaacacccccacataacatgcatttgcatgggcccgaacctgtgaaatgttacgtttgtgcttcatttttgccaaggtaaaaatgttccatcatttctagctaaaactccatttggtgaaaccaacatatccatttcttttcctagttacggatgatttggggatgcttttgcagaaatgtgttcatagatgatgctgaatgggggaggggggcagcacgtcagagaatttactattaatcccagagttttctctgtattctcagaagatgttaatagtttgttactagccagagagtatgactatgttagattatttttaaagatgaaacatgtatgataggatggattctttctgtattctgagagtgtacagtacaggattattataatgaaagtttatatcaacagggtttcgttggctctgccatatattataagcaaaagagattggtaaagtgccacagtattccagataacttttcagttgcggcctttcttctcgttctttaatttgaaacctagatacatgcagtaaaaactaggagaatgacttttacccttggggacagccaagttttgttgataaacctatttcctagcatgccttcaggaagttgtgccagaccctagattgtgaaggacccactgttcttctgttgtacgagctccctgaaccattgttcagaggaccaatgtcacatcgcttcatgggcatggcccatggagcatctgggtgatatctgtctacagtattggctcttctgcgaggctgatacacaaggcctctcttccacatgatcatttgcaaacctcccccagcccctaccatccaatgtggaaggaaaacaagaactgcctgaagaagagtccaagctacagatacacagcgtgtgcattgcggctgtcaccttcctcctcccacttctgtatcctcagagatgctgcgtggatgtttccttaacctcagctgacttccctgtgaatgtctaatgctagttcagggcctccaggcattgatttgtacagtggtaactcccaatgaggcttctgttatcatttggtgtgctttctctgtcattaaaagaaatgattttcccaggc

SEQ ID NO: 2335 - DNA, 811 bp, Homo sapiens
  source 1..811: mol_type = unassigned DNA
agcgtttgtctcgttaatggagaacacagtcacaggatcaaaagggctaatttcaggataattctcctgaaatcctgctaatttcaggataattcactgcttccagaattttagagtactggtaaagaatgaagtgatcagccagcagctgtgcgtcatcttcacacactgctacgggccctaccccatccccaagctcacagaaatcaaacggaaacagacctcgcgcttggatcctcattttcttaacaataaagaaatgtctgatgttacatttctggtagaaggaagaccattttatgctcacaaagtgctgttatttacagcctctccaaggttcaaagcactcctctccagcaagccgacaaatgatggcacctgcatagagattggttatgtgaaatactccatctttcagctggttatgcagtatctctactatggtggcccagagtcactgctcattaaaaacaatgagatcatggagcttctgtctgctgctaagtttttccagctggaggctttgcagcgacactgtgagattatctgtgcgaaaagcatcaataccgacaactgtgtggatatttacaaccatgccaagtttcttggagtcacagagctctcagcatattgcgaaggctactttctcaaaaacatgatggtcctcattgaaaacgaagcattcaagcagctcctgtatgacaaaaatggtgaagggaccggccaggatgtgctccaggacttacagaggacgttggccatcagaattcagtccatccacttgtcgtcttccaaaggttccgtggtatga

SEQ ID NO: 2336 - DNA, 1805 bp, Homo sapiens
  source 1..1805: mol_type = unassigned DNA
ggagggaggccaagcaggaaggggggtgccgtccccttgtgccggatcctatataaggaagagggatgtgagcagagtggtctgggcttcaccgtccctccagtggacttgggggctgagcataaagatgcctaggagaggctactccaagcctgggtcctggggcagcttctgggccatgctgaccttggtgggcctggtcacccatgcagcacagagagccgatgttggcggggaggcagctggcacctccatcaaccactcccaggcggtgctccagcgcttgcaggagctgctgcggcagggcaacgccagcgatgtggttctgcgggtgcaggctgcgggcaccgatgaggtccgggtattccacgcccaccgcctgctgctgggactgcacagtgagctgttcctggagctgctaagtaaccagagcgaggcggtgctgcaggagccacaggactgcgccgctgtcttcgacaagttcatcaggtacctgtactgcggggagctgaccgtgctgctgacccaggccatccccctgcacagactggccaccaagtacggcgtgtcctccctgcagcgcggcgtggccgactacatgcgcgcgcacctggcgggaggcgcgggcccggcggtgggctggtaccactacgcggtgggcaccggggacgaggccctgcgcgagagctgcctgcagttcctggcctggaacctgtcggccgtggcggccagcaccgagtggggcgccgtgagccccgagctgctctggcagctcctgcaacgctcggacctggtgctgcaggatgaactggagctgttccacgcgctggaggcctggctgggtcgcgcgcggccgccccctgccgtggccgagcgggcgctgcgcgccatacgctaccccatgatcccaccggcacagctgttccagctgcaggcgcgctcggcagccctggcgcgccacggccccgcggtggccgacctcctgctgcaggcctaccagttccacgccgcgtcgccgctgcactacgccaagttcttcgacgtcaacggcagcgccttcctgccccgcaactacctcgcgcccgcctggggcgccccgtgggtcatcaacaacccggcccgcgacgaccgcagcaccagcttccagacgcagctgggcccgagtggccacgacgcgggccgccgggtcacctggaacgtgctcttctcgccgcgctggctgcccgtcagcctgcggcccgtttacgcggacgccgcgggcactgctctgcccgccgcgcgcccggaggacggccgaccgcggctggtggtgacgccggccagcagcggcggcgacgcggcgggcgtgagcttccagaagacggtgctggtgggggcgcgccagcagggccgcctgctggtccgccacgcctacagcttccaccagagcagcgaggaggccggcgacttcctggcgcacgccgacctgcagcggcgcaactccgagtacctggttgagaacgccctgcacctgcacctcatcgtcaagcccgtataccacacccttatccggacccccaagtagcctcggggtctgggaataaaggcctggcctaggtggtccctgtgggtctgggaagggcaaggcgagcctggaggtggcaacaagcctggtcccctggatggccaggcgccggccaccctagggctggggtggagtccaggtgaggcgtggtagacaagatgcctggtttcaagagctgatttcacagctgacttgaaggaacgttcttggtcctgaataaaccgatgctcagagtggtaaa

SEQ ID NO: 2337 - DNA, 4680 bp, Homo sapiens
  source 1..4680: mol_type = unassigned DNA
acttccttttcgtggcactataaagggtgctgcacggcgcttgcatctcttcgcctctcggagctggaaatgcagctattgagatcttcgaatgctgcggagctggaggcggaggcagctggggaggtccgagcgatgtgaccaggccgccatcgctcgtctcttcctctctcctgccgcctcctgtctcgaaaataacttttttagtctaaagaaagaaagacaaaagtagtcgtccgcccctcacgccctctcttcctctcagccttccgcccggtgaggaagcccggggtggctgctccgccgtcggggccgcgccgccgagccccagccgccccgggccgcccccgcacgccgcccccatgcatcccttctacacccgggccgccaccatgataggcgagatcgccgccgccgtgtccttcatctccaagtttctccgcaccaaggggctcacgagcgagcgacagctgcagaccttcagccagagcctgcaggagctgctggcagaacattataaacatcactggttcccagaaaagccatgcaagggatcgggttaccgttgtattcgcatcaaccataaaatggatcctctgattggacaggcagcacagcggattggactgagcagtcaggagctgttcaggcttctcccaagtgaactcacactctgggttgacccctatgaagtgtcctacagaattggagaggatggctccatctgtgtgctgtatgaagcctcaccagcaggaggtagcactcaaaacagcaccaacgtgcaaatggtagacagccgaatcagctgtaaggaggaacttctcttgggcagaacgagcccttccaaaaactacaatatgatgactgtatcaggttaagatatagtctgtggatggatcatctgatgatgatggataaatttgatttttgctttgggtgggctcctcttggggatggattatggaatttaaaccatgtcacagctgtgaagatctggcacaagatagaatggtaaaaaaaaaaaaaattttaagtgacagtgccatagtttggacagtacctttcaatgattaattttaatagcctgtgagtccaagtaaatgatcactttatttgctagggagggaagtcctagggtggtttcagtttctcccagacatacctaaatttttacatcaatccttttaaagaaaatctgtatttcaaagaatctttctctgcagtaaatctcgcaggggaatttgcactattacacttgaaagttgttattgttaaccttttcggcagcttttaataggaaagttaaacgttttaaacatggtagtactggaaattttacaagacttttacctagcacttaaatatgtataaatgtacataaagacaaactagtaagcatgacctggggaaatggtcagaccttgtattgtgtttttggccttgaaagtagcaagtgaccagaatctgccatggcaacaggctttaaaaaagacccttaaaaagacactgtctcaactgtggtgttagcaccagccagctctctgtacatttgctagcttgtagttttctaagactgagtaaacttcttatttttagaaagtggaggtctggtttgtaactttccttgtacttaattgggtaaaagtcttttccacaaaccaccatctattttgtgaactttgttagtcatcttttatttggtaaattatgaactggtgtaaatttgtacagttcatgtatattgattgtggcaaagttgtacagatttctatattttggatgagaaatttttcttctctctataataaatcgtttcttatcttggcattttaatcaatctcttgtcatgattatagaggtttagctaaaagtattttttcttagaagacaggttctataaactgaatctctgttgcacactggtcatgctggaaaaacatttgatgaggaatgaagatgctctgtatatacatgtttaggttttacaggaaacacaggagtagcatgttttaaaaatttctaaagtcaaaacatggacacattcacaggctaatgatctcatgaaataaggataagagaccacggtagcatctaccaaaaatgtgatactcaaaggattacatttcattgcttccctgttgaagtgaagatataaatgttccattctgacccacctttgaaaaacaattactttgccccatggattctttgttcaattagaaatttccccggggcaggtgacccatagtcttaaagaacaggctaaacaccacagagagattggttgctttttgcttttcatcacctgcaagatgtacataaaaatcacataagctggaattcaacaaaaggtatgtttatgaacttttattctcaaaagttgaaatgctgactttctcgattcctcattttcagacttttatttcagataaatactaaaaacctaagtgaaccttgataatgctgtagtgtagattacttcactaccccatataatagaaggacttgctgtttagttgtagaggataacagcgtttttcagtggaaattgaaagtggaaaaattgaattttgctctacacagttaacatatagtggcctttttttggtatatatgtaaacatgttgacactggaaatacgcagtctgaaataaaattagtaattacttgaaattagtaatctcaaataacttttaagaagttatttctacacccaggaataaattattctgattttgtagacaacacaggaataggccactgaatatgcaggtatttagagtacaaatgtctgtggatattattggcacaccattctcgagagttagaattcgtagacccgcaacacatggactacccttgccaattgttatggttttatttttaaacctattctgtgaaaaagctcctcggtatttcaaacttgaattacaataaaaacaccaggtagggttgtttttaaatgggtctcaccccagtgctgactactgttgtttaccaactacatttcatctggtaactccattgaaactaagtacctcaaccattttttttttttatcataaagccttttttcaaatggaaagttgtttttgaagatcttgacatcagactttttcaatctttgaaaatgatggaaacagttaataaaaatgtttattttagaattcaggtgatgtctggcttgtgaggagctgtttataagtttgtctttgaaaaaggcttgcacacatcactctgagaccagctgtttcctgtgactttaaccttaccttccccagacaattgagctgaacctgtatctgcggtacagtagctgtttgtgatgtatttcttgttcactgtttctggggaatgttttgaaatattttattataaatccttttaagataggatgactactttcaaaattattgttgcctttggcaccaggaattcatagttgtgattggcagtaagtttgaggagtgttactttctaagttttaacaggtagttttgaaattatttccttttttccaaatttaagtagtgcctccctctgtaatgttgaaacaaggcttcaagtggattgtatagcaagagttaccctggttcatgcaggataatgcggctgttatctttgtcatctggaatgggaatctcatgtctttatccttatgtgcaatatttctataataatagactggaaaggccaccagaaagtggctttcaggtacattgcacaaatagtttccttaagtcattataactcacacattgcaagtaattaattttgttttgtataggtgttgcagtttatgaaattggccttcaagttaaaaggaaggaagccgtattcccgatggctagtgtttaatgactacaggtttccaggctccctttaatcttgggagcaaataaatctactattggacttctccctgcgtgacttttaacatttctgatactctctcttcttcctctttacagaagagaggtatgataactgaagttgtactttgcatattgaagtttaaagatacttcctctccccttttcacccctatttcaaatgatgtgataaaatcctcttgataggctatatggagaacatttgtcaatagttttatctatgcatggaagtcttcaaaaagtatatcttggattgtctaaaactgaatagatttcttatttatctgaaggtatacagactgccaacattttagacttatctctcagtctctgccactgaacttttatatatggctgctatcaaaatataaccggtttattttcatatttggaactaatataacagtatcacaaaatcttttacagtaagatagtttgtaataccagccgacccagctgcttaactgagtccttaaatcatttaatatatgggactgtaaatagagaaatctgtacattatgagatctgatttctggttatgcctatagatctttattttctttatccctatagatcattttcttctgatgttaagtgttatatttttgaaatgctcctaaacaagtaagccttagattgtattaatcctgaggattgataccatttcctcaacactttgtggagtatgattgacaccagtttttttttgactgcaggtttaacttggcttatcacttttcgtattgctcagtatgtccaagataggaataaaaaaatgtagttcaa

SEQ ID NO: 2338 - DNA, 504 bp, Homo sapiens
  source 1..504: mol_type = unassigned DNA
agcggttccccgcgaggctttaggggctggacggagggcgcccccttccccccagctggcaaaacggagaggagaagacaacacgcacaacaaagaaacttaagcccaccgaggcgggagctgcggtccgaggaccgtcggcggatttggggacaaaggagccgtggggctgggaacattataaacatcactggttcccagaaaagccatgcaagggatcgggttaccgttgtattcgcatcaaccataaaatggatcctctgattggacaggcagcacagcggattggactgagcagtcaggagctgttcaggcttctcccaagtgaactcacactctgggttgacccctatgaagtgtcctacagaattggagaggatggctccatctgtgtgctgtatgaagcctcaccagcaggaggtagcactcaaaacagcaccaacgtgcaaatggtagacagccgaatcagctgtaaggaggaacttctcttgggcagaacgagcc

SEQ ID NO: 2339 - DNA, 1275 bp, Homo sapiens
  source 1..1275: mol_type = unassigned DNA; mol_type = unassigned DNA
aaaaacgctgcccggggaaagtccgggcagagcccgagcagcggccagggtaacgctgtcttgtggacccgcacttcccacccgagacctctcactgagcccgagccgcgcgcgacatgagccacgggaagggaaccgacatgctcccggagatcgccgccgccgtgggcttcctctccagcctcctgaggacccggggctgcgtgagcgagcagaggcttaaggtcttcagcggggcgctccaggaggcactcacagagcactacaaacaccactggtttcccgaaaagccgtccaagggctccggctaccgctgcattcgcatcaaccacaagatggaccccatcatcagcagggtggccagccagatcggactcagccagccccagctgcaccagctgctgcccagcgagctgaccctgtgggtggacccctatgaggtgtcctaccgcattggggaggacggctccatctgcgtcttgtacgaggaggccccactggccgcctcctgtgggctcctcacctgcaagaaccaagtgctgctgggccggagcagcccctccaagaactacgtgatggcagtctccagctaggcccttccgcccccgccctgggcgccgccgtgctcatgctgccgtgacaacaggccaccacatacctcaacctggggaactgtatttttaaatgaagagctatttatatatattatttttttttaagaaaggaggaaaagaaaccaaaagttttttttaagaaaaaaaatccttcaagggagctgcttggaagtggcctccccaggtgcctttggagagaactgttgcgtgcttgagtctgtgagccagtctctgcctccttttcaactctccacattttgtattgccttcccagacctgcttccagtctttattgctttaaagttcactttgggcccacagacccaagagctaattttctggtttgtgggttgaaacaaagctgtgaatcactgcaggctgtgttcttgcatcttgtctgcaaacaggtccctgcctttttagaagcagcctcatggtctcatgcttaatcttgtctctcttctcttctttatgatgttcactttaaaaacaacaaaacccctgagctggactgttgagcaggcctgtctctcctattaagtaaaaataaatagtagtagtatgtttgtaagctattctgacagaaaagacaaaggttactaattgtatgatagtgtttttatatggaagaatgtacagcttatggacaaatgtacacctt

SEQ ID NO: 2340 - DNA, 2712 bp, Homo sapiens
  source 1..2712: mol_type = unassigned DNA; mol_type = unassigned DNA
cagggtaacgctgtcttgtggacccgcacttcccacccgagacctctcactgagcccgagccgcgcgcgacatgagccacgggaagggaaccgacatgctcccggagatcgccgccgccgtgggcttcctctccagcctcctgaggacccggggctgcgtgagcgagcagaggcttaaggtcttcagcggggcgctccaggaggcactcacagagcactacaaacaccactggtttcccgaaaagccgtccaagggctccggctaccgctgcattcgcatcaaccacaagatggaccccatcatcagcagggtggccagccagatcggactcagccagccccagctgcaccagctgctgcccagcgagctgaccctgtgggtggacccctatgaggtgtcctaccgcattggggaggacggctccatctgcgtcttgtacgaggaggccccactggccgcctcctgtgggctcctcacctgcaagaaccaagtgctgctgggccggagcagcccctccaagaactacgtgatggcagtctccagctaggcccttccgcccccgccctgggcgccgccgtgctcatgctgccgtgacaacaggccaccacatacctcaacctggggaactgtatttttaaatgaagagctatttatatatattatttttttttaagaaaggaggaaaagaaaccaaaagttttttttaagaaaaaaaatccttcaagggagctgcttggaagtggcctccccaggtgcctttggagagaactgttgcgtgcttgagtctgtgagccagtgtctgcctataggagggggagctgttagggggtagacctagccaaggagaagtgggagacgtttggctagcaccccaggaagatgtgagagggagcaagcaaggttagcaactgtgaacagagaggtcgggatttgccctgggggaggaagagaggccaagttcagagctctctgtctcccccagccagacacctgcatccctggctcctctattactcaggggcattcatgcctggacttaaacaatactatgttatcttttcttttatttttctaatgaggtcctgggcagagagtgaaaaggcctctcctgattcctactgtcctaagctgcttttcttgaaatcatgacttgtttctaattctaccctcaggggcctgtagatgttgctttccagccaggaatctaaagctttgggttttctgaggggggggaggagggaactggaggttattggggttaggatggaagggaactctgcacaaaacctttgctttgctagtgctgctttgtgtgtatgtgtggcaaataatttgggggtgatttgcaatgaaattttgggacccaaagagtatccactggggatgttttttggccaaaactcttccttttggaaccacatgaaagtcttgatgctgctgccatgatccctttgagaggtggctcaaaagctacagggaactccaggtcctttattactgccttcttttcaaaagcacaactctcctctaaccctcccctcccccttcccttctggtcgggtcatagagctaccgtattttctaggacaagagttctcagtcactgtgcaatatgccccctgggtcccaggagggtctggaggaaaactggctatcagaacctcctgatgccctggtgggcttagggaaccatctctcctgctctccttgggatgatggctggctagtcagccttgcatgtattccttggctgaatgggagagtgccccatgttctgcaagactacttggtattcttgtagggccgacactaaataaaagccaaaccttgggcactgttttttctccctggtgctcagagcacctgtgggaaaggttgctgtctgtctcagtacaatccaaatttgtcgtagacttgtgcaatatatactgttgtgggttggagaaaagtggaaagctacactgggaagaaactcccttccttcaatttctcagtgacattgatgaggggtcctcaaaagacctcgagtttcccaaaccgaatcaccttaagaaggacagggctagggcatttggccaggatggccaccctcctgctgttgccccttagtgaggaatcttcaccccacttcctctacccccaggttctcctccccacagccagtcccctttcctggatttctaaactgctcaattttgactcaaaggtgctatttaccaaacactctccctacccattcctgccagctctgcctccttttcaactctccacattttgtattgccttcccagacctgcttccagtctttattgctttaaagttcactttgggcccacagacccaagagctaattttctggtttgtgggttgaaacaaagctgtgaatcactgcaggctgtgttcttgcatcttgtctgcaaacaggtccctgcctttttagaagcagcctcatggtctcatgcttaatcttgtctctcttctcttctttatgatgttcactttaaaaacaacaaaacccctgagctggactgttgagcaggcctgtctctcctattaagtaaaaataaatagtagtagtatgtttgtaagctattctgacagaaaagacaaaggttactaattgtatgatagtgtttttatatggaagaatgtacagcttatggacaaatgtacacctttttgttactttaataaaaatgtagtaggataaa

SEQ ID NO: 2341 - DNA, 1275 bp, Homo sapiens; identical to SEQ ID NO: 2339
  source 1..1275: mol_type = unassigned DNA; mol_type = unassigned DNA

SEQ ID NO: 2342 - DNA, 2712 bp, Homo sapiens; identical to SEQ ID NO: 2340
  source 1..2712: mol_type = unassigned DNA; mol_type = unassigned DNA

SEQ ID NO: 2343 - DNA, 2895 bp, Homo sapiens
  source 1..2895: mol_type = unassigned DNA; mol_type = unassigned DNA
atctcctaggctgaagctcctgaggggactcacatcagttatcttgctgctccagaagggtgggagatggcagttttcccaagctccggtctccccagatgtctgctcaccctcattctcctccagctgcccaaactggattcagctccctttgacgtgattggacccccggagcccatcctggccgttgtgggtgaggacgccgagctgccctgtcgcctgtctccgaacgcgagcgccgagcacttggagctacgctggttccgaaagaaggtttcgccggccgtgctggtgcatagggacgggcgcgagcaggaagccgagcagatgcccgagtaccgcgggcgggcgacgctggtccaggacggcatcgccaaggggcgcgtggccttgaggatccgtggcgtcagagtctctgacgacggggagtacacgtgctttttcagggaggatggaagctacgaagaagccctggtgcatctgaaggtggctgctctgggctctgaccctcacatcagtatgcaagttcaagagaatggagaaatctgtctggagtgcacctcagtgggatggtacccagagccccaggtgcagtggagaacttccaagggagagaagtttccatctacatcagagtccaggaatcctgatgaagaaggtttgttcactgtggctgcttcagtgatcatcagagacacttctgcgaaaaatgtgtcctgctacatccagaatctccttcttggccaggagaagaaagtagaaatatccataccagcttcctccctcccaaggctgactccctggatagtggctgtggctgtcatcctgatggttctaggacttctcaccattgggtccatatttttcacttggagactatacaacgaaagacccagagagaggaggaatgaattcagctctaaagagagactcctggaagaactcaaatggaaaaaggctaccttgcatgcagttgatgtgactctggacccagacacagctcatccccacctctttctttatgaggattcaaaatctgttcgactggaagattcacgtcagaaactgcctgagaaaacagagagatttgactcctggccctgtgtgttgggccgtgagaccttcacctcaggaaggcattactgggaggtggaggtgggagacaggactgactgggcaatcggcgtgtgtagggagaatgtgatgaagaaaggatttgaccccatgactcctgagaatgggttctgggctgtagagttgtatggaaatgggtactgggccctcactcctctccggacccctctcccattggcagggcccccacgccgggttgggattttcctagactatgaatcaggagacatctccttctacaacatgaatgatggatctgatatctatactttctccaatgtcactttctctggccccctccggcccttcttttgcctatggtctagcggtaaaaagcccctgaccatctgcccaattgctgatgggcctgagagggtcacagtcattgctaatgcccaggacctttctaaggagatcccattgtcccccatgggggaggactctgcccctagggatgcagacactctccattctaagctaatccctacccaacccagccaaggggcaccttaaggaatatctcagctcatctgttttcctttcctctaacccctctcctccatagccttctgaggcttcacctgctagctttacccagtctgtttcttcctgttgggtggcaattaattaatcctgtgaaggttacattgctgctgctagagagggtggggattgcaccttccaaatctgtttctgtaccaatatttgggggatggaggggtgactcaaactgcttctagtgttctcctaatcccttaagactagaacctataggaaactacttggagcaaactcaaaggacagattagggatcgagattgggtcaggttagcatggggttgtggttgaaatatcttggtatccaggataagggtatgtggaaaaacaggctttaggcaagtggaaaattcaaaatgtgctgtgaaaggacaatctcaggctgaaatcccataaaggaacttggagggaatattatgatggagggaagtgaggtgaatccaggcacatgatgaacacctggctcatccatagagttttcacagcctatatcgcaaattttctaagccacgtcctataggacagaggagactggccccacttctatgggtctgagctgtggaaaagggagagcagagaggaactgagatgagcagggatgaagggtcaggcagaaagcgtgatagaggagagaatttttgacaaaactcaaaagttgtttgcacagctgttctttgtaccctgttcctttctctgcgccctcctgtttctcccttgcctggaagtcattccaccctcaatttgttgatccacaagtttccagttgtcctcttctttttgttatagcatctctctatttcaaagacattcctagaagtcatccttcagtgatatcaccacttgctcagtcaccatctcaaccttatgtcacctcagccctcatctcaatgcccaaaccccttacacacaccttcagttagcttcaactgcctccgtttccacactgtgcacctttcactttccctacccagctttcctacatgctgcctctcctcagggtcccctgaatgctgcatcattgtgttcagtgcagctggactgattgcacctgtgtatttgcccctgagcactttcctttacacatgtggcttgtcttgccaatagactccaggcttataccttccatttccatcgtattctccagtttccaggatagacgttgctcatcgtctttacctaataaataagtttgtctgattgctg

SEQ ID NO: 2344 - DNA, 2266 bp, Homo sapiens
  source 1..2266: mol_type = unassigned DNA; mol_type = unassigned DNA
ctgctccagaagggtgggagatggcagttttcccaagctccggtctccccagatgtctgctcaccctcattctcctccagctgcccaaactggattcagctccctttgacgtgattggacccccggagcccatcctggccgttgtgggtgaggacgccgagctgccctgtcgcctgtctccgaacgcgagcgccgagcacttggagctacgctggttccgaaagaaggtttcgccggccgtgctggtgcatagggacgggcgcgagcaggaagccgagcagatgcccgagtaccgcgggcgggcgacgctggtccaggacggcatcgccaaggggcgcgtggccttgaggatccgtggcgtcagagtctctgacgacggggagtacacgtgctttttcagggaggatggaagctacgaagaagccctggtgcatctgaaggtggctgctctgggctctgaccctcacatcagtatgcaagttcaagagaatggagaaatctgtctggagtgcacctcagtgggatggtacccagagccccaggtgcagtggagaacttccaagggagagaagtttccatctacatcagagtccaggaatcctgatgaagaaggtttgttcactgtggctgcttcagtgatcatcagagacacttctgcgaaaaatgtgtcctgctacatccagaatctccttcttggccaggagaagaaagtagaaatatccataccagcttcctccctcccaaggctgactccctggatagtggctgtggctgtcatcctgatggttctaggacttctcaccattgggtccatatttttcacttggagactatacaacgaaagacccagagagaggaggaatgaattcagctctaaagagagactcctggaagaactcaaatggaaaaaggctaccttgcatgcagttgatgtgactctggacccagacacagctcatccccacctctttctttatgaggattcaaaatctgttcgactggaagattcacgtcagaaactgcctgagaaaacagagagatttgactcctggccctgtgtgttgggccgtgagaccttcacctcaggaaggcattactgggaggtggaggtgggagacaggactgactgggcaatcggcgtgtgtagggagaatgtgatgaagaaaggatttgaccccatgactcctgagaatgggttctgggctgtagagttgtatggaaatgggtactgggccctcactcctctccggacccctctcccattggcagggcccccacgccgggttgggattttcctagactatgaatcaggagacatctccttctacaacatgaatgatggatctgatatctatactttctccaatgtcacagtcattgctaatgcccaggacctttctaaggagatcccattgtcccccatgggggaggactctgcccctagggatgcagacactctccattctaagctaatccctacccaacccagccaaggggcaccttaaggaatatctcagctcatctgttttcctttcctctaacccctctcctccatagccttctgaggcttcacctgctagctttacccagtctgtttcttcctgttgggtggcaattaattaatcctgtgaaggttacattgctgctgctagagagggtggggattgcaccttccaaatctgtttctgtaccaatatttgggggatggaggggtgactcaaactgcttctagtgttctcctaatcccttaagactagaacctataggaaactacttggagcaaactcaaaggacagattagggatcgagattgggtcaggttagcatggggttgtggttgaaatatcttggtatccaggataagggtatgtggaaaaacaggctttaggcaagtggaaaattcaaaatgtgctgtgaaaggacaatctcaggctgaaatcccataaaggaacttggagggaatattatgatggagggaagtgaggtgaatccaggcacatgatgaacacctggctcatccatagagttttcacagcctatatcgcaaattttctaagccacgtcctataggacagaggagactggccccacttctatgggtctgagctgtggaaaagggagagcagagaggaactgagatgagcagggatgaagggtcaggcagaaagcgtgatagaggagagaatttttgacaaaactcaaaagttgtttgcacagctgttctttgtaccctgttcctttctctgcgccctcctgtttctccctt

SEQ ID NO: 2345 - DNA, 583 bp, Homo sapiens
  source 1..583: mol_type = unassigned DNA; mol_type = unassigned DNA
gtcgaccgcgcgggaccgttaaatttgaaacttggcggctaggggtgtgggcttgaggtggccggtttgttagggagtcgtgtacgtgccttggtcgcttctgtagctccgagggcaggttgcggaagaaagcccaggcggtctgtggcccagaggaaaggcctgcagcaggacgaggacctgagccaggaatgcaggatggcggcggtgaagaaggaagggggtgctctgagggcatttgaatatgaaattcgattttacactggaaatgaccctctggatgtttgggataggtatatcagctggacagagcagaactatcctcaaggtgggaaggagagtaatatgtcaacgttattagaaagagctgtagaagcactacaaggagaaaaacgatattatagtgatcctcgatttctcaatctctggcttaaattagggcgtttatgcaatgagcctttggatatgtacagttacttgcacaaccaagggattggtgtttcacttgctcagttctatatctcatgggcagaagaatatgaagctagagaaaactttaggaaagcagatgcgatatttcagg

SEQ ID NO: 2346 - DNA, 3725 bp, Homo sapiens
  source 1..3725: mol_type = unassigned DNA; mol_type = unassigned DNA
gaccgcgcgggaccgttaaatttgaaacttggcggctaggggtgtgggcttgaggtggccggtttgttagggagtcgtgtacgtgccttggtcgcttctgtagctccgagggcaggttgcggaagaaagcccaggcggtctgtggcccagaggaaaggcctgcagcaggacgaggacctgagccaggaatgcaggatggcggcggtgaagaaggaagggggtgctctgagtgaagccatgtccctggagggagatgaatgggaactgagtaaagaaaatgtacaacctttaaggcaagggcggatcatgtccacgcttcagggagcactggcacaagaatctgcctgtaacaatactcttcagcagcagaaacgggcatttgaatatgaaattcgattttacactggaaatgaccctctggatgtttgggataggtatatcagctggacagagcagaactatcctcaaggtgggaaggagagtaatatgtcaacgttattagaaagagctgtagaagcactacaaggagaaaaacgatattatagtgatcctcgatttctcaatctctggcttaaattagggcgtttatgcaatgagcctttggatatgtacagttacttgcacaaccaagggattggtgtttcacttgctcagttctatatctcatgggcagaagaatatgaagctagagaaaactttaggaaagcagatgcgatatttcaggaagggattcaacagaaggctgaaccactagaaagactacagtcccagcaccgacaattccaagctcgagtgtctcggcaaactctgttggcacttgagaaagaagaagaggaggaagtttttgagtcttctgtaccacaacgaagcacactagctgaactaaagagcaaagggaaaaagacagcaagagctccaatcatccgtgtaggaggtgctctcaaggctccaagccagaacagaggactccaaaatccatttcctcaacagatgcaaaataatagtagaattactgtttttgatgaaaatgctgatgaggcttctacagcagagttgtctaagcctacagtccagccatggatagcaccccccatgcccagggccaaagagaatgagctgcaagcaggcccttggaacacaggcaggtccttggaacacaggcctcgtggcaatacagcttcactgatagctgtacccgctgtgcttcccagtttcactccatatgtggaagagactgcacgacagccagttatgacaccatgtaaaattgaacctagtataaaccacatcctaagcaccagaaagcctggaaaggaagaaggagatcctctacaaagggttcagagccatcagcaagcgtctgaggagaagaaagagaagatgatgtattgtaaggagaagatttatgcaggagtaggggaattctcctttgaagaaattcgggctgaagttttccggaagaaattaaaagagcaaagggaagccgagctattgaccagtgcagagaagagagcagaaatgcagaaacagattgaagagatggagaagaagctaaaagaaatccaaactactcagcaagaaagaacaggtgatcagcaagaagagacgatgcctacaaaggagacaactaaactgcaaattgcttccgagtctcagaaaataccaggaatgactctatccagttctgtttgtcaagtaaactgttgtgccagagaaacttcacttgcggagaacatttggcaggaacaacctcattctaaaggtcccagtgtacctttctccatttttgatgagtttcttctttcagaaaagaagaataaaagtcctcctgcagatcccccacgagttttagctcaacgaagaccccttgcagttctcaaaacctcagaaagcatcacctcaaatgaagatgtgtctccagatgtttgtgatgaatttacaggaattgaacccttgagcgaggatgccattatcacaggcttcagaaatgtaacaatttgtcctaacccagaagacacttgtgactttgccagagcagctcgttttgtatccactccttttcatgagataatgtccttgaaggatctcccttctgatcctgagagactgttaccggaagaagatctagatgtaaagacctctgaggaccagcagacagcttgtggcactatctacagtcagactctcagcatcaagaagctgagcccaattattgaagacagtcgtgaagccacacactcctctggcttctctggttcttctgcctcggttgcaagcacctcctccatcaaatgtcttcaaattcctgagaaactagaacttactaatgagacttcagaaaaccctactcagtcaccatggtgttcacagtatcgcagacagctactgaagtccctaccagagttaagtgcctctgcagagttgtgtatagaagacagaccaatgcctaagttggaaattgagaaggaaattgaattaggtaatgaggattactgcattaaacgagaatacctaatatgtgaagattacaagttattctgggtggcgccaagaaactctgcagaattaacagtaataaaggtatcttctcaacctgtcccatgggacttttatatcaacctcaagttaaaggaacgtttaaatgaagattttgatcatttttgcagctgttatcaatatcaagatggctgtattgtttggcaccaatatataaactgcttcacccttcaggatcttctccaacacagtgaatatattacccatgaaataacagtgttgattatttataaccttttgacaatagtggagatgctacacaaagcagaaatagtccatggtgacttgagtccaaggtgtctgattctcagaaacagaatccacgatccctatgattgtaacaagaacaatcaagctttgaagatagtggacttttcctacagtgttgaccttagggtgcagctggatgtttttaccctcagcggctttcggactgtacagatcctggaaggacaaaagatcctggctaactgttcttctccctaccaggtagacctgtttggtatagcagatttagcacatttactattgttcaaggaacacctacaggtcttctgggatgggtccttctggaaacttagccaaaatatttctgagctaaaagatggtgaattgtggaataaattctttgtgcggattctgaatgccaatgatgaggccacagtgtctgttcttggggagcttgcagcagaaatgaatggggtttttgacactacattccaaagtcacctgaacaaagccttatggaaggtagggaagttaactagtcctggggctttgctctttcagtgagctaggcaatcaagtctcacagattgctgcctcagagcaatggttgtattgtggaacactgaaactgtatgtgctgtaatttaatttaggacacatttagatgcactaccattgctgttctactttttggtacaggtatattttgacgtcactgatattttttatacagtgatatacttactcatggccttgtctaacttttgtgaagaactattttattctaaacagactcattacaaatggttaccttgttatttaacccatttgtctctacttttccctgtacttttcccatttgtaatttgtaaaatgttctcttatgatcaccatgtattttgtaaataataaaatagtatctgttaaatttgtgcttctaa

SEQ ID NO: 2347 - DNA, 526 bp, Homo sapiens
  source 1..526: mol_type = unassigned DNA; mol_type = unassigned DNA
aaatttgaaacttggcggctaggggtgtgggcttgaggtggccggtttgttagggagtcgtgtacgtgccttggtcgcttctgtagctccgagggcaggttgcggaagaaagcccaggcggtctgtggcccagaggaaaggcctgcagcaggacgaggacctgagccaggaatgcaggatggcggcggtgaagaaggaagggggtgctctgagtgaagccatgtccctggagggagatgaatgggaactgagtaaagaaaatgtacaacctttaaggcaagggcggatcatgtccacgcttcagggagcactggcacaagaatctgcctgtaacaatactcttcagcagcagaaacgggcatttgaatatgaaattcgattttacactggaaatgaccctctggatgtttgggataggtatatcagctggacagagcagaactatcctcaaggggcgtttatgcaatgagcctttggatatgtacagttacttgcacaaccaagggattggtgtttcacttgctca

SEQ ID NO: 2348 - DNA, 580 bp, Homo sapiens
  source 1..580: mol_type = unassigned DNA; mol_type = unassigned DNA
gtgtgggcttgaggtggccggtttgttagggagtcgtgtacgtgccttggtcgcttctgtagctccgagggcaggttgcggaagaaagcccaggcggtctgtggcccagaggaaaggcctgcagcaggacgaggacctgagccaggaatgcaggatggcggcggtgaagaaggaagggggtgctctgagtgaagccatgtccctggagggagatgaatgggaactgagtaaagaaaatgtacaacctttaaggcaagggcggatcatgtccacgcttcagggagcactggcacaagaatctgcctgtaacaatactcttcagcagcagaaacgagacggagtctcgctctttcggccaggctggagtgcagtggcacgatcttggctcactggaagctctgcctcctgggttcacgccaatctcctgcctcagcctcctgagtagctgggactacagggcatttgaatatgaaattcgattttacactggaaatgaccctctggatgtttgggataggtatatcagctggacagagcagaactatcctcaaggtgggaaggagagtaatatgtcaacgtt

SEQ ID NO: 2349 - DNA, 3628 bp, Homo sapiens
  source 1..3628: mol_type = unassigned DNA; mol_type = unassigned DNA
gtgtgggcttgaggtggccggtttgttagggagtcgtgtacgtgccttggtcgcttctgtagctccgagggcaggttgcggaagaaagcccaggcggtctgtggcccagaggaaaggcctgcagcaggacgaggacctgagccaggaatgcaggatggcggcggtgaagaaggaagggggtgctctgagtgaagccatgtccctggagggagatgaatgggaactgagtaaagaaaatgtacaacctttaaggcaagggcggatcatgtccacgcttcagggagcactggcacaagaatctgcctgtaacaatactcttcagcagcagaaacgggcatttgaatatgaaattcgattttacactggaaatgaccctctggatgtttgggataggtgggtctttttatttcacaaggacaatagaaacattaacaggtatatcagctggacagagcagaactatcctcaaggtgggaaggagagtaatatgtcaacgttattagaaagagctgtagaagcactacaaggagaaaaacgatattatagtgatcctcgatttctcaatctctggcttaaattagggcgtttatgcaatgagcctttggatatgtacagttacttgcacaaccaagggattggtgtttcacttgctcagttctatatctcatgggcagaagaatatgaagctagagaaaactttaggaaagcagatgcgatatttcaggaagggattcaacagaaggctgaaccactagaaagactacagtcccagcaccgacaattccaagctcgagtgtctcggcaaactctgttggcacttgagaaagaagaagaggaggaagtttttgagtcttctgtaccacaacgaagcacactagctgaactaaagagcaaagggaaaaagacagcaagagctccaatcatccgtgtaggaggtgctctcaaggctccaagccagaacagaggactccaaaatccatttcctcaacagatgcaaaataatagtagaattactgtttttgatgaaaatgctgatgaggcttctacagcagagttgtctaagcctacagtccagccatggatagcaccccccatgcccagggccaaagagaatgagctgcaagcaggcccttggaacacaggcaggtccttggaacacaggcctcgtggcaatacagcttcactgatagctgtacccgctgtgcttcccagtttcactccatatgtggaagagactgcacgacagccagttatgacaccatgtaaaattgaacctagtataaaccacatcctaagcaccagaaagcctggaaaggaagaaggagatcctctacaaagggttcagagccatcagcaagcgtctgaggagaagaaagagaagatgatgtattgtaaggagaagatttatgcaggagtaggggaattctcctttgaagaaattcgggctgaagttttccggaagaaattaaaagagcaaagggaagccgagctattgaccagtgcagagaagagagcagaaatgcagaaacagattgaagagatggagaagaagctaaaagaaatccaaactactcagcaagaaagaacaggtgatcagcaagaagagacgatgcctacaaaggagacaactaaactgcaaattgcttccgagtctcagaaaataccaggaatgactctatccagttctgtttgtcaagtaaactgttgtgccagagaaacttcacttgcggagaacatttggcaggaacaacctcattctaaaggtcccagtgtacctttctccatttttgatgagtttcttctttcagaaaagaagaataaaagtcctcctgcagatcccccacgagttttagctcaacgaagaccccttgcagttctcaaaacctcagaaagcatcacctcaaatgaagatgtgtctccagatgtttgtgatgaatttacaggaattgaacccttgagcgaggatgccattatcacaggcttcagaaatgtaacaatttgtcctaacccagaagacacttgtgactttgccagagcagctcgttttgtatccactccttttcatgagataatgtccttgaaggatctcccttctgatcctgagagactgttaccggaagaagatctagatgtaaagacctctgaggaccagcagacagcttgtggcactatctacagtcagactctcagcatcaagaagctgagcccaattattgaagacagtcgtgaagccacacactcctctggcttctctggttcttctgcctcggttgcaagcacctcctccatcaaatgtcttcaaattcctgagaaactagaacttactaatgagacttcagaaaaccctactcagtcaccatggtgttcacagtatcgcagacagctactgaagtccctaccagagttaagtgcctctgcagagttgtgtatagaagacagaccaatgcctaagttggaaattgagaaggaaattgaattaggtaatgaggattactgcattaaacgagaatacctaatatgtgaagattacaagttattctgggtggcgccaagaaactctgcagaattaacagtaataaaggtatcttctcaacctgtcccatgggacttttatatcaacctcaagttaaaggaacgtttaaatgaagattttgatcatttttgcagctgttatcaatatcaagatggctgtattgtttggcaccaatatataaactgcttcacccttcaggatcttctccaacacagtgaatatattacccatgaaataacagtgttgattatttataaccttttgacaatagtggagatgctacacaaagcagaaatagtccatggtgacttgagtccaaggtgtctgattctcagaaacagaatccacgatccctatgattgtaacaagaacaatcaagctttgaagatagtggacttttcctacagtgttgaccttagggtgcagctggatgtttttaccctcagcggctttcggactgtacagatcctggaaggacaaaagatcctggctaactgttcttctccctaccaggtagacctgtttggtatagcagatttagcacatttactattgttcaaggaacacctacaggtcttctgggatgggtccttctggaaacttagccaaaatatttctgagctaaaagatggtgaattgtggaataaattctttgtgcggattctgaatgccaatgatgaggccacagtgtctgttcttggggagcttgcagcagaaatgaatggggtttttgacactacattccaaagtcacctgaacaaagccttatggaaggtagggaagttaactagtcctggggctttgctctttcagtgagctaggcaatcaagtctcacagattgctgcctcagagcaatggttgtattgtggaacactgaaactgtatgtgctgtaatttaatttaggacacatttagatgcactaccattgctgttctactttttggtacaggtatattttgacgtcactgatattttttatacagtgatatacttactcatggccttgtctaacttttgtgaagaactattttattctaaacagactcattacaaatggttaccttgttatttaacccatttgtctctacttttc

SEQ ID NO: 2350 - DNA, 786 bp, Homo sapiens
  source 1..786: mol_type = unassigned DNA; mol_type = unassigned DNA
acaattccaagctcgagtgtctcggcaaactctgttggcacttgagaaagaagaagaggaggaagtttttgagtcttctgtaccacaacgaagcacactagctgaactaaagagcaaagggaaaaagacagcaagagctccaatcatccgtgtaggaggtgctctcaagggacaccatgtaaaattgaacctagtataaaccacatcctaagcaccagaaagcctggaaaggaagaaggagatcctctacaaagggttcagagccatcagcaagcgtctgaggagaagaaagagaagatgatgtattgtaaggagaagatttatgcaggagtaggggaattctcctttgaagaaattcgggctgaagttttccggaagaaattaaaagagcaaagggaagccgagctattgaccagtgcagagaagagagcagaaatgcagaaacagattgaagagatggagaagaagctaaaagaaatccaaactactcagcaagaaagaacaggtgatcagcaagaagagacgatgcctacaaaggagacaactaaactgcaaattgcttccgagtctcagaaaataccaggaatgactctatccagttctgtttgtcaagtaaactgttgtgccagagaaacttcacttgcggagaacatttggcaggaacaacctcattctaaaggtcccagtgtacctttctccatttttgatgagtttcttctttcagaaaagaagaataaaagtcctcctgcagatcccccacgagttttagctcaacgaagacccctt

SEQ ID NO: 2351 - DNA, 477 bp, Homo sapiens
  source 1..477: mol_type = unassigned DNA; mol_type = unassigned DNA
gctcgagtgtctcggcaaactctgttggcacttgagaaagaagaagaggaggaagtttttgagtcttctgtaccacaacgaagcacactagctgaactaaagagcaaagggaaaaagacagcaagagctccaatcatccgtgtaggaggtgctctcaaggctccaagccagaacagaggactccaaaatccatttcctcaacagatgcaaaataatagtagaattactgtttttgatgaaaatgctgatgaggcttctacagcagagttgtctaagcctacagtccagccatggatagcaccccccatgcccagggccaaagagaatgagctgcaagcaggcccttggaacacaggcaggtccttggaacacagggtaaggactcttagatccagtgctttgctgacacaacaaagacttcacatttagggtagagaagtatttttaccatctcttttaattcctcttgaatattta

SEQ ID NO: 2352 - DNA, 633 bp, Homo sapiens
  source 1..633: mol_type = unassigned DNA; mol_type = unassigned DNA
gagaatgagctgcaagcaggcccttggaacacaggcaggtccttggaacacagggtaaggactcttagatccagtgctttgctgacacaacaaagacttcacatttagggtagagaagtatttttaccatctcttttaattcctcttgaatatttagccatggtctatatatgctgtctgagaacataaaactatggtaattttagttttcttcttcatctccagcctcgtggcaatacagcttcactgatagctgtacccgctgtgcttcccagtttcactccatatgtggaagagactgcacgacagccagttatagtcttgctctgttgcccagcaggctgaagtgcagtggcaccatctcagctcaccgcaacctcgacctcctggttcaacgggcatggcagcccacgtttgccatcccagcactttgggaggccaaggacaccatgtaaaattgaacctagtataaaccacatcctaagcaccagaaagcctggaaaggaagaaggagatcctctacaaagggttcagagccatcagcaagcgtctgaggagaagaaagagaagatgatgtattgtaaggagaagatttatgcaggagtaggggaattctcctttgaagaaattcgg

SEQ ID NO: 2353 - DNA, 560 bp, Homo sapiens
  source 1..560: mol_type = unassigned DNA; mol_type = unassigned DNA
tgaatatttagccatggtctatatatgctgtctgagaacataaaactatggtaattttagttttcttcttcatctccagcctcgtggcaatacagcttcactgatagctgtacccgctgtgcttcccagtttcactccatatgtggaagagactgcacgacagccagttatgacaccatgtaaaattgaacctagtataaaccacatcctaagcaccagaaagcctggaaaggaagaaggagatcctctacaaagggttcagagccatcagcaagcgtctgaggagaagaaagagaagatgatgtattgtaaggagaagatttatgcaggagtaggggaattctcctttgaagaaattcgggctgaagttttccggaagaaattaaaagagcaaagggaagccgagctattgaccagtgcagagaagagagcagaaatgcagaaacagattgaagagatggagaagaagctaaaagaaatccaaactactcagcaagaaagaacaggtgatcagcaagaagagacgatgcctacaaaggagacaactaaactgcaaattg

SEQ ID NO: 2354 - DNA, 630 bp, Homo sapiens
  source 1..630: mol_type = unassigned DNA; mol_type = unassigned DNA
agtatatgcctggcactgctcagttgagtacaacagtactggtttagagtaggaataaaaattattggaaatgacttttgtggtacactcattttgtactgttagtggatgtctagggaaagagtacagtaaagctaatgttagaactagaaaatagcattttctggatgggagggacattgattttgtttatttaatgcaaacagcaagaagagacgatgcctacaaaggagacaactaaactgcaaattgcttccgagtctcagaaaataccaggaatgactctatccagttctgtttgtcaagtaaactgttgtgccagagaaacttcacttgcggagaacatttggcaggaacaacctcattctaaaggtcccagtgtacctttctccatttttgatgagtttcttctttcagaaaagaagaataaaagtcctcctgcagatcccccacgagttttagctcaacgaagaccccttgcagttctcaaaacctcagaaagcatcacctcaaatgaagatgtgtctccagatgtttgtgatgaatttacaggaattgaacccttgagcgaggatgccattatcacaggcttcagaaatgtaacaatttgtcctaacccagaagacactt

SEQ ID NO: 2355 - DNA, 439 bp, Homo sapiens
  source 1..439: mol_type = unassigned DNA; mol_type = unassigned DNA
cttttttttttaaagaccagctatgcagcttctttcatggcctatttttattatctccttctcttaaatctgggctcagaatccacgatccctatgattgtaacaagaacaatcaagctttgaagatagtggacttttcctacagtgttgaccttagggtgcagctggatgtttttaccctcagcggctttcggactgtacagatcctggaaggacaaaagatcctggctaactgttcttctccctaccaggtagacctgtttggtatagcagatttagcacatttactattgttcaaggaacacctacaggtcttctgggatgggtccttctggaaacttagccaaaatatttctgagctaaaagatggtgaattgtggaataaattctttgtgcggattctgaatgccaatgatgaggccacagtgtctgttcttgg

SEQ ID NO: 2356 - DNA, 578 bp, Homo sapiens
  source 1..578: mol_type = unassigned DNA; mol_type = unassigned DNA
agaaagaaaaggtatcagtacagaaaagaagagtcagaaaataccgtgcaaaggcacattcagaacgtaaccaggatagctggagccaggattcaaggagagagggtgtcttttatgaataatcaaaagcagcaaaagccaacgctatcaggccagcgttttaaaactagaaaaagagatgaaaaagagaggtttgaccctactcagtttcaagactgtattattcaaggcttaactgaaaccggtactgatttggaagcagtagctaagtttcttgatgcttctggagcaaaacttgattaccgtcgatatgcagaaacactctttgacattctggtggctggtggaatgctggccccaggtggtacactggcagatgacatgatgcgtacagatgtctgcgtgtttgcagcccaagaagatctagagaccatgcaagcatttgctcaggtttttaacaagttaatcaggcgctacaaatacctggagaaaggttttgaagatgaagtaaaaaagctgctgctgttcttgaagggtttttcagagtcggagaggaacaagctagctatgttgactgg

SEQ ID NO: 2357 - DNA, 1059 bp, Homo sapiens
  source 1..1059: mol_type = unassigned DNA; mol_type = unassigned DNA
gacttccggtgctggaggagggggccggcggcgagggactccaggaggacgcgtccaacttcgagaccggcgggggccggctccgctcttccaacccctccatgtgtgaagagggcggacgacgcagcgggggaagaaaaataagctagtctaggacaagtgtccaggcgacgtggaacccagtaagggaataaagaagactggaaacgtctctcccctcccctatcccagtccctcaccctaatccgcgcgcaatagaaaaggcggaagcgcctgtccacgatcagggcggggcaaggggaagaaatctcgcgataggagagcggtccgggcgggggtggcacctctccctcctcctggcgttagttccggtcgcagaggagacaccgccgcagttgccgggtgtcttttatgaataatcaaaagcagcaaaagccaacgctatcaggccagcgttttaaaactagaaaaagagatgaaaaagagaggtttgaccctactcagtttcaagactgtattattcaaggcttaactgaaaccggtactgatttggaagcagtagctaagtttcttgatgcttctggagcaaaacttgattaccgtcgatatgcagaaacactctttgacattctggtggctggtggaatgctggccccaggtggtacactggcagatgacatgatgcgtacagatgtctgcgtgtttgcagcccaagaagatctagagaccatgcaagcatttgctcaggtttttaacaagttaatcaggcgctacaaatacctggagaaaggttttgaagatgaagtaaaaaagctgctgctgttcttgaagggtttttcagagtcggagaggaacaagctagctatgttgactggtgttcttctggctaatggaacacttaatgcatccattcttaatagcctttataatgaaaatttggttaaagaaggagtttcagcagcttttgctgtgaagctctttaaatcatggataaatgaaaaagatatcaatgcagtagctgcaagtcttcggaaagtcagcatggataacagactgatg

SEQ ID NO: 2358 - DNA, 1075 bp, Homo sapiens
  source 1..1075: mol_type = unassigned DNA; mol_type = unassigned DNA
gacttccggtgctggaggagggggccggcggcgagggactccaggaggacgcgtccaacttcgagaccggcgggggccggctccgctcttccaacccctccatgtgtgaagagggcggacgacgcagcgggggaagaaaaataagctagtctaggacaagtgtccaggcgacgtggaacccaggtgtcttttatgaataatcaaaagcagcaaaagccaacgctatcaggccagcgttttaaaactagaaaaagagatgaaaaagagaggtttgaccctactcagtttcaagactgtattattcaaggcttaactgaaaccggtactgatttggaagcagtagctaagtttcttgatgcttctggagcaaaacttgattaccgtcgatatgcagaaacactctttgacattctggtggctggtggaatgctggccccaggtggtacactggcagatgacatgatgcgtacagatgtctgcgtgtttgcagcccaagaagatctagagaccatgcaagcatttgctcaggtttttaacaagttaatcaggcgctacaaatacctggagaaaggttttgaagatgaagtaaaaaagctgctgctgttcttgaagggtttttcagagtcggagaggaacaagctagctatgttgactggtgttcttctggctaatggaacacttaatgcatccattcttaatagcctttataatgaaaatttggttaaagaaggagtttcagcagcttttgctgtgaagctctttaaatcatggataaatgaaaaagatatcaatgcagtagctgcaagtcttcggaaagtcagcatggataacagactgatggaactctttcctgccaataagcaaagtgttgaacacttcacaaaatattttactgaggcaggcttgaaagagctttcagaatatgttcggaatcagcaaaccatcggagctcgtaaggagctccagaaagaacttcaagaacagatgtcccgtggtgatccatttaaggatataattttatatgtcaaggaggagatgaaaaaaaacaacatcccagagccagttgtcatcggaa

SEQ ID NO: 2359 - DNA, 6875 bp, Homo sapiens
  source 1..6875: mol_type = unassigned DNA; mol_type = unassigned DNA
gacttccggtgctggaggagggggccggcggcgagggactccaggaggacgcgtccaacttcgagaccggcgggggccggctccgctcttccaacccctccatgtgtgaagagggcggacgacgcagcgggggaagaaaaataagctagtctaggacaagtgtccaggcgacgtggaacccagtaagggaataaagaagactggaaacgtctctcccctcccctatcccagtccctcaccctaatccgcgcgcaatagaaaaggcggaagcgcctgtccacgatcagggcggggcaaggggaagaaatctcgcgataggagagcggtccgggcgggggtggcacctctccctcctcctggcgttagttccggtcgcagaggagacaccgccgcagttgccggtacatcggggatttctggctctttcctcttcgccttaaattcgggtgtcttttatgaataatcaaaagcagcaaaagccaacgctatcaggccagcgttttaaaactagaaaaagagatgaaaaagagaggtttgaccctactcagtttcaagactgtattattcaaggcttaactgaaaccggtactgatttggaagcagtagctaagtttcttgatgcttctggagcaaaacttgattaccgtcgatatgcagaaacactctttgacattctggtggctggtggaatgctggccccaggtggtacactggcagatgacatgatgcgtacagatgtctgcgtgtttgcagcccaagaagatctagagaccatgcaagcatttgctcaggtttttaacaagttaatcaggcgctacaaatacctggagaaaggttttgaagatgaagtaaaaaagctgctgctgttcttgaagggtttttcagagtcggagaggaacaagctagctatgttgactggtgttcttctggctaatggaacacttaatgcatccattcttaatagcctttataatgaaaatttggttaaagaaggagtttcagcagcttttgctgtgaagctctttaaatcatggataaatgaaaaagatatcaatgcagtagctgcaagtcttcggaaagtcagcatggataacagactgatggaactctttcctgccaataagcaaagtgttgaacacttcacaaaatattttactgaggcaggcttgaaagagctttcagaatatgttcggaatcagcaaaccatcggagctcgtaaggagctccagaaagaacttcaagaacagatgtcccgtggtgatccatttaaggatataattttatatgtcaaggaggagatgaaaaaaaacaacatcccagagccagttgtcatcggaatagtctggtcaagtgtaatgagcactgtggaatggaacaaaaaagaggagcttgtagcagagcaagccatcaagcacttgaagcaatacagccctctacttgctgcctttactactcaaggtcagtctgagctgactctgttactgaagattcaggagtattgctatgacaacattcatttcatgaaagccttccagaaaatagtggtgcttttttataaagctgaagtcctgagcgaggagcccattttgaagtggtataaagatgcacatgttgcaaaggggaagagtgttttccttgagcaaatgaaaaagtttgtagaatggctcaaaaatgctgaagaagaatctgaatctgaagctgaagaaggtgactgaattttgaaactacaccctcagtaaagcaaacaggagttgtagataaaatgtcatgtctcatgtgtcctggttcttacatcttcctacctccctgtatcaagcatgatataagggctttcatggcaaattttattttaactgtttctatggttgctggaaatgttgggtttagtttctaaaaccatgttttaagtagctacaggagctatagatttgaatctaatgttgcattagtcttttcagttatcttctacctcctgtattttctactgtaataatgtaatttaaggccttccacaatgaacagttcactttattccctgggttttctataaacagttttaaggatatgatttggttaaaaaataatttgttataaaaattctgtttgcaaattaaactggaaaagtatccagagtctcaaaaggcaatgatttgtgagataatatggcatgcccggagccctgctcatcaatgaaaaacccatatgtaataatcgaattcatttaacatgaatcttgagtacgtggaccattgcttgcatgttaactttttgttttgttttgttttgttttgttttgcatttttaactccagatatcctaaagctcaattgtttggtctctggttttcatccttagagaagccatggagaacagacttgaaaagtttaggaaatcataatgtggcagaggtggtgggaagaagaaagttgagctttttccccttgagaaacttctgcatttagtttctatctttccaggcaaaacaaatgggtattcttttcatacaaccattttcaaatgaaccttagaaaagtcttaacatttaaggtattttatgcacagaatacacttagattgataggaaagaactcgtaatggagtttgagtaaagaaaatgactgatgtactaaacccagtaaaaattgttgaaaatgttaaaggtcagcatgttctaattgggaatctagatatagcttagatttcctattggcttagagtatttgctataacaaatgaagtgcaatgacaattatatattcctactcggtcatactggactggcttcgttctcttaatatactcagtaatgactcaagcctctggctattaacataccctagttgccgttttttaattgccatgagccaaatacttcttggtatacaattgatccatttattttaatggctgccttttcattttcatcttttcttgctgctacccatctatgtatgtagtcattggggggaaaatgtagccacattttttatgggaagactttgtgttaaaagtgaacattttgaaggtttttaactggtgaaactagcctggaataatgccaccagagactgagtggaaatcgccccttttgaaggtgccattcttatgagccaaaagtttgtcatttaaaagttcattttgagggaataacatgtaatataatttgaaataaaggtatagtaaccttaaaaagaacattataactgattgttgtgaatggggtgaatttgttaaaatgagtaactttgataaagtttttcatgcacaggcaaaatgtattcactagatttctacgtagtgatctgcttttactttgtaatttgtagttctcaaaagacttttttttaaaaaaataaagtccatacttacacttaggctttatacatcagtctttttttttttaaattccatgttaatacctagtggtattgtatgttgtgtgttcagatgtctttactgtatctgtataccattaagtaataattagactcccaaactgtaaaccacctacacagaattctggtgtagctaaaactacattaatatttctacaaccaattcattgcatgtttcttccatacaaagtgtgccattttatactgtgtatagtgaaaaagtgtgtcatcttccagaactacattattatctttgatcgtagtttgtttcttcataatgacactgtagtgtttacttagtagaacattatagtaagtggatatcacttgtgacagtaatagtgtaaagaaagggaatgctttataaaaagattgcagattccattccatataaaaagattccattctgaatcttaagtggtaattttagaattcaggtgccagtgccagcctatggcctcaagtatgtaattcttaatatagatgttaaattgtacttttaattatgattggataaatgttttttctaactgtcagtttctaaggctgtctccttagaaactaaatgagtttttagagctggttgtaagtttcttagccttactctgtgagttatagatgttatttcattctatatatagatgtttattccattcttatttaaaaaaaaaaacctccatataccaaaaatgctacaggatattttgaaatagcatattttagttaggggaaatgcatgtgaccaagaggttggacttctaattcagtttttcaaaagcttttttccattatcatacccccagcctttttaggcttttttttttttttttttgagacggagtctcgctctgtcaccaggctggagtgcagtggcgcgatcttggctcactgcaagttccgcctcccgggttcacgccattctcctgcctcagcctcccgagtagctgggactacaggcgcccgccaccatgcccgactaatttttttgtatttttagtagagacgaggtttcaccggattagcgaggatggtctcaatctcctgaccttgtgatccacccgcctcagcctcccaaagtgctgggattatgggcttgagccaccgcgcccagctagacttttttctaatagagtcccccataaattttattaccatagatacgctgtgtatgtactgtttctgtgctttgtacatgaaaagagtaaaatgtttttgtttttgttttggagacagtctcactctgttacctgggctggagtgcaatggcatgatctcagctcactgcaatctctgcctcctgggttcaagcgattctcttgcttcagcctcctgagtagctgggattacaggcggccaccaccacccctggctaatttttgtatttttagtagaggtttcaccacgttgatcaggctggtctcaaactcctgacctcgtggtctgcctgccttggcctcccaaagtgctgggattacaggcgtgagccaccatgcccaaccaattttttttttttaaatccttggtagtgattgacccccattgagaatgcatgctctaatattttttaaaagggaagaagacctagtgatagacctttgcattggcaggcatgtctttatgtttatacagtgaagtagtattttttctgtcagggtcaatagaaagtagacgaaattcattttcagccaatctttcaccagttgtgctttgttccttaccccaccacaggcaacagacaaagcatttcctgctgtctttcaaggtcttaacagattctttcttgattataaatgtattactaagtagaatcatttgggttctttctataaaaatcagtgaaaatcctctagatgaatgaattaaagttgtaggcataacactgataaacctctgctctcatactgaagtaggctgcttgcaggaactgacaactattggttggctttaaatgtaatgtagatgccaaagttttagtgtacagtgttacttaaattaccaaattacctttgtacaaatattcctcagatgctgtctacaggtgccatataaaataggttgataagtatttgcaaattctggtaaattgccttgctatgatttttcatgctcagtattagtcctctagtatcaatacgaagtttttctattccccagcctactaaggcctacaggttaaaataccaggaataaaaaggttttcagtggacttgatttaagtggaatctggatgatgtgacaagtacctttgtctttggagtaatgagtttataattggcttttgtccaaaaactcttaagtggattaatatctgaacaatcttagacataattatatgaaactggatcagaaaggctttctgactcctttctcttcacttttttctcccagcttaactagaggcaattaacagtcatttcaaatctaattatttttattttccagtgtacttatcatcctttcatctttatgctaggagtatagtctcagttcttaatgagttgatgggatgaagatatagatagatagatagatagatagatagatagatatttttttttttttttttttttttttttttttttttgagacagagtctcgctctgtcgcccaggcgggagtgcagtggcacaatctcggctcactgcaagctccgccttgggggttcacaccattctcctgtctcagcctcctagctgggattacaggcgcccaccaaccaagcccggctaaggtatttttaaatgtactcaatcactgtcattttagtaaccttgaatcagaacctcagttgttaaaggcttaactgcttgtggcaactactatagtgctctagtggggacagtggttaaaatctgcagaatcccttgctttgtcatcttatccagaaggactgatagcttgttaaactgtggtatgattagaatgttggtggttgtgtagtgcatttggggtgctacaacgttaatcaaatataattgagctgttctgtttccagtcagtgtaaccatttaaaaataccttggcaaaacaagctaggagctagttcatgctaatattcttaaggacaaaaatagtttacagcttttttttttttaatctgaaatcctgaaggctatgcttaaaagttagagataaacctgttggaaataagtgattcatttatagactgaagcctctatgacttcaaaaagatactcaacagtctctggcatttgaagaacaaaatattttctctgtaaatacacctcatttccattctagttaggagcaatggcgcccaggacggcacacagaatggagaaaactggatagctggtaactcatttagctcttggcactctaaaaaacctcaaatacagccatccaagccagtaattctattgctgcgttatttctgtgtttaactgtgaaacttgcttcttgtctgtacccttgaaatggaataaaatttcatgagactccttgttaatgtagagaaaa

SEQ ID NO: 2360 - DNA, 530 bp, Homo sapiens
  source 1..530: mol_type = unassigned DNA; mol_type = unassigned DNA
agttccggtcgcagaggagacaccgccgcagttgccggtacatcggggatttctggctctttcctcttcgccttaaattcgggtgtcttttatgaataatcaaaagcagcaaaagccaacgctatcaggccagcgttttaaaactagaaaaagagatgaaaaagagaggtttgaccctactcagtttcaagactgtattattcaaggcttaactgaaaccggtactgatttggaagcagtagctaagtttcttgatgcttctggagcaaaacttgattaccgtcgatatgcagaaacactctttgacattctggtggctggtggaatgctgggtaagtgtctgtggtttgtgggcttaataatttagaaaggtataatatatggagattatggagagtctagaatatgaactatttggcaaacttgttaaaatggagtgatttttttggttttgttgtattttggttttatccaactttagccccaggtggtacactggcagatgacatgatgcgtacagatgtctgcgt

SEQ ID NO: 2361 - DNA, 265 bp, Homo sapiens
  source 1..265: mol_type = unassigned DNA; mol_type = unassigned DNA
gaggagacaccgccgcagttgccggtacatcggggatttctggctctttcctcttcgccttaaattcgggtgtcttttatgaataatcaaaagcagcaaaagccaacgctatcaggccagcgttttaaaactagaaaaagaggtaaatatttacgttttaatgtctctcttcaaacctccagaacatcttgtgtatcttgccttctctgacaggtacttgcatattactaaagcctcaaaagaagataccagaaagaaacttgaa

SEQ ID NO: 2362 - DNA, 2455 bp, Homo sapiens
  source 1..2455: mol_type = unassigned DNA; mol_type = unassigned DNA
cgggtggggaggtggggtccgggtgtgcgccgcggcgctggctgcgaaggcagtggccgaggcgggctccctctgggccgtgcccggcctggctaacaaagccgccgcggcctctgttgtgtgatggtgtcttttatgaataatcaaaagcagcaaaagccaacgctatcaggccagcgttttaaaactagaaaaagagatgaaaaagagaggtttgaccctactcagtttcaagactgtattattcaaggcttaactgaaaccggtactgatttggaagcagtagctaagtttcttgatgcttctggagcaaaacttgattaccgtcgatatgcagaaacactctttgacattctggtggctggtggaatgctggccccaggtggtacactggcagatgacatgatgcgtacagatgtctgcgtgtttgcagcccaagaagatctagagaccatgcaagcatttgctcaggtttttaacaagttaatcaggcgctacaaatacctggagaaaggttttgaagatgaagtaaaaaagctgctgctgttcttgaagggtttttcagagtcggagaggaacaagctagctatgttgactggtgttcttctggctaatggaacacttaatgcatccattcttaatagcctttataatgaaaatttggttaaagaaggagtttcagcagcttttgctgtgaagctctttaaatcatggataaatgaaaaagatatcaatgcagtagctgcaagtcttcggaaagtcagcatggataacagactgatggaactctttcctgccaataagcaaagtgttgaacacttcacaaaatattttactgaggcaggcttgaaagagctttcagaatatgttcggaatcagcaaaccatcggagctcgtaaggagctccagaaagaacttcaagaacagatgtcccgtggtgatccatttaaggatataattttatatgtcaaggaggagatgaaaaaaaacaacatcccagagccagttgtcatcggaatagtctggtcaagtgtaatgagcactgtggaatggaacaaaaaagaggagcttgtagcagagcaagccatcaagcacttgaagcaatacagccctctacttgctgcctttactactcaaggtcagtctgagctgactctgttactgaagattcaggagtattgctatgacaacattcatttcatgaaagccttccagaaaatagtggtgcttttttataaagctgaagtcctgagcgaggagcccattttgaagtggtataaagatgcacatgttgcaaaggggaagagtgttttccttgagcaaatgaaaaagtttgtagaatggctcaaaaatgctgaagaagaatctgaatctgaagctgaagaaggtgactgaattttgaaactacaccctcagtaaagcaaacaggagttgtagataaaatgtcatgtctcatgtgtcctggttcttacatcttcctacctccctgtatcaagcatgatataagggctttcatggcaaattttattttaactgtttctatggttgctggaaatgttgggtttagtttctaaaaccatgttttaagtagctacaggagctatagatttgaatctaatgttgcattagtcttttcagttatcttctacctcctgtattttctactgtaataatgtaatttaaggccttccacaatgaacagttcactttattccctgggttttctataaacagttttaaggatatgatttggttaaaaaataatttgttataaaaattctgtttgcaaattaaactggaaaagtatccagagtctcaaaaggcaatgatttgtgagataatatggcatgcccggagccctgctcatcaatgaaaaacccatatgtaataatcgaattcatttaacatgaatcttgagtacgtggaccattgcttgcatgttaactttttgttttgttttgttttgttttgttttgcatttttaactccagatatcctaaagctcaattgtttggtctctggttttcatccttagagaagccatggagaacagacttgaaaagtttaggaaatcataatgtggcagaggtggtgggaagaagaaagttgagctttttccccttgagaaacttctgcatttagtttctatctttccaggcaaaacaaatgggtattcttttcatacaaccattttcaaatgaaccttagaaaagtcttaacatttaaggtattttatgcacagaatacacttagattgataggaaagaactcgtaatggagtttgagtaaagaaaatgactgatgtactaaacccagtaaaaattgttgaaaatgttaaaggtcagcatgttctaattgggaatctagatatagcttagatttcctattggcttagagtatttgctataacaaatgaagtgcaatgacaattatatattcctactcggtcatactg

SEQ ID NO: 2363 - DNA, 1473 bp, Homo sapiens
  source 1..1473: mol_type = unassigned DNA; mol_type = unassigned DNA
accaccgctgcggccgccgcctccgccgctgctttcgctggagggcgggcggatgtacggggcgcctggggccccggcgcaaagcgcctcagtgactgtggtccgctcgttgcggcggccgccaccgcaggcgacaggggtgtcttttatgaataatcaaaagcagcaaaagccaacgctatcaggccagcgttttaaaactagaaaaagagatgaaaaagagaggtttgaccctactcagtttcaagactgtattattcaaggcttaactgaaaccggtactgatttggaagcagtagctaagtttcttgatgcttctggagcaaaacttgattaccgtcgatatgcagaaacactctttgacattctggtggctggtggaatgctggccccaggtggtacactggcagatgacatgatgcgtacagatgtctgcgtgtttgcagcccaagaagatctagagaccatgcaagcatttgctcaggtttttaacaagttaatcaggcgctacaaatacctggagaaaggttttgaagatgaagtaaaaaagctgctgctgttcttgaagggtttttcagagtcggagaggaacaagctagctatgttgactggtgttcttctggctaatggaacacttaatgcatccattcttaatagcctttataatgaaaatttggttaaagaaggagtttcagcagcttttgctgtgaagctctttaaatcatggataaatgaaaaagatatcaatgcagtagctgcaagtcttcggaaagtcagcatggataacagactgatggaactctttcctgccaataagcaaagtgttgaacacttcacaaaatattttactgaggcaggcttgaaagagctttcagaatatgttcggaatcagcaaaccatcggagctcgtaaggagctccagaaagaacttcaagaacagatgtcccgtggtgatccatttaaggatataattttatatgtcaaggaggagatgaaaaaaaacaacatcccagagccagttgtcatcggaatagtctggtcaagtgtaatgagcactgtggaatggaacaaaaaagaggagcttgtagcagagcaagccatcaagcacttgaagcaatacagccctctacttgctgcctttactactcaaggtcagtctgagctgactctgttactgaagattcaggagtattgctatgacaacattcatttcatgaaagccttccagaaaatagtggtgcttttttataaagctgaagtcctgagcgaggagcccattttgaagtggtataaagatgcacatgttgcaaaggggaagagtgttttccttgagcaaatgaaaaagtttgtagaatggctcaaaaatgctgaagaagaatctgaatctgaagctgaagaaggtgactgaattttgaaactacaccctcagtaaagcaaacaggagttgtagataaaatgtcatgtctcatgtgt

SEQ ID NO: 2364 - DNA, 557 bp, Homo sapiens
  source 1..557: mol_type = unassigned DNA; mol_type = unassigned DNA
agttttgcaggcctgagtggtgcaaggcggccgctgttgcggtcacaggcatgacctagggtaggatggtgctgcccgtaaccaggcttgtcagaagaaggggttcaccttttgacagtgttttagaattggcatacacattttggatgcctgctgactatggtgataatctctctttgcgttctgcgatgcttagtggtcgtggaagatggtgtcttttatgaataatcaaaagcagcaaaagccaacgctatcaggccagcgttttaaaactagaaaaagagatgaaaaagagaggtttgaccctactcagtttcaagactgtattattcaaggcttaactgaaaccggtactgatttggaagcagtagctaagtttcttgatgcttctggagcaaaacttgattaccgtcgatatgcagaaacactctttgacattctggtggctggtggaatgctggccccaggtggtacactggcagatgacatgatgcgtacagatgtctgcgtgtttgcagcccaagaagatctagagaccatgcaagcatttgctcagg

SEQ ID NO: 2365 - DNA, 557 bp, Homo sapiens
  source 1..557: mol_type = unassigned DNA; mol_type = unassigned DNA
aatttgaagggtttcttgtagagagaaatgcacattttgacgtacatttgattcaagtgcagggtgtcttttatgaataatcaaaagcagcaaaagccaacgctatcaggccagcgttttaaaactagaaaaagagatgaaaaagagaggtttgaccctactcagtttcaagactgtattattcaaggcttaactgaaaccggtactgatttggaagcagtagctaagtttcttgatgcttctggagcaaaacttgattaccgtcgatatgcagaaacactctttgacattctggtggctggtggaatgctggccccaggtggtacactggcagatgacatgatgcgtacagatgtctgcgtgtttgcagcccaagaagatctagagaccatgcaagcatttgctcaggtttttaacaagttaatcaggcgctacaaatacctggagaaaggttttgaagatgaagtaaaaaagctgctgctgttcttgaagggtttttcagagtcggagaggaacaagctagctatgttgactggtgttcttctggctaatggaac

SEQ ID NO: 2366 - DNA, 582 bp, Homo sapiens
  source 1..582: mol_type = unassigned DNA; mol_type = unassigned DNA
atgcagtagctgcaagtcttcggaaagtcagcatggataacagactgatggaactctttcctgccaataagcaaagtgttgaacacttcacaaaatattttactgaggcaggcttgaaagagctttcagaatatgttcggaatcagcaaaccatcggagctcgtaaggagctccagaaagaacttcaagaacagatgtcccgtggtgatccatttaaggatataattttatatgtcaaggaggagatgaaaaaaaacaacatcccagagccagttgtcatcggaatagtctggtcaagtgtaatgagcactgtggaatggaacaaaaaagaggagcttgtagcagagcaagccatcaagcacttgaagcaatacagccctctacttgctgcctttactactcaaggtcagtctgagctgactctgttactgaagattcaggagtattgctatgacaacattcatttcatgaaagccttccagaaaatagtggtgcttttttataaaggtaatttagattttgaattttgtaaataacacttaataaaaacccttataaacacaaaattatccaaatgatgag

SEQ ID NO: 2367 - DNA, 492 bp, Homo sapiens
  source 1..492: mol_type = unassigned DNA; mol_type = unassigned DNA
ttactgaggcaggcttgaaagagctttcagaatatgttcggaatcagcaaaccatcggagctcgtaaggagctccagaaagaacttcaagaacagatgtcccgtggtgatccatttaaggatataattttatatgtcaaggaggagatgaaaaaaaacaacatcccagagccagttgtcatcggaatagtctggtcaagtgtaatgagcactgtggaatggaacaaaaaagaggagcttgtagcagagcaagccatcaagcacttgaaggtattagaactatgccttgacaaaacaaactattctgctttcacgtggtgataagtgaactgtgactatatttttctaagaggatttatcacatcctgtggttcctagggatggcccaccagtaaataaacaaatagtaacattagctattgatgataatgctctgaattgggctgtggttcacaggttaaaaacaagaatatggcctggccaggcacaatgg

SEQ ID NO: 2368 - DNA, 779 bp, Homo sapiens
  source 1..779: mol_type = unassigned DNA; mol_type = unassigned DNA
tcggagctcgtaaggagctccagaaagaacttcaagaacagatgtcccgtggtgatccatttaaggatataattttatatgtcaaggaggagatgaaaaaaaacaacatcccagagccagttgtcatcggaatagtctggtcaagtgtaatgagcactgtggaatggaacaaaaaagaggagcttgtagcagagcaagccatcaagcacttgaagcaatacagccctctacttgctgcctttactactcaagctgaagtcctgagcgaggagcccattttgaagtggtataaagatgcacatgttgcaaaggggaagagtgttttccttgagcaaatgaaaaagtttgtagaatggctcaaaaatgctgaagaagaatctgaatctgaagctgaagaaggtgactgaattttgaaactacaccctcagtaaagcaaacaggagttgtagataaaatgtcatgtctcatgtgtcctggttcttacatcttcctacctccctgtatcaagcatgatataagggctttcatggcaaattttattttaactgtttctatggttgctggaaatgttgggtttagtttctaaaaccatgttttaagtagctacaggagctatagatttgaatctaatgttgcattagtcttttcagttatcttctacctcctgtattttctactgtaataatgtaatttaaggccttccacaatgaacagttcactttattccctgggttttctataaacagttttaaggatatgatttggttaaaaaataattt

SEQ ID NO: 2369 - DNA, 2158 bp, Homo sapiens
  source 1..2158: mol_type = unassigned DNA; mol_type = unassigned DNA
actcattcataaaacgcttgttataaaagcagtggctgcggcgcctcgtactccaaccgcatctgcagcgagcatctgagaagccaagactgagccggcggccgcggcgcagcgaacgagcagtgaccgtgctcctacccagctctgctccacagcgcccacctgtctccgcccctcggcccctcgcccggctttgcctaaccgccacgatgatgttctcgggcttcaacgcagactacgaggcgtcatcctcccgctgcagcagcgcgtccccggccggggatagcctctcttactaccactcacccgcagactccttctccagcatgggctcgcctgtcaacgcgcaggacttctgcacggacctggccgtctccagtgccaacttcattcccacggtcactgccatctcgaccagtccggacctgcagtggctggtgcagcccgccctcgtctcctccgtggccccatcgcagaccagagcccctcaccctttcggagtccccgccccctccgctggggcttactccagggctggcgttgtgaagaccatgacaggaggccgagcgcagagcattggcaggaggggcaaggtggaacagttatctccagaagaagaagagaaaaggagaatccgaagggaaaggaataagatggctgcagccaaatgccgcaaccggaggagggagctgactgatacactccaagcggagacagaccaactagaagatgagaagtctgctttgcagaccgagattgccaacctgctgaaggagaaggaaaaactagagttcatcctggcagctcaccgacctgcctgcaagatccctgatgacctgggcttcccagaagagatgtctgtggcttcccttgatctgactgggggcctgccagaggttgccaccccggagtctgaggaggccttcaccctgcctctcctcaatgaccctgagcccaagccctcagtggaacctgtcaagagcatcagcagcatggagctgaagaccgagccctttgatgacttcctgttcccagcatcatccaggcccagtggctctgagacagcccgctccgtgccagacatggacctatctgggtccttctatgcagcagactgggagcctctgcacagtggctccctggggatggggcccatggccacagagctggagcccctgtgcactccggtggtcacctgtactcccagctgcactgcttacacgtcttccttcgtcttcacctaccccgaggctgactccttccccagctgtgcagctgcccaccgcaagggcagcagcagcaatgagccttcctctgactcgctcagctcacccacgctgctggccctgtgagggggcagggaaggggaggcagccggcacccacaagtgccactgcccgagctggtgcattacagagaggagaaacacatcttccctagagggttcctgtagacctagggaggaccttatctgtgcgtgaaacacaccaggctgtgggcctcaaggacttgaaagcatccatgtgtggactcaagtccttacctcttccggagatgtagcaaaacgcatggagtgtgtattgttcccagtgacacttcagagagctggtagttagtagcatgttgagccaggcctgggtctgtgtctcttttctctttctccttagtcttctcatagcattaactaatctattgggttcattattggaattaacctggtgctggatattttcaaattgtatctagtgcagctgattttaacaataactactgtgttcctggcaatagtgtgttctgattagaaatgaccaatattatactaagaaaagatacgactttattttctggtagatagaaataaatagctatatccatgtactgtagtttttcttcaacatcaatgttcattgtaatgttactgatcatgcattgttgaggtggtctgaatgttctgacattaacagttttccatgaaaacgttttattgtgtttttaatttatttattaagatggattctcagatatttatatttttattttatttttttctaccttgaggtcttttgacatgtggaaagtgaatttgaatgaaaaatttaagcattgtttgcttattgttccaagacattgtcaataaaagcatttaagttgaatgcga

SEQ ID NO: 2370 - DNA, 796 bp, Homo sapiens
  source 1..796: mol_type = unassigned DNA; mol_type = unassigned DNA
ccaaccgcatctgcagcgagcatctgagaagccaagactgagccggcggccgcggcgcagcgaacgagcagtgaccgtgctcctacccagctctgctccacagcgcccacctgtctccgcccctcggcccctcgcccggctttgcctaaccgccacgatgatgttctcgggcttcaacgcagactacgaggcgtcatcctcccgctgcagcagcgcgtccccggccggggatagcctctcttactaccactcacccgcagactccttctccagcatgggctcgcctgtcaacgcgcaggacttctgcacggacctggccgtctccagtgccaacttcattcccacggtcactgccatctcgaccagtccggacctgcagtggctggtgcagcccgccctcgtctcctccgtggccccatcgcagaccagagcccctcaccctttcggagtccccgccccctccgctggggcttactccagggctggcgttgtgaagaccatgacaggaggccgagcgcagagcattggcaggaggggcaaggtggaacaggtgaggaactctagcgtactcttcctgggaatgtgggggctgggtgggaagcagccccggagatgcaggagcccagtacagaggatgaagccactgatggggctggctgcacatccgtaactgggagccctggctccaagcccattccatcccaactcagactctgagtctcaccctaagaagtactctcatagtttcttccctaagtttcttaccgcatgctttcagactgggctcttctttgtt

SEQ ID NO: 2371 - DNA, 596 bp, Homo sapiens
  source 1..596: mol_type = unassigned DNA; mol_type = unassigned DNA
aaccgcatctgcagcgagcatctgagaagccaagactgagccggcggccgcggcgcagcgaacgagcagtgaccgtgctcctacccagctctgctccacagcgcccacctgtctccgcccctcggcccctcgcccggctttgcctaaccgccacgatgatgttctcgggcttcaacgcagactacgaggcgtcatcctcccgctgcagcagcgcgtccccggccggggatagcctctcttactaccactcacccgcagactccttctccagcatgggctcgcctgtcaacgcgcaggtaaggctgccgtggccggagcggtgccggctcgggggctcgggacttgctctgagcgcacgcacgcttgccatagtaagaattggttcccccttcgggaggcaggttcgttctgagcaacctctggtctgcactccaggacggatctctgacattagctggagcagacgtgtcccaagcacaaactcgctaactagagcctggcttctccggggaggtggcagaaagcggcaatcccccctcccccggcagcctggagcacggaggagggatgagggaggagggtgcagcgggcgggtg

SEQ ID NO: 2372 - DNA, 567 bp, Homo sapiens
  source 1..567: mol_type = unassigned DNA; mol_type = unassigned DNA
aaccgcatctgcagcgagcatctgagaagccaagactgagccggcggccgcggcgcagcgaacgagcagtgaccgtgctcctacccagctctgctccacagcgcccacctgtctccgcccctcggcccctcgcccggctttgcctaaccgccacgatgatgttctcgggcttcaacgcagactacgaggcgtcatcctcccgctgcagcagcgcgtccccggccggggatagcctctcttactaccactcacccgcagactccttctccagcatgggctcgcctgtcaacgcgcagtgccaacttcattcccacggtcactgccatctcgaccagtccggacctgcagtggctggtgcagcccgccctcgtctcctccgtggccccatcgcagaccagagcccctcaccctttcggagtccccgccccctccgctggggcttactccagggctggcgttgtgaagaccatgacaggaggccgagcgcagagcattggcaggaggggcaaggtggaacagttatctccagaagaagaagagaaaaggagaatccgaagggaaaggaat

SEQ ID NO: 2373 - DNA, 1402 bp, Homo sapiens
  source 1..1402: mol_type = unassigned DNA; mol_type = unassigned DNA
aaccgcatctgcagcgagcatctgagaagccaagactgagccggcggccgcggcgcagcgaacgagcagtgaccgtgctcctacccagctctgctccacagcgcccacctgtctccgcccctcggcccctcgcccggctttgcctaaccgccacgatgatgttctcgggcttcaacgcagactacgaggcgtcatcctcccgctgcagcagcgcgtccccggccggggatagcctctcttactaccactcacccgcagactccttctccagcatgggctcgcctgtcaacgcgcaggacttctgcacggacctggccgtctccagtgccaacttcattcccacggtcactgccatctcgaccagtccggacctgcagtggctggtgcagcccgccctcgtctcctccgtggccccatcgcagaccagagcccctcaccctttcggagtccccgccccctccgctggggcttactccagggctggcgttgtgaagaccatgacaggaggccgagcgcagagcattggcaggaggggcaaggtggaacaggagacagaccaactagaagatgagaagtctgctttgcagaccgagattgccaacctgctgaaggagaaggaaaaactagagttcatcctggcagctcaccgacctgcctgcaagatccctgatgacctgggcttcccagaagagatgtctgtggcttcccttgatctgactgggggcctgccagaggttgccaccccggagtctgaggaggccttcaccctgcctctcctcaatgaccctgagcccaagccctcagtggaacctgtcaagagcatcagcagcatggagctgaagaccgagccctttgatgacttcctgttcccagcatcatccaggcccagtggctctgagacagcccgctccgtgccagacatggacctatctgggtccttctatgcagcagactgggagcctctgcacagtggctccctggggatggggcccatggccacagagctggagcccctgtgcactccggtggtcacctgtactcccagctgcactgcttacacgtcttccttcgtcttcacctaccccgaggctgactccttccccagctgtgcagctgcccaccgcaagggcagcagcagcaatgagccttcctctgactcgctcagctcacccacgctgctggccctgtgagggggcagggaaggggaggcagccggcacccacaagtgccactgcccgagctggtgcattacagagaggagaaacacatcttccctagagggttcctgtagacctagggaggaccttatctgtgcgtgaaacacaccaggctgtgggcctcaaggacttgaaagcatccatgtgtggactcaagtccttacctcttccggagatgtagcaaa

SEQ ID NO: 2374 - DNA, 629 bp, Homo sapiens
  source 1..629: mol_type = unassigned DNA; mol_type = unassigned DNA
gccacgatgatgttctcgggcttcaacgcagactacgaggcgtcatcctcccgctgcagcagcgcgtccccggccggggatagcctctcttactaccactcacccgcagactccttctccagcatgggctcgcctgtcaacgcgcaggacttctgcacggacctggccgtctccagtgccaacttcattcccacggtcactgccatctcgaccagtccggacctgcagtggctggtgcagcccgccctcgtctcctccgtggccccatcgcagaccagagcccctcaccctttcggagtccccgccccctccgctggggcttactccagggctggcgttgtgaagaccatgacaggaggccgagcgcagagcattggcaggaggggcaaggtggaacagttatctccagaagaagaagagaaaaggagaatccgaagggaaaggaataagatggctgcagccaaatgccgcaaccggaggagggagctgactgatacactccaagcggtaggtactctgtgggttgctcctttttaaaacttaaggggaaagttggagattgagcataagggcccttgagtaagactgtgtcttatgctttcctttatccctctgtatacaggagacag

SEQ ID NO: 2375 - DNA, 1496 bp, Homo sapiens
  source 1..1496: mol_type = unassigned DNA; mol_type = unassigned DNA
gatgctgaagggataacgggaacgcagcggcaggatggaagagacaggcactgcgctgcggaatgcctgggaggaaaagggggagacctttcatccaggatgagggacatttaagatgaaatgtccgtggcaggatcgtttctcttcactgctgcatgcggcactgggaactcgccccacctgtgtccggaacctgctcgctcacgtcggctttccccttctgttttgttctaggacttctgcacggacctggccgtctccagtgccaacttcattcccacggtcactgccatctcgaccagtccggacctgcagtggctggtgcagcccgccctcgtctcctccgtggccccatcgcagaccagagcccctcaccctttcggagtccccgccccctccgctggggcttactccagggctggcgttgtgaagaccatgacaggaggccgagcgcagagcattggcaggaggggcaaggtggaacagttatctccagaagaagaagagaaaaggagaatccgaagggaaaggaataagatggctgcagccaaatgccgcaaccggaggagggagctgactgatacactccaagcggagacagaccaactagaagatgagaagtctgctttgcagaccgagattgccaacctgctgaaggagaaggaaaaactagagttcatcctggcagctcaccgacctgcctgcaagatccctgatgacctgggcttcccagaagagatgtctgtggcttcccttgatctgactgggggcctgccagaggttgccaccccggagtctgaggaggccttcaccctgcctctcctcaatgaccctgagcccaagccctcagtggaacctgtcaagagcatcagcagcatggagctgaagaccgagccctttgatgacttcctgttcccagcatcatccaggcccagtggctctgagacagcccgctccgtgccagacatggacctatctgggtccttctatgcagcagactgggagcctctgcacagtggctccctggggatggggcccatggccacagagctggagcccctgtgcactccggtggtcacctgtactcccagctgcactgcttacacgtcttccttcgtcttcacctaccccgaggctgactccttccccagctgtgcagctgcccaccgcaagggcagcagcagcaatgagccttcctctgactcgctcagctcacccacgctgctggccctgtgagggggcagggaaggggaggcagccggcacccacaagtgccactgcccgagctggtgcattacagagaggagaaacacatcttccctagagggttcctgtagacctagggaggaccttatctgtgcgtgaaacacaccaggctgtgggcctcaaggacttgaaagcatccatgtgtggactcaagtccttacctcttccggagatgtagcaaaacgcatggagtgtgtattgttcccagtgacacttcagagagctggtag

SEQ ID NO: 2376 - DNA, 834 bp, Homo sapiens
  source 1..834: mol_type = unassigned DNA; mol_type = unassigned DNA
cggcaggatggaagagacaggcactgcgctgcggaatgcctgggaggaaaagggggagacctttcatccaggatgagggacatttaagatgaaatgtccgtggcaggatcgtttctcttcactgctgcatgcggcactgggaactcgccccacctgtgtccggaacctgctcgctcacgtcggctttccccttctgttttgttctaggacttctgcacggacctggccgtctccagtgccaacttcattcccacggtcactgccatctcgaccagtccggacctgcagtggctggtgcagcccgccctcgtctcctccgtggccccatcgcagaccagagcccctcaccctttcggagtccccgccccctccgctggggcttactccagggctggcgttgtgaagaccatgacaggaggccgagcgcagagcattggcaggaggggcaaggtggaacaggagacagaccaactagaagatgagaagtctgctttgcagaccgagattgccaacctgctgaaggagaaggaaaaactagagttcatcctggcagctcaccgacctgcctgcaagatccctgatgacctgggcttcccagaagagatgtctgtggcttcccttgatctgactgggggcctgccagaggttgccaccccggagtctgaggaggccttcaccctgcctctcctcaatgaccctgagcccaagccctcagtggaacctgtcaagagcatcagcagcatggagctgaagaccgagccctttgatgacttcctgttcccagcatcatccaggcccagtggctctgagacagcccgctccgtgccagacatg

SEQ ID NO: 2377 - DNA, 249 bp, Homo sapiens
  source 1..249: mol_type = unassigned DNA; mol_type = unassigned DNA
cgtctcctccgtggccccatcgcagaccagagcccctcaccctttcggagtccccgccccctccgctggggcttactccagggctggcgttgtgaagaccatgacaggaggccgagcgcagagcattggcaggaggggcaaggtggaacagaagaagaagagaaaaggagaatccgaagggaaaggaataagatggctgcagccaaatgccgcaaccggaggagggagctgactgatacactccaagcg

SEQ ID NO: 2378 - DNA, 1280 bp, Homo sapiens
  source 1..1280: mol_type = unassigned DNA; mol_type = unassigned DNA
gcaggagcccagtacagaggatgaagccactgatggggctggctgcacatccgtaactgggagccctggctccaagcccattccatcccaactcagactctgagtctcaccctaagaagtactctcatagtttcttccctaagtttcttaccgcatgctttcagactgggctcttctttgttctcttgctgaggatcttattttaaatgcaagtcacacctagtctgcaactgcaggtcagaaatggtttcacagtggggtgccaggaagcagggaagctgcaggagccagttctactggggtgggtgaatggaggtgatggcagacacttttactgaatgtcggtctttttttgtgattattctagttatctccagaagaagaagagaaaaggagaatccgaagggaaaggaataagatggctgcagccaaatgccgcaaccggaggagggagctgactgatacactccaagcggagacagaccaactagaagatgagaagtctgctttgcagaccgagattgccaacctgctgaaggagaaggaaaaactagagttcatcctggcagctcaccgacctgcctgcaagatccctgatgacctgggcttcccagaagagatgtctgtggcttcccttgatctgactgggggcctgccagaggttgccaccccggagtctgaggaggccttcaccctgcctctcctcaatgaccctgagcccaagccctcagtggaacctgtcaagagcatcagcagcatggagctgaagaccgagccctttgatgacttcctgttcccagcatcatccaggcccagtggctctgagacagcccgctccgtgccagacatggacctatctgggtccttctatgcagcagactgggagcctctgcacagtggctccctggggatggggcccatggccacagagctggagcccctgtgcactccggtggtcacctgtactcccagctgcactgcttacacgtcttccttcgtcttcacctaccccgaggctgactccttccccagctgtgcagctgcccaccgcaagggcagcagcagcaatgagccttcctctgactcgctcagctcacccacgctgctggccctgtgagggggcagggaaggggaggcagccggcacccacaagtgccactgcccgagctggtgcattacagagaggagaaacacatcttccctagagggttcctgtagacctagggaggaccttatctgtgcgtgaaacacaccaggctgtgggcctcaaggacttgaaa

SEQ ID NO: 2379 - DNA, 2158 bp, Homo sapiens; identical to SEQ ID NO: 2369
  source 1..2158: mol_type = unassigned DNA; mol_type = unassigned DNA

SEQ ID NO: 2380 - DNA, 796 bp, Homo sapiens; identical to SEQ ID NO: 2370
  source 1..796: mol_type = unassigned DNA; mol_type = unassigned DNA

SEQ ID NO: 2381 - DNA, 596 bp, Homo sapiens; identical to SEQ ID NO: 2371
  source 1..596: mol_type = unassigned DNA; mol_type = unassigned DNA

SEQ ID NO: 2382 - DNA, 567 bp, Homo sapiens; identical to SEQ ID NO: 2372
  source 1..567: mol_type = unassigned DNA; mol_type = unassigned DNA

SEQ ID NO: 2383 - DNA, 1402 bp, Homo sapiens; identical to SEQ ID NO: 2373
  source 1..1402: mol_type = unassigned DNA; mol_type = unassigned DNA

SEQ ID NO: 2384 - DNA, 629 bp, Homo sapiens; identical to SEQ ID NO: 2374
  source 1..629: mol_type = unassigned DNA; mol_type = unassigned DNA

SEQ ID NO: 2385 - DNA, 1496 bp, Homo sapiens; identical to SEQ ID NO: 2375
  source 1..1496: mol_type = unassigned DNA; mol_type = unassigned DNA

SEQ ID NO: 2386 - DNA, 834 bp, Homo sapiens; identical to SEQ ID NO: 2376
  source 1..834: mol_type = unassigned DNA; mol_type = unassigned DNA

SEQ ID NO: 2387 - DNA, 249 bp, Homo sapiens; identical to SEQ ID NO: 2377
  source 1..249: mol_type = unassigned DNA; mol_type = unassigned DNA

SEQ ID NO: 2388 - DNA, 1280 bp, Homo sapiens; identical to SEQ ID NO: 2378
  source 1..1280: mol_type = unassigned DNA; mol_type = unassigned DNA

SEQ ID NO: 2389 - DNA, 5884 bp, Homo sapiens
  source 1..5884: mol_type = unassigned DNA; mol_type = unassigned DNA
gaagcggcggcgaaggcggcggcggcggcggcggcggcggcagcagcgcggctcggtctctggtccattcactccacgctttctgcagccgccactgcagccgcgcggcgggggctccctccttgcagccagccggcggtccagcctggtgcctctgcaaaggaaaggggagcgtggagacgtgttcgaggtggtatcggcgaggatctctcgggcgccgctcactccttggtcgccttgcttgccagcagttgctcccttagtccttggctcgctcgcacaccccctcccgctacagggagcagttttgggtggcgtgggctccgtcctcttcttggctggtaggaacggtgtgcccaagaggggaagcctagtgggcctggcccctcccagccccgcgccaatgagtgccagggcgccgaaggagctgaggctggcgttgccgccgtgtctcctcaaccggacctttgcttcccccaacgccagcggcagcggcaacacgggtgcccgcggcccaggcgcagtaggcagcggcacctgcatcacgcaggtgggacagcagctcttccagtccttctcctccacgctggtgctgattgtcctggttaccctcatcttctgcctcatcgtgctgtccctctccactttccacatccacaagcgtaggatgaagaagcggaagatgcagagggctcaggaggaatatgagcgggatcactgcagcggcagccgcggtggcggggggctgccccgacctggcaggcaggccccaacccacgcaaaggaaacccggctggagaggcagccccgggactctcccttctgcgccccttccaacgcctcgtcgttgtcctcttcgtcccctggcctcccgtgccagggtccctgtgctcctccgcctccaccgccagcctccagtccccaaggagcacacgcagcttcctcctgtttggacacagctggcgagggccttttgcaaacggtggtactgtcctgatcgtctagcccctctcgttccccgtcctcgtttccagcatctttgccacccttgcttttttccttcttccttccttttccattttcctctggcccctctttcctcttcctggtttccttacctgccctccccttactcttgtttctcctccgccgaggcactgtgcggtatttgtaaatattgggcgaggaaagtctcggaagaagaaataacgctgataataatactttattaatatttatagtaattattataatactaataacacaatccaagcgcatgacaaatcacataatttctaactgtcaatggaggatgcatcttcccattccaccccgcgctcccctcaattaggaggagaaaccgcacaagctaccaaatatataaaaggcattgattcccggagcaaagggaggggagggggcccggtaatgtacatagctgtcaagttaagatttagtttccttccttcccctctgacccctaagctttcacttttcctttagcttccctttcctccccattcccaccctcagccgggctcaggcaatagtatattataaagaaaatgtctacattaagcaccaggactgcaagaggccatagagaatagtccccggaaagtgtttatgacaggtacccctcgccagtccgcccatttctcaccctttggttaaccattacattttccaggacagagcatttaatttactttttaaaatgaccctcgctggccgagcataagtacgttaaaatctttaaatgagttttttttaaaaagctaacgctttcattccctgccccgcccccacccgtacacctttgacttgtgacattttcaggatttacaaaggatctgggagctgtccagccaggtctggtgctgaagtcgcctcaccgttctgattacttcctctagttgtgaaggcagaggaggggctgttttggaaagtgactattctggcttttggttgggttctttcttctttttctacaatcgagttagcgtgtactattggttttcttattattaaacattgcataagttaccttttttgtaaaaaaaaaaaagtattaggtgatgtgcagtactgaaagtgcagtatctaaccaactagaacgtttgttttatttttagaacaagtgcacctttgttatatatttagtatattggtaccaaatacagaaaaaaactatagttctgtactatgtcctccaaactgtatattattgttcttaatttccagctgttgatataatggttaccactggatgagaaattcagtggtgcagacctggcttctgctgtttccagaagtgttcttttgtaccttattctgtagtagactgttataaaaagatgacacacacgctttattttttcttttgcaaataatagaaaaaacacaaccacagaaacaaacaaataatggatgtgcaagaatgccatctattaaaaacatggttaatatttaaacagtgcctgtagttctccctgcatgcagttaccacctggaggcagtggtgtgtgtgcttgcttgtactgtatgtggttggggatgagactggtggggatgttgggcaatttggatgataagacatgcgaatttcaagaaaagctagatccagtaattacttataggatacaaatgtttgcagcttgtttgtttagttacaaatctgtgcctgcagcaaaagaaaggctctctttctcagtctgtcctaacttcactgaacatacaaaaatactgagaaaaaaagaaagtgagaaaataagataaatattttattattttctaatgccagacaaggccatctatgttagaaatggaagtagtctatagttatttaccaccttgtttcctttggttgaatgacagaagaagccagaagcatattacaatattaattatatgcagtgacatctcttcttggaaatcaagcctttgacagctattcaaatttttggaaaatgtatgaatgaaagtgatctgcaaaaagctctaccaagagagtccttactatcctgcagggtgtaaggcaacagtgcccctatgagcatccctctcccaagcaactcattgttctaaattgtctacttggtccagacatatgtgctcttatccagaggaaacattacctctaatatttttggtcatctattaaattgcccaagctcagtttgcatcttttataaaaataatttaataaacttaattttaatcacccataagataatcacctttcctgaagcacagaagatcatcattgaagcatgccatcttgtaatattaggaagaccaggtataatctttgggtacaatatattaaacaatgaaccagtttttctccagtgccttagtcacttcctagtaataggtaaaagagtgcattaactccctcaggccactagggaatcctgtagtgcatcagagttctacactgtacatcagaatgactaaggcactgtgaagaagaaagtccattgatttttgtagcttaccctcatccagtggtagctctttaataccttattacagaatgacttttggacttgaaatttgaatagaatcagggtcccagaagggagcttcatcatttccaatgagctccaataagtgcatggatattactttctttcccttatttggtgcactttctacagcgaataatttcccattttattaaagcaataagatgttctgttgtgagcagtgctggataacgattccattttcttggtgctgaagctacgcatatgttcttgccttatgaatcatagtatattcaaggcatgcaataataatccccttccaaggagcagcctgtacactctgtgggggtaattatgaaattgtcctacatcatttctccccaaaggaatgcaaggagcaagagaaataaaagcattatgtatattgtaaaacaaatgatctcaatacctctcaacgtgggcacacatctgtaatacacttttattgtgcaactttaaatgtgtgtgcctttctccattaattgactgtagtttaatatttttaatagtgctctgtgtaaagatgatgcagtttgtgagtcagatttcatactgagcttaatatactcaaaacctaagcttccagtggtattacttgtgatttttttatgagatagagaattacatgaaattctagtaatccagtttccacacaaaattatttcaataagcacatatccaagcaatttgtacagaccttgtttaaagcactgcttcttatagggctcaattggcagtctcaggagcttgggatgctaccaacagggcatttaggttttcatttttatgaaacaaaaggcaatctggaaatagctaaatttattttaaggattttattcactgatgtcccgtcaaactaaatgcttcaaacccctatagctacagcttaacttctgcacttgctattcagtattaataaggtggcatgcttgattcttattgtttttaaaaatgagaaaatttggagagagaatactattatgtcaacggtacaagactctgaatcttgaagatgtagatggatataatatttagactttatatacacccatagatatgtatttatatatgcatacgttttgtataaatttacaattgactttttgtattctcttttctgtcattacaagaatgagatggaaaccaaaatagttgttccatcctcttacccaaagaggatactgaaaagtccggtatgtgcatgcacttgtttctctggggtcaaatctgaatgactttctctttaataatgaaaggggagagtcctggttagcttggaaaattggtaattagataagcttcctttcctaggttagtgactcaaatgtagcaatgataataaagttatgaccatatcaatgtggtctaaatatctagatggaaagcaaaaatatccagaagaggtttagggccatctagaccacaaacctggaacctggattgtggtttgatttttttcattttcaacctatatgttgtgtagaaatacaatttatatctgcatagctaaaggtaaagtgaaaatatgaccattatctgtttagtttgagaaatcatttttggataatatggataaattagctttaagaaacttctttgacatctgacttttccaccatttctatctgtatcaattgtattaattagataatggttaaatttttatttttttatcatgtagacatatgctttcatgcttttctgtgggtgaaagttgaacaattgctagctgatattatgtggaagttacaggttaaagtagaaccagaaattttaatataatctgatcaggttccttagtcccattcccatgtgaatctgaactttgaatttgaatctgaaaggcctacttatttgggccattttttgttggaacttgtgattgtaactcacagatgtttcagttcatattagaataaattgcccaatctataagagagtgtttaatcattggaatgaatgtaaatctgattctgatttggttatttatttgataacatttgagaaacagctaatgtggcttgacatcaatacttattaatgtcttcaacctaataatacaattggtgtcatgtatgaatgcttagctgacaataagaatttaatcaactttatttggagacaatgacttatcaaggaggtcctacccatttgtggtagggatatttcccttacagttgtgattacaagggattgtttctatagagagatgaacagcaacaacagtgacaatgatgacaacagaaaaactgacttttgaacttgagtatatccaatagatagaagaaaaaagatattagaattcatggaaattttgttttgcttttctatcaataaaagagttttcttgttaa

SEQ ID NO: 2390 - DNA, 5884 bp, Homo sapiens; identical to SEQ ID NO: 2389
  source 1..5884: mol_type = unassigned DNA; mol_type = unassigned DNA

SEQ ID NO: 2391 - DNA, 8404 bp, Homo sapiens
  source 1..8404: mol_type = unassigned DNA; mol_type = unassigned DNA
gggctgcgcccaaggctgccgggagcagactgggctgcgggcggcggggccggcgcctgcctggagggatggggctgccgggcgcgtaggggccatgccgcccgggacccgggcctgccgcgttccgcgccccggccgccgcgccccacgtccgcgccgggatggtgaacctggcggccatggtgtggcgccggcttctgcggaagaggtgggtgctcgccctggtcttcgggctgtcgctcgtctacttcctcagcagcaccttcaagcaggaggagagggcagtgagagataggaatctcctccaggttcatgaccataatcagcccatcccgtggaaagtgcagtttaacttgggcaatagcagtcgtccgagcaatcagtgccgcaactccattcaagggaagcacctcatcacggatgaactcggctacgtttgcgagaggaaggatttgctggtaaatggctgctgtaatgtcaacgtccctagcacgaagcagtactgctgtgatggctgctggcccaacggctgctgcagcgcctatgagtactgtgtctcctgctgcctgcagcccaacaagcaacttctcctggagcgcttcctcaaccgggcagccgtggcattccagaacctcttcatggcagtcgaagatcactttgagttgtgcctggccaaatgcaggacctcatctcagagcgtgcagcatgagaacacctaccgggaccccatagcaaagtattgctatggagaaagcccgcccgagctcttccccgcttgacgggtgcagcggacttgctccagcctgggtgaggaggccccgctgaagaactcgcctcctgggacccagcttcagccatcgggccaggctgcaggaagaagacaaaggcagcgtgaggaaaccttggctttgaccccttctcgtgttgtcatctttggcttcgctcaccacccgggcttaccagatggaactcttctgtaaagcagcttggcccctccagccagtcccattcgggaaagatgaaaccggaggccgggctcacggtggtggtggagttcttggatgactcagccctgggacctgcacagggacctgtgacttgtgttcatcgggggccggtgtcacttccagttttgatccaggctctttcactgtaaaattatttattggattcctttggagtaatgggaacattctaatgttttatgtaggaaaatgccttgccattctagttgaatatgttcaaggaaattatttttgttgttgttctgtgttctcgagtttcaggagttaaatcattcttccacccagatacaacattttctcttttaggacgtgaatattctctctaggcagttatttttgtttgtatttcgacagtatcaagcataggccctgaacgtgacctgttagccatatcctgacgtgtaaaattatctaaaaactcagacactcttccattctaatctaactgcacgatttctaacagtgggcaccatgtgcctgccctcaggttattttccagtggtagtcgaatgtgctcatataccctatggagagcactgttttagcagaaatctaatttctcttcctggaggaatttgttctcatttcttttgccacttaaaattaactgtgggctactcagccagggtacagtgggagcctcaggaaggtcagaggcaacctcctcccctgttctatcaatagaaacccaacgttgaggcaattcctaaacagacgcacctcgtagcttgctgtatgtgtttattctttattgctttcagctttggggctgtaacaggtacaaatatttggtttccctatgatttatagagaagaagaagaaacccagctttctatcagagcactgcaagagaagagtcttacacctgccctcagtgggagatgagaatggtcattatgacttagagaatgctacacgtgtaggttgctggtgtgtcctgaatccacaggcataaagcactccccatttttcctactgtaatgcagattctccggctcaaggtctagaatatttgatcctaagatcaagacatcatgcccttcgaatagtactgctctttgttttcaggagtcacgtgaacacacaactctcctatattcctcacgaacctcaggattgagcaaggtctttgtaatttttttggttcactttattgacctgggagcaaggtgctaattctgtggtcagtattcaatgtttttttcagtggagctttttctttgggccatatttgccttctaatacattcctgcaatatgtagtggtgatttcccttagcttcctcctactacctcttatactcatctccccaaattatttgcctcccttaaataagttttcctagaaggtaagctggtcaggcaatttgaaaaatattagatcccaagaaatctattccgtttgcattggacttctcggattccatgtgtttgcagcaggactacatcgaactctgatgtgccggattgtggcatgtctgcatgtctcatccatctattgtttttggtaactcagtttggaatttcagtgtctgtcttccctgggttgacattggaatcagcctctcctttgagcttattttaactcttgagcaacataacatagatttaatgtgaacagtttataccaaagggcagcctgtgcctgtttatggatcctctctgcctttgtacttgaagagcgcattttacatttccagtcctttcacagacaggagctccaaccttacgatggagaattaaacttgcttgtatttccactttgtggatgaggaactatgagaggtggagtgacttcctgggtccccgctgagacttagtgacagatcccagacaagaacttcatctctgactccaggtctagtcctcttccccctgtctcttgccaactccagccctgacaccgtgggcgtctcccctgagagcagatatatttcaattgtccaggccaaaagaggggcgaggcggcataaacacccaaattaggtggaggatccaaaagtcattttcatttggctgtggaatatgttttttgtatttcaatcagctaggggtgtgttcactgtttttggaaattcacagcgcttgagcctccataatgaagctgggctgcagagcacctggcacgtgctccaggctcccagctcccaacctaggacctctccctgccctccactctggttggtttgtggttccctcgaccgagggtttctagaatcagggaccttgtctaagttttgtttgcccagagcccagcgaagtgtgtgatacaccttgggagtttaggagatcacaaaagggatgaaaacacctttagaaaacatttcattggtggggcgtggtggcttatgcctgtaatcccagcactttggaaggctgaggcaggtggatcacctgaaggcaggagttcagaccagcctgaccaatatggtgaaaccccatctatactaaaaatacaaaaattagccgggtgtgggggcgtgtgcctgtttttgtgagactctgtctcaaaaaaaagaaaaaaatattgttaataagtgagtgttttcggctcaagggaattgagtcatacgttgcatctcccccagttctgcatcttatttgctgcgcttgctggagttgtaaagattggtcctaacagggaaagaagcacacaagagactgtgaaaagggctctgagacaagcaaggacaaaagagggagggaaataccttccacagggcctgggatctggcaatgctagagccttttttttttttttttttttttgcgatggagtcttgctctgttgctcaggctggagtgcaatggcgtgatctcagctcactgcaacctccccctcctgggttcaagcaattctcctgcctcagcctcctgagtagctgggatcacaggcgtacaccaccacacccagctaagtttttgtacttttagtagagacggggtttcaccatgttggccaggctggtcacggactcctgacctcagatgatctgcccgcctgagcctccgaaagtgctgggattacaggcgtgagccactgcgcccggcatggagctgctattgatgggtgagctccacagcttttgcagaagcagaggatatgacttgagagcagtgctgtcacctctcagcatgtccccaagcccaactggggcctcctggagatgcctcagtcggcactggccccaagggaatcgtggggaacagttgcacaatttgcaagtttctgagtgcagcttttcccatccttgggatcagcagataagttgtaaacacagggaggtactgcttattggatatacttttcataagtaggacagaattcttttgggactctagagttgggaactaccacttactagcggcgtggctgaggcagtcttcctcctctgtggctcaggcccttcatctgtgaaatggggtcacagcatctgcctctcagggtcactgtgaggtgtcgatgtgagcaaggcctgaggcttggcaagaagtcaatgtctgcaactcagcagggagcaatggcaggggcagtcaggggtcggctcggataggggtgggtgggctcctgaggttggaagggtaggaattacagagctcttgttactattgttgttactgtttttaaagatacgatatttcagataattcaggagcacgtaaggatgaaacttaggataacctaaaatcacacaacctagagagaagcgcatttttgtcttcccccattttctaggcaaaaatgaaagtactttgtcctcttgaaaaacaattctctaatgaatatcctatgttacatagaggcctgtgtaatgcatttgtgtggccacatggtgtcaatttcatgaatatacaataatattattaattccctgctgaggacattaactggtttccaaggctgcttgttgtttttgctactacaaataatgcattgatgataaatacttttacatacatggttgtatgtttatctgaactattttcaccaatatattcacctagtgtgtatggaagtgtccatttttgtcatacccctggtaaccctgtgatattatttttaaacattttgctaatggatctctgttcttgtttgaatgtatttaatttccagcagaatgagccccattccttattttgattggccatttatcatgtacatatggtgaaatgcctattcgtgacttagccaatgttgtttctttttcttactgattactacagtacatttttatatgaaagcagcctttgtccccttctcttgtttttcagccctgtgttagaaacaactaagctcacatattcacaaaccaacttttccagttcatctagggcagtggtgctcaacaggggcaattttgccccccagggaacatttggcaatgtctggagacatttttgtcacaggtggggaggagggcagtactgtgggcactcgtggagggaggccagggatggtgcccaacagcccccacgacacagaattacctggctggaagtgggagccgggtggagggagggaagccctgctctggggtcatatctccccgttagattgaacagaggagctcctggtagctgagtgctgacttcattatttttccccgcccttgctttctaccctgctgaagtgctgctgattaaattaccctgaaatccccacaggacacattacttcctcacaggtctctactagcccagcgctgcctcaaggaatggcattattcctttgccactgtgtcctcaccgcactcttggactccgccgaatgcagacaccctcctgtctgcagaaggatctggaggggtagaacgcttcccctctacgacggattgactccccagcacctcaccagcagttctttgaatggagtggctttggaggtgggagttgaggaagaaatgtgagcctgtcattacaggttctgtttagaaaactagtcattctactaaaaaggtatcacataagtaagtaggagcaataaaaacaaagaagatagtgggactccgagaagctttccccgcctctggcctgttagtctatcgttcgttgggcaaggctcttccagtgtgtgaccttttgcgtgttatcacagcatgagtgcagttttgtgtacaggcatccctatattcagcatgtatctgcaacatgccttacctcgtctgctgtcacagagcaaagtggagcaagtggtcgccgttggtctgcacctgagctgggagccgagtggtgacgtgcatatgggccgactgcgtctccacagaacctactcagtgatcttcctgtgtacgactcagtccctgatgttggagttgaactgtaggactgtctgtaaaatgaaagtgcagactttaatgtagtaaagagaatgacttgccagttacaaccaatgagcaaagcagttaattattcaaatattttaccaagagtccaggtttattttttctcaggactacacattctgtgagaccagagggaccaagacatatcactaccagaaatgtgttttcatcagcactgccagaggttttcatagggtagtttactcttggaatttttaaattcatacttttttttatgcaacgtggggtaggtaagcttctgatcactgtgcacccagattatcccaaaatcgaaagtggtgttggcagccgggtgtggtggctcacacctgtaatcccagcactttgggaggccaaggtgagaggattgcttgagcccagaattcgagaccagcctgagcaacatagggagaccctgtctctacaaaaaataaaaaaaaggagccaggcatggtagtgcacacctgtagtcccagctactcaggaggctgaggcgggaggatggcttgagtccaggaggtcaaggctgcagtgagccgtcattgcgccagtgtgctccaacctgggccacagagtgagaccctgtctgaggaggggaaaaaagtgttgtctaaatgagaaatcaccattatcagtaatttaagattccaggctatgttggtcacatctcactattcttttttttttgaaacggattctcgttccatcgcccaggctggagtgcagtggcacgatctgggctcgctgcaagctctgcctcctgggttcacgccattctcctgcctcagcctcccgagtagctgggactacaggcgcccgccaccgtgcccagctaatttttgtatttttagtagagacggggtttcaccgtgttagtagccaggatggtctcgatctcctgacctcgtgatccgcccacctcggcctcccaaagtgctgggattacaggagtgagccaccgcgcctggccacatctcactattcttaaggaagagagagagcgagagagagtgttgtcctgtcctgtggggattggggcattgtattaagttgtactgggggatgtcaagatagaaatgttgagtaagttactacctgaataaatatttgaccagttgatgctaatttgaatagtaaatgtgatgacattatatattctcagggatgtttccatacattggctctgtgtgtgcgtgtgtgtgtgtgtgtgtgtgtaacaaaagcagtatgaagtatgtgagcaatatcctaattttattgacaagagcactgaccttaatgaccttgagtaaattaccctctccggctttggtttcctcatttgtcaattaagggtgatggctagcgtatcttgcagatccaaattccaatttttgtaacaagccaaaagtccccctggctgttaaagcaagaccagagccctcgtatcccagcggctgggtcccaggcttttgattttcacaggacaaatgtagcccagccatctggagcccgtttttctccaaaccagggcttcctccttctctcttgcagatttcaactggggctcaccattttctgcctcttcctcctccagttttaaagagacaccatatccttctctgctgggaccaacttcccatgtactgctgccctgcacctgtgaaaacagctgctgtgttttctgtcataaaaatagctgccttttggcagagaagcacacaacggtactacgtttctgagccttaatgcagtgctcaattatttaggtgtgcttcacctgagatacacagagcatcttggaactcctactaagcagggcttctacaggcattgctcagctcagtaaaaggttttcctttctctgcttttgtgattaccaggcagaaaccttaaaatgtatgaacttacaaagaaattaaattgtgccaaattagattcccagcccctagagataaccactaattaaagttccgctggagcgttttgcctgtattttgtatataaacgtggattttgtatttgtatgtaaataaaggtaggaccctgctgtccata

SEQ ID NO: 2392 - DNA, 1371 bp, Homo sapiens
  source 1..1371: mol_type = unassigned DNA; mol_type = unassigned DNA
ggtcacgtggggctgcgcccaaggctgccgggagcagactgggctgcgggcggcggggccggcgcctgcctggagggatggggctgccgggcgcgtaggggccatgccgcccgggacccgggcctgccgcgttccgcgccccggccgccgcgccccacgtccgcgccgggatggtgaacctggcggccatggtgtggcgccggcttctgcggaagaggtgggtgctcgccctggtcttcgggctgtcgctcgtctacttcctcagcagcaccttcaagcaggctacgtttgcgagaggaaggatttgctggtaaatggctgctgtaatgtcaacgtccctagcacgaagcagtactgctgtgatggctgctggcccaacggctgctgcagcgcctatgagtactgtgtctcctgctgcctgcagcccaacaagcaacttctcctggagcgcttcctcaaccgggcagccgtggcattccagaacctcttcatggcagtcgaagatcactttgagttgtgcctggccaaatgcaggacctcatctcagagcgtgcagcatgagaacacctaccgggaccccatagcaaagtattgctatggagaaagcccgcccgagctcttccccgcttgacgggtgcagcggacttgctccagcctgggtgaggaggccccgctgaagaactcgcctcctgggacccagcttcagccatcgggccaggctgcaggaagaagacaaaggcagcgtgaggaaaccttggctttgaccccttctcgtgttgtcatctttggcttcgctcaccacccgggcttaccagatggaactcttctgtaaagcagcttggcccctccagccagtcccattcgggaaagatgaaaccggaggccgggctcacggtggtggtggagttcttggatgactcagccctgggacctgcacagggacctgtgacttgtgttcatcgggggccggtgtcacttccagttttgatccaggctctttcactgtaaaattatttattggattcctttggagtaatgggaacattctaatgttttatgtaggaaaatgccttgccattctagttgaatatgttcaaggaaattatttttgttgttgttctgtgttctcgagtttcaggagttaaatcattcttccacccagatacaacattttctcttttaggacgtgaatattctctctaggcagttatttttgtttgtatttcgacagtatcaagcataggccctgaacgtgacctgttagccatatcctgacgtgtaaaattatctaaaaactcagacactcttccattctaatctaactgcacgatttctaacagtgggcaccatgtgcctgccctcaggttattt

SEQ ID NO: 2393 - DNA, 923 bp, Homo sapiens
  source 1..923: mol_type = unassigned DNA; mol_type = unassigned DNA
gttcccagttgcttgaatggttcttttgcagaatggatcattgtattgctaatcacatatctaatgaataagatacccagggtgttttggcatgcacgtgtgtgcacgcgtgtgtcctttcccctccctccttttctcctcctcttccccccttccctgtatcagcattctcttagtttaggagagatagccaaggtcaccttgtgctggcttaggtaatttattacaggcactaacttttgtttccatagcaacttctcctggagcgcttcctcaaccgggcagccgtggcattccagaacctcttcatggcagtcgaagatcactttgagttgtgcctggccaaatgcaggacctcatctcagagcgtgcagcatgagaacacctaccgggaccccatagcaaagtattgctatggagaaagcccgcccgagctcttccccgcttgacgggtgcagcggacttgctccagcctgggtgaggaggccccgctgaagaactcgcctcctgggacccagcttcagccatcgggccaggctgcaggaagaagacaaaggcagcgtgaggaaaccttggctttgaccccttctcgtgttgtcatctttggcttcgctcaccacccgggcttaccagatggaactcttctgtaaagcagcttggcccctccagccagtcccattcgggaaagatgaaaccggaggccgggctcacggtggtggtggagttcttggatgactcagccctgggacctgcacagggacctgtgacttgtgttcatcgggggccggtgtcacttccagttttgatccaggctctttcactgtaaaattatttattggattcctttggagtaatgggaacattctaatgttttatgtaggaaaatgccttgccattctagttgaatatgttcaaggaaatta

SEQ ID NO: 2394 - DNA, 492 bp, Homo sapiens
  source 1..492: mol_type = unassigned DNA; mol_type = unassigned DNA
tcttcgggctgtcgctcgtctacttcctcagcagcaccttcaagcagagcgtgcagcatgagaacacctaccgggaccccatagcaaagtattgctatggagaaagcccgcccgagctcttccccgcttgacgggtgcagcggacttgctccagcctgggtgaggaggccccgctgaagaactcgcctcctgggacccagcttcagccatcgggccaggctgcaggaagaagacaaaggcagcgtgaggaaaccttggctttgaccccttctcgtgttgtcatctttggcttcgctcaccacccgggcttaccagatggaactcttctgtaaagcagcttggcccctccagccagtcccattcgggaaagatgaaaccggaggccgggctcacggtggtggtggagttcttggatgactcagccctgggacctgcacagggacctgtgacttgtgttcatcgggggccggtgtcacttccagttttgatcca

SEQ ID NO: 2395 - DNA, 2633 bp, Homo sapiens
  source 1..2633: mol_type = unassigned DNA; mol_type = unassigned DNA
cgtcaccgccgcgcagcgcgggcgcagagccctgccctcagctgaagggagtcttcttttttttttttttttccgctgtttttttctccgcccctaagaggttgactccaaacccggagttccgctaggtccaacaggagggcttacggcgtgagcggcgtacctggggagaggcttaggcagcggcaaccgctgattggcagtaaaggggttcactccccatctcctgctcgggcgaaaccgggacagccaatcagagagagtactgacggaaacggcccaatcctggagcagggctgagggagggggcggggacaaatggctcaggtggactccgggctggagctgtcctgggggagcttgtttgcggcagcggctgctgctgccactgctgtgctgggggcccggtcgccaggcaaaaagccctcccacgtttgaggggagtcatgagccgtttcctgaatgtgttaagaagttggctggttatggtgtccatcatagccatggggaacacgctgcagagcttccgagaccacacttttctctatgaaaagctctacactggcaagccaaaccttgtgaatggcctccaagctcggacctttgggatctggacgctgctctcatcagtgattcgctgcctctgtgccattgacattcacaacaagacgctctatcacatcacactctggaccttcctccttgccctggggcatttcctctctgagttgtttgtctatggaactgcagctcccacgattggcgtcctggcacccctgatggtggcaagtttctccatcctgggtatgctggtcgggctccggtatctagaagtagaaccagtatccagacagaagaagagaaactgaggccagcattatcacctccaggactttctcgttttccaccttggccatcttcttccttcgtcgtctctcctctttaatttcttttctattccatcatctgcccttttattcacttttagcctctttttttaatttttaaaatttaaagatatgcatactgaaaagtatataacatgtacgtacaatttaaagaataattttaaagtgaatactacgtaactccatccaagtcaagaaattgccagcttctcggaagcccactgtgtctccttcccctacctgcaacctcttccaggctcccttttccagccttcccctttttcccttttattttcatgccttgatttgacttgtgtggtgggaacatgtgaactatgaaacttaaacctgctgcccacccagagcagctgtgaccaagggctgcctcaaggggttgtccacgcaggttgggctcctctctgctgctggacccaagactctgaaccttccaagggacaggcagttcttctaagaagggctcccctgtgtgtgagcaagaccacagctctccttctatctacagatgcatgagggttggaagagtctgggctgtttttagaccttctggtcagctgtatttgtgtaacaacttttgtaataaatagaaaaaccctctgctctgatcagttcttgtactttgacctctgctaagacaagagcatggctgcctcctctgagccctaggagaatcacagctttatgcctgattgaatacaccatagtgagtaggacagctcatgacacaggtcagcctggctgcctccggctccttactgtcatttgctcattcctcttgtattcttgaagtcaaatcttcttttttctcaccttcaagagtctgcgttcacaactaaacactaagtgccctttcttatttcctcctaaagaagaaacagattcttgagagagcagagacaaaaaaatagaactaggcagcatagatgaaacaactgcatgacatgggaagaagacaactaaaccccgaggagaatgcactggaatggacagttgctcttaaaccctacccagagggcctcccccagctggaccctcatacacagtgtgtgtatccaaaaggccattgctatttcagcaaatatttgttgagtacttctccatgccggacacttgggaaagagaaatgaacgacacaggcaatgcccctgccctgtgggccttatattatagtcaaggtaacagaatcaacaagccaacacaaaaataaagaacttcaaatagggataagaactctaacaaacacaaggtattttggtcaagaaggaatgtggggtgggcagtggggaacgtaacttaaattagatcatcagaaagtcctccctgaggagatgggatttttttgttttttagagacagggtttcactctgtcacccaggctggagtgcagtggcacaatcacacctcactgcagcctcaacttcctgggctcaagtgatcctcctgcatcagcttcccaagtagctgggactacaagtgtgtaccaccacatccagctaacatttttgggggtgggaagagatggggtcttactatgttgtccaggctaagaggtgggatttgagctgagacttgaatgcccaggagttaaatgtcttaagatatggagcaggccgttagaaaggagggagcagcaactggaaggtagaatagtcttattcaaggaataagaactatgtaatcacagcatggtgaagagttaggaagtg

SEQ ID NO: 2396 - DNA, 7583 bp, Homo sapiens
  source 1..7583: mol_type = unassigned DNA; mol_type = unassigned DNA
cgcgctcggggccctccgcctagtagagatctggagccagaagcccagagacagccgagtgcgccgtgcggtctccggacgctcgctgctcagcccgatccccgccaactgtgcaggcggctgacccgcagcggcagcggcagcagcgaggactcgagcgctggctgcagcgacaccatggatctctcctttatggccgcgcagctgcccatgatggggggagctttcatggactcgcccaacgaggacttcagcaccgagtactccctgtttaactcctctgccaatgtccacgcggctgccaatggccagggccagccggaagatcctcctcggtcctccaacgacgccgtcttgctatggattgccatcatagctacgctggggaacatcgtggtggtgggcgtggtgtatgccttcaccttctgaggacggcacaccctgcaccaccatggggtgaggcttggcacgtagctctgacttgctgtcggcctttggcttctcctgtgttctagaaccaggagttttgaccaggggcggcggccgtccttctggaatttctccccagcagccctgatttcaaatatcccatgttgtggtcaagctgagtcagaagacatggaagtatgggcctcctgcccctagaggcatgacggggcaaggccttcagagggcagattggggatccttgaaactacattccaggaacatgggaccagatgagacagctagttaagtttaaaacatagacatgatttgatgatcgcttgctggtggtaaataatcactcgtgtgtcttgtttttatgcaaacttatcgaacctagggcgtggggtgctggggcaagagcagccctcagaacttcagtgttcctgacccaattctggtttcacattcagtcccttggccatctagtagggccattggatgttcctagtttgactttgaaatggcacctttgccaccagacacctggtcccttccaagacccaagtgcattgggagacccagggatggggggttactggtaataggtggggtttctgggggtgttgttggtggtttttatctcctggtcggactttctcttctttttaagaagaggagaggatgtctttaagagctagatgtgccaggcagtggactcttcaggccacccacgtgagaatgctgtttcttctctgaggaatcgtggaattttaaagatgaacaagattcacatccactgaattattcaacggatgggtcagaaaggggggtgatttgcctgtggtcaccaggcaggtttgtggaggagtcggaacagaaagatgtgtcctcactctcagctcactgagctctctgccccaactaagcacttccctgaggaggttgctgagaagctgccctcaggagaatgtccaggcatcttgaaggtgggtgcgagattggcaggctgctcagatacccgtcctttacattcagtgtggataccgtgcattctcctgaagctgtgaaagtgcttctgcccaagccacttccttaaattctgaaatatcagcatctggggtcctggcaagcaaggaagcttccaagtaaaaaccagagagaagggcacacttttctttcttcattaggaaatcttattgcacaggaaccacccccacccccaccccccacaccttcccaaggcagcatcccagtgcagatagagtgggaaaggtcccagaagggggctcactcacctctaggcccagagaggctttctcctcactttatacactgcaaaaacagaagaattgtgtcaataacaccctctgtagtggagaaacttaaaaagctggttaggaagctctcgtgtatatttagagacaattacaagaaagctggacttgccgctgtggtctcaggagaaatgagtgttcttgatgacaggcaaagggacatcttagttgtccagaagcggcactcttccctggaagccgccatgttaataggattactagcctggctccagacagtgcctgctcatggctgccagttcttaccgatcacatctgtcactgccaccgtatatcatctgccagtgcatcagcttaaggggaggtcacgagtgcaaaagaacctgacccttgacaatgagggagaagggacatggaccacctgtctggaattcctggaatcactggcagggtggaggctgggctggggagttagccgcggtgtgcgtgaatggctctgtctccagcaagtctctctccatcaaaccccaggtctgccccataagcaagatctttaacagatggatgtctccatgagaaaacccaaggcgagaagcccagagccatggcggggttgcttgacgtcctcatggagtcactctgccccacatgctcaaatcttccctctggccccacatccctaggagggcctgacccctgtaaagatacaggaggcagctccctggcctccaaatggcccatggagatggcagtcgggagacagggttctgtgtttgctgcggtgaagggaggagaaggcaggaggaaaaaggatggcttctagccctgaagaggactccagcatcccaggcaccgggtgcttctggctgcagttttccctatggaggcccctcagcctccagccctaacataaatgtcggttaaattcagttttcaagcctctctcccttttcagtgtcagagcagtagatggtccagggcattggaggcctcgaccactctgcattgcagattacagtgacttcctcggggttgccccatcttggtctcctgtggtttcttcatcagctttttttttaccagcatctctcaaataacaatgaagatagatatgcccattagtgtctgattaaggagcaaaggctggatttctggccacagcgagctgcactctccctcctgcctcagccggggtccgtcttagcagtttggaaaggggaaaaagatgccggtcctcactgcttaagttttgtgtccaggtgccactagacttgcatgcacactaactccttacaatcaccacacagcatcatcgccccagtgcacagatgaggaaccagaggctcagaggagtgaagttgccttcctgaggtcacacagcatgaaagtgatgagctaggatttgaatctgggaagttgggctctagagccagactgtactgccttctgccacactgtactgccttctgtgactgggtggcacctccagggcacatttacacaaggccctgaatctgcagaggctgtttctcaagatgcccgtcatggtgtggcctgggccagctctggcttccacaggtccctgactgtcctcagagtggaacatgctcaacctcccgcccactgctctctctctgcccagatttcaggggtgccggtccccaaggcctgcccccttctttaagactgaactcaagtctccttggaaggccccggtgaagctcccagagactggttttcttgggatgcaggcagaaggggaccctccctggccaacacccaggagcccagcagaagcacccacacgtagaaagaggctcactacagccagaagtgcagagtcagagtcctgggaccatcttgttctgcaaggtgaccccaggctccccaggacaggggagagggatcgtcctcattcagactctagctggggcctctgtactggcttctccctgggtggggttgcctgttacatagctgtgcctcagagaaagggtcctgcattttctggaatgttctctgtgcttacccctctgtgtgcccctccattgctcctctacaagcaattaggtgattcaaaagagcaacttaggctgggtgcagtgactcacacccgtaatcccggcactttgggaggccgaggcgggcagggacaggagttcaagaccagcctggccaacatggtgaaaccctgtctctacaaaaaatacaaaaattaaccagacattgtggcatgtgcctgtaatcccagctactcaggaggctgacacaggagaattgcttgaaccaggaggcggaggctgcagtgagctgagattgtgccactgcactccagcctgggcaacagaacgagactctgtctcaaaaaaaaaaaaaaagaaaagaaaaaaaaaaagagcaacttactgctttgtgaggttgtgagtggccaccactgaaggtctttgagaagaggccagacgccgctgtagccaggcctgtcttaagaggacttgtgcttccagggacccaggcaggatgatggcgcagctcttcctactccaagccaatgctgtccttcccctttcccatgaaatcaaggtcaagaggcaaataagactccctgctccactctaccccccagagagaaatgattctcgctcctttcagatcccccaggatctgagggagaaaggatgggaggaggggcagcagcatttcgctggaaaggcagcagatgcttttccagccccggttcagctggaaggcttggaggctggccagaccactctggcgtctcctgaagtgggtccctggagaccgaagaggctcagtggagtctgtctgttgtcagcactgctgcctgatccctgcaagacaaatggcactttccttcttcagaagcatcatctgccttcattattagcagtaatattattcccagttattattcttaccggtgccagttttgcacatctttttgttgctctatttgtgtctcatttacttctcaaattgcccctgggggcaggaatgaggatgcagagagatgcacgttaattactgtcgcatttttctgtggagaaaactgaggccagggctgaacgctcacagctaaggagctgtgattcagacccagttctgtcagctctagaggcaccctgcatcatgcccaccagggtgatccccctgggatggaccatctcgggatatgaggcctcggaggctggggttgagatttggtcctgaagagcttatagccagattgccacattcaagtgtaagtccaggaaaggggcaggcggcagtgcacagggatttatcagttccagaacctcacagtgataagaggctttagagagcatctaatcgagacctttaatttttcggggagagcagctgaggccgtgtggaaaattagtggagagctgacaagtgtctgggctcctggcccaggggtccgtggtccagcacgttgtgcgttcagtgggaagcaaagggcttgcccgggattacctgccccagccccgaggtgggttgtgctccctgcagctgccatcggcccgctttgcttcgtcctggcagatgcccagtgattgtccccgagcaagtgccagggttgggctgagctgctatgacagggaggcccagggagttctgctcagggagccaaagggaacagccagatcctgaatgttctatgttcacctgccccagccccacccaccctggcccactccacaggcccctgaccatggtcactcacggagagggatggaggagaaggtggttgaactgagtactgagaacccagaggacagagcccacagcttccaagcaggaaaagggacctctctgaaaaatctggataaccagaattatcacagcaccttctcattcccagcgcgtccttctgagctcagaccttgagcatttactgggtttctttttgaggaagagggaaagtgacaaaggacaaaacaatgcaaatcttcatgactgaagacgatcaaagactccctggagcgagaaaacagttactgccagaagcagaatggaagagccaaaaagtacacaaaatggacgccataaattctgaaataaaagtgtatgatgtgttctgagtcactgtagaagtcatgcatttattatcaagatagaaaagagcagagaatgacgtggacattggtcctcggagaggctgcgtaggtggtgcggtccccgggggattctggatgctggtcttttgaccgtggcggcagcctcgcgcctgcccggatggctccatccagacatttggcaaggctgtcatctgctcttgggtcctttttcaagctgatttcctgcctccccaagaggaggtttgagccccattctgccttggaaataaatcctgacagatgtgcacagcatatttgcagggaatttgcaggcctcgattattgggggaatcagagcccattccacaccgagccccatccacgtggctgagcaacacccctgtgtcccctgtatctgtctcactggctgtctttctcccagtttcttaaagaaccacaccattactgcgtttgccgttcgaagcgttgtcccaacaatgcagatggttctgacaagggctctatatgctggcagaagggagcttccaaccttttaacttgaggaaaatgaatctctgagaggcttgagagtgttgccaggtggagcttttcaggagacaggggtcttgagcccaggacacctaactatcgagttttcactaggagacttagtggtggctttcatgaggccagtcgttctcaaggaagggctgggggccatcagcaatgtctggagacatttttgattctcacagcttggtggggactgctattggtatctcatgggtggaggccagggatgccaccgaacatcctacaatgcacagggcagccccccacaaataagaattatccagccccaaaatgccaatagtgccgaggtcaggggaccctgtgctggccatcctatctctgattctgaaactatgcatgctttccacttttccccatttgtgagtcattgagtaaattaaagctcttctgagcagcagcagtgatcatggtcactgccctgcgttcaaataatgcgagctgaggacagtgatctgcaactcccagcatgtcatgtggtctcttagaaatccatgtgactgtttccaccatcttgggcatttgtggggacccccagactggagggagaaagccctacaaagtggatgggagtgtggggctgaacttttccctacccttaactttgtgtctctgggacctccagggacctggcccctcaccaatgcatatgaagagtatgcttggggaagagcttaggaatggggtgggcatgggagtgctgggtagcagcctttgagcaaatctgcatcttctcttatttctgacctttttccacgtgcccagtcctatttctgccagttgaaggcatactaatattctttatactatttaatcttttgcagaaaccttactattataacttgctactctccagataccaattcttcatgccgagagcatcggaaatgtttttgtgtcttactgatgttttcatgatcaacttgtaaatgtaagcagttgacttcataaaaggtattttaactattcttggagtcctttgctacccaagcacctggtttcaccatgcgatcactgacttctctacagtgaagactctttcttaataaaggatttcgctgtgctcttttgattaaaaatatctaaccttaaaagacgtaaaaatgtatctgtgaaatctcactttgttagcgttgctgctgttgtcattttctattatgataactgaaaagagaaaagaagaaaacatgaa

SEQ ID NO: 2397 - DNA, 562 bp, Homo sapiens
  source 1..562: mol_type = unassigned DNA; mol_type = unassigned DNA
agaagcccagagacagccgagtgcgccgtgcggtctccggacgctcgctgctcagcccgatccccgccaactgtgcaggcggctgacccgcagcggcagcggcagcagcgaggactcgagcgctggctgcagcgacaccatggatctctcctttatggccgcgcaggtcaagtgagcctggggaataacaagtgaggatgccaaatcatgcatggaccagcctaactcctttccagtctgccgttgccacttggagttcttccagctgcccatgatggggggagctttcatggactcgcccaacgaggacttcagcaccgagtactccctgtttaactcctctgccaatgtccacgcggctgccaatggccagggccagccggaagatcctcctcggtcctccaacgacgccgtcttgctatggattgccatcatagctacgctggggaacatcgtggtggtgggcgtggtgtatgccttcaccttctgaggacggcacaccctgcaccaccatggggtgaggcttggcacgtagctctgacttgctgtcggcctttggctt

SEQ ID NO: 2398 - DNA, 774 bp, Homo sapiens
  source 1..774: mol_type = unassigned DNA; mol_type = unassigned DNA
agacagccgagtgcgccgtgcggtctccggacgctcgctgctcagcccgatccccgccaactgtgcaggcggctgacccgcagcggcagcggcagcagcgaggactcgagcgctggctgcagcgacaccatggatctctcctttatggccgcgcagctgcccatgatggggggagctttcatggactcgcccaacgaggacttcagcaccgagtactccctgtttaactcctctgccaatgtccacgcggctgccaatggccagggccagccggaagatcctcctcggtcctccaacgacgccgtcttgctatggattgccatcatagctacgctggggaacatcgtggtggtgggcgtggtgtatgccttcaccttctgaggacggcacaccctgcaccaccatgggaaaccttactattataacttgctactctccagataccaattcttcatgccgagagcatcggaaatgtttttgtgtcttactgatgttttcatgatcaacttgtaaatgtaagcagttgacttcataaaaggtattttaactattcttggagtcctttgctacccaagcacctggtttcaccatgcgatcactgacttctctacagtgaagactctttcttaataaaggatttcgctgtgctcttttgattaaaaatatctaaccttaaaagacgtaaaaatgtatctgtgaaatctcactttgttagcgttgctgctgttgtcattttctattatgataactgaaaagagaaaagaagaaaacatg

SEQ ID NO: 2399 - DNA, 536 bp, Homo sapiens
  source 1..536: mol_type = unassigned DNA; mol_type = unassigned DNA
gcgccgtgcggtctccggacgctcgctgctcagcccgatccccgccaactgtgcaggcggctgacccgcagcggcagcggcagcagcgaggactcgagcgctggctgcagcgacaccatggatctctcctttatggccgcgcagaacaaagacaaatcccggatttctccatcagtctgtgaccctagagaagacccagagctggctccagggaagggctgcgtttggcctgggagactgcccatgatggggggagctttcatggactcgcccaacgaggacttcagcaccgagtactccctgtttaactcctctgccaatgtccacgcggctgccaatggccagggccagccggaagatcctcctcggtcctccaacgacgccgtcttgctatggattgccatcatagctacgctggggaacatcgtggtggtgggcgtggtgtatgccttcaccttctgaggacggcacaccctgcaccaccatggggtgaggcttggcacgtagctctgacttgctgtcggcctttggcttct

SEQ ID NO: 2400 - DNA, 7583 bp, Homo sapiens; identical to SEQ ID NO: 2396
  source 1..7583: mol_type = unassigned DNA; mol_type = unassigned DNA

SEQ ID NO: 2401 - DNA, 562 bp, Homo sapiens; identical to SEQ ID NO: 2397
  source 1..562: mol_type = unassigned DNA; mol_type = unassigned DNA

SEQ ID NO: 2402 - DNA, 774 bp, Homo sapiens; identical to SEQ ID NO: 2398
  source 1..774: mol_type = unassigned DNA; mol_type = unassigned DNA

SEQ ID NO: 2403 - DNA, 536 bp, Homo sapiens; identical to SEQ ID NO: 2399
  source 1..536: mol_type = unassigned DNA; mol_type = unassigned DNA

SEQ ID NO: 2404 - DNA, 233 bp, Homo sapiens
  source 1..233: mol_type = unassigned DNA; mol_type = unassigned DNA
tgagtccaacagactcaatcatacatgtcatacatgtttatgattaagagatattctttttgtgtgctagttgattttgccgagaaaaaatgaagaagaattcaagaatgagatgagggtgtcttcttcctgtagaagtccaaatgaaacaccttatttccaatcacagccacaacctgggggagaagaatcaaatcctccacagggattgtgatttctgcagatatgaataa

SEQ ID NO: 2405 - DNA, 6495 bp, Homo sapiens
  source 1..6495: mol_type = unassigned DNA; mol_type = unassigned DNA
ctccccctagcgtcccagacagcggagggagtcgccgccgctaccgccgccgccgccgcagggcccgccgctgggatgccgagcgcccgcgccgccgctgcctctgtcctccgcgcgctgctcagctgaaggcgcacaggattcaattactggacttgtcaactctgccagtgtacgtgccatttctcttccactatgagaggaccgattgtattgcacatttgtctggctttctgtagccttctgcttttcagcgttgccacacaatgtctggccttccccaaaatagaaaggaggagggagatagcacatgttcatgcggaaaaagggcagtccgataagatgaacaccgatgacctagaaaatagctctgttacctcaaagcagactccccaactggtggtctctgaagatccaatgatgatgtcagcagtaccatcggcaacatcattaaataaagcattctcgattaacaaagaaacccagcctggacaagctgggctcatgcaaacagaacgccctggtgtttccacacctactgagtcaggtgtcccctcagctgaagaagtatttggttccagccagccagagagaatatctcctgaaagtggacttgccaaggccatgttaaccattgctatcactgcgactccttctctgactgttgatgaaaaggaggaactccttacaagcactaactttcagcccattgtagaagagatcacagaaaccacaaaaggttttctgaagtatatggataatcaatcatttgcaactgaaagtcaggaaggagttggtttgggacattcaccttcatcctatgtgaatactaaggaaatgctaaccaccaatccaaagactgagaaatttgaagcagacacagaccacaggacaacttcttttcctggtgctgagtccacagcaggcagtgagcctggaagcctcacccctgataaggagaagccttcgcagatgacagctgataacacccaggctgctgccaccaagcaaccactcgaaacttccgagtacaccctgagtgttgagccagaaactgatagtctgctgggagccccagaagtcacagtgagtgtcagcacagctgttccagctgcctctgccttaagtgatgagtgggatgacaccaaattagagagtgtaagccggataaggacccccaagcttggagacaatgaagagactcaggtgagaacggagatgtctcagacagcacaagtaagccatgagggtatggaaggaggccagccttggacagaggctgcacaggtggctctggggctgcctgaaggggaaacacacacgggcacagccctgctaatagcgcatgggaatgagagatcacctgctttcactgatcaaagttcctttacccccacaagtctgatggaagacatgaaagtttccattgtgaacttgctccaaagtacgggagacttcacggaatccaccaaggaaaacgatgccctgtttttcttagaaaccactgtttctgtctctgtatatgagtctgaggcagaccaactgttgggaaatacaatgaaagacatcatcactcaagagatgacaacagctgttcaagagccagatgccactttatccatggtgacacaagagcaggttgctaccctcgagcttatcagagacagtggcaagactgaggaagaaaaggaggacccctctcctgtgtctgacgttcctggtgttactcagctgtcaagaagatgggagcctctggccactacaatttcaactacagtcgtccctttgtcttttgaagttactcccactgtggaagaacaaatggacacagtcacagggccaaatgaggagttcacaccagttctgggatctccagtgacacctcctggaataatggtgggggaacccagcatttcccctgcacttcctgctttggaggcatcctctgagagaagaactgttgttccatctattactcgtgttaatacagctgcctcatatggcctggaccaacttgaatctgaagagggacaagaagatgaggatgaagaggatgaagaagatgaagatgaagaagaggaagatgaggaagaagatgaggaagataaagatgcagactcgctggatgagggcttggatggtgacactgagctgccaggttttaccctccctggtatcacatcccaggaaccaggcttagaggagggaaacatggacctgttggagggagctacctaccaggtgccagatgccctcgagtgggaacagcagaatcaaggcctggtgagaagctggatggaaaaattaaaagacaaggctggttacatgtctgggatgctggtgcctgtaggggttgggatagctggagccttgttcatcttgggagccctctacagcattaaggttatgaatcgccgaaggagaaatggcttcaaaaggcataaaagaaagcagagagaattcaacagcatgcaagatcgagtaatgctcttagccgacagctctgaagatgaattttgaattggactgggttttaattgggatattcaacgatgctactattctaatttttattttggagcagaaaaaaaaaaagaacaacctgccacattgctgctatcaggccgttagtcctagtgtctgctgggtgctgggtagtagatttttcttgtactgagcagaaatggcatgttgtatactaaacgtatcatgcagtatttggttttattctgtagtgaattttccacaaccgtgggctacaactcataaatatgcaacatatatgtttttcagtaggagttgctacattaggcagagtaaatattttgtagttttccacagtgtcttttccttggtttgaattacctgcattgagaataatgattgttgccaccaaggcatgcttgactctgagatataaatcttaacaaagaataacttctcaagatatactctacctacttgaaaccacagggttgtgggccatggtacatactgcatttgcatcaaactagcagtaactcagaatgaaatcattttcattaagaagctctctcagcatattaggattatatgtagatttgtatgtattttgcattatgtacttcagtctcctagttttattattctcaccttccgttttattcttggcgaggaaaaaaatgcactagaaataatacattaaactgactcttagtcttaatgtacgtttgctgtcttaaatagtgtgattgagtccaacagactcaatcatacatgtcatacatgtttatgattaagagatattctttttgtgtgctagttgattttgccgagaaaaaatgaagaagaattcaagaatgagatgagggtaggtaagctctcagagcatttctgtctgccatttggttctatgcttatgtggctgctaatgtgactaattcagagtgttgtatttccacatctgtggactccaccatggaaaaggtgggctaccattggtccttatatggctttattagaaaaatagacattctatcgtttgtctgcccagtggccagagtcctggtgaacaacagagctcatgggaaaccagcctctctcagggcaccccgctatgaggatattgaaatatgttcaatcatttctcatctcccttggaatgtaattccctgccctatacaaaataggatattccaatgcgctatttgaatctagggattgaggatttgtagttgagttttggggtaaaggcttggctcattgccatggaagaataaaagttatttattaatagtgctgtcactgtggagtacttgttggtgtttattagaagttgtctactatgttcaagaaaagttgcacagttattcctcagagctactatgtgaggtaggacatatgtttttattctcccatttgactgaagatggaactgaagcagagaagtgaaatgattttccaaagttgtacccagagagaatcagcgtgagaacccacttggacccagccatgcacccttatcttcagttcagtaaccttttcatagactttggtggaagcagtgacatttcagggtccttctttaaaacaaaggttctaagggaatagcagggaatagctgcctggtcaaggaacgtttgatgtgaatttccatctttgttaaatgaatgatgcctttctaatttctctcttactcacacacaagttctttccttccccatctcagttatcagttatttcctttacagtcatacatttgagtatcacctctatggaactaataaaccttcctagaatccgtttttgaataatgtctggctcacaagaacattttcatcaaataattttaactctttttgccaagagatgtaagcaaatatgtgaaactgatcaagagaagtgaaaagctctgtacagtcaaatagaagttagcaactggcaaattagctcaaggtcagattttaaaaatagaattcagaatcatgacactcagaagtgatttgtaatttcacgagtagagacatcctgatattgcataagggatgttttccttttctaagagcagccctttgctgtaagtgtttctaaggttgggagtaagtgagcatggtgtggcattactgtctttgtattcttgacaaactatttgttgagaatacgtcgtaggccacttaactgagtagcacatgggtgatactagtggccattattgccttgggctactcaatctatagtcttaactaaaccatggctaataggttgaatcttcaaactgtagtgtaataaattcccaaataacagacccatattttcatttctcagaggtccgtgaggatgacatgtatgtgaattttggcttaacacagtatctctgtggtcctttttgggacacatgatttcttaaaggaaaagattatacttagagtacatttctgtacaaacccatttaaacatctggattgagtggaaggtcggtggatggtacaaatgacatgtttattttggccattttccttgctgctggtggctgtggaataatgattttcagtggttggcttagattattaagaggatcagaaaaggttgtcatattttaaacaaaacctgggattagagatgctgctacgagatggaagtgctggccagtggttatatagtggtccagttgagaagtagtaaatcaggcacttgtaggtttacccaaaataagtgacaagtatgcttatatttgcacaattaaaatagaaagtcaactttttattcaaacaactaggcttaaaacatttaacagtgaaacaaataaagctgtctggaaaggagggctgattcctgcagcttcagttgtgaacaccatccccactggactgagtttacccagccagaactgccagcatcccaccgcaggggcaggaactaggtcttcttctcggagggagaggcagtgtttccagaatttgcaggctcataaaaatcacctgggacacttgtgaaacatacagatctcaaggccttgccccagacctgatgagttagaatctccagggaaggagcttggggtattcatgccccagcaagcttgggaacacagctaggagggatctatctagagaaccacttccttatgatagagacaaggtcatttaaagtcacaatgagataccacctcacacctattgggatggctattattcaataaaacaaaatataacaattgtttctgaggatgtggagaaattggaatccttgtatactgtgggtgggaatgtaaaatggatagccactgtggaaaacagtatgaagattcctcaaaaaattaagatagaactactatataatccaactatcccacttctgggcatatatccaaaagaatagaaatcaggatcttgaagaagtatctgtacgcctgtgttcattgcttatgcttataagcatattattcacaataagcttataagtattattcacaatagccaagatatggaaattgcattgatagatatgcaaatatctatcaatagatgaatggataaagaaaatgtggtatatacatacagtagaatattattcagccataggaaataaggaaattctgtcattgtgacaatatggatatacatggagaacattatgctaagtgaaataaactagtgacagaaggacaaatgcatgattgcacttctttgaggtatccaaaataatcaaactcataagggcagaggcaaaatggtgcttgccacgggctgggcaaagttaaaggtggggagatgttgattaattatgtttcagttatgcaagatgaataagttctagagctctgctgtataacatagtgcctatagttaacaatatcgtactgtgcagttaaaaatttgttaagagggccgggtgtggtggctcacgcctgtaatcccagcactttgggaggccaaggtgggcagatcatgaggtcaggagatagaaaccatcctggctaacatggtgaaaccccatctctactaaaaatacaaaaaa

SEQ ID NO: 2406 - DNA, 1748 bp, Homo sapiens
  source 1..1748: mol_type = unassigned DNA; mol_type = unassigned DNA
gttcatgcggaaaaagggcagtccgataagatgaacaccgatgacctagaaaatagctctgttacctcaaagcagactccccaactggtggtctctgaagatccaatgatgatgtcagcagtaccatcggcaacatcattaaataaagcattctcgattaacaaagaaacccagcctggacaagctgggctcatgcaaacagaacgccctggtgtttccacacctactgagtcaggtgtcccctcagctgaagaagtatttggttccagccagccagagagaatatctcctgaaagtggacttgccaaggccatgttaaccattgctatcactgcgactccttctctgactgttgatgaaaaggaggaactccttacaagcactaactttcagcccattgtagaagagatcacagaaaccacaaaaggttttctgaagtatatggataatcaatcatttgcaactgaaagtcaggaaggagttggtttgggacattcaccttcatcctatgtgaatactaaggaaatgctaaccaccaatccaaagactgagaaatttgaagcagacacagaccacaggacaacttcttttcctggtgctgagtccacagcaggcagtgagcctggaagcctcacccctgataaggagaagccttcgcagatgacagctgataacacccaggctgctgccaccaagcaaccactcgaaacttccgagtacaccctgagtgttgagccagaaactgatagtctgctgggagccccagaagtcacagtgagtgtcagcacagctgttccagctgcctctgccttaagtgatgagtgggatgacaccaaattagagagtgtaagccggataaggacccccaagcttggagacaatgaagagactcagacatcatcactcaagagatgacaacagctgttcaagagccagatgccactttatccatggtgacacaagagcaggttgctaccctcgagcttatcagagacagtggcaagactgaggaagaaaaggaggacccctctcctgtgtctgacgttcctggtgttactcagctgtcaagaagatgggagcctctggccactacaatttcaactacagtcgtccctttgtcttttgaagttactcccactgtggaagaacaaatggacacagtcacagggccaaatgaggagttcacaccagttctgggatctccagtgacacctcctggaataatggtgggggaacccagcatttcccctgcacttcctgctttggaggcatcctctgagagaagaactgttgttccatctattactcgtgttaatacagctgcctcatatggcctggaccaacttgaatctgaagagacggggtttcaccatgttgcccaggctcgtctcaaactcctgggcttaagaagtctgcctgcctcggcctcccaaagtgttggaattacaagtgtgaactcctgcacccagccaagaaaatatttaaacagctgcctgaaatggaaattgaatccaaaacattttgccactggtgtttgaagtggactatcttgtctcaagcctttttattttctcatgaatgtaccttctaaatattgttaaggctacaatggaggaaattttaaattattatatttactattttacagtgagtggaaaatttgaaatttagtaaaaagttttcaagaaatttttatagattaataatggagtttaaaaagtcatggcgatgaggcatttaacaaggag

SEQ ID NO: 2407 - DNA, 2380 bp, Homo sapiens
  source 1..2380: mol_type = unassigned DNA; mol_type = unassigned DNA
gtcgccgccgctaccgccgccgccgccgcagggcccgccgctgggatgccgagcgcccgcgccgccgctgcctctgtcctccgcgcgctgctcagctgaaggcgcacaggattcaattactggacttgtcaactctgccagtgtacgtgccatttctcttccactatgagaggaccgattgtattgcacatttgtctggctttctgtagccttctgcttttcagcgttgccacacaatgtctggccttccccaaaatagaaaggaggagggagatagcacatgttcatgcggaaaaagggcagtccgataagatgaacaccgatgacctagaaaatagctctgttacctcaaagcagactccccaactggtggtctctgaagatccaatgatgatgtcagcagtaccatcggcaacatcattaaataaagcattctcgattaacaaagaaacccagcctggacaagctgggctcatgcaaacagaacgccctggtgtttccacacctactgagtcaggtgtcccctcagctgaagaagtatttggttccagccagccagagagaatatctcctgaaagtggacttgccaaggccatgttaaccattgctatcactgcgactccttctctgactgttgatgaaaaggaggaactccttacaagcactaactttcagcccattgtagaagagatcacagaaaccacaaaaggttttctgaagtatatggataatcaatcatttgcaactgaaagtcaggaaggagttggtttgggacattcaccttcatcctatgtgaatactaaggaaatgctaaccaccaatccaaagactgagaaatttgaagcagacacagaccacaggacaacttcttttcctggtgctgagtccacagcaggcagtgagcctggaagcctcacccctgataaggagaagccttcgcagatgacagctgataacacccaggctgctgccaccaagcaaccactcgaaacttccgagtacaccctgagtgttgagccagaaactgatagtctgctgggagccccagaagtcacagtgagtgtcagcacagctgttccagctgcctctgccttaagtgatgagtgggatgacaccaaattagagagtgtaagccggataaggacccccaagcttggagacaatgaagagactcaggtgagaacggagatgtctcagacagcacaagtaagccatgagggtatggaaggaggccagccttggacagaggctgcacaggtggctctggggctgcctgaaggggaaacacacacgggcacagccctgctaatagcgcatgggaatgagagatcacctgctttcactgatcaaagttcctttacccccacaagtctgatggaagacatgaaagtttccattgtgaacttgctccaaagtacgggagacttcacggaatccaccaaggaaaacgatgccctgtttttcttagaaaccactgtttctgtctctgtatatgagtctgaggcagaccaactgttgggaaatacaatgaaagacatcatcactcaagagatgacaacagctgttcaagagccagatgccactttatccatggtgacacaagagcaggttgctaccctcgagcttatcagagacagtggcaagactgaggaagaaaaggaggacccctctcctgtgtctgacgttcctggtgttactcagctgtcaagaagatgggagcctctggccactacaatttcaactacagtcgtccctttgtcttttgaagttactcccactgtggaagaacaaatggacacagtcacagggccaaatgaggagttcacaccagttctgggatctccagtgacacctcctggaataatggtgggggaacccagcatttcccctgcacttcctgctttggaggcatcctctgagagaagaactgttgttccatctattactcgtgttaatacagctgcctcatatggcctggaccaacttgaatctgaagagacggggtttcaccatgttgcccaggctcgtctcaaactcctgggcttaagaagtctgcctgcctcggcctcccaaagtgttggaattacaagtgtgaactcctgcacccagccaagaaaatatttaaacagctgcctgaaatggaaattgaatccaaaacattttgccactggtgtttgaagtggactatcttgtctcaagcctttttattttctcatgaatgtaccttctaaatattgttaaggctacaatggaggaaattttaaattattatatttactattttacagtgagtggaaaatttgaaatttagtaaaaagttttcaagaaatttttatagattaataatggagtttaaaaagtcatggcgatgaggcattta

SEQ ID NO: 2408 - DNA, 557 bp, Homo sapiens
  source 1..557: mol_type = unassigned DNA; mol_type = unassigned DNA
cagtcgtccctttgtcttttgaagttactcccactgtggaagaacaaatggacacagtcacagggccaaatgaggagttcacaccagttctgggatctccagtgacacctcctggaataatggtgggggaacccagcatttcccctgcacttcctgctttggaggcatcctctgagagaagaactgttgttccatctattactcgtgttaatacagctgcctcatatggcctggaccaacttgaatctgaaggtattcatgctttgaaggggatcttttcaaggactggttgagtgagtcactgagcaaatgtttttgaaaaagaattaagtaggagtatattcaatctgcagtatagatcagaggacagtaaactacagctgggccaaatctggcctgccacttgtttttgaatggtttgtaagctaagaatggtttttacattttgaaatgattgaaaaaaaaagtcaaaagaagaataatattttgtgacatagaaaagttataaaaattcaaattccagtgttcataaataaagctatattggaacacagcca

SEQ ID NO: 2409 - DNA, 572 bp, Homo sapiens
  source 1..572: mol_type = unassigned DNA; mol_type = unassigned DNA
aaaccagcttgtcggcgccattttgtctcggcagcggtggccgtagctccatcgcattttatgtttctggcgagaagggaacggagttttcatcaggtagattggtttttgtgcggccgtcctccaccgtttcctccaggacagcacctagtcgtggccggaggagtctcagagctgtcagaaagaataagactgattttatgggaaaattaagcagatgctccagtttgagaaacctggatctgcgatctgtttgtggattcaattactggacttgtcaactctgccagtgtacgtgccatttctcttccactatgagaggaccgattgtattgcacatttgtctggctttctgtagccttctgcttttcagcgttgccacacaatgtctggccttccccaaaatagaaaggaggagggagatagcacatgttcatgcggaaaaagggcagtccgataagatgaacaccgatgacctagaaaatagctctgttacctcaaagcagactccccaactggtggtctctgaagatccaatgatgatgtcagcagtaccatcggcaacatcatta

SEQ ID NO: 2410 - DNA, 830 bp, Homo sapiens
  source 1..830: mol_type = unassigned DNA; mol_type = unassigned DNA
gccccaggcaccctgggcgctctgccctaccggcggcgcctctcactgctcacggaacgttctggaagtttgggaaaccctgagcggtctctgaggacctggtgagcagattgttgcaccattagaagctaggttgatccacagacagatggctgaaagtggaaaagaaaaaataaaatggacaaccaccattattattagctcatctcttaagagttatgaagttgcaactgccctagaaaatcgaagccacaaagttcgatattcagattcagtggaaaatggatcaattatattttctctttctggagttgcatttttattaatggatactaaggaatgtcttctgtcaactgaagaaatatttctagccaaaattgagaaatttattaacattcaccaaaatagttttttggttttgtctgctgccctccatgggcctgaagaatggaaactgatgttcaggattcagcagagattcctgggttgtaacttacgaatacttccagtacacaacacagtaaatgctattaatcttatgtgcactatagcaaagactacctccaaaccatacatagatagcatttgctacagaatgataacagctaaagcttacatcattgagcaaagtcctgtttggaaaacacttcagaagataaaactgaatagtgattcagttaacccaaattagagtaccaacttaatgtttttctcgaagaatgtgaaaataattagacctgttaaattataatattcaaatatctatttaaagacatttatattaatttgaaataataacatatacaattaaaagtgattttattttagga

SEQ ID NO: 2411 - DNA, 871 bp, Homo sapiens
  source 1..871: mol_type = unassigned DNA; mol_type = unassigned DNA
gaggacctggtgagcagattgttgcaccattagaagctaggttgatccacagacagatggctgaaagtggaaaagaaaaaataaaatggacaaccaccattattattagctcatctcttaagtagaaagaaggtctcgctacattgcccaggctgttctcaaactcctgggctgaagtgattctctcacctcagcctcccaaagtgctaggattacaggtgtgagccattgtgcctggccaagtttaaattttaacctatcaggaaaaactattaaccacctagattttagtattgtgggtaatatgatttaattgcctgggtggaataggaaatcaggtgatatttgaaatgagttatgaagttgcaactgccctagaaaatcgaagccacaaagttcgatattcagattcagtggaaaatggatcaattatattttctctttctggagttgcatttttattaatggatactaaggaatgtcttctgtcaactgaagaaatatttctagccaaaattgagaaatttattaacattcaccaaaatagttttttggttttgtctgctgccctccatgggcctgaagaatggaaactgatgttcaggattcagcagagattcctgggttgtaacttacgaatacttccagtacacaacacagtaaatgctattaatcttatgtgcactatagcaaagactacctccaaaccatacatagatagcatttgctacagaatgataacagctaaagcttacatcattgagcaaagtcctgtttggaaaacacttcagaagataaaactgaatagtgattcagttaacccaaattagagtaccaacttaatgtttttctcgaagaatgtgaaaataat

SEQ ID NO: 2412 - DNA, 10265 bp, Homo sapiens
  source 1..10265: mol_type = unassigned DNA; mol_type = unassigned DNA
cccactcccggggggacgttccgtgccgcggccgccgcggccgctgcttctttcacactttagttgggagctgcgcgccgcgctcagttactggagagctggccgcgcgccgccgcctcccgcacgcttgcacgcgggcccggcttcggggttttgggttcttactccaagcggcggggaggagggggagccccggacacactgtggggaggaggaggaagaagaggaggagggaggaagaaaaaagacgaggaggacaggggcggggggcgggaggcttgccaccttcagcccccccgcgaacgcccaaggtgcacacatcttgaccaactcagcagcaaggtggattttctttgtgtttaaagaaaaaaaatgtccctgtgtctgtagagatgatttgcagttcagcccggctgaagctgaccgaatgagactatgggctgtgcctccgccaagcatgttgccactgttcaaaatgaagaggaagcccagaaagggaaaaactaccagaacggagatgtgtttggcgatgagtataggatcaaaccagtggaagaggtcaaatacatgaaaaatggggcagaagaagagcagaaaatagcagccaggaaccaagaaaacttggaaaaaagtgccagctcaaatgtaagacttaaaactaataaagaggttccgggattagttcatcaacccagagcaaacatgcacatctctgaaagccaacaagaattcttcagaatgctggatgaaaaaattgaaaagggtcgggattactgttcggaagaagaggatatcacatagcaccaattttaccactcaaaccaggagctactactgtgtaaataggttacaccccagttgaaatctttgcaaaggtcggttctattcagcgaacagcactatagcaaaagaagatcgttccatattgtacgccccattaaattacagtgtttcttaatgaacttgcaaaggaatattgctaaaaacaaacaaaaaaaactgttatcgaactttctttgttgctgctagttaaaacttgttgcaacttttcacttctcttgtgtccaggtatgcagcaaaattctgcaatttcaccttaaagatactgttggttttacagatgctctccaacctattttctataagatgaggtagtggtgaactcagataacaaacttctcttctaaactggttctgcttctaagacaagcatctcctgccctctctccttcctccccatctctcgcacgcagtctagagatggactgagccttgcttctcactggcagtgttgagctttggagatgggatggttgctatgccaagccttgtttctctgctcagaagaagtagagaagctattatcaattaaaagcatgctgtgatgtgactcctggaagtgacgtaggagtgagtggcaggttgtttgatttaataggtatcttaatcaagaattaagcttgcaacattggctttgctcagatgcagatggaagtgtgatcacaatcattttgaatccctcttcctcacttttttttctaagaaaataaacattttactgtttttatggatccttgtcttctcccattcatccagctcagtgttttaagatgatcctgggtgcagaagttgagccctcctttgcattgacactgataattagcctatagggctccctacccttccattaagaatctaccaagcattagcaaggctgaaagtggtctaagaggtgaggggacatcctatgactttttaggaaggcctgaaaccaccttgttacctttcattttgttagcaaataaaccatcctattttgtaactctcccccttcaaaatgctacatgagccttgccacttcctttttctcttacttccagcacactagacatagcaaaagtgtttgcctactcaaaaacataatacttttatgctgatgatggtatttggagatgtgaaagccaaaagcccctggcagtggtggggaatgttgactgagtgttcagcagagtttatttttccatactatatgaagagaatgatctcttctcaaagacagaagtgatatttttaacaaatattgtcacaagtaaatagcaatcaaaaggagaaaataacttttgtatttttttaatgtgtttgatagctttgacgagggttctctttgttactttcaggggagggcatcctattaaatgccacgccagcagtccgggtctgggtttgtcccacaaaatcacaggagcactgtatgttcctctcttttggagttgtgactttgaagggcctcaatattagccacactgccgcctgcagaaggtggagagttaagatgttctatgtcaatttgctcttgccgaaaagatgagcctcgattttaaaatctatccacatccaactgatggcaccattgatgtgcaaataatgagattccctatctccttttagacctgggacggcaaaagggaagggaaggaaacttagcagagtgctattgactatagattcacatattagcaacaaaatcccgtaattcttttggccaacagcagctattttggggagcagctgtggctgttacataaatagagatgcagccaaaattttaggccttttatcctgcttctagcagaaaaatgcagggagagtcaagtagtctagggtttcaggttgcctcccctcatatggtttttggccaagtgactaaaacagttttccacaactgtaaacaaactgctaagccccacctcaaacttgttcactggggactttgcttaccgttctgtgggtgaccttttccgggatttcttgttcttatcaagcaagaattaagcacatgctaaacgtcttccatttgacttctctactcggtgtctcagacagtgtcttcccagaaaaccaccaccctctacccaaagatgaaacatgctcatgtcatttttctcatggtcacatttaacagttttgacatgttatacttgcgcatagatccaagcgtttcttgggaacctgacttttgagtgtttaataaagccggaagtggtgttgccctgaaccagcagattttcacctgggttctggctccggtgtttaacactggatacatctttgatgtgcgaaagtgagttcatcttcagacacatttggtacatccagaaatagatccaagaaatggggtggttgagtgggtccgcacgaaatgcttgattatgtcagcaacacccaacactgtctgttttccatttgttggttttaatcataaaattgtcaagtgattcgtgtttgtactttatttttttgtgccttctgaaaggatctaaaacaaaaatattttgcctttttttccccacgtgtatctgaacattaagcagattggctcagacacaatgaaaaggataatccaatgtacgtgctggtgcactctgctagttgttatctctgtagggctcaggaagctggaaggaggaagggagggtaagtggcctggtgagtggaggtagaaaaatgatgagaaatgaactgagagcattaagcagagagggttgataggctggccgtgtccggggtgaaattggaaatccagctgcctagtggccagtgggtggggcaagactgtcaacgagatttacagctggcttacacatgccttatgtcctctgagttgtagagttgtaaaagttcagcagtgtgtgcacagctttcttttggttggcagagattcaggatcatggagtactgctctcataattgaagacgtgtttgttattggcagagaaccttaaaaaaggcctttacctcagcgatgcttcctagccccaggcttgcagagaacacagagtggtgttgtggtctatttagggacaaagaaggtataaagtccagagatgagaaaactgggtcagccctcagaaactgcagcagccacgcacacagaagcctgctggaagacaggtctctctccgtccacagtgcccatcatctgagcctgggctgggatgactcaacttagcaaagacggacccaggaggagtgctggttcttcagtctttgtactggccccatcctctcctcactgtaatgtgaggaagcacctctgtgtcagggctcacctgggcatccaaagcggccacgcccacaatccgacagcccccaggagcaggtccagggatgatgcagcccccttcttggtcccatgtgatgtcatcctgctttgttatcttcttataactttatcctgctataactttatcctcttcccagcctcatccctgtttttctgttagggcaagactcttccataagcctgctaaaaaacagagatgatacctcttacaaactttacctcatagcctgtgaagcaggttggcatgtggattacaagtcctgctttgacactgggcaagaatttaagattgttctatctctactagtcatagaaaagaaacattgttaaacatgttgagttttaaaggaagaaatattttcaaattcttaatccaagaaaatactgagttggaatcttagacttcgggactctgacacgttctttatgaaaggcaaaataattggtatctaaagttctctccttcctgcctcccctaaagaaaaaggatattagattgcacactataattttacataagatctgccttccacacttccctgctggaaggcattctcagagctttatgtcttcgtacctctcagagattggactttttcttgtttaaaaccccaaccaaaaaaaataataaggcatgattggtggggagggaatgtgtatttaggggcataataaaaaggtggctcgaagcaggaactttggcctcatggtgtcatgggtggatgcctggactccagtgtgcctgtgaggggctgggttaggcagtcggctgtcacactcacatgtgcctgcaataaaccttttggaatttcatgaacgaggtctatgaattgccttttgccaatgaatggatgtatttttccaaggggggaatagtatccttgactttggcagtcacctttttgtatgtctctagaaaggggtcaaaaaactatggtaaagatgaggcttatgagtgaatacctctgggacaaaccttaggactcacaagctatgccatgtttttcaggagactcttgtaccttatctggaatctaatcttgggagaagaggaaaaaggagctaatatttgtcatttatactcactctgtgccagatactgtgctaggcattttataattgttttgtgtcatcctcatgataatcctgtgaagtagatctattacccccgtgttctaaataatagatcttaagtgtggaatgcatctatccaacataaatgcccatgttgaaagaaggaaagatgtcattcaagtatttttcaaattctttttattatgactatgcccttcgcaacactgtgaaaacaacccctgggggcatctgccttccagaatctctctctggcttctcaccagcttggtttcctcatggggagtgttttatttggcctcccctatctgagctgcacacacaccaggggaggccactggctaacagtaggacttcagtgccctgaggaaaaggctttgggaatttaggcacacgtttctctccttggaatccttctagcatctggaaaaggaacctggtatttctgcagttagataccagatgcaaccagaacaggctttcgagtgctgtgatttctttcctgggttcccaagtcttgttgtttcatcacaaactgtatctttttaaggttaaaagtcttgaccttcatgggggtctgggacaatccgatctccaagcatggaggaaaggcaatgcctggaccactgacttgcattgaaatcctttcttgtgggctagggtttgatgtctctttttcatctttggactggggatctgcatcttccaggtccatttaagcactgaaactagatgcaaatctctttcgagaccttacatgttttagatagtcatgtaatgacttggatagacatttaaataacttgttccaaggtcggaagagcccaagaactcctcagagttcctcttcttgcttcttgaatcacatcctctaaagatgactcatgtctccatagcaactgttaaaggtgctgcctagacgggacccgctcccacctttacttactttgctcgaaggaaccaaaacaatgtccttgtgtaaaggggctgtcatatccagttttcctttgaaatctggcccccaagatcctgcttctttctaacctggcagctgtcatgtcccttcaagatgatgtgggaaatggcccttacaacttgggaaccacagaaattgctgtatttcgggaagattcacctctaaactgaaggcttcattctgatagtgtctgccctctctaccctgatttcgcccttctttgcttccatttttagcccaaggctttgaatttgattgagtaagacttagaggcagtataaagaacaccataaacttaggcagaggtcccttagggtctctagagttgaaaataattctacagccttagggggacctcttggcattgactctaaagggagagaatagcccctgtgtcctggcatttcagtctagaccttcaaggactgttctctcttgacaggcaagcaagcaaagaaagttttgcaatagatttcaagccagtttttccattcaaaccaagatgcaaattcataaaattactcttttcctggaatagatccaggcagctgccttattagaactttagattcggatctattttcttaacacacatacacatacacgcgcatacatacatatacagagagatacgtggagaaaggaaatttactctatcattgcaatacttcaagaaagagctgtattttgcctttctgtaatctccaagatagtgtctaggaaagtaatagtataactatagggataccgaaacaggaaaaaccagccatcactcttgagaaagtttgagttcgactcacatgggagaatcgaggtctgctactcgtcttgctttgtgccccatctgtgcctggatgccctactacatctgcttgactcgtctgggctgctagccggggtgttgtggctgacatcctttcctggccttacacacataatagacacatccctaacggcgtgtgcctggtccagccacatacagccaccacatgtgtcacacactgtccccctcatccatgtggacttgactggcatttcagcagctccactgggatgctctaaccccagtgtgtggagttggggtcccttcatctaggttgacccaggtatagcatttttagcattgcctttccagtcttgatgattcattcattgaactcatttatttctggagcccctggtacactccaggcactgcgctaattgccagcaaagcacaactgaactaaatccaccttcaaggaacctagccataacgagggaggcagcatggaagtaccctacaggggaaagtcctgagtgctgtgggagcatctcaccgtggcagccagcccagttttggcaatcaggggcttcctgaaagaggtgacatcaaagcccggatgtgtcagaggactgagggagagtgttactaaaggactttcaggctgagaggatagcacaggactcagcccaaaggagggccagtgtggactgtccagggccagcctgcagtacagaggctggagcttggacttgtagagggagagagaagagcaagggacgtggacggggcagtgagccaggctagccacagagggttcccggggctttgctggggattcagggagcataaataagagctttaggtggtgctgtgtcctctgcagcccactgctgaggtcctccagacaggtaaggtgtggtcacaatcagggccggggtttccctgctcactgcggcagtgcaggggtgcttgctgagatgattcatcccagggtgtcctctgtcccttacccagccccaactcctcttcctctgccaaaagctatttgaattcaaggactttaacctgggccggatctggtttggagacaaaggggacagctctgggtcagcatgaccttctttagagccactaaggcgaaaaataccgtttgggaccaggctggcctagacccagggatgagaatgcaccctaaaataaatatacgggaagcagcagagggcttccctgtctagtgtgtgatcctaactaaaggcagctctcttggacagccttcccctggattaggtcacatacacctggtggccaagcctctgctgggtcccaaatacacacccgagtcctgccaaagaaaggagatttttaaaaagcacagacaaattgtatgcaagtggaaaatacccataggcctagacagctgtggagggaagacctcgtgggtacctggaggctgccagagctgggagctctgcaggtatgagtcagggaaggctcagagacaagcagaatctctctatggagacaacttgcagtgccttttaggttttccaaataacctcggagttcagagcattgggtttttttctcccctccccacccccagaaaaataattagaaaaatgtttaggagaaaggaaaagaattagatgcatcagaataccagctataagccaacactgtttccagaaactcaagaaaaagctcaaacagaagacagttcccctgagaggctggaggcgttggtgctgaaggcaattttcctagctaaggggcactgggccttgctgcaccttggggctgaccttttttgcaaaacacccacccctgccctcctggcatactcaacagcaacgccagctttctggacccttggaaagatgttagctcaaacacccactttttccagatcttcctcttgctcttcactgaggaatttgtaattctgaggctagcgatgcccactcggatattccgcaggcccaggtgtttagattagaatttgtccagcggtaatcctgatgctggaaaccaacaaacatttggcctcatattcacccatttaaaaactagagcccctggcaggtccccttagggccatgtgttcatggaatataagccaagtttgccttaggcttgttcatggaatataagccaagtttacctctccccattttctgccctggcccacttcccactcacctccacctcattgccaggaagggatcaaaatgcctccatgccagttgttaatggctacatatttgcccttcccaagggtatttgcattttatttaggaacatggccttatattcaaggaaaatctagcatcaagattacgaggcatcacctctcaatcaggtctgggaggtatcttggggcattgctcttctgaacacctgcagaggcttcctcaggtgagtgtgggagcccggaagggtggcctccctaaccactctgcctgcacatgaattctccaaagcagtgggcccccatctgtttcaattacacatgcctgtcagcaaaaacttcgtgagatgcactctctctgtgtgtttattaatttatttaaagcatatatccctttacttttgtactactatattaggcacattataaaaagtatacagcatagaaactttaaatgaataagacacaaaatattataaacagaggttctggcattttctctctgaactcctgagggggaccttgggcacctcctggtatgtgcacaccccactttgaacacccttgctttagtgcaaatcagcacgcctaaatagcatcccaaaccactgtgcgacatttggcctgcagaataagaaagtcctaaggcagaatccccaggaacttcaaatctgggagatgaggaaagaaaactcactcacaaacaacataaatgtaaataattcaaaaccctaaaggagagctgtccctagacagtagtggctacaggtgctaagcaaaagtcaggtacactggacagagccatgcgattgattgttcatcttccctctctgggtctccagaaaaggacactggcaatatccccagctctctcctgattggaattctttgaaccctcgaagtgctccagcagtactaccccccacgtagcagtgggcccatgtcgcttgaatattatttttgatttgaccaccaagatgtaatgatgattctattccattttgaaaagggtctgagaaagtgtacaggtctaattatatatacatatttatacatgtgtatttttgtttattgttacattttgacattggactttctattaaataatttttaagagttg

SEQ ID NO: 2413 - DNA, 426 bp, Homo sapiens
  source 1..426: mol_type = unassigned DNA; mol_type = unassigned DNA
agaaataaacccttgttgttttaagccattctgttttggggatgtttgttactacaacataaccaaactaaaatacctcacctatggataatgagtggtaacatgtcaggttgtagatgaagtacctggcaagcatgtcagaattctgagctgccactggatgagaaacttccatgtcagagaatcctttctccttcctacatggagaggtgccctagggtgaaatgcttcagtggaaattctccttcgattatgaagttgcaaagtctgtccttcggtctgccaacttttccttcttactatctgtcaaatcctgatttattcagaaaaaagtgccagctcaaatgtaagacttaaaactaataaagaggttccgggattagttcatcaacccagagcaaagtacatcacaattggaaagttaaa

SEQ ID NO: 2414 - DNA, 644 bp, Homo sapiens
  source 1..644: mol_type = unassigned DNA; mol_type = unassigned DNA
actggcaaccaccattctactttctgtctccatgaatttgactactccaggctgctgtgcattttagagaagttcttatgtgatactgaaaaaagtgccagctcaaatgtaagacttaaaactaataaagaggttccgggattagttcatcaacccagagcaaacatgcacatctctgaaagccaacaagaattcttcagaatgctggatgaaaaaattgaaaagggtcgggattactgttcggaagaagaggatatcacatagcaccaattttaccactcaaaccaggagctactactgtgtaaataggttacaccccagttgaaatctttgcaaaggtcggttctattcagcgaacagcactatagcaaaagaagatcgttccatattgtacgccccattaaattacagtgtttcttaatgaacttgcaaaggaatattgctaaaaacaaacaaaaaaaactgttatcgaactttctttgttgctgctagttaaaacttgttgcaacttttcacttctcttgtgtccaggtatgcagcaaaattctgcaatttcaccttaaagatactgttggttttacagatgctctccaacctattttctataagatgaggtagtggtgaactcagataacaaacttctc

SEQ ID NO: 2415 - DNA, 399 bp, Homo sapiens
  source 1..399: mol_type = unassigned DNA; mol_type = unassigned DNA
gccagctcaaatgtaagacttaaaactaataaagaggttccgggattagttcatcaacccagagcaaacatgcacatctctgaaagccaacaagaattcttcagaatgctggatgaaaaaattgaaaagtatttatttatgaatttctaagctatgatgtatatcactcaacagaagataatgaagaaggtcttaaattcattagtattatttagcagcagatcccactttgacatggaccctctgagagaataattgtatcatcttctaagccaccattaaaagaccagcaaaggtcaccaatgcgaaaaatagagatggataatgaattaaaatgagagttaaatctataatgttccctggatgtaaataaataaatacttgttaaagtataataat

SEQ ID NO: 2416 - DNA, 3138 bp, Homo sapiens
  source 1..3138: mol_type = unassigned DNA; mol_type = unassigned DNA
taagaattttcagttctattctttagatactgctacatctactatttttactggaaaccaaattgtaagctggtttctttattcatttctctcctcagcccctcattttaataccctcctattgaattctaggtccagaaagccaaaggcaattttctctcaaatatttgacccaagtgttgcattatcagccacaccctcactcttggacaaattctcctcccacccaattccaggcatggaaagggttttgttgataagttcttacagtcacaggaatcatcctagtcagcaagccgtgggagagacagaaatagaaacagcaaatttgaccaaaccaaggtccatgtttgggtgttttcatttatcaagcacacaaatctctgagcctcaattcagatatttgtataatcaggataagaaacccttaggattattgtgtgcagaaaatgaagaattctatataaaagatcgtatactatgttatgacactcatggttaaacggtaattcttagattgcagaaaggttaaaggctacagtttggaaagactgatagcatatgatttgtttcagaatgtaaaaagggcagctctctggcatgttcctgactgaggatctcataacatttaacttgaggaacttcctccttttccagctttgggagtcaaggtgagactcctggggacctaggtaggaagtatctgaagacttgggagaggaggcacagtccttgggaagcctgataaagggaagaggttggagtccgcgtggcagaatggccgttgttttctttctccttaatggatattaagacttattggtaacagcacttaggatgggtaaactgacttacatagataaatacagaatgtgtaaatgataatttcaagtttatgccattaagctcctggattctaagtaactaaaaacacagtttattaaattaaaggacaagttaggtagtggctataattaacaaatcctatagagacctgcctatcagcatgtagacttgtcttcataattgagtgactttaagaagggatgtcttctctcccttcgcctcacaaaccaacatccccccagtccccagtgcgattcctaaggttggtaacccaccagagtcacacaggcccctatgtctgaaagtctttcttgaagtctgcatgttcaaggtttgaaagttggaatctggttatttattttttcaccttccttcactccaatgttctgggtatggattgaccttcccacctcccttcctttgctattgggacctcagaggtcttgaggggtgagtatgtctcatccagagacagggtgtgctgacttccctaggagatcatgagtttaggttaatgctttaaaatcactggagaagcagacaaaactataaaaacattcttggggctttgaggagaatgaggagcagagttatggaaggaagggtgggtgggtgcatatttagataggagagagaaggggaaagggggaaccccctccttgccacccaggctctcccagggccaaagtgacaccccctcctcctcctgccctaatccccccattaaggcagctctgagtttgttatgacaggggctgaaggctgctgaattgctgtttgctgtgtctgctaattggactgaagggttggagtctggacactgaaagggaccattgttgctgtttaccttctacagccgcctccctggggaccctctgggtaaaggggagcagcagcacccccttagggtcattgcacccatttcctgcacaagggactgcggtggggagacagtttgtctcattgccttggggtggtttgagcttctacagcacagaggagacaagccaacacctgagccagtctcttctccaggccaggcctaggggccatccaggagctcccaggaaagaggatttacatgcttgtctttctcctttttattcattcccttcttctttagggatctttgctttgcctcttcctccagctaatcaggcttcacccctgcaccttttctgacctgctttcttctaggtcagtgattctcaacttggttatgcactgaatcacctggggagcttttttaaaaatgttgatgtttgggcccagccccagatccatgaaatcagagtatgtggaaatgatgcctaggcatcattattatttaatgtgcacctgaggttatgaaccactgatgtaggctcacctctccacctgggaaacacatacacacacgtatgcatgtacccacatgcctgtggatgtgtacacgtgcacacacaaacacaccccggcctttccccgcctctcctcccaaactcctgatatctataatactatcagacaggttgtatgtcttctaaattattattactaaattccttgtaggagccttagcatttagaatggaatttagaggtctgtactttatctcccacctcaatctgagctcttccccaaggggagggactatgattccatctccctgtggatgtccaaataggatctagaggaagactgagctaaattatcagagattcaatgacttttgtgctcttccttcctcaaagtaatattggcaatttggaggtcttcagagaggagaaacattcttcaggtatcatctttcccttttcttactgtttccaaatgtttttgcttcttctcttccctttagcttctcacctggggcgggtgggttctgcaccaccctcccaccctccttcctccgtgtggacgatagagccacatccagcaccacggacagctcccgggcgaccaaaaagaagaatgtacttcatctggttgggctggattccctctgataagccttcccagttgactgaaagatgaggctaggctctagcaagttgaagtcaaaccagctccttcaagaagctttgagcagaatgaagtggggaggacccagcttccagcccaggaagcccactgtacctggagccatctgggataagactttgacccatgactcccatatccacagcctgtccatcctagcccatcccagtttatcctgtatcatttgagctgggattcccacatcctctgagttggaagtcccatctcaagtcttcaataaagactcttgaatattgaatcacattaata

SEQ ID NO: 2417 - DNA, 473 bp, Homo sapiens
  source 1..473: mol_type = unassigned DNA; mol_type = unassigned DNA
ccagccgcaggggccacccgaacagtctctcctcctcacagaagcctggagctgggcatccaagaagaagcagcctcatttgttttctggtgtcatcgtaggtggccacctatggcttttgggaccaaaaagaagaatgtacttcatctggttgggctggattccctctgataagccttcccagttgactgaaagatgaggctaggctctagcaagttgaagtcaaaccagctccttcaagaagctttgagcagaatgaagtggggaggacccagcttccagcccaggaagcccactgtacctggagccatctgggataagactttgacccatgactcccatatccacagcctgtccatcctagcccatcccagtttatcctgtatcatttgagctgggattcccacatcctctgagttggaagtcccatctcaagtcttcaataaagactcttgaatattgaatcacattaa

SEQ ID NO: 2418 - DNA, 867 bp, Homo sapiens
  source 1..867: mol_type = unassigned DNA; mol_type = unassigned DNA
ctgcgcagaggggcccggggaaagccggcctcacgggcgggagggagaggcttgagcgaggggctagagccgcgaggactgaccagcaccagaggatacaagaggaggagagagacctcactggttcgggcgacatttcacccccccagcaccccagtcggcacagcttctcacctggggcgggtgggttctgcaccaccctcccaccctccttcctccgtgtggacgatagagccacatccagcaccacggacagctcccgggcgccttcatctcctcgtcctccaggcagcacaagccattgtggaatctccaccaggtgtacagaacggtgcctctgcgtcctgccactcaggacctctcaagtccccgatgtgatggctcctcagcatgatcaggagaaattccatgatcttgcttattcctgtcttgggaagtccttctccatgtctaaccaagatctatatggctatagcaccagctctttggctcttggcttggcatggctaagttgggagaccaaaaagaagaatgtacttcatctggttgggctggattccctctgataagccttcccagttgactgaaagatgaggctaggctctagcaagttgaagtcaaaccagctccttcaagaagctttgagcagaatgaagtggggaggacccagcttccagcccaggaagcccactgtacctggagccatctgggataagactttgacccatgactcccatatccacagcctgtccatcctagcccatcccagtttatcctgtatcatttgagctgggattcccacatcctctgagttggaagtcccatctcaagtcttcaataaagactcttgaatattgaatcacatta

SEQ ID NO: 2419 - DNA, 764 bp, Homo sapiens
  source 1..764: mol_type = unassigned DNA; mol_type = unassigned DNA
gagctgggcatccaagaagaagcagcctcatttgttttctggtgtcatcgtaggtggccacctatggcttttgggcttctcacctggggcgggtgggttctgcaccaccctcccaccctccttcctccgtgtggacgatagagccacatccagcaccacggacagctcccgggcgatcccatgggagtagaagaggtgtgagcaggttgcccagctggttagcggaaatgccaagatccaggctcctgaatttcagcctggccctttctatctgtctgatacctcctttacgagtctctctgcctgcgttgtgtggagcgggcctgctgctggttgggggagtttgcaggttgcccctatgcaaaaaaggacaggatgcatgactggcatgtaaggtgttcaggaaaaccaggaaaagaccaaaaagaagaatgtacttcatctggttgggctggattccctctgataagccttcccagttgactgaaagatgaggctaggctctagcaagttgaagtcaaaccagctccttcaagaagctttgagcagaatgaagtggggaggacccagcttccagcccaggaagcccactgtacctggagccatctgggataagactttgacccatgactcccatatccacagcctgtccatcctagcccatcccagtttatcctgtatcatttgagctgggattcccacatcctctgagttggaagtcccatctcaagtcttcaataaagactcttgaatattgaatcaca

SEQ ID NO: 2420 - DNA, 725 bp, Homo sapiens
  source 1..725: mol_type = unassigned DNA; mol_type = unassigned DNA
gggcagcaccccctttttgctgcctttccagggagagcagcaagagaaagaaagagagaggcaagcgaaattcctgaatggatagacagatgctacgtcatcggagctgcatcctccactccacaagaggctaggagctggggggagagaggcagtccagccgcaggggccacccgaacagtctctcctcctcacagaagcctggagctgggcatccaagaagaagcagcctcatttgttttctggtgtcatcgtaggtggccacctatggcttttgggcttctcacctggggcgggtgggttctgcaccaccctcccaccctccttcctccgtgtggacgatagagccacatccagcaccacggacagctcccgggcgaccaaaaagaagaatgtacttcatctggttgggctggattccctctgataagccttcccagttgactgaaagatgaggctaggctctagcaagttgaagtcaaaccagctccttcaagaagctttgagcagaatgaagtggggaggacccagcttccagcccaggaagcccactgtacctggagccatctgggataagactttgacccatgactcccatatccacagcctgtccatcctagcccatcccagtttatcctgtatcatttgagctgggattcccacatcctctgagttggaagtcccatctcaagtcttcaataaagactcttgaatattgaatcaca

SEQ ID NO: 2421 - DNA, 4774 bp, Homo sapiens
  source 1..4774: mol_type = unassigned DNA; mol_type = unassigned DNA
agagacctttctcccatctccccaccaccaagcccttgttgagcacactgcacactggctttttatttttattttttggagacggagtcttgctctgtcacccaggctggagtgcagtggcgcgatctcagctcactgcaacctctgcctcccaggttcaagagattctcctgcctcagcctccagagtagctgggattacaggtgcctgccaccatgcccggctaatttttgtaattttagtagagacagggttttgccatgttggccaggctggtctcgaactcctgacctcaagtgatctgcccaccttggcctcccaaagtgctgggattacaggtgtgagccactgtgcgtggactgcgctggcccttctagtgaatgtttgggttcagggtacacgaagcagcagaatgctggcggacaccacctcagcttgcaggctgctctgggtttgatagtcagtggggctttgtccacaggaaggacaggaaaagaaggagcttttggtttttgactctggaattggacaggctggtcaggatacaaattctggcttcccccacttactagctaggtgaccttaggcaagtcccttcatgtctttggaccctaactgccttccttggttatcctgaagatcaaatggggtgatgggaatgaatgttttctaaggctgtatgcagatgtttagtgttaaatgctaagtgcagagggacacagttatggggccattgaggtaggtgggggcaatcaaggaaggcctcctgggttgtgagggccatggatcaccgggtgcagtccataacggaggcctgactgagaaatggggctgggctccatggctggggcttttgtggtctgaaggaggtgagcatcttgctgaggctgtttcgagagggacccgttgttaacaattaggtggtgaactccacaacggcagcctcttttatccactggccaggtgtgaatgccacccaacataccaggaggaggggacaggtagggtgcagctctgccacattgcccctaacctgccctgctccctccctgcagccttcatctcctcgtcctccaggcagcacaagccattgtggaatctccaccaggtgtacagaacggtgcctctgcgtcctgccactcaggacctctcaagtccccgatgtgatggctcctcagcatgatcaggagtgagcgtaattcagacctatttagatccgtcagcccacggaccagggggaccttgagcaggacagtcttttgtctccaagcagtcattccctgttatacaagcaagagtcaggaggaggaatggttttggcatcatcccccacagacagcaatggggcctttaggcctggaaggaaggaccaggctgcggctggcatatggaggttgagccctgggcacggggcatcagcttcacccggctggggatgccttctgctgggtttgtccatctggcaccagctggcttcccagcaccgcccccacaaccaaccagactcctccttctgctgttgccatggcaattggctgccatattgtacctcagagcactagctcctatctggattttcccgcggggttcctagagggtgggagatgggtctccagggatttatccctttcccctgatatctatccaataaaaattcataataacatatgattttttaatagcctaagtggaggattactatgtgtcaggctctgtgccagacactctctacatgttatttaatgtggctaagaaagaattaatgagatagaattcaagaggttcccatccagtttcctgctactacgacagacttttcctctctccaaccaggaaattccatgatcttgcttattcctgtcttgggaagtccttctccatgtctaaccaagatctatatggctatagcaccagctctttggctcttggcttggcatggctaagttgggaggtaaggaaggaatgccacctagctttagttacttcataaaggttcctggactccagctattagaataggaaaactgagacttgtctagcttggtgagaggtctgagtgccccttaaagacttgggagcccccacccaaaccttttgtttacagaagaggagtaaatgccacagaatgctttgaaattccccttctgtgccccatcagcaccccagaaagaggagccggagaccatggaatagcaatagtctctcaggccctctgggctccccctttggaagccagtctcccagctcctgccctggggggaacgttccaacagggtctcagagacatcctgggataatgagggtcccctccttctggagcccaactggaaggcagagaatggtcactttgacctcgaggggcatctataaggggcactaagcagaggccagatttgctgaggaaatcctgaatgaggagcaggtggagagaaaaaggaggccattctcaactgaggaagggtgggctgggagggaggggccagggataatttatgatatcattgctcccccgccgcacttacttcccagccctctgctactgtaccgttgctaggagagcctggctctgtctggggctgggagggtgtaacaagcgggaggctgttccatctgcactcctcctcccccacccaggggagggcaccgcatggagctgcatccaccaccccttcccaggccctgacagacaccagtctcttctgtcgttcccccaaatctagccactcaagggatagcaggactcccagttgggctgaggatctagagcaaggaatgggcaagagagcatggaaggagacacactggcagacttagaggggcactgaggaacagacagcccaccttgagtcctggcagccagcccgggtcaggaagagggccagagggggtcagggaaacaggcctggcagagatcaggtttggagaagacagggtcgttacatttgaggggctcctgatatgatgggcaaggcagacttctcatccccactcctccatactgtcaagatccaggttggagagctggcaaaggtagggggaggaggagctggggaagggaggagggatgtgagctgggagaggctgcgaagagtctaggaagaagaaaggccacactcgtctgagtggagctgggccatgcagggccgtggccgagatcccctcctctttctgaaactcttctcagatcttaaggctcttggagaagtcaagggaggtgaactttgggggtttccaaagcggctggctcccaaccctggatgggacaggaaaggaaggctgtgcccacagctgtgcctgacacctgattcctgtgcagcccctactgggtttatttgcctttcctggacatagcttccccagcccaggaaggaaggagctgaccctgatttgtgcccatttggttgtgtaagccctttcatagccattatctcagctaatcttcccaacagccctgaaaaccgggtgatattgtccccactttatgaaggaggaatcaaagcctcaggaaggctaagacactttcccagagtcacaggactggtaaattgggctgggcttcaagtgggtcttcgtagaccccaaagcatatgtccccttcctcccctgtgctgacttctgaaacacaaatggagggaccgagagaagagaggaccagataggcaggtggaattcttggcatgttctccagtgtaggggtaaagtctgagggatgataaacatcttgcaggttgaagacaggattggggaagaggccatgggagctgtggaagcgaccaaagtcttccaggctggtccttagcccaagtgcatcctgcaccctgccttcctgaagcaagtcccctgggctctctgcctaatctctcccgttcttgggatctgagtttacgccttaggcatttccctcaccccccattgccttggatggagcacctggaagaggtggaagaggtgcctagactcaagccactgtcatggtggatccctttgtgatgaccccttccctagctcctcaccttgcctgatggaagtgagctccttccaagatggctggaagtttgtcctctgcctcctcctaaagtctccatccgaagtgtattttttggctggacgtggtggctcacgcctgtaattccaacactctgggaggccgaggcaggtggatcacttgaggtcaggagttcgagaccagcctggccaacatggcgaaaccccgtgtcttctaaaaatacaaaatttagccaggtgtgatggcatgcgcctgtaatcccagctactcagaggctgaggtacgagaattgcttgaacctaggaggcagaggttgcagtgagccgagatcatgccactgcactccagcctgggtgacagagtgagattccatctcaaaaaaaagaagtatttttctttacgcttgacaatttttcttttcagaccaaaaagaagaatgtacttcatctggttgggctggattccctctgataagccttcccagttgactgaaagatgaggctaggctctagcaagttgaagtcaaaccagctccttcaagaagctttgagcagaatgaagtggggaggacccagcttccagcccaggaagcccactgtacctggagccatctgggataagactttgacccatgactcccatatccacagcctgtccatcctagcccatcccagtttatcctgtatcatttgagctgggattcccacatcctctgagttggaagtcccatctcaagtcttcaataaagactcttgaatattgaatcac

SEQ ID NO: 2422 - DNA, 543 bp, Homo sapiens
  source 1..543: mol_type = unassigned DNA; mol_type = unassigned DNA
ggcagaggagggagctaggaggtgagacccgctccaccctgctcgcctaggctcggcggaggctaagagcagggcagcctcctctgcccggcgcccgctgagccccggcatctggaactcagggccctggcgctccaggggcgggaactggccgggaggaccgcgcgggagagcacggatgggcaccctgggctcgataccaaaaagaagaatgtacttcatctggttgggctggattccctctgataagccttcccagttgactgaaagatgaggctaggctctagcaagttgaagtcaaaccagctccttcaagaagctttgagcagaatgaagtggggaggacccagcttccagcccaggaagcccactgtacctggagccatctgggataagactttgacccatgactcccatatccacagcctgtccatcctagcccatcccagtttatcctgtatcatttgagctgggattcccacatcctctgagttggaagtcccatctcaagtcttcaataaagactcttgaatattgaatcac

SEQ ID NO: 2423 - DNA, 1987 bp, Homo sapiens
  source 1..1987: mol_type = unassigned DNA; mol_type = unassigned DNA
aaacggtaattcttagattgcagaaaggttaaaggctacagtttggaaagactgatagcatatgatttgtttcagaatgtaaaaagggcagctctctggcatgttcctgactgaggatctcataacatttaacttgaggaacttcctccttttccagctttgggagtcaaggtgagactcctggggacctaggtaggaagtatctgaagacttgggagaggaggcacagtccttgggaagcctgataaagggaagaggttggagtccgcgtggcagaatggccgttgttttctttctccttaatggatattaagacttattggtaacagcacttaggatgggtaaactgacttacatagataaatacagaatgtgtaaatgataatttcaagtttatgccattaagctcctggattctaagtaactaaaaacacagtttattaaattaaaggacaagttaggtagtggctataattaacaaatcctatagagacctgcctatcagcatgtagacttgtcttcataattgagtgactttaagaagggatgtcttctctcccttcgcctcacaaaccaacatccccccagtccccagtgcgattcctaaggttggtaacccaccagagtcacacaggcccctatgtctgaaagtctttcttgaagtctgcatgttcaaggtttgaaagttggaatctggttatttattttttcaccttccttcactccaatgttctgggtatggattgaccttcccacctcccttcctttgctattgggacctcagaggtcttgaggggtgagtatgtctcatccagagacagggtgtgctgacttccctaggagatcatgagtttaggttaatgctttaaaatcactggagaagcagacaaaactataaaaacattcttggggctttgaggagaatgaggagcagagttatggaaggaagggtgggtgggtgcatatttagataggagagagaaggggaaagggggaaccccctccttgccacccaggctctcccagggccaaagtgacaccccctcctcctcctgccctaatccccccattaaggcagctctgagtttgttatgacaggggctgaaggctgctgaattgctgtttgctgtgtctgctaattggactgaagggttggagtctggacactgaaagggaccattgttgctgtttaccttctacagccgcctccctggggaccctctgggtaaaggggagcagcagcacccccttagggtcattgcacccatttcctgcacaagggactgcggtggggagacagtttgtctcattgccttggggtggtttgagcttctacagcacagaggagacaagccaacacctgagccagtctcttctccaggccaggcctaggggccatccaggagctcccaggaaagaggatttacatgcttgtctttctcctttttattcattcccttcttctttagggatctttgctttgcctcttcctccagctaatcaggcttcacccctgcaccttttctgacctgctttcttctagcttctcacctggggcgggtgggttctgcaccaccctcccaccctccttcctccgtgtggacgatagagccacatccagcaccacggacagctcccgggcgaccaaaaagaagaatgtacttcatctggttgggctggattccctctgataagccttcccagttgactgaaagatgaggctaggctctagcaagttgaagtcaaaccagctccttcaagaagctttgagcagaatgaagtggggaggacccagcttccagcccaggaagcccactgtacctggagccatctgggataagactttgacccatgactcccatatccacagcctgtccatcctagcccatcccagtttatcctgtatcatttgagctgggattcccacatcctctgagttggaagtcccatctcaagtcttcaataaagactcttgaatattgaatca

SEQ ID NO: 2424 - DNA, 726 bp, Homo sapiens
  source 1..726: mol_type = unassigned DNA; mol_type = unassigned DNA
ggcagaggagggagctaggaggtgagacccgctccaccctgctcgcctaggctcggcggaggctaagagcagggcagcctcctctgcccggcgcccgctgagccccggcatctggaactcagggccctggcgctccaggggcgggaactggccgggaggaccgcgcgggagagcacggatgggcaccctgggctcgatcttctcacctggggcgggtgggttctgcaccaccctcccaccctccttcctccgtgtggacgatagagccacatccagcaccacggacagctcccgggcgcactggaagctgagggttttgacagcggcaggccacataggcaaggaagctggtgcatgcagtgtctctgggcaaggttatgcaaaccaaaaagaagaatgtacttcatctggttgggctggattccctctgataagccttcccagttgactgaaagatgaggctaggctctagcaagttgaagtcaaaccagctccttcaagaagctttgagcagaatgaagtggggaggacccagcttccagcccaggaagcccactgtacctggagccatctgggataagactttgacccatgactcccatatccacagcctgtccatcctagcccatcccagtttatcctgtatcatttgagctgggattcccacatcctctgagttggaagtcccatctcaagtcttcaataaagactcttgaatattgaatc

SEQ ID NO: 2425 - DNA, 528 bp, Homo sapiens
  source 1..528: mol_type = unassigned DNA; mol_type = unassigned DNA
gctgcctgaccaggtgtgcactgaaagcctaccctggttggtggacatggaacagactgaggccataagaaggacttcctggctgaccagaaatactgttgaatcttcctgttaatggaattaggaagagaggatggagagagaaggaaggagggagagaccatgaatggcggcccccagaagagataccaaaaagaagaatgtacttcatctggttgggctggattccctctgataagccttcccagttgactgaaagatgaggctaggctctagcaagttgaagtcaaaccagctccttcaagaagctttgagcagaatgaagtggggaggacccagcttccagcccaggaagcccactgtacctggagccatctgggataagactttgacccatgactcccatatccacagcctgtccatcctagcccatcccagtttatcctgtatcatttgagctgggattcccacatcctctgagttggaagtcccatctcaagtcttcaataaagactcttgaatattgaa

SEQ ID NO: 2426 - DNA, 688 bp, Homo sapiens
  source 1..688: mol_type = unassigned DNA; mol_type = unassigned DNA
gggccacccgaacagtctctcctcctcacagaagcctggagctgggcatccaagaagaagcagcctcatttgttttctggtgtcatcgtaggtggccacctatggcttttgggcttctcacctggggcgggtgggttctgcaccaccctcccaccctccttcctccgtgtggacgatagagccacatccagcaccacggacagctcccgggcgccttcatctcctcgtcctccaggcagcacaagccattgtggaatctccaccaggtgtacagaacggtgcctctgcgtcctgccactcaggacctctcaagtccccgatgtgatggctcctcagcatgatcaggaaccaaaaagaagaatgtacttcatctggttgggctggattccctctgataagccttcccagttgactgaaagatgaggctaggctctagcaagttgaagtcaaaccagctccttcaagaagctttgagcagaatgaagtggggaggacccagcttccagcccaggaagcccactgtacctggagccatctgggataagactttgacccatgactcccatatccacagcctgtccatcctagcccatcccagtttatcctgtatcatttgagctgggattcccacatcctctgagttggaagtcccatctcaagtcttcaataaagactcttgaatattgaa

SEQ ID NO: 2427 - DNA, 879 bp, Homo sapiens
  source 1..879: mol_type = unassigned DNA; mol_type = unassigned DNA
ctcctcacagaagcctggagctgggcatccaagaagaagcagcctcatttgttttctggtgtcatcgtaggtggccacctatggcttttgggaatgtaaaaagggcagctctctggcatgttcctgactgaggatctcataacatttaacttgaggaacttcctccttttccagctttgggagtcaagcttctcacctggggcgggtgggttctgcaccaccctcccaccctccttcctccgtgtggacgatagagccacatccagcaccacggacagctcccgggcgccttcatctcctcgtcctccaggcagcacaagccattgtggaatctccaccaggtgtacagaacggtgcctctgcgtcctgccactcaggacctctcaagtccccgatgtgatggctcctcagcatgatcaggagaaattccatgatcttgcttattcctgtcttgggaagtccttctccatgtctaaccaagatctatatggctatagcaccagctctttggctcttggcttggcatggctaagttgggagaccaaaaagaagaatgtacttcatctggttgggctggattccctctgataagccttcccagttgactgaaagatgaggctaggctctagcaagttgaagtcaaaccagctccttcaagaagctttgagcagaatgaagtggggaggacccagcttccagcccaggaagcccactgtacctggagccatctgggataagactttgacccatgactcccatatccacagcctgtccatcctagcccatcccagtttatcctgtatcatttgagctgggattcccacatcctctgagttggaagtcccatctcaagtcttcaataaagactcttgaatattg

SEQ ID NO: 2428 - DNA, 588 bp, Homo sapiens
  source 1..588: mol_type = unassigned DNA; mol_type = unassigned DNA
cagcctcttttatccactggccaggtgtgaatgccacccaacataccaggaggaggggacaggtagggtgcagctctgccacattgcccctaacctgccctgctccctccctgcagccttcatctcctcgtcctccaggcagcacaagccattgtggaatctccaccaggtgtacagaacggtgcctctgcgtcctgccactcaggacctctcaagtccccgatgtgatggctcctcagcatgatcaggaaccaaaaagaagaatgtacttcatctggttgggctggattccctctgataagccttcccagttgactgaaagatgaggctaggctctagcaagttgaagtcaaaccagctccttcaagaagctttgagcagaatgaagtggggaggacccagcttccagcccaggaagcccactgtacctggagccatctgggataagactttgacccatgactcccatatccacagcctgtccatcctagcccatcccagtttatcctgtatcatttgagctgggattcccacatcctctgagttggaagtcccatctcaagtcttcaataaagactcttgaatatt

SEQ ID NO: 2429 - DNA, 542 bp, Homo sapiens
  source 1..542: mol_type = unassigned DNA; mol_type = unassigned DNA
ggcagaggcagaggagggagctaggaggtgagacccgctccaccctgctcgcctaggctcggcggaggctaagagcagggcagcctcctctgcccggcgcccgctgagccccggcatctggaactcagggccctggcgctccaggggcgggaactggccgggaggaccgcgcgggagagcacggatgggcaccctgggctcgatcttctcacctggggcgggtgggttctgcaccaccctcccaccctccttcctccgtgtggacgatagagccacatccagcaccacggacagctcccgggcgaccaaaaagaagaatgtacttcatctggttgggctggattccctctgataagccttcccagttgactgaaagatgaggctaggctctagcaagttgaagtcaaaccagctccttcaagaagctttgagcagaatgaagtggggaggacccagcttccagcccaggaagcccactgtacctggagccatctgggataagactttgacccatgactcccatatccacagcctgtccatcc

SEQ ID NO: 2430 - DNA, 475 bp, Homo sapiens
  source 1..475: mol_type = unassigned DNA
aggcttgagcgaggggctagagccgcgaggactgaccagcaccagaggatacaagaggaggagagagacctcactggttcgggcgacatttcacccccccagcaccccagtcggcacagccttcatctcctcgtcctccaggcagcacaagccattgtggaatctccaccaggtgtacagaacggtgcctctgcgtcctgccactcaggacctctcaagtccccgatgtgatggctcctcagcatgatcaggaaccaaaaagaagaatgtacttcatctggttgggctggattccctctgataagccttcccagttgactgaaagatgaggctaggctctagcaagttgaagtcaaaccagctccttcaagaagctttgagcagaatgaagtggggaggacccagcttccagcccaggaagcccactgtacctggagccatctgggataagactttgacccatgactcccatatc

SEQ ID NO: 2431 - DNA, 652 bp, Homo sapiens
  source 1..652: mol_type = unassigned DNA
ccacccgaacagtctctcctcctcacagaagcctggagctgggcatccaagaagaagcagcctcatttgttttctggtgtcatcgtaggtggccacctatggcttttgggcttctcacctggggcgggtgggttctgcaccaccctcccaccctccttcctccgtgtggacgatagagccacatccagcaccacggacagctcccgggcgccttcatctcctcgtcctccaggcagcacaagccattgtggaatctccaccaggtgtacagaacggtgcctctgcgtcctgccactcaggacctctcaagtccccgatgtgatggctcctcagcatgatcaggagaaattccatgatcttgcttattcctgtcttgggaagtccttctccatgtctaaccaagatctatatggctatagcaccagctctttggctcttggcttggcatggctaagttgggagaccaaaaagaagaatgtacttcatctggttgggctggattccctctgataagccttcccagttgactgaaagatgaggctaggctctagcaagttgaagtcaaaccagctccttcaagaagctttgagcagaatgaagtggggaggacccagcttccagcccaggaagcccactgtacctggagccatct

SEQ ID NO: 2432 - DNA, 412 bp, Homo sapiens
  source 1..412: mol_type = unassigned DNA
tgacagcggcaggccacataggcaaggaagctggtgcatgcagtgtctctgggcaaggttatgcaaccttcatctcctcgtcctccaggcagcacaagccattgtggaatctccaccaggtgtacagaacggtgcctctgcgtcctgccactcaggacctctcaagtccccgatgtgatggctcctcagcatgatcaggagaaattccatgatcttgcttattcctgtcttgggaagtccttctccatgtctaaccaagatctatatggctatagcaccagctctttggctcttggcttggcatggctaagttgggagaccaaaaagaagaatgtacttcatctggttgggctggattccctctgataagccttcccagttgactgaaagatgaggctaggctctagcaagt

SEQ ID NO: 2433 - DNA, 826 bp, Homo sapiens
  source 1..826: mol_type = unassigned DNA
cagaggcagaggagggagctaggaggtgagacccgctccaccctgctcgcctaggctcggcggaggctaagagcagggcagcctcctctgcccggcgcccgctgagccccggcatctggaactcagggccctggcgctccaggggcgggaactggccgggaggaccgcgcgggagagcacggatgggcaccctgggctcgattgcatttgacctacctcaggatatccaaaggagaacagagggaagtgaggggttgagaactgacaccctacaacgccagcacctcagtggaaaggaggaatagagcccaggagggatgtggggcttctcacctggggcgggtgggttctgcaccaccctcccaccctccttcctccgtgtggacgatagagccacatccagcaccacggacagctcccgggcgatcccatgggagtagaagaggtgtgagcaggttgcccagctggttagcggaaatgccaagatccaggctcctgaatttcagcctggccctttctatctgtctgatacctcctttacgagtctctctgcctgcgttgtgtggagcgggcctgctgctggttgggggagtttgcaggttgcccctatgcaaaaaaggacaggatgcatgactggcatgtaaggtgttcaggaaaaccaggaaaagccttcatctcctcgtcctccaggcagcacaagccattgtggaatctccaccaggtgtacagaacggtgcctctgcgtcctgccactcaggacctctcaagtccccgatgtgatggctcctcagcatgatcaggagaaattccatgatcttgcttattc

SEQ ID NO: 2434 - DNA, 427 bp, Homo sapiens
  source 1..427: mol_type = unassigned DNA; mol_type = unassigned DNA
ggaaagccggcctcacgggcgggagggagaggcttgagcgaggggctagagccgcgaggactgaccagcaccagaggatacaagaggaggagagagacctcactggttcgggcgacatttcacccccccagcaccccagtcggcacagccttcatctcctcgtcctccaggcagcacaagccattgtggaatctccaccaggtgtacagaacggtgcctctgcgtcctgccactcaggacctctcaagtccccgatgtgatggctcctcagcatgatcaggagtgagcgtaattcagacctatttagatccgtcagcccacggaccagggggaccttgagcaggacagtcttttgtctccaagcagtcattccctgttatacaagcaagagtcaggaggaggaatggttttggcatcatcccccaca

SEQ ID NO: 2435 - DNA, 578 bp, Homo sapiens
  source 1..578: mol_type = unassigned DNA; mol_type = unassigned DNA
cagtctctcctcctcacagaagcctggagctgggcatccaagaagaagcagcctcatttgttttctggtgtcatcgtaggtggccacctatggcttttgggcttctcacctggggcgggtgggttctgcaccaccctcccaccctccttcctccgtgtggacgatagagccacatccagcaccacggacagctcccgggcgatcccatgggagtagaagaggtgtgagcaggttgcccagctggttagcggaaatgccaagatccaggctcctgaatttcagcctggccctttctatctgtctgatacctcctttacgagtctctctgcctgcgttgtgtggagcgggcctgctgctggttgggggagtttgcaggttgcccctatgcaaaaaaggacaggatgcatgactggcatgtaaggtgttcaggaaaaccaggaaaagccttcatctcctcgtcctccaggcagcacaagccattgtggaatctccaccaggtgtacagaacggtgcctctgcgtcctgccactcaggacctctcaagtccccgatgtgatggctcctcagcatgatcagga

SEQ ID NO: 2436 - DNA, 536 bp, Homo sapiens
  source 1..536: mol_type = unassigned DNA; mol_type = unassigned DNA
gtctctcctcctcacagaagcctggagctgggcatccaagaagaagcagcctcatttgttttctggtgtcatcgtaggtggccacctatggcttttgggcttctcacctggggcgggtgggttctgcaccaccctcccaccctccttcctccgtgtggacgatagagccacatccagcaccacggacagctcccgggcgatcccatgggagtagaagaggtgtgagcaggttgcccagctggttagcggaaatgccaagatccaggctcctgaatttcagcctggccctttctatctgtctgatacctcctttacgagtctctctgcctgcgttgtgtggagcgggcctgctgctggttgggggagtttgcaggttgcccctatgcaaaaaaggacaggatgcatgactggcatccttcatctcctcgtcctccaggcagcacaagccattgtggaatctccaccaggtgtacagaacggtgcctctgcgtcctgccactcaggacctctcaagtccccgatgtgatggctcctca

SEQ ID NO: 2437 - DNA, 2697 bp, Homo sapiens
  source 1..2697: mol_type = unassigned DNA
ggcagtccagccgcaggggccacccgaacagtctctcctcctcacagaagcctggagctgggcatccaagaagaagcagcctcatttgttttctggtgtcatcgtaggtggccacctatggcttttgggcttctcacctggggcgggtgggttctgcaccaccctcccaccctccttcctccgtgtggacgatagagccacatccagcaccacggacagctcccgggcgatcccatgggagtagaagaggtgtgagcaggttgcccagctggttagcggaaatgccaagatccaggctcctgaatttcagcctggccctttctatctgtctgatacctcctttacgagtctctctgcctgcgttgtgtggagcgggcctgctgctggttgggggagtttgcaggttgcccctatgcaaaaaaggacaggatgcatgactggcatgtaaggtgttcaggaaaaccaggaaaaggtggaacagactgctacctctgtctgaagtggtttggagggaaggcctcagggacagggcatacctagcagtagctggcaagcccatgggagaaaaggcaagggggcaaccatctgccagggcacagaggccaggggatggccacaaggagtctccagaggccagtgggagtcatgcaaactggaacggggcctgggaaaggcccttctgtgtgcccaggcctgcctccccaacaccgtgagcctagaaacaaaggggccattctctctaggatttgatgctgccatctccggctggcagtgccaggtggtgggggcatcgggggtgtcaatccattatcccccccaactcctaggtcctctgaggctggatgttggggaggtgggtgttctatgctatgttgctatggcaaccgcccccccacccccaaagtacaaagagaggcagctttcacccctacccccaggaagaacctgggtctggctgggaatcttcccttgagaatcctcctttctgatgcacaagccatggcatgcataagcgtcaccctcttttcagcactggaagctgagggttttgacagcggcaggccacataggcaaggaagctggtgcatgcagtgtctctgggcaaggttatgcaagtgagtaccagccccttatacttaaccccctctcttcccaagctcgcctgcccctcacctaccacagccaaggacatcccaggccttctcagctgaagcgatggggccttgaccttctactctttcccagaagtgagggacacccggctacctccagcaaacctccaggctgtgggaacagagaagaggagggggccattcctgccaccctccatctgcaccctccgccattactcattaggcattctgccccctccttccgctcgttaagcctgatttgcatgcatttgcataatacagttcatttacattccaggaggctcatggtagaagccaggaaaaaaggggaggggggctggagaagagaaaaagggggagagattttgttttcatcaaagtgttgggggagggactagggggaggtggcaggaagaggacagaaataaaaacttacactactttctttcttcctttctgccctccctccctgagctggactcaaatgccaaagagagatgccaaggggccagcttttctgtccttttttgtcttgcttcctccggccttggctccccagcctggccccccaccttgttgggctgaggcttcagaaagaaagaggcaggggtaggaggcaaggctgtgggaacggaagcggagggtgagggaggccgccatcttaggtaactggcgcctgtaagatggctgcctgaccaggtgtgcactgaaagcctaccctggttggtggacatggaacagactgaggccataagaaggacttcctggctgaccagaaatactgttgaatcttcctgttaatggaattaggaagagaggatggagagagaaggaaggagggagagaccatgaatggcggcccccagaagagatgtaaggttgagcacaggagcaggggtggtagagaggcctcagcactgggcttagttcccagactacttagaggactgtgggtaataagaaaagtactggaggaatcagaatgggggaatatcagcatgaggagagagagagtaagatgtggccaggcagtatcatctgctagtttgagggtctctctggggcctgtgaaaggtgactgtgtacttgaggtgatgctccaccttctctcctcagcccagcactctggtgaaactgcatcctctcagaggccactcacagccccctcaacaaagaccactggcccttcccaagcccagtcctccttgacctgtatggaaaatgttatgccattttctcagtcttttcctttggccttctgttcttctgttacatccatgatcatctgttcttggttccattcattcagtcctccggatggaccagttccttaactagaagtggtccccaggttctgctggtagcttgttttctcttccttctcactcttctcactccacttttatcactttaaccatcacctgaagttataaattctcctgtgtttcatttttcttttcttttctcttctctttctttctctctctctctctttcttctttcttttttttttttttttttttttgagagtcttgctctctcacccaggctggagtgcagtggc

SEQ ID NO: 2438 - DNA, 685 bp, Homo sapiens
  source 1..685: mol_type = unassigned DNA
cagaggcagaggagggagctaggaggtgagacccgctccaccctgctcgcctaggctcggcggaggctaagagcagggcagcctcctctgcccggcgcccgctgagccccggcatctggaactcagggccctggcgctccaggggcgggaactggccgggaggaccgcgcgggagagcacggatgggcaccctgggctcgatcttctcacctggggcgggtgggttctgcaccaccctcccaccctccttcctccgtgtggacgatagagccacatccagcaccacggacagctcccgggcgatcccatgggagtagaagaggtgtgagcaggttgcccagctggttagcggaaatgccaagatccaggctcctgaatttcagcctggccctttctatctgtctgatacctcctttacgagtctctctgcctgcgttgtgtggagcgggcctgctgctggttgggggagtttgcaggttgcccctatgcaaaaaaggacaggatgcatgactggcatgtaaggtgttcaggaaaaccaggaaaaggtggaacagactgctacctctgtctgaagtggtttggagggaaggcctcagggacagggcatacctagcagtagctggcaagcccatgggagaaaaggcaagggggcaaccatctgccagggcacagaggccaggggatg

SEQ ID NO: 2439 - DNA, 766 bp, Homo sapiens
  source 1..766: mol_type = unassigned DNA
gaaaggatgaatgaaaagtccggagccggagcgcgccggggccagagccgcggcagaggcagaggagggagctaggaggtgagacccgctccaccctgctcgcctaggctcggcggaggctaagagcagggcagcctcctctgcccggcgcccgctgagccccggcatctggaactcagggccctggcgctccaggggcgggaactggccgggaggaccgcgcgggagagcacggatgggcaccctgggctcgattgcatttgacctacctcaggatatccaaaggagaacagagggaagtgaggggttgagaactgacaccctacaacgccagcacctcagtggaaaggaggaatagagcccaggagggatgtggggaatgtaaaaagggcagctctctggcatgttcctgactgaggatctcataacatttaacttgaggaacttcctccttttccagctttgggagtcaagcttctcacctggggcgggtgggttctgcaccaccctcccaccctccttcctccgtgtggacgatagagccacatccagcaccacggacagctcccgggcgatcccatgggagtagaagaggtgtgagcaggttgcccagctggttagcggaaatgccaagatccaggctcctgaatttcagcctggccctttctatctgtctgatacctcctttacgagtctctctgcctgcgttgtgtggagcgggcctgctgctggttgggggagtttgcaggttgcccctatgcaaaaa

SEQ ID NO: 2440 - DNA, 1575 bp, Homo sapiens
  source 1..1575: mol_type = unassigned DNA
ggacccggtctatagactctgaccttagccctcagaatccctcattcagagcttagggatcgccaggccagaaggtggctgggaaggcaccagggagaagacagcctcccgcccccagttgagggaggtggtgaagagaggggagactgaaagcagtgggggagggtgagagaggggagccagcagagactcaagtggcctccagacttccaagtgctggccttcatctccccgcaagatgcgccccctccaactctcagccttcatcttcctactgtcactgtctccttcacaaggagagcagcaagagaaagaaagagagaggcaagcgaaattcctgaatggatagacagatgctacgtcatcggagctgcatcctccactccacaagaggctaggagctggggggagagaggcagtccagccgcaggggccacccgaacagtctctcctcctcacagaagcctggagctgggcatccaagaagaagcagcctcatttgttttctggtgtcatcgtaggtggccacctatggcttttgggctttcggcccctgattttggtctactccaattgtagaaagacctacatagtcaatgataggccaccctgcttccagttctgtgatagagaggaaaggcattggggatacagggaactctttccccttctccaatgggctcctgagggcaaagttggaggccaattgaccttgggggagatgattggttggagaagggaacagagatacttgtacctgggtgacagaggtgagaaagaagaggagcatggggtatggtaaatggggacccaaggagcttaaataactgtgagtgggtatgtatgccagggtatacaactgcaagcactgggaggtggtactgctgggagtatcagtggatttgtcattgcattggtctgagttgataagtttgagtatgtgtgcatgtgtgtgtgtgtgcgcacgcgtgtatgtgtgtgcgtgtgtgtatgtgtatgtgtgtgcatgtgtgtgtgtgcgtgtgtgtgtgtgtgatgcgcagcacccttgcatactcatgcttatgccccttaaggaggccatttgctgatggttgagggtcttgtagaaaggactcagtctggacgaaccagccaaccctctaccatctctgccaccttgttcttacctcccagacacataaggttctcaggcaagtgagcaatgtgtgggctcaagaatagaactgggagcaggcaaggaaggcagtacttacacaagcccaaggaattctcaagctggcccctcaataggaggaacataccactctctcgtggggaagaagtgtgacatccttagggacgatatcctccagattatttctccatacctcctaccttttctgcccacatgaatagatattttgtatatatatatttttttcacacagcctcagtattttttattgctaattcttgcttttatttgtgactatcccatagacaatgcagatttctatagcaaaaaatgtatgatattgttcataatgatgcacttataagacaaataaatatctgaatccaccctttcccaaa

SEQ ID NO: 2441 - DNA, 1091 bp, Homo sapiens
  source 1..1091: mol_type = unassigned DNA
cgcaggggccacccgaacagtctctcctcctcacagaagcctggagctgggcatccaagaagaagcagcctcatttgttttctggtgtcatcgtaggtggccacctatggcttttggggtatttattttcttatttattgtttctgatggtggagtgggtgggggaagaaaaggaaaactggccctgtctcacttatgttttctcctgttctctgtacccctctacccctctccctgtctcttccagctttcggcccctgattttggtctactccaattgtagaaagacctacatagtcaatgataggccaccctgcttccagttctgtgatagagaggaaaggcattggggatacagggaactctttccccttctccaatgggctcctgagggcaaagttggaggccaattgaccttgggggagatgattggttggagaagggaacagagatacttgtacctgggtgacagaggtgagaaagaagaggagcatggggtatggtaaatggggacccaaggagcttaaataactgtgagtgggtatgtatgccagggtatacaactgcaagcactgggaggtggtactgctgggagtatcagtggatttgtcattgcattggtctgagttgataagtttgagtatgtgtgcatgtgtgtgtgtgtgcgcacgcgtgtatgtgtgtgcgtgtgtgtatgtgtatgtgtgtgcatgtgtgtgtgtgcgtgtgtgtgtgtgtgatgcgcagcacccttgcatactcatgcttatgccccttaaggaggccatttgctgatggttgagggtcttgtagaaaggactcagtctggacgaaccagccaaccctctaccatctctgccaccttgttcttacctcccagacacataaggttctcaggcaagtgagcaatgtgtgggctcaagaatagaactgggagcaggcaaggaaggcagtacttacacaagcccaaggaattctcaagctggcccctcaataggaggaacataccactctctcgtggggaagaagtgtgacatccttagggacgatatcctccagattatttctccatacctcctaccttttctgcc

SEQ ID NO: 2442 - DNA, 768 bp, Homo sapiens
  source 1..768: mol_type = unassigned DNA
atgttcctgactgaggatctcataacatttaacttgaggaacttcctccttttccagctttgggagtcaagcttctcacctggggcgggtgggttctgcaccaccctcccaccctccttcctccgtgtggacgatagagccacatccagcaccacggacagctcccgggcgccttcatctcctcgtcctccaggcagcacaagccattgtggaatctccaccaggtgtacagaacggtgcctctgcgtcctgccactcaggacctctcaagtccccgatgtgatggctcctcagcatgatcaggagaaattccatgatcttgcttattcctgtcttgggaagtccttctccatgtctaaccaagatctatatggctatagcaccagctctttggctcttggcttggcatggctaagttgggagaccaaaaagaagaatgtacttcatctggttgggctggattccctctgataagccttcccagttgactgaaagatgaggctaggctctagcaagttgaagtcaaaccagctccttcaagaagctttgagcagaatgaagtggggaggacccagcttccagcccaggaagcccactgtacctggagccatctgggataagactttgacccatgactcccatatccacagcctgtccatcctagcccatcccagtttatcctgtatcatttgagctgggattcccacatcctctgagttggaagtcccatctcaagtcttcaataaagactcttgaatattgaatcac

SEQ ID NO: 2443 - DNA, 7705 bp, Homo sapiens
  source 1..7705: mol_type = unassigned DNA
gagctcggcgcggagcccggagcccgcagccgacagtctcctgctcccgtacgctgggcgccagctccggccgtgctgcccggctgcctgagagcgcgcccggccatggagccctcgcacaaagacgccgagacggcggcggcggcggcggcggtggcggcggcggacccccggggggcgtcctcgtccagcggggtggtggtgcaggtccgcgagaagaagggccccctgcgcgccgccatcccctacatgcccttccccgtggccgtcatctgcctcttcctcaacactttcgtgccgggactggggacattcgtctcggccttcactgtgctgtgcggggcccgcaccgacctcccggacaggcatgtgtgctgcgtcttctggctgaacattgcagcagccctcatccaaatcctcactgccatcgtcatggtgggctggatcatgagcatcttctggggcatggacatggtcatccttgccatttcccaaggctacaaggagcagggcatcccacagcagctgtgagcccacgggagccgctggggagatccaggggggccctgtgagggctgcaccaggcagctttgggcacaaggacctttacatgttcttttctgccattttctggactgggggtggaaagggggtatttttaaaaatattatttattttgaaaacgcatctgcttttctcagcaggttgtgagggctgccagcccctcctgctctggaaagcactgtgggcgcaggcaccagagcatcagagagtggggtggagatgagaacgcccacagagaggctgggatgctccggcaggctccaactggccttgctgtacccactgcccaccgcaaaggcacgccacgtctgctgggccgggccacaccgggccctgtctgggtgagcaggggctcaccaaggggacaggactgtggtagacccgtcctgtgggaccccacctgcctcaaaatctggtgccccgagtgtttactgtgtggtctcctgggggcagcaccagggtgtgggtgaggatggccaggctccaccctagcgtggaaaggcccactgtgcccacagctggcctgaggcctcggggagaagaccagtcccacaggcgtctcctgggcctgcctccctgaccgcaccccccgcctcctcgcagctgaaatctgagggctgggtgtgtcgtgacctgtgttttcctgggaaggagaggagtagctccttccctggggtgaaactgccagatgtttatacacaaagttattagactgaagcaggagtgggcagactagcaggctttcacccaatacttaacagcatttctggcccacattcctttttctgaagtcattggggccagatgtgtctccgaattgagaaattttagatttgagaaagacaatgcgatccatttatcgtacactttctaacttcccggcagagtgtggaacatctcgcctaccatcaggcacgtgaatatttctgcagagaaacatgtgactagtcccattaactgggagctatacaaactgtaaatagcctcacctcagttcagtctaattttgccactaagtaacttagggaaaaacttaccatttgagagcttttagggtttcagaattgcaagaacaattgtatggggttgtggaccttgatctgaaaatcctgcttgcaaacagatgtgttagagggtgaaattgtcggcattacacaaggactccttcagttgccaaaagaccatgggcctctttaaggagcccctctgtaagtgattgggacagggctagatccctaatgggggctaggggtggggagaatctagcagaagttgtccaggatactgtggatcaagtatcaatctgaaattaagagaaattagatactaagaggatggacatttacatgtctgtttcctttcctttcattttcattctaacataggaaatgctaacagatggggctggcccaaagtcaagcttctgactccacttgacacagtgccattgggcatgtccctctctgaagggcttgtttgtctatcagagactgtcagaactccatgagggcaggagaagggattttgcaggatgaaagtgcttgggaagtagtggccaccgttctgggggtttcagcccacctaccccatccaccgggctttctaatcacagtcctgcctgagaagcgggccctgctgcccaccccttatcatggatcccttagctactgtccgtcttccattgctgcctggggctgggctgccgtttttgaacacctggcagtgtctttgtcgcgtcctgtcctctcttcttacagaccccaacccaggcctttgccttcttctctcctgtttggaagcctctgtatcttcaaggtgtgggaacagatttggttttctctaaaaagctagaaccttctgctgtgtgcagcaggcatcctccaggctggtgctggctgctctcgaggaagctgcgtcagagtggagctgcccctctactcagataaaatagcttcagctgcaggaagccgccccctcccatgcccaccagcccacagcccttcaccccacacagcccccagagtttgcccgacaccccctgagtgatgacaggtctcaggagggggccgcccccacaaatgggaggcggaagcttattttccccgcttgggctgggggcggctgctgagggggtgaagaagagatagcaatttatgtcgcatgtttagtgacacaatccagatgcaggtgggactttcttgagtggcaggtgtcaccctgggtcccgtgtgggatggtttaatacaggggtttgtgtgtttgtgtgtgtggagggccactgcgcccccagatcctcctctcccccgagggctgcgtctctaaacctgggaaaacatcagcctcaggaggaggcccctttccgggtaactgatgtgtgggagaagccaagaggcccctgcctgtctcctgaatgaggctgtgagggttgccatgtgggcgggaccggttcaaaatagcgcccccgcccctctaaattagaccgtggtctcagcatgatcatcttcagtagataagggacagtggctgatttactccaaatagttccagctggccactcagaccagggccagagttaacttctcaaacaccagccagctgaaaattagggttctcgtgcaggcaagtgcatggttgacacacagccctttggtgacaaagctgggctttgcctgcatagtgcagacaaggctgttggttcagaggctgcagggcacattccaggttggggccttttgtcggtcggaattcaataggacattccctggctgtgggtgtttagggcaggaattacaggcttgcagagaaagtcagaggcaatgagatgctcccagtaccaaactgtgacactgggatcagggtggtcattcccttgggtcagagtgggaccctagagccagagtgagctgtgggtggcctgggtgtgtcctgtggacggcggagactgttgatttggatgttgagctctgagtcagtttcagaaccaaggatctcaggctgagaaggccaggtccccatgggagcggcaggagtctgatggctctgctgccagagcctaccccagcctgccacgccgctgaccttcccatggtaaggaaggggcaggcagcatggttcccaccctcagctgccccagacccacacatccagccccaagagcagcctcacccaggcacagtgcagggcattttagctcctgggaggggagatgcctttgtgagtttcagatgtcagaggagaagctccgagagagtaagtcatgtgcccccaaacactcagctcctaagtggcaggacaggcaagtggccaggttgggccgcccccacagcctgtgccgtccacacactcactacagcactcccagaagaaggagcagaatcgcatgcagcccagagcaggtcctgtggaggggtcctcacccctcaggagtaatagggtgattatgtcacatgtttagtgatacaatcccacctgtgtctggattgtgtcactaaacatgcaacataaattaccatctcttctccatcccctcagcagccgcccccaccccaagctgggaaaataagcttctccctcccatatgtgggggcggccccctcctgagacctgtcatcacttagggggagttgggcaaaacctcctaggaaggtcctggacgcctccaccctgccccacaaggctccgtactcccacctgcctgggcagccctcacacccatgctccctcctttaggcaggcccagaaaggtgccccttcctgagggtgttgggggatggcggcagagagacagctggtattaggagcttccccatcctaatgtgcaggaccaagttgcccgctctgccagccaggggctccagccatgctggcacaggcatctcagaggtgtgagatgaactccgcctcatgcaggatgcccagggctcggaagcagtaaggaggatgctacagaaaggaactgcagaaagaaaaaaagccacatggttaacttttcccctggagggcaaaggggtccggctctcaaaaagaaaagccaggcacagatcccaacaccaagtgtaaggcagcacaaagtgggtctgaaaccccaggaccgggtcaaaggccttccgaaggcccgaggttcttgaggaggggaagctgatagggccctggtctttctgcaccagcgtggctctttaaaatacaaaacacccacaaagccaaaaaccctgaaacatgttctttagctaaccccttccctgcccagatgcctgcaattctgagaattcacttcagttttgccagatccaacccctaggcttgagggtggagagccaggcctcctcagggtcccttctaggctcccaggcccaccttaggctttaattgcattggctgtttcttatggtgttagtgaattttgcaaagaaagccctgagcattgcataaatgcttgggggcgtgtcatttaaatggaagttctccaatagtggctgaaggcagagtttactgttatccctccctcttgctggctttgctggagggcttttatcagagagattggaggtgggagagcacttttaaagcacaccccaccccctgcacccgagcggcacctaagcttcccagagaccatgaccttgtatgtggctggaggcctcaggcttagggagcagcctgaagcctttgctgtcaaccctcccaggaaagaagccgggcctcaggctgaggaaaaacagagtttcctctccagagggctcaatgagcagccaggtagtggcctcgggcagtcctcaccagggggacacctccctgctttgcattaactcatcagcaagctcatcgagagctaacgtgggcccagcagtcctgtgcttggaaatgatgccgtcacctccacactcctgctgttccagcctctgcaggtgaagctgcaaggtgagcagaggcaggcgtggggacacactcttcaaggactgcactgccccttctccctcctgagagctctgtgcactgggtttggggatgaggcgccagcctggtcaggggaggtgactgtggtccttctgaccagcttggatctttaaaataatcacaaaaaagctcagcctgagcaggtgggtgcaaggctcaggggcctgtgtttttcatcaatcagttttcttcctgcaagattcttagagctggatgttcacgggatcatggggcatggaggtggtcacgctcagacagtcatgcaccaccctcaatcccaggccctgcagagataggaagaatcccaaccagagggattcttccccaaacgttcccttgtggcccaagagtgagttccggcctgagtgctgttatgactgccggcgtctctccgactgcctctcgcctcagtttaaccatctataggttaggaacaaagaagggcttaggcagccatcgtttccccatttctgtcagagccaagggcttggaggcccagccccatccgggcaagggctgtccgctcctgcccaggcctcacctcctcgctgcagctggcaagattctttctagcagaacagaaacactggcccccaattccactctcccctcctgatgctaccgcagagggcagaaaggtgccctgtagcgtccaccatgtgtgtgtcctgagtttccagtgcaagtcatctggatttgcatttagctagggaaactcggccctcaaaccctctccctctctgcctgaatttgccaaaatgccaaccatccgggcaggtgtggatgccacagtccatccccattgcatttcacccccacatggacagaggcacacactcgcacacattcccagcacctttgactgctgggggatgcaggccagggtctgcctggagcctcagggttgggacttatctccaaaggagcccacaccccctcttccaggatgggcactggctggcagcacttttttccctcatcacatccctgacccctgcccagcccacatgcacatgctgtttcctgtctccagggccctagcctgtggatctcttcctcccatgcactcctagggtgaatgggctcagcaccaaacctggctgtgcccattccccacaaccccagcttggcctcctgtgggaaggagaaggcagacctgcccagaggagaggggcagtgttcccacccacctgctccagcacaggaaccagggaggaaagaagggagagggaggttccattcaccgttttctgggttagcgcttgattggatgtttcaagcaagggacaaggtgatggtggctgtaataggctcctcgtgggcaccgtcaccccagaaggcctgggcacccatgagaacctgtggccagcccttttcattggctgagttccctgctgttgtgcgtggtgccattttttttttaaacaacatatataaaaacaaaacaactggttctgtgtgtatcaacttaatttgcatatgaatgagtgttgtgttgtgatttgcagtgttttgacaccgtgattggctttgtttgggtctctcttctttctgtgaaattaactgctgtgcgttttcactgttcttagagaagaccctgagctcctggggttttcttgtctcacttctaccctgacctgctgggagcccaccccaccccagtccagccatgagggtatttccagcctattccaatgactgaaacccttcttggaagaaaacgtctaatgtcggggacgtagggacgcttccagacttgccctggccggaaccctgcagcctggggccccagcccgcctgcagctcagctttccccaacaccctcaggacccagccccagccccggcagaccttccctgggagctgcttaggtggtctccacagcgccctctaggggccaagcagggttccagattctccagccttctgccagctttaaaacccttcactcaagcagcattactgtacatgcaatgaaaaatactatatatgacagtcaaaacctgtgtacatatttccatgtacatatttatacatacacacaccttcctattataaatatataaagcatgacatctctttggcattccaagtttgtgtttttttaaatccttggaaatacggctttggaaacctttttcttcctttccctcttttctatgttgtaataaacattcatgtgaccttt

SEQ ID NO: 2444 - DNA, 275 bp, Homo sapiens
  source 1..275: mol_type = unassigned DNA
ctctgttttcaggctgtgttttctcttcttctctctctcctcttcctcctgctgcctcccactctgtgctgctgcagtttcccaaggctacaaggagcagggcatcccacagcagctgtgagcccacgggagccgctggggagatccaggggggccctgtgagggctgcaccaggcagctttgggcacaaggacctttacatgttcttttctgccattttctggactgggggtggaaagggggtatttttaaaaatattatttattttgaaaacg

SEQ ID NO: 2445 - DNA, 4093 bp, Homo sapiens
  source 1..4093: mol_type = unassigned DNA
gagctcggcgcggagcccggagcccgcagccgacagtctcctgctcccgtacgctgggcgccagctccggccgtgctgcccggctgcctgagagcgcgcccggccatggagccctcgcacaaagacgccgagacggcggcggcggcggcggcggtggcggcggcggacccccggggggcgtcctcgtccagcggggtggtggtgcaggtccgcgagaagaagggccccctgcgcgccgccatcccctacatgcccttccccgtggccgtcatctgcctcttcctcaacactttcgtgccgggactggggacattcgtctcggccttcactgtgctgtgcggggcccgcaccgacctcccggacaggcatgtgtgctgcgtcttctggctgaacattgcagcagccctcatccaaatcctcactgccatcgtcatggtgggctggatcatgagcatcttctggggcatggacatggtcatccttgccacttccacaggctacaaggagcagggcatcccacagcagctgtgagcccacgggagccgctggggagatccaggggggccctgtgagggctgcaccaggcagctttgggcacaaggacctttacatgttcttttctgccattttctggactgggggtggaaagggggtatttttaaaaatattatttattttgaaaacgcatctgcttttctcagcaggttgtgagggctgccagcccctcctgctctggaaagcactgtgggcgcaggcaccagagcatcagagagtggggtggagatgagaacgcccacagagaggctgggatgctccggcaggctccaactggccttgctgtacccactgcccaccgcaaaggcacgccacgtctgctgggccgggccacaccgggccctgtctgggtgagcaggggctcaccaaggggacaggactgtggtagacccgtcctgtgggaccccacctgcctcaaaatctggtgccccgagtgtttactgtgtggtctcctgggggcagcaccagggtgtgggtgaggatggccaggctccaccctagcgtggaaaggcccactgtgcccacagctggcctgaggcctcggggagaagaccagtcccacaggcgtctcctgggcctgcctccctgaccgcaccccccgcctcctcgcagctgaaatctgagggctgggtgtgtcgtgacctgtgttttcctgggaaggagaggagtagctccttccctggggtgaaactgccagatgtttatacacaaagttattagactgaagcaggagtgggcagactagcaggctttcacccaatacttaacagcatttctggcccacattcctttttctgaagtcattggggccagatgtgtctccgaattgagaaattttagatttgagaaagacaatgcgatccatttatcgtacactttctaacttcccggcagagtgtggaacatctcgcctaccatcaggcacgtgaatatttctgcagagaaacatgtgactagtcccattaactgggagctatacaaactgtaaatagcctcacctcagttcagtctaattttgccactaagtaacttagggaaaaacttaccatttgagagcttttagggtttcagaattgcaagaacaattgtatggggttgtggaccttgatctgaaaatcctgcttgcaaacagatgtgttagagggtgaaattgtcggcattacacaaggactccttcagttgccaaaagaccatgggcctctttaaggagcccctctgtaagtgattgggacagggctagatccctaatgggggctaggggtggggagaatctagcagaagttgtccaggatactgtggatcaagtatcaatctgaaattaagagaaattagatactaagaggatggacatttacatgtctgtttcctttcctttcattttcattctaacataggaaatgctaacagatggggctggcccaaagtcaagcttctgactccacttgacacagtgccattgggcatgtccctctctgaagggcttgtttgtctatcagagactgtcagaactccatgagggcaggagaagggattttgcaggatgaaagtgcttgggaagtagtggccaccgttctgggggtttcagcccacctaccccatccaccgggctttctaatcacagtcctgcctgagaagcgggccctgctgcccaccccttatcatggatcccttagctactgtccgtcttccattgctgcctggggctgggctgccgtttttgaacacctggcagtgtctttgtcgcgtcctgtcctctcttcttacagaccccaacccaggcctttgccttcttctctcctgtttggaagcctctgtatcttcaaggtgtgggaacagatttggttttctctaaaaagctagaaccttctgctgtgtgcagcaggcatcctccaggctggtgctggctgctctcgaggaagctgcgtcagagtggagctgcccctctactcagataaaatagcttcagctgcaggaagccgccccctcccatgcccaccagcccacagcccttcaccccacacagcccccagagtttgcccgacaccccctgagtgatgacaggtctcaggagggggccgcccccacaaatgggaggcggaagcttattttccccgcttgggctgggggcggctgctgagggggtgaagaagagatagcaatttatgtcgcatgtttagtgacacaatccagatgcaggtgggactttcttgagtggcaggtgtcaccctgggtcccgtgtgggatggtttaatacaggggtttgtgtgtttgtgtgtgtggagggccactgcgcccccagatcctcctctcccccgagggctgcgtctctaaacctgggaaaacatcagcctcaggaggaggcccctttccgggtaactgatgtgtgggagaagccaagaggcccctgcctgtctcctgaatgaggctgtgagggttgccatgtgggcgggaccggttcaaaatagcgcccccgcccctctaaattagaccgtggtctcagcatgatcatcttcagtagataagggacagtggctgatttactccaaatagttccagctggccactcagaccagggccagagttaacttctcaaacaccagccagctgaaaattagggttctcgtgcaggcaagtgcatggttgacacacagccctttggtgacaaagctgggctttgcctgcatagtgcagacaaggctgttggttcagaggctgcagggcacattccaggttggggccttttgtcggtcggaattcaataggacattccctggctgtgggtgtttagggcaggaattacaggcttgcagagaaagtcagaggcaatgagatgctcccagtaccaaactgtgacactgggatcagggtggtcattcccttgggtcagagtgggaccctagagccagagtgagctgtgggtggcctgggtgtgtcctgtggacggcggagactgttgatttggatgttgagctctgagtcagtttcagaaccaaggatctcaggctgagaaggccaggtccccatgggagcggcaggagtctgatggctctgctgccagagcctaccccagcctgccacgccgctgaccttcccatggtaaggaaggggcaggcagcatggttcccaccctcagctgccccagacccacacatccagccccaagagcagcctcacccaggcacagtgcagggcattttagctcctgggaggggagatgcctttgtgagtttcagatgtcagaggagaagctccgagagagtaagtcatgtgcccccaaacactcagctcctaagtggcaggacaggcaagtggccaggttgggccgcccccacagcctgtgccgtccacacactcactacagcactcccagaagaaggagcagaatcgcatgcagcccagagcaggtcctgtggaggggtcctcacccctcaggagtaatagggtgattatgtcacatgtttagtgatacaatcccacctgtgtctggattgtgtcactaaacatgcaacataaattaccatctcttctccatcccctc

SEQ ID NO: 2446 - DNA, 1143 bp, Homo sapiens
  source 1..1143: mol_type = unassigned DNA
agtcttgctgaagtctgcttgaaatgtccctggtgagcttctggccactggggaagttcagggggcaggtctgaagaaggggaagtaggaagggatgtgaaacttggccacagcctggagccactcctgctgggcagcccacagggtccctgggcggagggcaggagcatccagttggagttgacaacaggaggcagaggcatcatggagggtccccggggatggctggtgctctgtgtgctggccatatcgctggcctctatggtgaccgaggacttgtgccgagcaccagacgggaagaaaggggaggcaggaagacctggcagacgggggcggccaggcctcaagggggagcaaggggagccgggggcccctggcatccggacaggcatccaaggccttaaaggagaccagggggaacctgggccctctggaaaccccggcaaggtgggctacccagggcccagcggccccctcggagcccgtggcatcccgggaattaaaggcaccaagggcagcccaggaaacatcaaggaccagccgaggccagccttctccgccattcggcggaaccccccaatggggggcaacgtggtcatcttcgacacggtcatcaccaaccaggaagaaccgtaccagaaccactccggccgattcgtctgcactgtacccggctactactacttcaccttccaggtgctgtcccagtgggaaatctgcctgtccatcgtctcctcctcaaggggccaggtccgacgctccctgggcttctgtgacaccaccaacaaggggctcttccaggtggtgtcagggggcatggtgcttcagctgcagcagggtgaccaggtctgggttgaaaaagaccccaaaaagggtcacatttaccagggctctgaggccgacagcgtcttcagcggcttcctcatcttcccatctgcctgagccagggaaggaccccctcccccacccacctctctggcttccatgctccgcctgtaaaatgggggcgctattgcttcagctgctgaagggagggggctggctctgagagccccaggactggctgccccgtgacacatgctctaagaagctcgtttcttagacctcttcctggaataaacatctgtgtctgtgtctgctgaa

SEQ ID NO: 2447 - DNA, 768 bp, Homo sapiens
  source 1..768: mol_type = unassigned DNA
ccaggaggctgggcagctgaggcagggagggagggaaataactgtgcctgattctaggacagggatgggggtgcagcactgatccaggacccagaatggaggcatcatggagggtccccggggatggctggtgctctgtgtgctggccatatcgctggcctctatggtgaccgaggacttgtgccgagcaccagacgggaagaaaggggaggcaggaagacctggcagacgggggcggccaggcctcaagggggagcaaggggagccgggggcccctggcatccggacaggcatccaaggccttaaaggagaccagggggaacctgggccctctggaaaccccggcaaggtgggctacccagggcccagcggccccctcggagcccgtggcatcccgggaattaaaggcaccaagggcagcccaggaaacatcaaggaccagccgaggccagccttctccgccattcggcggaaccccccaatggggggcaacgtggtcatcttcgacacggtcatcaccaaccaggaagaaccgtaccagaaccactccggccgattcgtctgcactgtacccggctactactacttcaccttccaggtgctgtcccagtgggaaatctgcctgtccatcgtctcctcctcaaggggccaggtccgacgctccctgggcttctgtgacaccaccaacaaggggctcttccaggtggtgtcagggggcatggtgcttcagctgcagcagggtgaccaggtctgggttgaaaaagaccc

SEQ ID NO: 2448 - DNA, 976 bp, Homo sapiens
  source 1..976: mol_type = unassigned DNA
acctgcccaggccctcccgtgtctccacagaggcatcatggagggtccccggggatggctggtgctctgtgtgctggccatatcgctggcctctatggtgaccgaggacttgtgccgagcaccagacgggaagaaaggggaggcaggaagacctggcagacgggggcggccaggcctcaagggggagcaaggggagccgggggcccctggcatccggacaggcatccaaggccttaaaggagaccagggggaacctgggccctctggaaaccccggcaaggtgggctacccagggcccagcggccccctcggagcccgtggcatcccgggaattaaaggcaccaagggcagcccaggaaacatcaaggaccagccgaggccagccttctccgccattcggcggaaccccccaatggggggcaacgtggtcatcttcgacacggtcatcaccaaccaggaagaaccgtaccagaaccactccggccgattcgtctgcactgtacccggctactactacttcaccttccaggtgctgtcccagtgggaaatctgcctgtccatcgtctcctcctcaaggggccaggtccgacgctccctgggcttctgtgacaccaccaacaaggggctcttccaggtggtgtcagggggcatggtgcttcagctgcagcagggtgaccaggtctgggttgaaaaagaccccaaaaagggtcacatttaccagggctctgaggccgacagcgtcttcagcggcttcctcatcttcccatctgcctgagccagggaaggaccccctcccccacccacctctctggcttccatgctccgcctgtaaaatgggggcgctattgcttcagctgctgaagggagggggctggctctgagagccccaggactggctgccccgtgacacatgctctaagaagctcgtttcttagacctcttcctggaataaacatctgtgtctgtgtctgctgaa

SEQ ID NO: 2449 - DNA, 677 bp, Homo sapiens
  source 1..677: mol_type = unassigned DNA
agcaggtacaattatggtcccatcctatagcagagaaaattggggctcccttgactgacaacacatcaactggcaagtggcagaggcgggattggaatcaaaggctctgactgtaagccagcactcaggcagcgggcccgccacatgatgctcactgaggaacacccctgcccagtgtagaagaagatcacgaggaggcgtctgacacagtatgatgatgaagatcccatggggcagcatcccagtactgatgttgctcctgctcctgggcctaatcgatatctcccaggcccagctcagctgcaccgggcccccagccatccctggcatcccgggtatccctgggacacctggccccgatggccaacctgggaccccagggataaaaggagagaaagggcttccagggctggctggagaccatggtgagttcggagagaagggagacccagggattcctgggaatccaggaaaagtcggccccaagggccccatgggccctaaaggtggcccaggggcccctggagccccaggccccaaaggtgaatcgggagactacaaggccacccagaaaatcgccttctctgccacaagaaccatcaacgtccccctgcgccgggaccagaccatccgcttcgaccacgtgatcaccaacatgaacaacaattatgagcccc

SEQ ID NO: 2450 - DNA, 1254 bp, Homo sapiens
  source 1..1254: mol_type = unassigned DNA
gtggatgttcccccaggacagcgtgttctccccacagctgctgagttggcagaaccaaacttgccacccacccgtctcatttacagtaaatccagtgggttgcagaaataggacctgaaactgcctgagggcagcagggtggggggacagtgaggggacgggaaaggggccagcctgctggtccatgggaggggaccgtcaggggaaagcccttcccgcctctggggaagggaacttccgcttcggaccgagggcagtaggctctcggctcctggtcccactgctgctcagcccagtggcctcacaggacaccagcttcccaggaggcgtctgacacagtatgatgatgaagatcccatggggcagcatcccagtactgatgttgctcctgctcctgggcctaatcgatatctcccaggcccagctcagctgcaccgggcccccagccatccctggcatcccgggtatccctgggacacctggccccgatggccaacctgggaccccagggataaaaggagagaaagggcttccagggctggctggagaccatggtgagttcggagagaagggagacccagggattcctgggaatccaggaaaagtcggccccaagggccccatgggccctaaaggtggcccaggggcccctggagccccaggccccaaaggtgaatcgggagactacaaggccacccagaaaatcgccttctctgccacaagaaccatcaacgtccccctgcgccgggaccagaccatccgcttcgaccacgtgatcaccaacatgaacaacaattatgagccccgcagtggcaagttcacctgcaaggtgcccggtctctactacttcacctaccacgccagctctcgagggaacctgtgcgtgaacctcatgcgtggccgggagcgtgcacagaaggtggtcaccttctgtgactatgcctacaacaccttccaggtcaccaccggtggcatggtcctcaagctggagcagggggagaacgtcttcctgcaggccaccgacaagaactcactactgggcatggagggtgccaacagcatcttttccgggttcctgctctttccagatatggaggcctgacctgtgggctgcttcacatccaccccggctccccctgccagcaacgctcactctacccccaacaccaccccttgcccaaccaatgcacacagtagggcttggtgaatgctgctgagtgaatgagtaaataaactcttcaaggccaagggaca

SEQ ID NO: 2451 - DNA, 977 bp, Homo sapiens
  source 1..977: mol_type = unassigned DNA
gcccttcccgcctctggggaagggaacttccgcttcggaccgagggcagtaggctctcggctcctggtcccactgctgctcagcccagtggcctcacaggacaccagcttcccagccctgtcaggttgaaatcagcattgccaagaggctcagagaggttaaggcacttgcctgaggttatgcagccggtagcagatggggctttaaagtcaagtgggcctgactccatgttgcggaaagggactgctggaccgaaggagatggaaaggaggcgtctgacacagtatgatgatgaagatcccatggggcagcatcccagtactgatgttgctcctgctcctgggcctaatcgatatctcccaggcccagctcagctgcaccgggcccccagccatccctggcatcccgggtatccctgggacacctggccccgatggccaacctgggaccccagggataaaaggagagaaagggcttccagggctggctggagaccatggtgagttcggagagaagggagacccagggattcctgggaatccaggaaaagtcggccccaagggccccatgggccctaaaggtggcccaggggcccctggagccccaggccccaaaggtgaatcgggagactacaaggccacccagaaaatcgccttctctgccacaagaaccatcaacgtccccctgcgccgggaccagaccatccgcttcgaccacgtgatcaccaacatgaacaacaattatgagccccgcagtggcaagttcacctgcaaggtgcccggtctctactacttcacctaccacgccagctctcgagggaacctgtgcgtgaacctcatgcgtggccgggagcgtgcacagaaggtggtcaccttctgtgactatgcctacaacaccttccaggtcaccaccggtggcatggtcctcaagctggagcagggggagaacgtcttcctgcaggccaccgacaagaactc

SEQ ID NO: 2452 - DNA, 1044 bp, Homo sapiens
  source 1..1044: mol_type = unassigned DNA
gcccttcccgcctctggggaagggaacttccgcttcggaccgagggcagtaggctctcggctcctggtcccactgctgctcagcccagtggcctcacaggacaccagcttcccaggaggcgtctgacacagtatgatgatgaagatcccatggggcagcatcccagtactgatgttgctcctgctcctgggcctaatcgatatctcccaggcccagctcagctgcaccgggcccccagccatccctggcatcccgggtatccctgggacacctggccccgatggccaacctgggaccccagggataaaaggagagaaagggcttccagggctggctggagaccatggtgagttcggagagaagggagacccagggattcctgggaatccaggaaaagtcggccccaagggccccatgggccctaaaggtggcccaggggcccctggagccccaggccccaaaggtgaatcgggagactacaaggccacccagaaaatcgccttctctgccacaagaaccatcaacgtccccctgcgccgggaccagaccatccgcttcgaccacgtgatcaccaacatgaacaacaattatgagccccgcagtggcaagttcacctgcaaggtgcccggtctctactacttcacctaccacgccagctctcgagggaacctgtgcgtgaacctcatgcgtggccgggagcgtgcacagaaggtggtcaccttctgtgactatgcctacaacaccttccaggtcaccaccggtggcatggtcctcaagctggagcagggggagaacgtcttcctgcaggccaccgacaagaactcactactgggcatggagggtgccaacagcatcttttccgggttcctgctctttccagatatggaggcctgacctgtgggctgcttcacatccaccccggctccccctgccagcaacgctcactctacccccaacaccaccccttgcccaaccaatgcacacagtagggcttggtgaatgctgctgagtgaatgagtaaataaactcttcaaggccaaggga

SEQ ID NO: 2453 - DNA, 1295 bp, Homo sapiens
  source 1..1295: mol_type = unassigned DNA
tagcggccgccgcgggtgtggtgatgctgctggtgctggtggtgctcatccccgtgctggtgagctcgggcggcccggaaggccactatgagatgctgggcacctgccgcatggtgtgcgacccctaccccgcgcggggccccggcgccggcgcgcggaccgacggcggcgacgccctgagcgagcagagcggcgcgcccccgccttccacgctggtgcagggcccccaggggaagccgggccgcaccggcaagcccggccctccggggcctcccggggacccaggtcctcccggccctgtggggccgccgggggagaagggtgagccaggcaagccgggccctccggggctgccgggcgcggggggcagcggcgccatcagcactgccacctacaccacggtgccgcgcgtggccttctacgccggcctcaagaacccccacgagggttacgaggtactcaagtttgacgacgtggtcaccaacctaggcaacaactacgacgcggccagcggcaagtttacgtgcaacattcccggcacctactttttcacctaccatgtcctcatgcgcggcggcgacggcaccagtatgtgggcagacctctgcaagaatggccaggtgcgggccagtgctattgcccaggacgcggaccagaactacgactacgccagcaacagcgtgatcctgcacctggacgccggcgacgaggtcttcatcaagctggatggaggcaaagcacacggcggcaacagcaacaaatacagcacgttctctggcttcatcatctactccgactgagctccccacgtctccctccacccacgtccctcacccgccggggtcccctccgggcggggcagacgatgactcgcccctcgcccacccgctcgctgcccggccctccccggctatgacgcccccggcccgtgctcaacaccgcctgggccacagctaggccctcccaccggctcgctgcagagccgggcccagcgcgccctgtccccgtgccagggaaccggggttgaccgcccccgcccagcccgcgctatatatttgtacaataggactgtttactgcccacctccgcctgccagcccaccccagcctggggagaggtcgcggcggcgggtttgcttcctgcgctctgagatgagctgccctccgctccctccggggtggcgcgcccgggggaggggggagttgggggctggatagcttcccagcaccctcagagcccccgcccggctgtgccccgtctgaccaaagttataataaaaacattttcaccccgca

SEQ ID NO: 2454 - DNA, 2043 bp, Homo sapiens
  source 1..2043: mol_type = unassigned DNA
gacatgagggctccgtctcccgagtgatggcagcgcgcgctgcttcgccgcctccgccgctcagccccggactccttacgtcagggtagcggggtcccccctccgcgcgggagccagcgaacagcgagagagcacagcagagcgcgccgcggagccggggcgccctcactgcgctaggagccccactaaacccagcggagcggagcctggcgggaggcagcgccgcggagccagcgccggacgccgcaagcagactccccggccagcgcaagcactccctggccggcgccggaccctcggggcgccggattcgtcttgtgtgccccacgtcatgcgcgcgggcgtccgcggctctcccgaccagccccagcgcggtgggcccaggctcagaggtcccggcgcctctcgctgaagtagttgggtagccggggctgggggtcgccacgtcgggggcgcggccaggacccgcggagccggtccccgagcgcggggagcggggccgcccgcgccgccccaccattacctccccgggcggcaaggaggagctggtggcggtcgcctcccggctgtggcagcggcggcggcgtgcctgcctggcggccgtcggcgtactcttggccatggcgctcgggctgctcatcgccgtgccgctgctgctgcaggcggcgccccgaggcgccgcgcactatgagatgatgggcacctgccgcatgatctgcgacccttacactgccgcgcccggcggggagcccccgggtgcaaaggcgcagccacccggacccagcaccgccgccctggaagtcatgcaggacctcagcgccaaccctcctcctcctttcatccagggacccaagggcgacccggggcgaccgggcaagccagggccgcgggggccccctggagagccgggcccgcctggacccaggggccctccgggagagaagggcgactcggggcggcccgggctgccagggctgcaactgacggcgggcacggccagcggcgtcggggtggtgggcggcggggccggggtaggtggcgattccgagggtgaagtgaccagtgcgctgagcgccaccttcagcggccccaagatcgccttctatgtgggtctcaagagcccccacgaaggctatgaggtgctgaagttcgatgacgtggtcaccaacctcggcaatcactatgaccccaccacgggcaagttcagctgccaggtacgcggcatctacttcttcacctaccacatcctcatgcgcggcggcgacggcaccagcatgtgggcggacctctgcaagaacgggcaggtccgggccagcgccattgcacaggacgccgaccagaactacgactacgccagtaacagcgtggtgctgcacttggattcaggggacgaagtgtatgtgaagctggatggcgggaaggctcacggaggcaataataacaagtacagcacgttctcgggctttcttctgtacccggattaggggcgcggggggtgcgaggcggggtggctgcaggccgcccggtctccgcccgggcgcggctccttggcaaaggccactctcgattcataacacttcctgacatctcctttggaaaagacaaatccctgcgtcctccctgccccgctcctggcctcagtgcgtctgcgacccaccacgctcagggctgtgctcctggtctccatccccatcccggcaagggaggaagggacgcccgagcccttgaggcggcggcacagactttgcaaacctgattagactggacaggcagggccgggagcctgccctcctcagacagcctcctcccagtgcctagaagcggagggctccgggccctggccagggaggtaggccagagggagcgcgggcttcctggggcgtccttctttgtgacccgaaatacttgtgcagatttccctgtccatcagccaaaaccccacccacagcagaattccagcaaacagaaaattcacctctccacaccgcattccctcctgactcagactcaccgcgatgcattaaattatgtttttagactatg

SEQ ID NO: 2455 - DNA, 1664 bp, Homo sapiens
  source 1..1664: mol_type = unassigned DNA
aggaaggaagctggactgtagagcgctctgggccaccccgcgttagctgctgcctctggcctcagtttccccaactgctcagattaatgatgcctgctctctagacccagaggacgaagctctaaggaggtcacagatgaggaagggtccagtgctcggcgcagactccgtgcggagcccctaggccccgcagctcgcccctccctctcccctactcccctcctctccccctcccgtctctcccccgcctcttcgctctcgctcggctccctctctagctgaccttccctttccctcacgcctccccacgcccggcccctggccccagcaccctgtccgctgccgcctcagagccgggaaaagcagccggagcccccgccgcccctgccgcagcgcgggcggtcagcgcgcagcccggcacccgcagcctgcagcctgcagcccgcagcccgcagcccggagccagatcgcgggctcagaccgaacccgactcgaccgccgcccccagccaggcgccatgctgccgcttctgctgggcctgctgggcccagcggcctgctgggccctgggcccgacccccggcccgggatcctctgagctgcgctcggccttctcggcggcacgcaccacccccctggagggcacgtcggagatggcggtgaccttcgacaaggtgtacgtgaacatcgggggcgacttcgatgtggccaccggccagtttcgctgccgcgtgcccggcgcctacttcttctccttcacggctggcaaggccccgcacaagagcctgtcggtgatgctggtgcgaaaccgcgacgaggtgcaggcgctggccttcgacgagcagcggcggccaggcgcgcggcgcgcagccagccagagcgccatgctgcagctcgactacggcgacacagtgtggctgcggctgcatggcgccccgcagtacgcgctaggcgcgcccggcgccaccttcagcggctacctagtctacgccgacgccgacgctgacgcgcctgcgcgcgggccgcccgcgccccccgagccgcgctcggccttctcggcggcgcgcacgcgcagcttggtgggctcggacgctggccccgggccgcggcaccaaccactcgccttcgacaccgagttcgtcaacattggcggcgacttcgacgcggcggccggcgtgttccgctgccgtctgcccggcgcctacttcttctccttcacgctgggcaagctgccgcgtaagacgctgtcggttaagctgatgaagaaccgcgacgaggtgcaggccatgatttacgacgacggcgcgtcgcggcgccgcgagatgcagagccagagcgtgatgctggccctgcggcgcggcgacgccgtctggctgctcagccacgaccacgacggctacggcgcctacagcaaccacggcaagtacatcaccttctccggcttcctggtgtaccccgacctcgcccccgccgccccgccgggcctcggggcctcggagctactgtgagccccgggccagagaagagcccgggagggccaggggcgtgcatgccaggccgggccggaggctcgaaagtcccgcgcgagcgccacggcctccgggcgcgcctggactctgccaataaagcggaaagcgggcacgcgcagcgcccggcagcccaggc

SEQ ID NO: 2456 - DNA, 530 bp, Homo sapiens
  source 1..530: mol_type = unassigned DNA
atgctgccgcttctgctgggcctgctgggcccagcggcctgctgggccctgggcccgacccccggcccgggatcctctgagctgcgctcggccttctcggcggcacgcaccacccccctggagggcacgtcggagatggcggtgaccttcgacaaggtgtacgtgaacatcgggggcgacttcgatgtggccaccggccagtttcgctgccgcgtgcccggcgcctacttcttctccttcacggctggcaaggccccgcacaagagcctgtcggtgatgctggtgcgaaaccgcgacgaggtgcaggccatgatttacgacgacggcgcgtcgcggcgccgcgagatgcagagccagagcgtgatgctggccctgcggcgcggcgacgccgtctggctgctcagccacgaccacgacggctacggcgcctacagcaaccacggcaagtacatcaccttctccggcttcctggtgtaccccgacctcgcccccgccgccccgccgggcctcggggcctcggagctactgtg

SEQ ID NO: 2457 - DNA, 1038 bp, Homo sapiens
  source 1..1038: mol_type = unassigned DNA
acaaccctgccaaggtccagaaccactgccaggagccctattatcaggccgcggcagcaggggcactcacctgtgcaaccccagggacctggaaagacagacaggatggggaggaggttcttcagtgtatgcctggctgtggatcatatgctgatcccatcacagaccagccctccgttaggttcagtcctcagctctgacacacaggcctgctggagaaaccctccaagcgttggtggatcttgcaccttctgtgtgcctgctgtctaactactgatgatgtggtcactgcctgatggggaactgcatcagctctgtgaattcttgcaatctattgcctgggaaagtgtcttgcacattaaacagaaaaccctcccctccctgctgtgcatgacgcgggctccctctgcacacagtgcacgaagacgctgtcgggagagcccaggattcaacacgggccttgagaaatgtggctcttgtacctcctggtgccggccctgttctgcagggcaggaggctccattcccatccctcagaagttatttggggaggtgacttcccctctgttccccaagccttaccccaacaactttgaaacaaccactgtgatcacagtccccacgggatacagggtgaagctcgtcttccagcagtttgacctggagccttctgaaggctgcttctatgattatgtcaagatctctgctgataagaaaagcctggggaggttctgtgggcaactgggttctccactgggcaaccccccgggaaagaaggaatttatgtcccaagggaacaagatgctgctgaccttccacacagacttctccaacgaggagaatgggaccatcatgttctacaagggcttcctggcctactaccaagctgtggaccttgatgaatgtgcttcccggagcaaatcaggggaggaggatccccagccccagtgccagcacctgtgtcacaactacgttggaggctacttctgttcctgccgtccaggctatgagcttcaggaagacaggcattcctgccagg

SEQ ID NO: 2458 - DNA, 449 bp, Homo sapiens
  source 1..449: mol_type = unassigned DNA
cagatgtccagttccagatgcctggacccagagtgtgggggaaatatctctggagaagccctcactccaaaggctgtccaggcgcaatatctcattcgtcggttcggatccaagccagttctgtggtcagcaaggctcccctctgggcaggccccctggtcagagggagttttcagcccatcagcgaggccagcaggggctctgaggccatcaacgcacctggagacaaccctgccaaggtccagaaccactgccaggagccctattatcaggccgcggcagcaggctgtggatcatatgctgatcccatcacagaccagccctccgttaggttcagtcctcagctctgacacacaggcctgctggagaaaccctccaagcgttggtggatcttgcaccttctgtgtgcctgctgtctaactactgatgatgtggtcactgcctgatgg

SEQ ID NO: 2459 - DNA, 3394 bp, Homo sapiens
  source 1..3394: mol_type = unassigned DNA
atttccaggaacttcctcctcccccaccggccttcaccttttgttccctatcctgggccagttctctcgcaggtcccagatgtccagttccagatgcctggacccagagtgtgggggaaatatctctggagaagccctcactccaaaggctgtccaggcgcaatgtggtggctgcttctctggggagtcctccaggcttgcccaacccggggctccgtcctcttggcccaagagctaccccagcagctgacatcccccgggtacccagagccgtatggcaaaggccaagagagcagcacggacatcaaggctccagagggctttgctgtgaggctcgtcttccaggacttcgacctggagccgtcccaggactgtgcaggggactctgtcacaatctcattcgtcggttcggatccaagccagttctgtggtcagcaaggctcccctctgggcaggccccctggtcagagggagtttgtatcctcagggaggagtttgcggctgaccttccgcacacagccttcctcggagaacaagactgcccacctccacaagggcttcctggccctctaccaaaccgtggctgtgaactatagtcagcccatcagcgaggccagcaggggctctgaggccatcaacgcacctggagacaaccctgccaaggtccagaaccactgccaggagccctattatcaggccgcggcagcaggggcactcacctgtgcaaccccagggacctggaaagacagacaggatggggaggaggttcttcagtgtatgcctgtctgcggacggccagtcacccccattgcccagaatcagacgaccctcggttcttccagagccaagctgggcaacttcccctggcaagccttcaccagtatccacggccgtgggggcggggccctgctgggggacagatggatcctcactgctgcccacaccatctaccccaaggacagtgtttctctcaggaagaaccagagtgtgaatgtgttcttgggccacacagccatagatgagatgctgaaactggggaaccaccctgtccaccgtgtcgttgtgcaccccgactaccgtcagaatgagtcccataactttagcggggacatcgccctcctggagctgcagcacagcatccccctgggccccaacgtcctcccggtctgtctgcccgataatgagaccctctaccgcagcggcttgttgggctacgtcagtgggtttggcatggagatgggctggctaactactgagctgaagtactcgaggctgcctgtagctcccagggaggcctgcaacgcctggctccaaaagagacagagacccgaggtgttttctgacaatatgttctgtgttggggatgagacgcaaaggcacagtgtctgccagggggacagtggcagcgtctatgtggtatgggacaatcatgcccatcactgggtggccacgggcattgtgtcctggggcatagggtgtggcgaagggtatgacttctacaccaaggtgctcagctatgtggactggatcaagggagtgatgaatggcaagaattgaccctgggggcttgaacagggactgaccagcacagtggaggccccaggcaacagagggcctggagtgaggactgaacactggggtaggggttgggggtggggggttgggggaggcagggaaatcctattcacatcactgttgcaccaagccactgcaagagaaacccccacccggcaagcccgccccatcccagacaggaagcagagtcccacagaccgctcctcctcaccctctacctccctgtgctcatgcactaggccccgggaagcctgtacatctcaacaactttcgccttgaatgtccttagaaccgccttcccctacttcatctgttgacacagcttttatactcacctgtggaagagtcagctactcacccgctattagagtatggaggaaggggttttcattgcattgcatttctgaaacattcctaagaccctttagttgaccttcaaatattcaagctattctgcagctccaagatgcaattatagaaacagctccttttttattttatgtcctctatatgccaggtgcttcacctgttatttcacttaatcctcataccatatttgcaaaggatgtgttattatctatgtgtgacaaatgaggaaactgaggctcaggggataaagggacttgcccaagtcccacagctggtgtgtgactgcagagactgtgctcttcccagtgtgctgcaatacttctcaaccctcctctaacctgctgtgtcacccgctttccctcccagcccccacatccttaccattttccctccctgggaattcctgcttctgcgaaaatggtatcctctagctcacactttcctaatggccccatctcctgcagaagccaggtgagcccagcactggactgaagttcttgcagacaccccacctgtgcccctatcatcaggggaactgctccacctgagaggaccaactctttaatttttagtaaaacctggaggtgatgggccgggcgcagtggctcacgcctgtaatcccaacaccttaggagtccgaggtgggtggatcacgaggtcaggagatccagcccatcctggccaacatggtgaaaccccatctctactaaaaatacaaaaattagccgggcgtggtgacacgtgcctgtagtcccagctactcgggaggctgaggcaggagaatcacttgaacctgggaggcggaggttgcagtgagctaagatcacgccactgcactccagcctgcggacagaccaagacttcatcccccccaaaaaaaaaagattggaggtgatttacagtgaaagacacaaataaaatacaactgttcaatggaaatagaaaataaacaccataaaagagagaagagaggtaatttgttagcatcaagagtcaagttgctatatggtcaaaggttaaatttatctctaaaaaatggcaggattcaaagttgtacatacatgtgattacttctgttttttacacccacatacagtacaaaagattattaaaaatattcccaaaaggcaggtgcaatgatgcacacttatacccccagccactcaggaggctgatgcaagaggatcgcttgagcccaggagttgaagtccagcctaagcaacatagtgaaaccccatcgccaaaaatataataataattctctcaaaatactaaacagaggtggttttattgataagattttggctgtttggttttccactattctctattggctaaaatttgtttaatgagcatgaaatgtttttattttattttgcttatttttatgattgcaaaaaatgatatgagtttctccctgccaaggcaaaaaaatatatatatacctata

SEQ ID NO: 2460 - DNA, 504 bp, Homo sapiens
  source 1..504: mol_type = unassigned DNA
gcgtcccctaccacagcacttcagagaagcaggagaatcacttgaacctgggaggcggaggttgcagtgagctaagatcacgccactgcactccagcctgcggacagaccaagacttcatcccccccaaaaaaaaaagattggaggtgatttacagtgaaagacacaaataaaatacaactgttcaatggaaatagaaaataaacaccataaaagagagaagagaggtaatttgttagcatcaagagtcaagttgctatatggtcaaaggttaaatttatctctaaaaaatggcaggattcaaagttgtacatacatgtgattacttctgttttttacacccacatacagtacaaaagattattaaaaatattcccaaaaggcaggtgcaatgatgcacacttatacccccagccactcaggaggctgatgcaagaggatcgcttgagcccaggagttgaagtccagcctaagcaacatagtgaaaccccatcgccaaaaatat

SEQ ID NO: 2461 - DNA, 1569 bp, Homo sapiens
  source 1..1569: mol_type = unassigned DNA
accttttgttccctatcctgggccagttctctcgcaggtcccagatgtccagttccagatgcctggacccagagtgtgggggaaatatctctggagaagccctcactccaaaggctgtccaggcgcaatgtggtggctgcttctctggggagtcctccaggcttgcccaacccggggctccgtcctcttggcccaagagctaccccagcagctgacatcccccgggtacccagagccgtatggcaaaggccaagagagcagcacggacatcaaggctccagagggctttgctgtgaggctcgtcttccaggacttcgacctggagccgtcccaggactgtgcaggggactctgtcacaatctcattcgtcggttcggatccaagccagttctgtggtcagcaaggctcccctctgggcaggccccctggtcagagggagtttgtatcctcagggaggagtttgcggctgaccttccgcacacagccttcctcggagaacaagactgcccacctccacaagggcttcctggccctctaccaaaccgtggctgtgaactatagtcagcccatcagcgaggccagcaggggctctgaggccatcaacgcacctggagacaaccctgccaaggtccagaaccactgccaggagccctattatcaggccgcggcagcagcttcaactccgagcctatttctttgcctctcctcatttacgccacaggggcactcacctgtgcaaccccagggacctggaaagacagacaggatggggaggaggttcttcagtgtatgcctgtctgcggacggccagtcacccccattgcccagaatcagacgaccctcggttcttccagagccaagctgggcaacttcccctggcaagccttcaccagtatccacggccgtgggggcggggccctgctgggggacagatggatcctcactgctgcccacaccatctaccccaaggacagtgtttctctcaggaagaaccagagtgtgaatgtgttcttgggccacacagccatagatgagatgctgaaactggggaaccaccctgtccaccgtgtcgttgtgcaccccgactaccgtcagaatgagtcccataactttagcggggacatcgccctcctggagctgcagcacagcatccccctgggccccaacgtcctcccggtctgtctgcccgataatgagaccctctaccgcagcggcttgttgggctacgtcagtgggtttggcatggagatgggctggctaactactgagctgaagtactcgaggctgcctgtagctcccagggaggcctgcaacgcctggctccaaaagagacagagacccgaggtgttttctgacaatatgttctgtgttggggatgagacgcaaaggcacagtgtctgccagggggacagtggcagcgtctatgtggtatgggacaatcatgcccatcactgggtggccacgggcattgtgtcctggggcatagggtgtggcgaagggtatgacttctacaccaaggtgctcagctatgtggactggatcaagggagtgatgaatggcaagaattga

SEQ ID NO: 2462 - DNA, 582 bp, Homo sapiens
  source 1..582: mol_type = unassigned DNA
ctcattcgtcggttcggatccaagccagttctgtggtcagcaaggctcccctctgggcaggccccctggtcagagggagtttgtatcctcagggaggagtttgcggctgaccttccgcacacagccttcctcggagaacaagactgcccacctccacaagggcttcctggccctctaccaaaccgtggtctgcggacggccagtcacccccattgcccagaatcagacgaccctcggttcttccagagccaagctgggcaacttcccctggcaagccttcaccagtatccacggccgtgggggcggggccctgctgggggacagatggatcctcactgctgcccacaccatctaccccaaggacagtgtttctctcaggaagaaccagagtgtgaatgtgttcttgggccacacagccatagatgagatgctgaaactggggaaccaccctgtccaccgtgtcgttgtgcaccccgactaccgtcagaatgagtcccataactttagcggggacatcgccctcctggagctgcagcacagcatccccctgggccccaacgtcctcccggtctgtctgcccga

SEQ ID NO: 2463 - DNA, 592 bp, Homo sapiens
  source 1..592: mol_type = unassigned DNA
cagatgtccagttccagatgcctggacccagagtgtgggggaaatatctctggagaagccctcactccaaaggctgtccaggcgcaatgtggtggctgcttctctggggagtcctccaggcttgcccaacccggggctccgtcctcttggcccaagagctaccccagcagctgacatcccccgggtacccagagccgtatggcaaaggccaagagagcagcacggacatcaaggctccagagggctttgctgtgaggctcgtcttccaggacttcgacctggagccgtcccaggactgtgcaggggactctgtcacaatctcattcgtcggttcggatccaagccagttctgtggtcagcaaggctcccctctgggcaggccccctggtcagagggagtttgtatcctcagggaggagtttgcggctgaccttccgcacacagccttcctcggagaacaagactgcccacctccacaagggcttcctggccctctaccaaaccgtgggggcactcacctgtgcaaccccagggacctggaaagacagacaggatggggaggaggttcttcagtgtatgcctgtctgcggacg

SEQ ID NO: 2464 - DNA, 561 bp, Homo sapiens
  source 1..561: mol_type = unassigned DNA
tccaggacttcgacctggagccgtcccaggactgtgcaggggactctgtcacaatctcattcgtcggttcggatccaagccagttctgtggtcagcaaggctcccctctgggcaggccccctggtcagagggagtttgtatcctcagggaggagtttgcggctgaccttccgcacacagccttcctcggagaacaagactgcccacctccacaagggcttcctggccctctaccaaaccgtggctgtgaactatagtcagcccatcagcgaggccagcaggggctctgaggccatcaacgcacctggagacaaccctgccaaggtccagaaccactgccaggagccctattatcaggccgcggcagcaggggcactcacctgtgcaaccccagggacctggaaagacagacaggatggggaggaggttcttcagtgtatgcctggaaccaccaaactgtcttcaacagcagcagcaccaagttacatctcaccggcaatacatgagggttcaagcccaccatttttgagatccacgcttttgaatgaaagcattgccttct

SEQ ID NO: 2465 - DNA, 532 bp, Homo sapiens
  source 1..532: mol_type = unassigned DNA
ggacttcgacctggagccgtcccaggactgtgcaggggactctgtcacaatctcattcgtcggttcggatccaagccagttctgtggtcagcaaggctcccctctgggcaggccccctggtcagagggagtttgtatcctcagggaggagtttgcggctgaccttccgcacacagccttcctcggagaacaagactgcccacctccacaagggcttcctggccctctaccaaaccgtggctgtgaactatagtcagcccatcagcgaggccagcaggggctctgaggccatcaacgcacctggagacaaccctgccaaggtccagaaccactgccaggagccctattatcaggccgcggcagcaggggcactcacctgtgcaaccccagggacctggaaagacagacaggatggggaggaggttcttcagtgtatgcctgcagcagcaccaagttacatctcaccggcaatacatgagggttcaagcccaccatttttgagatccacgcttttgaatgaaagcattgccttc

SEQ ID NO: 2466 - DNA, 813 bp, Homo sapiens
  source 1..813: mol_type = unassigned DNA
ctctcgcaggtcccagatgtccagttccagatgcctggacccagagtgtgggggaaatatctctggagaagccctcactccaaaggctgtccaggcgcaatgtggtggctgcttctctggggagtcctccaggcttgcccaacccggggctccgtcctcttggcccaagagctaccccagcagctgacatcccccgggtacccagagccgtatggcaaaggccaagagagcagcacggacatcaaggctccagagggctttgctgtgaggctcgtcttccaggacttcgacctggagccgtcccaggactgtgcaggggactctgtcacaatctcattcgtcggttcggatccaagccagttctgtggtcagcaaggctcccctctgggcaggccccctggtcagagggagtttgtatcctcagggaggagtttgcggctgaccttccgcacacagccttcctcggagaacaagactgcccacctccacaagggcttcctggccctctaccaaaccgtgggtgagtgtccctcctgggggtgcagggagggagcctctgttcccagccatgaccctggtatcttcaagccttaagtggaagcttgagtgacagctgaggctggggactcagggacacctgggctggatcccagccctgcccctgctggcaagcaaccctattaagagacagccgtagctgagcccccagcggttgtttccatgcagatttacaggcccagtgtttgcagatcatctcatttttaaagagatgccaaaaatccagatttttaagtaaaattataaattttcaaa

SEQ ID NO: 2467 - DNA, 539 bp, Homo sapiens
  source 1..539: mol_type = unassigned DNA
acagcttctagccctgcctcgcgaggcctctgagtcctagcgcggctcccccgctcctcccacacccacaggcttccggccatagctgcgcggccccaccttgccctccccccaactcacaggtggtggctgcttctctggggagtcctccaggcttgcccaacccggggctccgtcctcttggcccaagagctaccccagcagctgacatcccccgggtacccagagccgtatggcaaaggccaagagagcagcacggacatcaaggctccagagggctttgctgtgaggctcgtcttccaggacttcgacctggagccgtcccaggactgtgcaggggactctgtcacaatctcattcgtcggttcggatccaagccagttctgtggtcagcaaggctcccctctgggcaggccccctggtcagagggagtttgtatcctcagggaggagtttgcggctgaccttccgcacacagccttcctcggagaacaagactgcccacctccacaagggcttcctggccctctaccaaaccgt

SEQ ID NO: 2468 - DNA, 354 bp, Homo sapiens
  source 1..354: mol_type = unassigned DNA
aaggctgtccaggcgcaatgtggtggctgcttctctggggagtcctccaggcttgcccaacccggggctccgtcctcttggcccaagagctaccccagcagctgacatcccccgggtacccagagccgtatggcaaaggccaagagagcagcacggacatcaaggctccagagggctttgctgtgaggctcgtcttccaggacttcgacctggagccgtcccaggactgtgcaggggactctgtcacagtgagctggggatggggggggtcccgccaggactgtggccagggagattcccggggttgtgggaagtggcggtgccctgaatcccccatctggaggagggatgaat

SEQ ID NO: 2469 - DNA, 1335 bp, Homo sapiens
  source 1..1335: mol_type = unassigned DNA
cctcccatgttaacactattgtttctttctgtttactttcagttggttggcagagaatttgaactggagatgaactttattatccaggatgctgagagtataacatgcatgacagagcttttagagcactgtgatgtaacatgtcaagcagaaatagggagcatgtttacagccattctatgaaaaagtgttcggaatgtacagactagcacagaagctggactaattgaacaagtattgctgaaaatgagtgctgtagatgacatgatagcagagtaccttcaagtttaaatctgagagtgatattcatttggcagaacatcataaacaggttttgtatgatgggaaacttgcaagtagcattacctttacatatactgctaaggccactgatgctcaactctgcctggaatcatcaccaaaagagaatgcatcaatttttgtgcattcccaacatgctctaatgcttcagattcaagtgctttttccactgtttccccaattggataatcggcagctcaatgacagtcaagtggaaacaactgtctgctcctgcttcaggtgcagaaatacagcgatttccagtgccagctgttgagccagtgccagcaccaggggcagattcccctccagggacagcgctggagctagaggaagctccagagccctcctgccgctgccctgggactgcccaggaccagcccagtgaggagctgcctgacttcatggcacctcctgtagagccaccggcctcagccctggagctgaaagtgtggctggagctagaggtggcagagaggggtggccagcacagctccagccagcagctcccacactgctcccagtcctgggcacagtggaagctatggaggcagagaccagggtttgcaatctgggctcctctgcctcactggagagggacttctctcattcagcagagcagcagccctgctgctgaagggcctgctgctactgctgctggggctgtttgcctgcctgcaggaggtgctggagagcaagaaaaggagcctgtgagcaggggttccagcaggtcctcctgctcccagaggcgacctcctcctccaggcatggaggtttgccctcagctgggcatctgggccatttgcccctaacgtgctgcccaggatggcctcctcttgacaggcggacagggggtgagggggccagggggcatctccaaaggaagcttttaaactcagcagctgcaccccagaatctgtatgcctgcacctgcccaaggatttattcatagcttacctaagaatttcaaatttctaccataacactgaataaagtttgactttttgaaacttc

SEQ ID NO: 2470 - DNA, 969 bp, Homo sapiens
  source 1..969: mol_type = unassigned DNA
ttggttggcagagaatttgaactggagatgaactttattatccaggatgctgagagtataacatgcatgacagagcttttagagcactgtgatgtaacatgtcaagcagaaatagggagcatgtttacagccattctatgaaaaagtgttcggaatgtacagactagcacagaagctggactaattgaacaagtattgctgaaaatgagtgctgtagatgacatgatagcagttgtctttacagttttcatgctagcaaaggagttggttactctgctcattttgttggcaactgttttatagtcacatcattgaagtccaaaggaaaatgttttcagcattgtgtgaaatatgattttcaaccacgtaagtggtacatgatcagcattgtccacatttacaatcgatggagaaacagtgaaattcagtgttatgttaatggacaactggtatcttatggtgatatggcttggcatgttaacacaaatgacagctatgacaagtgctttcttggatcatcagaaactgctgatgcaaatagggtattctgtggtcaacttggtgccgtgtatgtgttcagtgaagcactcaacccagcacagatatttgcaattcatcagttaggacctagatataagagtaccttcaagtttaaatctgagagtgatattcatttggcagaacatcataaacaggttttgtatgatgggaaacttgcaagtagcattacctttacatatactgctaaggccactgatgctcaactctgcctggaatcatcaccaaaagagaatgcatcaatttttgtgcattcccaacatgctctaatgcttcaggatgtgaaagggatagtaacacattcaattcatagtgcaattcattcaattggacagattcaagtgctttttccactgtttccccaattggataatcggcagctcaatgacagtcaagtggaaacaactgtct

SEQ ID NO: 2471 - DNA, 656 bp, Homo sapiens
  source 1..656: mol_type = unassigned DNA
gccacttctaccatctgtgaaatgagggatgggagggggaacttgaggaagtggtattagatgatcattaatagtcctgtcagcatattattgtagggttttatgaatattataattgcattttagaccataataaccaaacattacatattgatatatttaatttttttatttaagtggtacatgatcagcattgtccacatttacaatcgatggagaaacagtgaaattcagtgttatgttaatggacaactggtatcttatggtgatatggcttggcatgttaacacaaatgacagtaccttcaagtttaaatctgagagtgatattcatttggcagaacatcataaacaggttttgtatgatgggaaacttgcaagtagcattacctttacatatactgctaaggccactgatgctcaactctgcctggaatcatcaccaaaagagaatgcatcaatttttgtgcattcccaacatgctctaatgcttcagattcaagtgctttttccactgtttccccaattggataatcggcagctcaatgacagtcaagtggaaacaactgtctggtaagttttctttacatgtgcaattgctggtattttatacacacttagactatgcatgatgtactcagtgctgtgtaaatgtat

SEQ ID NO: 2472 - DNA, 266 bp, Homo sapiens
  source 1..266: mol_type = unassigned DNA
tgctttcttggatcatcagaaactgctgatgcaaatagggtattctgtggtcaacttggtgccgtgtatgtgttcagtgaagcactcaacccagcacagatatttgcaattcatcagttaggacctagatataagagtaccttcaagtttaaatctgagagtgatattcatttggcagaacatcataaacaggttttgtatgatgggaaacttgcaagtagcattacctttacatatactgctaaggccactgatgctcaactctg

SEQ ID NO: 2473 - DNA, 996 bp, Homo sapiens
  source 1..996: mol_type = unassigned DNA
cttggtgccaaactgttgcctgctgttcacctggggtatgctgtccacctggggcatattgtccacctggggtctggatgtcagcctggggcttgttgtacacctgtatcttagatatctagataggggtctgttttctgcttaggtgcagcagtccacctggtgcttgagtgtcaacctacggcctgatgtctatgttggacctagggttcacctgaggcctgatatccacctggggcctcaatgtccaaatggagcctgatgcccatctgggccctgggtgtctacctgtggcatggatgtccactggtactttatgtccaccaggggcctaatgtccacctaagacgtggtgttcacctggggtctgatgttcagctgaagactggatgtccacctggagctgaggaatccacccagggactggtgttgaactggggcctgatgaccaccgggggacaaggtatccacaccaggcttgatgtccacctgtcaccagatgtctacctcctgcttcaggtgcagaaatacagcgatttccagtgccagctgttgagccagtgccagcaccaggggcagattcccctccagggacagcgctggagctagaggaagctccagagccctcctgccgctgccctgggactgcccaggaccagcccagtgaggagctgcctgacttcatggcacctcctgtagagccaccggcctcagccctggagctgaaagtgtggctggagctagaggtggcagagaggggtggccagcacagctccagccagcagctcccacactgctcccagtcctgggcacagtggaagctatggaggcagagaccagggtttgcaatctgggctcctctgcctcactggagagggacttctctcattcagcagagcagcagccctgctgctgaagggcctgctgctactgctgctggggctgtttgcctgcctgcaggaggtgctggagagcaagaaaaggagcctgtgagca

SEQ ID NO: 2474 - DNA, 3728 bp, Homo sapiens
  source 1..3728: mol_type = unassigned DNA
cttcctttccttacgcacgctgcgcgcggacgtcggcctctgacgtcgtcgcctcagcgccggctcccggccgggccgcggccgccgaccgttgagccgccggctgagccgcctgctgaagtccctccctcaggaacccctccgccaccctccacctccgaaccgctctcgcggcggcgacccatgtgggggttcaggctcctgcggtcgccgccgttgctgctcctgctgccgcagctcggaatcggaaacgcctcgtcctgctctcaggccagaaccatgaacccgggcggcagcggcggcgcgcgatgctccctctcggccgaggtgcgccgccgtcagtgcctgcagctttccaccgtgcctggagccgatccgcagcgcagcaacgaattgctcctgttggcggcggccggggagggactggagcggcaggacctccccggggacccagcgaaggaggagccgcagccgccgccccagcatcacgtcctctatttccctggggatgtgcagaattaccatgaaattatgactcgtcatcctgagaattatcaatgggaaaactggagtctagaaaatgttgctaccattttagcccaccggttccccaatagttatatttgggtgataaaatgttcccgaatgcatttgcacaaattcagctgctatgacaattttgtgaaaagtaacatgtttggtgccccagaacacaatactgactttggagcttttaagcacctttatatgttattagttaatgcttttaatttaagtcagaatagtttatcaaagaaaagtttgaatgtttggaataaggactccatagcatctaactgtagatccagtccttctcatactacgaatggttgccagggagaaaaagtgaggacctgtgaaaaatctgatgagtctgccatgagtttttatccaccatcactaaatgacgcatcttttactttgattggattcagtaaaggttgtgttgttttgaatcagttgctttttgaattgaaagaagccaagaaagacaagaacatagatgcttttatcaaaagcataagaacaatgtattggctggatggtggtcattctggaggaagcaatacttgggttacttatccagaagtcttgaaagaatttgcacaaacaggaattatcgttcacactcatgtaacaccttaccaagtacgtgatccaatgagatcttggattggaaaggagcacaagaaatttgttcagatacttggggatcttggtatgcaggtgactagccaaattcattttacaaaggaagctccttccatagagaatcacttcagggttcatgaagtattttgagattacaggtatattaatgaacttgttcagtggaagaacataagcacttttgagtgttataaattcagataatgggatgtaattcatagctgcattgtcagttttggggtatggggggaagcacacattcctaaaatgtgagtgtaatgtgcaatagtattttttgcttgtgaatgtgagcagttattaatttggattgagttagaattagttaatttgaaatctaacaaggtggtttgtaataatgctgaggagatataagacccttaaaatgaaagttacaacattgttcttataaaaggtaactaaaattgttactgttggaaataactgattttctgagtaatgttttaaactaatttggtgacattttaacagtaattagctattttgagtggaaatattttcatttctcttcaaacaaaagcaaaggtacgatgctgttttctatcattttggaataactgcaccctgccttttgtgtttttgtaaactccttgactcattctttcatgtgtcaccaagtacttttctcatgagagtcaacatatatttgtttccaaatgtccacaagtgtacaatagtgtaaaggtggtttttaaaaacatagccaggtgtggtggcacgtgcctttagttccagctactcaggaggctaaggcaggaggattgcttgagcccaggctgtgtggttcaccataattgtgtttgtgactagctactgcactccaacctgggcaacatagtgggacttcatctctaaaacaaaacaaaacaaaattacacttaagcactattgtttaatttttaattgtcagtttatcattattttgggtaagacattctggggtttcttgaatcttgtccaaaaaccagttgttttggaaaattgctttaaattgagcatatttatgtatattggataaaaatgtactacagagcaaatttcaaatttttcattatatcagtctttttgaaaggatcaacttggataaaataaatatataatgctctatttgttagagctctattaaaaaggaaacagattccatagatctaagtcaatgtttctccagaagcatgattttgtctgccaaaagaaaatagctctctttggccaaaatgcaaaattacattgctataagaaaagttacaagggaaagtttgaagacacaaatgatttaattttggctcaaaaactgaatttgcttaacactgctacataatttgggtgaagtttccttctgcccgtttttcttgacctagataaatacactttgagaaatccagatctaataaatgtcaaccaacattgacattgtaattgggtgattacaataaaaggtgagcagtttgttgtttattaataattagcttttgcaggtaatgaaatagcagggaagtaacatgctgctttaggactaaaaaaaaaaaaaaaaaaaagacactgaagcttaataccttaatgacccagaagacctagatttataaagccatatagaataaaaatgttaatttcttggtttcttcccagaattatattttaatgactccataaatacattccaaatattcagagattcatgagaaaggattcttaacaaatgtttaaaaataacatttctttttggtgttttaacacttaattttataaactgcagaacagcatctctaaatggctttttttttttttttaaagacaaagtagtattatgttgcttcagtttctttaaatacctcgtttcttttgagaccaaaaattcccatcaaggaaataaatcagcctgattttaacattttacatattacattgcctttaagcactatgattggatggctttttttctatttgtttaataatccttggctaaattcacatgtatctaaaggaaaatagctgagttactgaattctataaggggaagaaaaagcatttattttcacatgattaactgaaatggaaaagtaagacatttagcagaataattcatttaaaaataattttaaaaaatcagacatatttaaaaatctaggttgtctatccagtatgtgaatgcttaattataattgttacatgttgaatgggtattaagagtaagtcaccaggtacacaaaactgccatcatagcaaaatgagacagtgttgaaaagacaaaatattttctggaatgaaaatatattcaagttgatccatattcagatgttttctgtttaatacttcagattggtcctttgtccacatttgtttaaaacttattgtaatgttaatttacacttttggattgtgcctttgtcatgagttgagaaaagtagtcctacaaataatgtgaaagttgttaccaccacagcatgaatgtataattgtattaaaattgatcatccacagaa

SEQ ID NO: 2475 - DNA, 1034 bp, Homo sapiens
  source 1..1034: mol_type = unassigned DNA
gcctcagcgccggctcccggccgggccgcggccgccgaccgttgagccgccggctgagccgcctgctgaagtccctccctcaggaacccctccgccaccctccacctccgaaccgctctcgcggcggcgacccatgtgggggttcaggctcctgcggtcgccgccgttgctgctcctgctgccgcagctcggaatcggaaacgcctcgtcctgctctcaggccagaaccatgaacccgggcggcagcggcggcgcgcgatgctccctctcggccgaggtgcgccgccgtcagtgcctgcagctttccaccgtgcctggagccgatccgcagcgcagcaacgaattgctcctgttggcggcggccggggagggactggagcggcaggacctccccggggacccagcgaaggaggagccgcagccgccgccccagcatcacgtcctctatttccctggggatgtgcaggttctgccccgcgcgagggcctcacctgtgggtagaggtgctgcatgaactgctcccgagaaacgccctccagccggggtaccgggaggtgctgcccggccatggttgctcacgcctgccctcttccaggtcttcggaacttcggctctaaagcgttcctcagcgccatccgcccggaaacacgagcgacagagaaaaggtccgcgaggccggcagactccagagtggctgggtccgagcgcggggcgggttgccgaagggcctcggcctgggctgcgtgctggagagcggggacggggccgactcaccagaggctgcagcaacaggtccactttgctctccagtctctttctccgacaccgctgaggcggtttcccaccgacttcctttccatacagcaccggcaggcaccggtgtgaagggtcataaaaatggcgctggccgctcgtttgctaccccagttcctgcactctcggtcgctgccctgcggggccgtccgactccggactcctgctgtggccgaggtgaggctgccgtcggccacactttgctacttctgccgctgtcg

SEQ ID NO: 2476 - DNA, 3657 bp, Homo sapiens
  source 1..3657: mol_type = unassigned DNA
gggcgccaccgccccgagaggcgggcagcgggtgcgcccgggccgcggcggccgcagagggcgggcggcggccagcatggagcgcgagctggaggcgctggcggcccggcttgcgcgccctgccgagccgcccttccaggcgttggtggaagcggcggggggccgcgggcaggtgctgctggtgggcgagctgtgggagcgcgaacagagccgcgcgctgctgcgggacttcgcacgggcggtgttcccgccggagccaggcgcggccaagccgggcggcgcggcggcagagggcgcggggcccggggcggcgcgcggggcgcagagggcggcgagggcggctggggcggcgggggcggcggcggcggcggcgcgcgccatccgctcgccgctggtcttcgtgctgtgccgcgcgtcgtcgctggccgcccgggagccgcggcgccgcctgcgggagatgctgcgggacgtgcgcggccggcggcgggccggggcggcgctggtcggggtgctggtggccgaggccgggccagaggacgcggtggcgccggggctgcggctgctggaggcgctgttgcgcgccgtgttcggccgccaggcgggggggcccgtgcaggcggccgcctactgccccggcctcccggcctcctgcctggccgtccaggcggccgcctgcagggccctgcaagccgccggagccgggcaaccagtggaaggagcctgggagaggccaggcctccccggactgctagcctgcttttcctggggtccctggagccggaggaagaaccaggatgttgctgcctgcagaagctcagctcaggaagacttccaggaacctgaggaggagctgccactaacagccatatttcccaatggagactgtgatgaccttggaagggggtcaaaagcctgtgatggagtcgtacacactcctgctgagcccaccggagactcaagatgaaggctggacccttgcgctgtccctggctctaacctacagactggggcctggctccgtcttactggcccccaggtctccatggagactgcagaaacccccgcctgctggaggcctgccacactcacagttaccagctagacagtggggcttactaagacaagcaggacctaaaacagtgtctcccctgggaacctactccccacccagcatttgctaagtctgatcacagggaggttattttgtctctctgtctcggtttctctgagccactgagacagatggctgtccgctttgaggctctgcagagctgtggcaccccatggtgtgtctgcagtgttctgggcacatgcatgggcacccatcgttgagagtgcagctgggaagaactctgaaccagaagtcatcagagctgaggcatggccttgaacatgtcactcagtctctggggcttctgtttcacaaatgcatgagggggccaccagcccagtggctttaaaccaggggcaggttgtccctccaggcagcattggaaatgtgtgtgtgttgagggggtcacagtgactgtgggggcacccctggcatctagtgggcatcccacaatgtgcagaacagtctctgacagcaaagaattggtccattcaatgccaattgtagtacctttgagacattctggctgagccaatgccttctccctgtcagagtcccccagagcagagagggtcaggcttccctggaccttggctcccagagcaagccaaaataaagactacactgttgccttgggggcttgtcgggccagggccaagacggtctgcgtgctgcagggccaggacagaaatagccacacatgccggtgagaacaaagagcctctttctttctcatgttgacatcgactttctgtgccaagtcctttgggtataaggatgctagggaattcctataggcaccaaacagaaggaaagctaggggcttggactactgggtataggacttgctctagctctcaggtcctagcccaagctcaatgcaaacacagcccctccgggctctctgtttctgtgaggttctggaatcccttcctctgtgtccgtgagtctgacagaatcgatgatgttcccttagagctgggaaatccatgtgtttattcacggagggaactcaccattacctcccttgtcttctttgcctgccttggagaaatccagagtcttcggaatggcaaaggcagctcctggatttccctggaggggaggcactagctgagggaagtagctcccttcattcatgatgcacagtttacgcagcagacacacaactgcgcctactatttgctcggtgccctgcaaggtgctgcctaactttgatttgttatttcagctctctccaggatagtgccaaatggtgcaatgggaaacctgttttgctggggggctctagatcactggctccagaactcccggctgccagggtagcccctacccccagccccttgctcctggacagcagtgggtctcacctttagcctctgcccccagttctggtctgacccaacagaggggctctatgatattaagaaggggcccttcctgctctgtgcctcaacctattctccataatagggagtctaatcctattccttccctgcctgatgaggatggtgtgaggatgaggaggacggcatctcatttggggctttttggcagtgggcctcattttaatcctgcagggctgcctgccagtggatctatccagctgcttccttgtagccaagaatgagttcaatgaattgtgattcactgattttattgattttgttttaaaacagggagactggtatttttgaagctgctatcattttctatttctttattaatttctttgtaatcatcttattaaagttttcttatttagtgggagagggagctttgtttaagtttggaatttgcctaaggcagaagttataaggcttcataaccttttgtatgtattgccaatatttgaaacttgggagattacgtataaaaaatacctagttttctgggtggaggatggggcatgctgtcatctcaagtctgctgcggctcacccccaccacctttaccccctcccccgcccttcccatcccccactgcacttcactcatgtaagacgtctgcccggtgctggtccaggcgggcatgtgagtttgtagcctctgctccaaaggatggtttacacattattttttcattaccttcagtattcctgtgaatggttcaagagagaaagtcttcatttactaagatttgggttctgcctcccaagtgacaatacggggctgagatccctctcagcttctttgagatgtggccaccataagcatcatcgttgtagggacagtctcattgctgtcttctagcagacagaagagttaggtgccagaaaggacaatcttgatggtgggtcccctccctgaaggactttaagaaggcataaaggggttggggtggagggtggcgtgtgaaggaggaggcccttgattaggtcagtggtccctgggagccatcggcgagaggcctccagccgggtgacagtctgggctctcgggtactaatctttctaatatggcagtggttgtggcacttctgacttgaattgataattctcatatctaataaaaccaagaagtacctcgttgatatcttatagaaaa

SEQ ID NO: 2477 - DNA, 579 bp, Homo sapiens
  source 1..579: mol_type = unassigned DNA
cagcatggagcgcgagctggaggcgctggcggcccggcttgcgcgccctgccgagccgcccttccaggcgttggtggaagcggcggggggccgcgggcagtggaaggagcctgggagaggccaggcctccccggactgctagcctgcttttcctggggtccctggagccggaggaagaaccaggatgttgctgcctgcagaagctcagctcaggaagacttccaggaacctgaggaggagctgccactaacagccatatttcccaatggagactgtgatgaccttggaagggggtcaaaagcctgtgatggagtcgtacacactcctgctgagcccaccggagactcaagatgaaggctggacccttgcgctgtccctggctctaacctacagactggggcctggctccgtcttactggcccccaggtctccatggagactgcagaaacccccgcctgctggaggcctgccacactcacagttaccagctagacagtggggcttactaagacaagcaggacctaaaacagtgtctcccctgggaacctactccccacccagcatttgctaagtctgatc

SEQ ID NO: 2478 - DNA, 3141 bp, Homo sapiens
  source 1..3141: mol_type = unassigned DNA
aagcaatcatttttaaagttcggttttaaaaacccacccacttttgcaaatcagactctgtgtttttaatcagacagttgaaactagggcagttgaccgttggggcacttgatttgctaaacgaaatctctcagtcttgtgaagtgggaaccatgtgaccctctgactcaggttttgtgttcttcctagtggaaggagcctgggagaggccaggcctccccggactgctagcctgcttttcctggggtccctggagccggaggaagaaccaggatgttgctgcctgcagaagctcagctcaggaagacttccaggaacctgaggaggagctgccactaacagccatatttcccaatggagactgtgatgaccttggaagggggtcaaaagcctgtgatggagtcgtacacactcctgctgagcccaccggagactcaagatgaaggctggacccttgcgctgtccctggctctaacctacagactggggcctggctccgtcttactggcccccaggtctccatggagactgcagaaacccccgcctgctggaggcctgccacactcacagttaccagctagacagtggggcttactaagacaagcaggacctaaaacagtgtctcccctgggaacctactccccacccagcatttgctaagtctgatcacagggaggttattttgtctctctgtctcggtttctctgagccactgagacagatggctgtccgctttgaggctctgcagagctgtggcaccccatggtgtgtctgcagtgttctgggcacatgcatgggcacccatcgttgagagtgcagctgggaagaactctgaaccagaagtcatcagagctgaggcatggccttgaacatgtcactcagtctctggggcttctgtttcacaaatgcatgagggggccaccagcccagtggctttaaaccaggggcaggttgtccctccaggcagcattggaaatgtgtgtgtgttgagggggtcacagtgactgtgggggcacccctggcatctagtgggcatcccacaatgtgcagaacagtctctgacagcaaagaattggtccattcaatgccaattgtagtacctttgagacattctggctgagccaatgccttctccctgtcagagtcccccagagcagagagggtcaggcttccctggaccttggctcccagagcaagccaaaataaagactacactgttgccttgggggcttgtcgggccagggccaagacggtctgcgtgctgcagggccaggacagaaatagccacacatgccggtgagaacaaagagcctctttctttctcatgttgacatcgactttctgtgccaagtcctttgggtataaggatgctagggaattcctataggcaccaaacagaaggaaagctaggggcttggactactgggtataggacttgctctagctctcaggtcctagcccaagctcaatgcaaacacagcccctccgggctctctgtttctgtgaggttctggaatcccttcctctgtgtccgtgagtctgacagaatcgatgatgttcccttagagctgggaaatccatgtgtttattcacggagggaactcaccattacctcccttgtcttctttgcctgccttggagaaatccagagtcttcggaatggcaaaggcagctcctggatttccctggaggggaggcactagctgagggaagtagctcccttcattcatgatgcacagtttacgcagcagacacacaactgcgcctactatttgctcggtgccctgcaaggtgctgcctaactttgatttgttatttcagctctctccaggatagtgccaaatggtgcaatgggaaacctgttttgctggggggctctagatcactggctccagaactcccggctgccagggtagcccctacccccagccccttgctcctggacagcagtgggtctcacctttagcctctgcccccagttctggtctgacccaacagaggggctctatgatattaagaaggggcccttcctgctctgtgcctcaacctattctccataatagggagtctaatcctattccttccctgcctgatgaggatggtgtgaggatgaggaggacggcatctcatttggggctttttggcagtgggcctcattttaatcctgcagggctgcctgccagtggatctatccagctgcttccttgtagccaagaatgagttcaatgaattgtgattcactgattttattgattttgttttaaaacagggagactggtatttttgaagctgctatcattttctatttctttattaatttctttgtaatcatcttattaaagttttcttatttagtgggagagggagctttgtttaagtttggaatttgcctaaggcagaagttataaggcttcataaccttttgtatgtattgccaatatttgaaacttgggagattacgtataaaaaatacctagttttctgggtggaggatggggcatgctgtcatctcaagtctgctgcggctcacccccaccacctttaccccctcccccgcccttcccatcccccactgcacttcactcatgtaagacgtctgcccggtgctggtccaggcgggcatgtgagtttgtagcctctgctccaaaggatggtttacacattattttttcattaccttcagtattcctgtgaatggttcaagagagaaagtcttcatttactaagatttgggttctgcctcccaagtgacaatacggggctgagatccctctcagcttctttgagatgtggccaccataagcatcatcgttgtagggacagtctcattgctgtcttctagcagacagaagagttaggtgccagaaaggacaatcttgatggtgggtcccctccctgaaggactttaagaaggcataaaggggttggggtggagggtggcgtgtgaaggaggaggcccttgattaggtcagtggtccctgggagccatcggcgagaggcctccagccgggtgacagtctgggctctcgggtactaatctttctaatatggcagtggttgtggcacttctgacttgaattgataattctcatatctaataaaaccaagaagtacctcgttgatatcttatagaaaacaaaa

SEQ ID NO: 2479 - DNA, 3657 bp, Homo sapiens; identical to SEQ ID NO: 2476
  source 1..3657: mol_type = unassigned DNA

SEQ ID NO: 2480 - DNA, 579 bp, Homo sapiens; identical to SEQ ID NO: 2477
  source 1..579: mol_type = unassigned DNA

SEQ ID NO: 2481 - DNA, 3141 bp, Homo sapiens; identical to SEQ ID NO: 2478
  source 1..3141: mol_type = unassigned DNA

SEQ ID NO: 2482 - DNA, 802 bp, Homo sapiens
  source 1..802: mol_type = unassigned DNA
ggacttttctttttccgttatccagggaaatgcgtgagttactatgacagatgccaaagacttttggctctggtagtggaaattgggaggcaatggtgaaatgaagtaagaaattccagggccagaaggtggatgcaagtcagcaacggcttttcccaggagcttgctctttttggacagcataaaatagaggatgctgctataacatatgtaagtgaaaatgaagaaattaaacacgaagaaaaacctggaaaaagcatacatcattcaaaatcacatgttggaagaggacgtatatattatgctaaattcattaacacaaatgcaagaacatacaatgaaccatttccctacatagatcccaaaaaagggccagaaatacagggtgactggtggtcacatggtaaagcactggaacctgtcttcctaccaccttacgactctaagagcacccagaggagtgacttccaaaaaccatcgtgtccactggttttgccagtcaaacacagcaagatgcaaaagccttcttgtggaatagtaccacttgcctctcctggtacatcagcagaacttcaaaacaattttatagaatacatctcttttatacatcaatatgatgccagaaaaactccgaatgagcctctccagggaaagagacacggagcttttgtacagagagagataaaaccaggcagtaggccaacagttcctaaaggagcagaggtattactgaacactccagggtcacgttcatcagaacagtccaaaaaaacagagaaaggaaactcagcggaaagcagaa

SEQ ID NO: 2483 - DNA, 576 bp, Homo sapiens
  source 1..576: mol_type = unassigned DNA
gcacccttttcctggcagggctgcgtccctgttcttcccaggaggctcctcgctgcctggtgccgtagaggcccatggaggaaaaggaagataagcatcaacagcataaaatagaggatgctgctataacatatggtgactggtggtcacatggtaaagcactggaacctgtcttcctaccaccttacgactctaagagcacccagaggagtgacttccaaaaaccatcgtgtccactggttttgccagtcaaacacagcaagatgcaaaagccttcttgtggaatagatgaaaccttgagaaaaggagccaagactgtaacagtggtcctgtgccacagtgcaggaagaaaaggaacagagagatcacgggcatgtttttttaggtggtttcatgccatcttattttctccttgaaatacattcacaatgaggtgactggctctgtgggaagcctatggccatgttgtaatgacactcaatcagcccagtggagagggccacatggcaaggaactaaggcctcccaccaacagccagcaaagaactgagaccttctgcctacagtcatgagtcct

SEQ ID NO: 2484 - DNA, 1921 bp, Homo sapiens
  source 1..1921: mol_type = unassigned DNA
tcttcccaggaggctcctcgctgcctggtgccgtagaggcccatggaggaaaaggaagataagcatcaacagcataaaatagaggatgctgctataacatatgtaagtgaaaatgaagaaattaaacacgaagaaaaacctggaaaaagcatacatcattcaaaatcacatgttggaagaggacgtatatattatgctaaattcattaacacaaatgcaagaacatacaatgaaccatttccctacatagatcccaaaaaagggccagaaatacagggtgactggtggtcacatggtaaagcactggaacctgtcttcctaccaccttacgactctaagagcacccagaggagtgacttccaaaaaccatcgtgtccactggttttgccagtcaaacacagcaagatgcaaaagccttcttgtggaatagtaccacttgcctctcctggtacatcagcagaacttcaaaacaattttatagaatacatctcttttatacatcaatatgatgccagaaaaactccgaatgagcctctccagggaaagagacacggagcttttgtacagagagagataaaaccaggcagtaggccaacagttcctaaaggagcagaggtattactgaacactccagggtcacgttcatcagaacagtccaaaaaaacagagaaaggaaactcagcggaaagcagaatgatctcaccaggtctctgccaacaaaattctcaggagctgttagagcctaaaactcacttatcagaaacagacgtcagacaggcagccaaggcatgccccagcactcctgagagcagagaaaagacctcaggcgccactcaaacaactgtaggagatgctcttttcactaggcacaagcctttaaatccaccaattaaaaaatcagaataaattaccttcttcagataaaaatctaatccctggaatatagggaaatttcacaatcatcatcttggccctcacatttacttttctgttatcagtaacttcagaacatacaatttatgtaaatggaaaaagagaaaaaagacaattaaaatacaaccaaatgttattaataagagtggtctccaataagtggagtgagacattatttctatgtcacattctttatgaacacaactttgttttgcacaacacatgatcgtaattaacaaatataatacttttagaagagaggccctgttagacatgagtggacagctttggaatcaaacaaactagagttggaatgttggcttcacttcattccttgagctgtgtgaccttgggtaagtaacttaacctctctagacttcagttttctcaactgtaaaattaggaaaatagcaacttcgtaagattattgaggatgtgattatgcacattgatcagtaagtggtcaatgtaatcatatcatcactgctactataattcaattttcaatttaaggataatgttctcttatatatttaatttttcctcattattctaaaacttagaactcctccatatataattaaaagtgtgaaaatctaaaaatacttctgccagtacaagatgcacagacacatacacacttaattcaaagacatatgggtacttagaatattgaagtattttctaaattgttttctattttactcagatcatttctagcaccaactcaacctttgctttttggatgagtttggtaaggattaattctacttccaatttggtgtgtttggtgtgccaaaatgtatctattataagatatgttatattgcatacaagtggaagtaggtggagtattcctctgttataaagagtatttacaaatttccattgggaaatatcagctgctcactattatctgcagtattgataagactacagctatatctttatccatttattctccattaaagaaattgtgataaactgc

SEQ ID NO: 2485 - DNA, 1713 bp, Homo sapiens
  source 1..1713: mol_type = unassigned DNA
tcttcccaggaggctcctcgctgcctggtgccgtagaggcccatggaggaaaaggaagataagcatcaggtgactggtggtcacatggtaaagcactggaacctgtcttcctaccaccttacgactctaagagcacccagaggagtgacttccaaaaaccatcgtgtccactggttttgccagtcaaacacagcaagatgcaaaagccttcttgtggaatagtaccacttgcctctcctggtacatcagcagaacttcaaaacaattttatagaatacatctcttttatacatcaatatgatgccagaaaaactccgaatgagcctctccagggaaagagacacggagcttttgtacagagagagataaaaccaggcagtaggccaacagttcctaaaggagcagaggtattactgaacactccagggtcacgttcatcagaacagtccaaaaaaacagagaaaggaaactcagcggaaagcagaatgatctcaccaggtctctgccaacaaaattctcaggagctgttagagcctaaaactcacttatcagaaacagacgtcagacaggcagccaaggcatgccccagcactcctgagagcagagaaaagacctcaggcgccactcaaacaactgtaggagatgctcttttcactaggcacaagcctttaaatccaccaattaaaaaatcagaataaattaccttcttcagataaaaatctaatccctggaatatagggaaatttcacaatcatcatcttggccctcacatttacttttctgttatcagtaacttcagaacatacaatttatgtaaatggaaaaagagaaaaaagacaattaaaatacaaccaaatgttattaataagagtggtctccaataagtggagtgagacattatttctatgtcacattctttatgaacacaactttgttttgcacaacacatgatcgtaattaacaaatataatacttttagaagagaggccctgttagacatgagtggacagctttggaatcaaacaaactagagttggaatgttggcttcacttcattccttgagctgtgtgaccttgggtaagtaacttaacctctctagacttcagttttctcaactgtaaaattaggaaaatagcaacttcgtaagattattgaggatgtgattatgcacattgatcagtaagtggtcaatgtaatcatatcatcactgctactataattcaattttcaatttaaggataatgttctcttatatatttaatttttcctcattattctaaaacttagaactcctccatatataattaaaagtgtgaaaatctaaaaatacttctgccagtacaagatgcacagacacatacacacttaattcaaagacatatgggtacttagaatattgaagtattttctaaattgttttctattttactcagatcatttctagcaccaactcaacctttgctttttggatgagtttggtaaggattaattctacttccaatttggtgtgtttggtgtgccaaaatgtatctattataagatatgttatattgcatacaagtggaagtaggtggagtattcctctgttataaagagtatttacaaatttccattgggaaatatcagctgctcactattatctgcagtattgataagactacagctatatctttatccatttattctccattaaagaaattgtgataaactgc

SEQ ID NO: 2486 - DNA, 656 bp, Homo sapiens
  source 1..656: mol_type = unassigned DNA
tgcctggtgccgtagaggcccatggaggaaaaggaagataagcatcaacagcataaaatagaggatgctgctataacatatggtgactggtggtcacatggtaaagcactggaacctgtcttcctaccaccttacgactctaagagcacccagaggagtgacttccaaaaaccatcgtgtccactggttttgccagtcaaacacagcaagatgcaaaagccttcttgtggaatagtaccacttgcctctcctggtacatcagcagaacttcaaaacaattttatagaatacatctcttttatacatcaatatgatgccagaaaaactccgaatgagcctctccagggaaagagacacggagcttttgtacagagagagataaaaccaggcagtaggccaacagttcctaaaggagcagaggtattactgaacactccagggtcacgttcatcagaacagtccaaaaaaacagagaaaggaaactcagcggaaagcagaatgatctcaccaggtctctgccaacaaaattctcaggagctgttagagcctaaaactcacttatcagaaacagacgtcagacaggcagccaaggcatgccccagcactcctgagagcagagaaaagacctcaggcgccactcaaacaactgtaggaga

SEQ ID NO: 2487 - DNA, 560 bp, Homo sapiens
  source 1..560: mol_type = unassigned DNA; mol_type = unassigned DNA
ggaagataagcatcaacagcataaaatagaggatgctgctataacatatggtgactggtggtcacatggtaaagcactggaacctgtcttcctaccaccttacgactctaagagcacccagaggagtgacttccaaaaaccatcgtgtccactggttttgccagtcaaacacagcaagatgcaaaagccttcttgtggaatagagacacggagcttttgtacagagagagataaaaccaggcagtaggccaacagttcctaaaggagcagagatgaaaccttgagaaaaggagccaagactgtaacagtggtcctgtgccacagtgcaggaagaaaaggaacagagagatcacgggcatgtttttttaggtggtttcatgccatcttattttctccttgaaatacattcacaatgaggtgactggctctgtgggaagcctatggccatgttgtaatgacactcaatcagcccagtggagagggccacatggcaaggaactaaggcctcccaccaacagccagcaaagaactgagaccttctgcctacagtcatgagtcct

SEQ ID NO: 2488 - DNA, 622 bp, Homo sapiens
  source 1..622: mol_type = unassigned DNA; mol_type = unassigned DNA
ggaagataagcatcaagacacggagcttttgtacagagagagataaaaccaggcagtaggccaacagttcctaaaggagcagagaagagaggccctgttagacatgagtggacagctttggaatcaaacaaactagagttggaatgttggcttcacttcattccttgagctgtgtgaccttggatgaaaccttgagaaaaggagccaagactgtaacagtggtcctgtgccacagtgcaggaagaaaaggaacagagagatcacgggcatgtttttttaggtggtttcatgccatcttattttctccttgaaatacattcacattttgtgttgaagtgaatgaagctctagaaagccaaaggacagaaggagccaggacctctgagtcatttggaggagtgctaccctagaaagccacccctatcatgttaaaccacaaatttgggacttgtttgctatagtagatagtgctaattctatgtaatatactctcgtttttacttctcatagcatttattgttctctaccataaataattattcgcgtaaatatattttttcattttagtctattagttgctttaaaaaaaaaaaaactacattgccatggtttgactgtgtcc

SEQ ID NO: 2489 - DNA, 1376 bp, Homo sapiens
  source 1..1376: mol_type = unassigned DNA; mol_type = unassigned DNA
cgtagaggcccatggaggaaaaggaagataagcatcaggtgactggtggtcacatggtaaagcactggaacctgtcttcctaccaccttacgactctaagagcacccagaggagtgacttccaaaaaccatcgtgtccactggttttgccagtcaaacacagcaagatgcaaaagccttcttgtggaatagagacacggagcttttgtacagagagagataaaaccaggcagtaggccaacagttcctaaaggagcagaggtattactgaacactccagggtcacgttcatcagaacagtccaaaaaaacagagaaaggaaactcagcggaaagcagaatgatctcaccaggtctctgccaacaaaattctcaggagctgttagagcctaaaactcacttatcagaaacagacgtcagacaggcagccaaggcatgccccagcactcctgagagcagagaaaagacctcaggcgccactcaaacaactgtaggagatgctcttttcactaggcacaagcctttaaatccaccaattaaaaaatcagaataaattaccttcttcagataaaaatctaatccctggaatatagggaaatttcacaatcatcatcttggccctcacatttacttttctgttatcagtaacttcagaacatacaatttatgtaaatggaaaaagagaaaaaagacaattaaaatacaaccaaatgttattaataagagtggtctccaataagtggagtgagacattatttctatgtcacattctttatgaacacaactttgttttgcacaacacatgatcgtaattaacaaatataatacttttagaagagaggccctgttagacatgagtggacagctttggaatcaaacaaactagagttggaatgttggcttcacttcattccttgagctgtgtgaccttgggtaagtaacttaacctctctagacttcagttttctcaactgtaaaattaggaaaatagcaacttcgtaagattattgaggatgtgattatgcacattgatcagtaagtggtcaatgtaatcatatcatcactgctactataattcaattttcaatttaaggataatgttctcttatatatttaatttttcctcattattctaaaacttagaactcctccatatataattaaaagtgtgaaaatctaaaaatacttctgccagtacaagatgcacagacacatacacacttaattcaaagacatatgggtacttagaatattgaagtattttctaaattgttttctattttactcagatcatttctagcaccaactcaacctttgctttttggatgagtttggtaaggattaattctacttccaatttggtgtgtttggtgtgcca

SEQ ID NO: 2490 - DNA, 5263 bp, Homo sapiens
  source 1..5263: mol_type = unassigned DNA; mol_type = unassigned DNA
agataaaaagccagctccagcaggcgctgctcactcctccccatcctctccctctgtccctctgtccctctgaccctgcactgtcccagcaccatgggacccacctcaggtcccagcctgctgctcctgctactaacccacctccccctggctctggggagtcccatgtactctatcatcacccccaacatcttgcggctggagagcgaggagaccatggtgctggaggcccacgacgcgcaaggggatgttccagtcactgttactgtccacgacttcccaggcaaaaaactagtgctgtccagtgagaagactgtgctgacccctgccaccaaccacatgggcaacgtcaccttcacgatcccagccaacagggagttcaagtcagaaaaggggcgcaacaagttcgtgaccgtgcaggccaccttcgggacccaagtggtggagaaggtggtgctggtcagcctgcagagcgggtacctcttcatccagacagacaagaccatctacacccctggctccacagttctctatcggatcttcaccgtcaaccacaagctgctacccgtgggccggacggtcatggtcaacattgagaacccggaaggcatcccggtcaagcaggactccttgtcttctcagaaccagcttggcgtcttgcccttgtcttgggacattccggaactcgtcaacatgggccagtggaagatccgagcctactatgaaaactcaccacagcaggtcttctccactgagtttgaggtgaaggagtacgtgctgcccagtttcgaggtcatagtggagcctacagagaaattctactacatctataacgagaagggcctggaggtcaccatcaccgccaggttcctctacgggaagaaagtggagggaactgcctttgtcatcttcgggatccaggatggcgaacagaggatttccctgcctgaatccctcaagcgcattccgattgaggatggctcgggggaggttgtgctgagccggaaggtactgctggacggggtgcagaacccccgagcagaagacctggtggggaagtctttgtacgtgtctgccaccgtcatcttgcactcaggcagtgacatggtgcaggcagagcgcagcgggatccccatcgtgacctctccctaccagatccacttcaccaagacacccaagtacttcaaaccaggaatgccctttgacctcatggtgttcgtgacgaaccctgatggctctccagcctaccgagtccccgtggcagtccagggcgaggacactgtgcagtctctaacccagggagatggcgtggccaaactcagcatcaacacacaccccagccagaagcccttgagcatcacggtgcgcacgaagaagcaggagctctcggaggcagagcaggctaccaggaccatgcaggctctgccctacagcaccgtgggcaactccaacaattacctgcatctctcagtgctacgtacagagctcagacccggggagaccctcaacgtcaacttcctcctgcgaatggaccgcgcccacgaggccaagatccgctactacacctacctgatcatgaacaagggcaggctgttgaaggcgggacgccaggtgcgagagcccggccaggacctggtggtgctgcccctgtccatcaccaccgacttcatcccttccttccgcctggtggcgtactacacgctgatcggtgccagcggccagagggaggtggtggccgactccgtgtgggtggacgtcaaggactcctgcgtgggctcgctggtggtaaaaagcggccagtcagaagaccggcagcctgtacctgggcagcagatgaccctgaagatagagggtgaccacggggcccgggtggtactggtggccgtggacaagggcgtgttcgtgctgaataagaagaacaaactgacgcagagtaagatctgggacgtggtggagaaggcagacatcggctgcaccccgggcagtgggaaggattacgccggtgtcttctccgacgcagggctgaccttcacgagcagcagtggccagcagaccgcccagagggcagaacttcagtgcccgcagccagccgcccgccgacgccgttccgtgcagctcacggagaagcgaatggacaaagtcggcaagtaccccaaggagctgcgcaagtgctgcgaggacggcatgcgggagaaccccatgaggttctcgtgccagcgccggacccgtttcatctccctgggcgaggcgtgcaagaaggtcttcctggactgctgcaactacatcacagagctgcggcggcagcacgcgcgggccagccacctgggcctggccaggagtaacctggatgaggacatcattgcagaagagaacatcgtttcccgaagtgagttcccagagagctggctgtggaacgttgaggacttgaaagagccaccgaaaaatggaatctctacgaagctcatgaatatatttttgaaagactccatcaccacgtgggagattctggctgtgagcatgtcggacaagaaagggatctgtgtggcagaccccttcgaggtcacagtaatgcaggacttcttcatcgacctgcggctaccctactctgttgttcgaaacgagcaggtggaaatccgagccgttctctacaattaccggcagaaccaagagctcaaggtgagggtggaactactccacaatccagccttctgcagcctggccaccaccaagaggcgtcaccagcagaccgtaaccatcccccccaagtcctcgttgtccgttccatatgtcatcgtgccgctaaagaccggcctgcaggaagtggaagtcaaggctgctgtctaccatcatttcatcagtgacggtgtcaggaagtccctgaaggtcgtgccggaaggaatcagaatgaacaaaactgtggctgttcgcaccctggatccagaacgcctgggccgtgaaggagtgcagaaagaggacatcccacctgcagacctcagtgaccaagtcccggacaccgagtctgagaccagaattctcctgcaagggaccccagtggcccagatgacagaggatgccgtcgacgcggaacggctgaagcacctcattgtgaccccctcgggctgcggggaacagaacatgatcggcatgacgcccacggtcatcgctgtgcattacctggatgaaacggagcagtgggagaagttcggcctagagaagcggcagggggccttggagctcatcaagaaggggtacacccagcagctggccttcagacaacccagctctgcctttgcggccttcgtgaaacgggcacccagcacctggctgaccgcctacgtggtcaaggtcttctctctggctgtcaacctcatcgccatcgactcccaagtcctctgcggggctgttaaatggctgatcctggagaagcagaagcccgacggggtcttccaggaggatgcgcccgtgatacaccaagaaatgattggtggattacggaacaacaacgagaaagacatggccctcacggcctttgttctcatctcgctgcaggaggctaaagatatttgcgaggagcaggtcaacagcctgccaggcagcatcactaaagcaggagacttccttgaagccaactacatgaacctacagagatcctacactgtggccattgctggctatgctctggcccagatgggcaggctgaaggggcctcttcttaacaaatttctgaccacagccaaagataagaaccgctgggaggaccctggtaagcagctctacaacgtggaggccacatcctatgccctcttggccctactgcagctaaaagactttgactttgtgcctcccgtcgtgcgttggctcaatgaacagagatactacggtggtggctatggctctacccaggccaccttcatggtgttccaagccttggctcaataccaaaaggacgcccctgaccaccaggaactgaaccttgatgtgtccctccaactgcccagccgcagctccaagatcacccaccgtatccactgggaatctgccagcctcctgcgatcagaagagaccaaggaaaatgagggtttcacagtcacagctgaaggaaaaggccaaggcaccttgtcggtggtgacaatgtaccatgctaaggccaaagatcaactcacctgtaataaattcgacctcaaggtcaccataaaaccagcaccggaaacagaaaagaggcctcaggatgccaagaacactatgatccttgagatctgtaccaggtaccggggagaccaggatgccactatgtctatattggacatatccatgatgactggctttgctccagacacagatgacctgaagcagctggccaatggtgttgacagatacatctccaagtatgagctggacaaagccttctccgataggaacaccctcatcatctacctggacaaggtctcacactctgaggatgactgtctagctttcaaagttcaccaatactttaatgtagagcttatccagcctggagcagtcaaggtctacgcctattacaacctggaggaaagctgtacccggttctaccatccggaaaaggaggatggaaagctgaacaagctctgccgtgatgaactgtgccgctgtgctgaggagaattgcttcatacaaaagtcggatgacaaggtcaccctggaagaacggctggacaaggcctgtgagccaggagtggactatgtgtacaagacccgactggtcaaggttcagctgtccaatgactttgacgagtacatcatggccattgagcagaccatcaagtcaggctcggatgaggtgcaggttggacagcagcgcacgttcatcagccccatcaagtgcagagaagccctgaagctggaggagaagaaacactacctcatgtggggtctctcctccgatttctggggagagaagcccaacctcagctacatcatcgggaaggacacttgggtggagcactggcccgaggaggacgaatgccaagacgaagagaaccagaaacaatgccaggacctcggcgccttcaccgagagcatggttgtctttgggtgccccaactgaccacacccccattcccccactccagataaagcttcagttatatctcacgtgtctggagttctttgccaagagggagaggctgaaatccccagccgcctcacctgcagctcagctccatcctacttgaaacctcacctgttcccaccgcattttctcctggcgttcgcctgctagtgtg

SEQ ID NO: 2491 - DNA, 368 bp, Homo sapiens
  source 1..368: mol_type = unassigned DNA
tcctccccacgactcagcttcttccctctcccctccactccaggctcggatgaggtgcaggttggacagcagcgcacgttcatcagccccatcaagtgcagagaagccctgaagctggaggagaagaaacactacctcatgtggggtctctcctccgatttctggggagagaagcccaacctcagctacatcatcgggaaggacacttgggtggagcactggcccgaggaggacgaatgccaagacgaagagaaccagaaacaatgccaggacctcggcgccttcaccgagagcatggttgtctttgggtgccccaactgaccacacccccattcccccactccagataaagcttcagttatatctca

SEQ ID NO: 2492 - DNA, 1992 bp, Homo sapiens
  source 1..1992: mol_type = unassigned DNA; mol_type = unassigned DNA
attgagatgcaaggtgtatttgttgttttttttttcctttgtatgacacttacggagagtactttagttcaaaaaaatgcttgccttcttctctttgtataatttacaacatggagtaaacatcttttctatgccttagtaccttgtcttgctcctttctaagtttggatcagcttccaatattttatcctttgagctttccatgacacaaaattcctccaagagttcctttaaagtgactttgtattctataatgtcccttcctctgggacatcttcatcctttttgtccccatgaccttccttatttatgctaatacatttgccttccctgagttcctctacactacctatctctcaaatggcagcagggtcaacatcaccatagtctgctattctttgataactccatttatgctgtctttgaagttcacttctggcattatcacttttcatttctttgctgcatttttatctttgttggccagttccctcttttcgtgatacattgttgtaaaatctcatgggagttagccacctggagacagggaggcaacagaactacacactttgctgtctgtgcataaattgaagagcagaagctcagtgaccaatcactgatggactttgaaaggagtgacagtaattggccctcaattatgatgcttatcttttatttatgtcgtgatttctagactgaagagttagcaacaaagtttataccatatgcaactactcgtgatcaatataccaaggtactgaaaaagaaccatgtcactgggctactagtgttatttaactgaatcatgcagagtgagggctgcctgtattcttgccttgttttctagaactgaagcatggagggtcaaataatgcatccaatgttatttagagctggaatttgaatccatgcagttgggtgcagagtctgagctcttaatcaccttgaccattacattaccttgctttttatttcctttggggaaatgtttcctaaaaaatgtaacgcccctctgtgctgctatgtgggaatcagaagtctcagtgcctgatcagacctccttgtccaggaacagacccttggggctgacccctccttgggacccaatgcccttctttctgcactatccaggtaccggggagaccaggatgccactatgtctatattggacatatccatgatgactggctttgctccagacacagatgacctgaagcagctggccaatggtgttgacagatacatctccaagtatgagctggacaaagccttctccgataggaacaccctcatcatctacctggacaaggtctcacactctgaggatgactgtctagctttcaaagttcaccaatactttaatgtagagcttatccagcctggagcagtcaaggtctacgcctattacaacctggaggaaagctgtacccggttctaccatccggaaaaggaggatggaaagctgaacaagctctgccgtgatgaactgtgccgctgtgctgaggagaattgcttcatacaaaagtcggatgacaaggtcaccctggaagaacggctggacaaggcctgtgagccaggagtggactatgtgtacaagacccgactggtcaaggttcagctgtccaatgactttgacgagtacatcatggccattgagcagaccatcaagtcaggctcggatgaggtgcaggttggacagcagcgcacgttcatcagccccatcaagtgcagagaagccctgaagctggaggagaagaaacactacctcatgtggggtctctcctccgatttctggggagagaagcccaacctcagctacatcatcgggaaggacacttgggtggagcactggcccgaggaggacgaatgccaagacgaagagaaccagaaacaatgccaggacctcggcgccttcaccgagagcatggttgtctttgggtgccccaactgaccacacccccattcccccactccagataaagcttcagttat

SEQ ID NO: 2493 - DNA, 585 bp, Homo sapiens
  source 1..585: mol_type = unassigned DNA; mol_type = unassigned DNA
cttcatacaaaagtcggatgacaaggtcaccctggaagaacggctggacaaggcctgtgagccaggagtggactatgtgtacaagacccgactggtcaaggttcagctgtccaatgactttgacgagtacatcatggccattgagcagaccatcaagtcaggctcggatgaggtgcaggttggacagcagcgcacgttcatcagccccatcaagtgcagagaagccctgaagctggaggagaagaaacactacctcatgtggggtctctcctccgatttctggggagagaagcccaagtgagtgctttccctgcgcgtgcgcgcgaccgcccgactgccccgcccatgccacgcccacaccattgtcacgcccctgcgccacgcccacaccacgccccttcctgacctgccattcttccctccagcctcagctacatcatcgggaaggacacttgggtggagcactggcccgaggaggacgaatgccaagacgaagagaaccagaaacaatgccaggacctcggcgccttcaccgagagcatggttgtctttgggtgccccaactgaccacacccccattccccc

SEQ ID NO: 2494 - DNA, 627 bp, Homo sapiens
  source 1..627: mol_type = unassigned DNA; mol_type = unassigned DNA
agccaacctagggcctggggtctgatggttccaggggcctgagagtcccagaggaaagctgtacccggttctaccatccggaaaaggaggatggaaagctgaacaagctctgccgtgatgaactgtgccgctgtgctgagggtgagttccctggagccgggaacagagaattgcttcatacaaaagtcggatgacaaggtcaccctggaagaacggctggacaaggcctgtgagccaggagtggactatgtgtacaagacccgactggtcaaggttcagctgtccaatgactttgacgagtacatcatggccattgagcagaccatcaagtcaggctcggatgaggtgcaggttggacagcagcgcacgttcatcagccccatcaagtgcagagaagccctgaagctggaggagaagaaacactacctcatgtggggtctctcctccgatttctggggagagaagcccaacctcagctacatcatcgggaaggacacttgggtggagcactggcccgaggaggacgaatgccaagacgaagagaaccagaaacaatgccaggacctcggcgccttcaccgagagcatggttgtctttgggtgccccaactgaccacacccccattcc

SEQ ID NO: 2495 - DNA, 303 bp, Homo sapiens
  source 1..303: mol_type = unassigned DNA; mol_type = unassigned DNA
aacaacgagaaagacatggccctcacggcctttgttctcatctcgctgcaggaggctaaagatatttgcgaggagcaggtcaacagcctgccaggcagcatcactaaagcaggagacttccttgaagccaactacatgaacctacagagatcctacactgtggccattgctggctatgctctggcccagatgggcaggctgaaggggcctcttcttaacaaatttctgaccacagccaaagacgaagagaaccagaaacaatgccaggacctcggcgccttcaccgagagcatggttgtcttt

SEQ ID NO: 2496 - DNA, 576 bp, Homo sapiens
  source 1..576: mol_type = unassigned DNA; mol_type = unassigned DNA
atcacccaccgtatccactgggaatctgccagcctcctgcgatcagaagagaccaaggaaaatgagggtttcacagtcacagctgaaggaaaaggccaaggcaccttgtcggtggtgacaatgtaccatgctaaggccaaagatcaactcacctgtaataaattcgacctcaaggtcaccataaaaccagcaccggaaacaggtataccctctcccatctttctctcttctgtgtttctagaaaagaggcctcaggatgccaagaacactatgatccttgagatctgtaccaggtaccggggagaccaggatgccactatgtctatattggacatatccatgatgactggctttgctccagacacagatgacctgaagcagctggccaatggtgttgacagatacatctccaagtatgagctggacaaagccttctccgataggaacaccctcatcatctacctggacaaggtctcacactctgaggatgactgtctagctttcaaagttcaccaatactttaatgtagagcttatccagcctggagcagtcaaggtctacgcctattacaacctg

SEQ ID NO: 2497 - DNA, 280 bp, Homo sapiens
  source 1..280: mol_type = unassigned DNA; mol_type = unassigned DNA
gctaaggccaaagatcaactcacctgtaataaattcgacctcaaggtcaccataaaaccagcaccggaaacagaaaagaggcctcaggatgccaagaacactatgatccttgagatctgtaccaggtaagaagctaggtcaccggggttcatcttggccatccctctatctctagcaagaattcttgcaaataatatccatgatattcagtactttccaagtacactgtgtatctgatactgttctaagtatccaccatgaggtagacaacacagacagt

SEQ ID NO: 2498 - DNA, 563 bp, Homo sapiens
  source 1..563: mol_type = unassigned DNA; mol_type = unassigned DNA
ctagcatgcatctctttctgagctttctctgagccatccccaggctggacagagcagtgagcactggggatggggtatcttctttgcagataagaaccgctgggaggaccctggtaagcagctctacaacgtggaggccacatcctatgccctcttggccctactgcagctaaaagactttgactttgtgcctcccgtcgtgcgttggctcaatgaacagagatactacggtggtggctatggctctacccaggccaccttcatggtgttccaagccttggctcaataccaaaaggacgcccctgaccaccaggaactgaaccttgatgtgtccctccaactgcccagccgcagctccaagatcacccaccgtatccactgggaatctgccagcctcctgcgatcagaagagaccaaggaaaatgagggtttcacagtcacagctgaaggaaaaggccaaggcaccttgtcggtggtgacaatgtaccatgctaaggccaaagatcaactcacctgtaataaattcgacctcaaggtcaccataaaaccagcaccggaaacag

SEQ ID NO: 2499 - DNA, 873 bp, Homo sapiens
  source 1..873: mol_type = unassigned DNA; mol_type = unassigned DNA
gctgaccgcctacgtggtcaaggtcttctctctggctgtcaacctcatcgccatcgactcccaagtcctctgcggggctgttaaatggctgatcctggagaagcagaagcccgacggggtcttccaggaggatgcgcccgtgatacaccaagaaatgattggtggattacggaacaacaacgagaaagacatggccctcacggcctttgttctcatctcgctgcaggaggctaaagatatttgcgaggagcaggtcaacagcctgccaggcagcatcactaaagcaggagacttccttgaagccaactacatgaacctacagagatcctacactgtggccattgctggctatgctctggcccagatgggcaggctgaaggggcctcttcttaacaaatttctgaccacagccaaaggtgagggttggcctggaggggtgaagggagatgcatggctgaagttcagggcgggagatactgagctgggatgcatggcttttagctgagctgggacagatgaccctaagccaagctgagatggatagtcctaaggtatcaagctgggatgcataaccctgagctgagctgggatgcacggctctaagttttcgcaggtcctcattgtaaaccacacgagaaagtttgttgcgtcatttattcaacaaatgcgtattaagcattcatttcaaagggagaagtgagagttgatgaaacaagagaggtaaggcaggagccaagtaattgagagcctcgaatgtcagccaggacacccaaacaccaggaagtctagcatgcatctctttctgagctttctctgagccatccccaggctggacagagcagtgagcactggggatggggtatcttctttgca

SEQ ID NO: 2500 - DNA, 418 bp, Homo sapiens
  source 1..418: mol_type = unassigned DNA; mol_type = unassigned DNA
tcgaaacgagcaggtggaaatccgagccgttctctacaattaccggcagaaccaagagctcaaggtgggtcccggggtggcagaggcttcttggaggctgccagggggtaggtagcctgttgcacacacacttgcccggatcctttctctccctggcaggtgagggtggaactactccacaatccagccttctgcagcctggccaccaccaagaggcgtcaccagcagaccgtaaccatcccccccaagtcctcgttgtccgttccatatgtcatcgtgccgctaaagaccggcctgcaggaagtggaagtcaaggctgctgtctaccatcatttcatcagtgacggtgtcaggaagtccctgaaggtcgtgccggaaggaatcagaatgaacaaaactgtggctgttcgcaccctgg

SEQ ID NO: 2501 - DNA, 621 bp, Homo sapiens
  source 1..621: mol_type = unassigned DNA; mol_type = unassigned DNA
tagtagagatggggtttcaccatgttgtccaggctggtctcaaagtcctgacctcaagcgatccacccacctcagcctcccaaagtgctgggattacaggggtgagccaccgtgcccagccttaatttttgtatttttagtagagatgggtttcaccatgttagctaggctggtctccaactcctggcctcaagtgatccacctgccttggcctccctaagtgctgggatttcaggcatgagccatggcaactggcctgctctgttctaaatgcagatctaaaccccctgcaggtaacctggatgaggacatcattgcagaagagaacatcgtttcccgaagtgagttcccagagagctggctgtggaacgttgaggacttgaaagagccaccgaaaaatggaatctctacgaagctcatgaatatatttttgaaagactccatcaccacgtgggagattctggctgtgagcatgtcggacaagaaagggatctgtgtggcagaccccttcgaggtcacagtaatgcaggacttcttcatcgacctgcggctaccctactctgttgttcgaaacgagcaggtggaaatccgagccgttctctacaattaccggcagaacca

SEQ ID NO: 2502 - DNA, 406 bp, Homo sapiens
  source 1..406: mol_type = unassigned DNA; mol_type = unassigned DNA
cgcctcctccttgtttcttccgcacccctgggactccttcccccatcccggatccctccctgcgttccctgccactcaccctccccagcctgatgccagcctgtccccccagatcatgaacaagggcaggctgttgaaggcgggacgccaggtgcgagagcccggccaggacctggtggtgctgcccctgtccatcaccaccgacttcatcccttccttccgcctggtggcgtactacacgctgatcggtgccagcggccagagggaggtggtggccgactccgtgtgggtggacgtcaaggactcctgcgtgggctcgctggtggtaaaaagcggccagtcagaagaccggcagcctgtacctgggcagcagatgaccctgaagatagagggtgaccacggggcc

SEQ ID NO: 2503 - DNA, 349 bp, Homo sapiens
  source 1..349: mol_type = unassigned DNA; mol_type = unassigned DNA
attgaggatggctcgggggaggttgtgctgagccggaaggtactgctggacggggtgcagaacccccgagcagaagacctggtggggaagtctttgtacgtgtctgccaccgtcatcttgcactcagagcgcagcgggatccccatcgtgacctctccctaccagatccacttcaccaagacacccaagtacttcaaaccaggaatgccctttgacctcatggtgttcgtgacgaaccctgatggctctccagcctaccgagtccccgtggcagtccagggcgaggacactgtgcagtctctaacccagggagatggcgtggccaaactcagcatcaacacacacccca

SEQ ID NO: 2504 - DNA, 469 bp, Homo sapiens
  source 1..469: mol_type = unassigned DNA; mol_type = unassigned DNA
ggggggctggggggtggagtcaggttcctctacgggaagaaagtggagggaactgcctttgtcatcttcgggatccaggatggcgaacagaggatttccctgcctgaatccctcaagcgcattccgattgaggatggctcgggggaggttgtgctgagccggaaggtactgctggacggggtgcagaacccccgagcagaagacctggtggggaagtctttgtacgtgtctgccaccgtcatcttgcactcaggcagtgacatggtgcaggcagagcgcagcgggatccccatcgtgacctctccctaccagatccacttcaccaagacacccaagtacttcaaaccaggaatgccctttgacctcatggtgttcgtgacgaaccctgatggctctccagcctaccgagtccccgtggcagtccagggcgaggacactgtgcagtctctaacccagggagatggcgtgg

SEQ ID NO: 2505 - DNA, 714 bp, Homo sapiens
  source 1..714: mol_type = unassigned DNA; mol_type = unassigned DNA
gtatgtcaggttcttgaggagggggctcagggctcccctatccccggagagggagcaggggggctccgaggcctgagagaccactcatccgccctcctcacagcatgggccagtggaagatccgagcctactatgaaaactcaccacagcaggtcttctccactgagtttgaggtgaaggagtacgtgctgcccagtttcgaggtcatagtggagcctacagagaaattctactacatctataacgagaagggcctggaggtcaccatcaccgccaggttcctctacgggaagaaagtggagggaactgcctttgtcatcttcgggatccaggatggcgaacagaggatttccctgcctgaatccctcaagcgcattccgattgaggatggctcgggggaggttgtgctgagccggaaggtactgctggacggggtgcagaacccccgagcagaagacctggtggggaagtctttgtacgtgtctgccaccgtcatcttgcactcaggcagtgacatggtgcaggcagagcgcagcgggatccccatcgtgacctctccctaccagatccacttcaccaagacacccaagtacttcaaaccaggaatgccctttgacctcatggtgttcgtgacgaaccctgatggctctccagcctaccgagtccccgtggcagtccagggcgaggacactgtgcagtctctaacccagggag

SEQ ID NO: 2506 - DNA, 625 bp, Homo sapiens
  source 1..625: mol_type = unassigned DNA; mol_type = unassigned DNA
actcctccccatcctctccctctgtccctctgtccctctgaccctgcactgtcccagcaccatgggacccacctcaggtcccagcctgctgctcctgctactaacccacctccccctggctctggggagtcccatgtactctatcatcacccccaacatcttgcggctggagagcgaggagaccatggtgctggaggcccacgacgcgcaaggggatgttccagtcactgttactgtccacgacttcccaggcaaaaaactagtgctgtccagtgagaagactgtgctgacccctgccaccaaccacatgggcaacgtcaccttcacgatcccagccaacagggagttcaagtcagaaaaggggcgcaacaagttcgtgaccgtgcaggccaccttcgggacccaagtggtggagaaggtggtgctggtcagcctgcagagcgggtacctcttcatccagacagacaagaccatctacacccctggctccacagttctctatcggatcttcaccgtcaaccacaagctgctacccgtgggccggacggtcatggtcaacattgaggtgccagccagagggggccccaggggaagcaggggcacaggcttaggagaggcaaagaga

SEQ ID NO: 2507 - DNA, 708 bp, Homo sapiens
  source 1..708: mol_type = unassigned DNA; mol_type = unassigned DNA
agggcctgcgctgctgtgggagcgagggtctctctctgtcacccaggctggagtgcagtggtgcaatctcagctcactgcaacctctgcctcccggcttcaagcgattctcctgcctcagcctcctgagtagctgggattacaggcacccaccaccacgcctggctaatttttgtactttcagtaaagacggggtttcaccatgttggccaggctggtctccaactcctggcctcaagtgatctgcctgcctcggcctcccaaagtgctgggattacagacgtgagccactgcgcctggcaaggggatgcagtttcaaaagctgaaccccaattctggagagcaagcaggtactctatcatcacccccaacatcttgcggctggagagcgaggagaccatggtgctggaggcccacgacgcgcaaggggatgttccagtcactgttactgtccacgacttcccaggcaaaaaactagtgctgtccagtgagaagactgtgctgacccctgccaccaaccacatgggcaacgtcaccttcacgatcccagccaacagggagttcaagtcagaaaaggggcgcaacaagttcgtgaccgtgcaggccaccttcgggacccaagtggtggagaaggtggtgctggtcagcctgcagagcgggtacctcttcatccagacagacaagaccatctacacccctggctccacag

SEQ ID NO: 2508 - DNA, 895 bp, Homo sapiens
  source 1..895: mol_type = unassigned DNA; mol_type = unassigned DNA
ctgccctcctgcttccgttgctagggacgcttcggccgaggataccgcaatggatcaggaagaggggctgaaggccttggacaatattgtcactcaattcaacgcctatgaagatttcctggactcgcagatcactactgtggacttgtactacctggaggatgaaaccctggcccgccagttggtggagctaggctaccgagggactggagagagagtgaaaagggaagattttgaagcaaggaaagcggctatagagattgcaagactggctgaaagagctcagcaaaagacgctaacaagtgctggtaaagacctacaagataattttctgacggccctggcaatgagagaagaagacaatcgcagtggaaaactgagttccgtgatctttattcgtgacagaaattctcatgggcaagagatatcaggatacatcgactatgcccacaggctaaagacggaagattttgaagtctactttactggaaaaaaaagacttcttccaaggcctacagatataagcttttacaactgggacgctgatattgctgttagtaattcaagtcccaactatcaagtgattgccgataatccagaaggcttacttttcagatacaaaagagacagaaaaattcttaatgtggacccaaaggcgcagccaggtgacaactctactagaatcactatcctgacagaactctacgtacaagctgtcatttttgaccacatttccagaaggaagacttaagtaccaacatgttaatttcctaataatttgctaaatttaaataaattccgtagacagagcaaattagaataataaatgagccctgtagctggaaggcaaattagaacaataaagttaataaagaagttagaaagaaaactgtaa

SEQ ID NO: 2509 - DNA, 729 bp, Homo sapiens
  source 1..729: mol_type = unassigned DNA; mol_type = unassigned DNA
agggacgcttcggccgaggataccgcaatggatcaggaagaggggctgaaggccttggacaatattgtcactcaattcaacgcctatgaagatttcctggactcgcagatcactactgtggacttgtactacctggaggatgaaaccctggcccgccagttggtggagctaggctaccgagggactggagagagagtgaaaagggaagattttgaagcaaggaaagcggctatagagattgcaagactggctgaaagagctcagcaaaagacgctaacaagtgctggtaaagacctacaagataattttctgacggccctggcaatgagagaagaagacaatcgcagtggaaaactgagtgctggagtgcaatggcaccatctcggctcactgcaacctctgcctcctgggttcaaggaattttcctgcttcagcctcccgagtagctgggattacaggcatgcaccaccacacccggggtatacaaaaatggttaaaactctgtccaagctttcaagaaacaacagtggacaacatcaaattgacaccaaggagatagatggatggtgagtttacttctcactaagaagataagggagacttcacctagaaagtgcggtttaaactgcaacttaaaataagcagttttctggtatacagctagagggaaaggtcatttcagagggaggaaactggactaacaaagggcgataggaggagagcagaaag

SEQ ID NO: 2510 - DNA, 777 bp, Homo sapiens
  source 1..777: mol_type = unassigned DNA; mol_type = unassigned DNA
agggacgcttcggccgaggataccgcaatggatcaggaagaggggctgaaggccttggacaatattgtcactcaattcaacgcctatgaagatttcctggactcgcagatcactactgtggacttgtactacctggaggatgaaaccctggcccgccagttggtggagctaggctaccgagggactggagagagagtgaaaagggaagattttgaagcaaggaaagcggctatagagattgcaagactggctgaaagagctcagcaaaagtgtcagactctcagttaatctttcctagatctggacaaagaaaagcctcaaagaaaacctgtttccatcaatgctgattctctacagatgcaaatctctcccacaaaaggacgctaacaagtgctggtaaagacctacaagataattttctgacggccctggcaatgagagaagaagacaatcgcagtggaaaactgagtggtatacaaaaatggttaaaactctgtccaagctttcaagaaacaacagtggacaacatcaaattgacaccaaggagatagatggatggtgagtttacttctcactaagaagataagggagacttcacctagaaagtgcggtttaaactgcaacttaaaataagcagttttctggtatacagctagagggaaaggtcatttcagagggaggaaactggactaacaaagggcgataggaggagagcagaaagtattacagagggaagaaactatgggtcaggaggagaagggagctacctgaagtcca

SEQ ID NO: 2511 - DNA, 492 bp, Homo sapiens
  source 1..492: mol_type = unassigned DNA; mol_type = unassigned DNA
gggacgcttcggccgaggataccgcaatggatcaggaagaggggctgaaggccttggacaatattgtcactcaattcaacgcctatgaagatttcctggactcgcagatcactactgtggacttgtactacctggaggatgaaaccctggcccgccagttggtggagctaggctaccgagggactggagagagagtgaaaagggaagattttgaagcaaggaaagcggctatagagattgcaagactggctgaaagagctcagcaaaagacgctaacaagtgctggtaaagacctacaagataattttctgacggccctggcaatgagagaagaagacaatcgcagtggaaaactgagtatactggaacccatcttgaatcatgctatggaccgaaagtctgtgacctccccacctaaattcatacgttgaaatcttcactccctaagtgatagtattaggaggtgagggcctttgaaggacaattacatca

SEQ ID NO: 2512 - DNA, 3349 bp, Homo sapiens
  source 1..3349: mol_type = unassigned DNA; mol_type = unassigned DNA
aatggatcaggaagaggggctgaaggccttggacaatattgtcactcaattcaacgcctatgaagatttcctggactcgcagatcactactgtggacttgtactacctggaggatgaaaccctggcccgccagttggtggagctaggctaccgagggactggagagagagtgaaaagggaagattttgaagcaaggaaagcggctatagagattgcaagactggctgaaagagctcagcaaaagacgctaacaagtgctggtaaagacctacaagataattttctgacggccctggcaatgagagaagaagacaatcgcagtggaaaactgagtgctggagtgcaatggcaccatctcggctcactgcaacctctgcctcctgggttcaaggaattttcctgcttcagcctcccgagtagctgggattacaggcatgcaccaccacacccggtccgtgatctttattcgtgacagaaattctcatgggcaagagatatcaggatacatcgactatgcccacaggctaaagacggaagattttgaagtctactttactggaaaaaaaagacttcttccaaggcctacagatataagcctgagaaaaaggattcttcagagacaagataagtaaattcccagtgacattcctttttaatgataagtagtgcctaaattttgttaacctcatgaggcttttgcagcacttgggacttggtctgtccagaagcctcaagaactgctcatctaacatgttttcctccacttttctttggtcaccagccaaagtgctggcccctgatcagctcaccctcatttctctcatctctgtcctattctgggacacccattccttaacacccatcattctttttactaccaatgcttgccttttattctagaacccttatctatcacctagcatctaccctacactgccaatctattcacagatgggttcttctactcccttctaaatagcatgcaagctaaaactttttattccctcttacttaactatagaaccccaaaattaagtagcagcattatgctttaactctccactgctgtattcagatcattatttgatgattataacaatacctacctcctctgagatgcctgttatcctctatccacccttactgatattatctgaagacttccttatccatcacctttttttgatttgtttgtttttgagatggagtctcgctctgtcgcccaggctggagtgcaatggtgcaatcttggatcactgctacttccacctcacgggttcaagcaattctcttgtctcagcctcccatgcagctgggactacaggcacataccaccacgtctggatactttttgtatttttagtagagacagggttccaccatattggtcaagctggtctcaaactcctgacctcaggtgatccaccggcctcagcctcccaaagtgctgggattacaggcgtcagccaccgagcctgactcccatctccactgtaatggacttagctctttcctgtcctacctaggataacatttcatttaacttctctcttgcagtaatgcccattgcccatgtctttttgatttttggttgtatctgacctactaacattccaaagtcaatcgatccacacatttttttcactgcacttgtagctaccccactgggtactgctgaaggaaattttaggaaatttcacaaaactgtggattgctgtgctaataacttatggtttccaaactcaattgagtcctttatgattcttaaaacttatgttcaaaattaaattcattttaattcctgaagcctgctattgcttctgtgtcacctgtcttggcaaatggcatcacccttgaaaccaaaggcaaaatccagatgttatcctagacctcttgtttttcatcaccacctttataactaataatttattaaaaacactgaattctattatcttagcagctttgttttgttaaagcaaatttaagatatctcatttcacctgcaaacacttcagcatggatctttatctgataccatttttaaagaaaacatcttggcattatcatacctaacaaaatactttccttaatgtcatctaatacctagttcacatttcattttcacccttaataacatttaattgactgtctaatttattttttatagtttgtttgaccagtcaaaattcaagtgattttgtgttttgtcttactatatcttgacctcttgcatgcttttttttttttttacaacagtccccctcattctttttatcttctacgctattgatttgttggagaaaccaggtcctgataaacattgtcctcaaatgtctcacattctggattttactgatccagtaaaatcgtgctgtttattctactatctatgttcctctattccctataaactgatttgattaaatgcagtataatttttttctaagtaagaaattttaatatgtgatgctctgtactgactatcgccccagttttagatctcctgagctcgatcagtaggttcaagtggtgtcagtctaattacttcattacaagattttccataaaatttcacccaatggtgttagcatctattattgaaagctacctaaatgtttttactaagggttgaataatggtgaatctataattatattatttatcctgaattttttaacttgaattcttctatagagaaaaacttttccttatcacttatttggttaccttgaaataaattcctgcagaaatacaaaataaatatttttttcatttatagaaaatttgaagccagaaacacaaaagagtgtagagattataccaaattatttttcagagtagttgtatcattttgtatccatgagaaatactgcataagtgatctggttatccctcatcctcaccaacacaagatattaacaaactgttctttcccactgtagtgagttataaatgatctctcaatgtggttttcatttttatttacttgattatttattagattgggtatcttttattggctgttcagattttctttctgtgaagtacctattaagatttttccctgttatttcaagtgagctattctttttcttgcaaattataagattcgttttatttatttttggatattgattaatcctttgcctcttatgtgtatttcaaaatatcatctctctgtgtgtagttcttcttcttttttttttttcattgattttgatggtcagaaatcagaagttctgatagtcatcttaatgcattttaaactttacctctgcagtttgtgcttttgtattttgtttaataaaccccatcctttttggaagtcataaatatactgtcttatagg

SEQ ID NO: 2513 - DNA, 753 bp, Homo sapiens
  source 1..753: mol_type = unassigned DNA; mol_type = unassigned DNA
atggatcaggaagaggggctgaaggccttggacaatattgtcactcaattcaacgcctatgaagatttcctggactcgcagatcactactgtggacttgtactacctggaggatgaaaccctggcccgccagttggtggagctaggctaccgagggactggagagagagtgaaaagggaagattttgaagcaaggaaagcggctatagagattgcaagactggctgaaagagctcagcaaaagacgctaacaagtgctggtaaagacctacaagataattttctgacggccctggcaatgagagaagaagacaatcgcagtggaaaactgagtctaaatcaacaggagactgatgctgctcatatcttgaagaagcaactggcatccgtgatctttattcgtgacagaaattctcatgggcaagagatatcaggatacatcgactatgcccacaggctaaagacggaagattttgaagtctactttactggaaaaaaaagacttcttccaaggcctacagatataagcttttacaactgggacgctgatattgctgttagtaattcaagtcccaactatcaagtgattgccgataatccagaaggcttacttttcagatacaaaagagacagaaaaattcttaatgtggacccaaaggcgcagccaggtgacaactctactagaatcactatcctgacagaactctacgtacaagctgtcatttttgaccacatttccagaaggaagacttaa

SEQ ID NO: 2514 - DNA, 429 bp, Homo sapiens
  source 1..429: mol_type = unassigned DNA; mol_type = unassigned DNA
gaggggctgaaggccttggacaatattgtcactcaattcaacgcctatgaagatttcctggactcgcagatcactactgtggacttgtactacctggaggatgaaaccctggcccgccagttggtggagctaggctaccgagggactggagagagagtgaaaagggaagattttgaagcaaggaaagcggctatagagattgcaagactggctgaaagagctcagcaaaagacgctaacaagtgctggtaaagacctacaagataattttctgacggccctggcaatgagagaagaagacaatcgcagtggaaaactgagtgtaagtacatttcatccaacagcttaaaatgtatacactaaatgcacaattaatattaaaaaatgtaacattaaatatctttcttaaagtaatttacaagatataaaa

SEQ ID NO: 2515 - DNA, 268 bp, Homo sapiens
  source 1..268: mol_type = unassigned DNA; mol_type = unassigned DNA
cgactatgcccacaggctaaagacggaagattttgaagtctactttactggaaaaaaaagacttcttccaaggcctacagatataaggcgcagccaggtgacaactctactagaatcactatcctgacagaactctacgtacaagctgtcatttttgaccacatttccagaaggaagacttaagtaccaacatgttaatttcctaataatttgctaaatttaaataaattccgtagacagagcaaattagaataataaatgagccctg

SEQ ID NO: 2516 - DNA, 228 bp, Homo sapiens
  source 1..228: mol_type = unassigned DNA; mol_type = unassigned DNA
agcttttacaactgggacgctgatattgctgttagtaattcaagtcccaactatcaagtgattgccgataatccagaaggcttacttttcagatacaaaagagacagaaaaattcttaatgtggacccaaaggcgcagccaggtgacaactctactagaatcactatcctgacagaactctacgtacaagctgtcatttttgaccacatttccagaaggaagacttaa

SEQ ID NO: 2517 - DNA, 6170 bp, Homo sapiens
  source 1..6170: mol_type = unassigned DNA; mol_type = unassigned DNA
gaagattgctggggactccacgttcaaccgaatcccacgctggtgggaagaggacgcggtcgatacaggcgtcccgcgggtcactctgggtctcgtcgggccacctaggagagtgccgcgggagcttgacggcagcctgagagcggcgttctacgcggagcggcgggggttggagaggacaacgccaagacggctgggaagccccaggccagcagcggaagtccactcggcccgccctgcgactttgaaaccggtgccccggaccactccttggagacggtggcgcctcttgcgtcatcacgcgggcgttggagcttacgccatcgcgcgtcctagagtcctagcacgctattggctggctgtcaagcaatgggaggagtcgtgagaacctggatgacagcgggctgagccaccggcttggcgcggcggccaaactggtgggacagtgtctccaggtagtgaggcccaacctctttaaaacaaacaaacaaacaaacaaaaaaccaaaatgcaaacgtgagtagagaatgaaatacacagtttaaatgccctcactatctttgggttactaatatactaagcctttctggactaagtaaaagatgcaggttcctgcggctagggatagaagccagactggcgtcttcagaatctcccaccaaggctgtacctctggaggagttctaggtttggatttggtcatctcaagaagagacttcagatggattttaaaattgaacacacttgggatggttttccagtgaagcatgagcccgtatttatcaggctgaatccaggtgacagaggagtgatgatggacattagtgctccatttttcagggatcctccagccccacttggagaaccaggaaaacctttcaatgaactgtgggattatgaagttgtggaagcatttttcttgaatgatataactgagcaatatttagaagttgaactttgtccccacggacagcatttagtgcttttactttctggaagaagaaatgtgtggaaacaagaacttcctttatcgttcagaatgtccagaggagagacaaaatgggaaggcaaagcttatctcccttggagttattttccaccaaatgtgacaaaattcaattcatttgcaattcatggatcaaaagataaacgaagttatgaagctctttaccctgtacctcagcatgaactgcagcaaggacaaaaacctgatttccattgcctagaatacttcaagtctttcaattttaacacactgcttggagaagagtggaaacaaccggaatcagacctgtggctaatagagaaatgtgatatataggagtaatagataaccataccgatcattttttcctctataccttttaagataaacaaaaaataaatatcaattttttaagatgtcatgcatacatttcaacaacaaatatcttcatagaagtcactgaaaatatagtatctgtggcaaattgtatatgattaacaagaaaatatatgattctttgtagatgatttcatctgtaaagtcacaatgtttctcagagtcacttagtccaggatgttgcattcccagcacacagtacagttattcttgaaaactacaagtgaaaaagggggaacaattgaggttgtccaaggccacctagaggactgtcttgcactaccttgtgattcaaccatttcattcctagatatataccccagaaaaatgactgctcatagcagctttattcataatagcacaaaattgtaaacagtgaaatttccatccataggaaaatggatagacaaactacaatatagtcagtggaatactgttcatttaaaaaaggactgctgatacatgcaacaacctgtatgaatctcaaaaacattaagttgagcaaaacaaaccaaacataacatactatctaattacttttatattaaagccacttccaggcaaaactaatatttgatgatagataccagaacagtggctgcttagagtgagggcagggaattcaaattgaatggaaaaggggcctgaggaaattttccggggtgattgaaatgttttgtattttgatctggatgatggttatgtagctgcatatatttgtcaacattcctcatgctgtatgtttagatttgtgattttactatatgtaaattaattccttaataaaatactattataaaataagctgtaaattaaatggaattaacttcaagtttacattgagtttatatgtttccattgaacaatcactagtgatggttaaatgtggcttatcgacttactcatttcttatatatgttctctatctaaaaagagagctggtgtaagataaatgctaacttttacaaaaggtattattaagtatcctgactacacatcatggtggcagtgttaggcatcttagataaattgagaaattattcttaaaactgacaatagcaactaattaatttgatatagaaacgatctgcctgttttagatacgaatggcatattttaaataacctaggacgatttatttataaattacctgaataattttataaatgcatataaaactatcaaaataaaaacaagatatattttagagcatcttgattttagaagcgaatcgaacactgtgaatcacagtttcagatataaatcataactatttataatatggataaaaatgaagcacaaatatgatagatacaatcacaacaatataaaatactgaatttgaatgttgtagcttgtgagctttctcaaatctaatgtgtatctttttaaaatttgtttagatgttttttaaacatctcttaactttctttcatctagataaggcatttccttttcttccaataccaagcaagcaaaaatacattatataaacattttcttttgaaaggaacatgcatatcaactacagaatttcggaaagcttgtccattagtcaggtacaaatgatatattctagaaacttgtatccaagaaacttttatttgagagtgggtgtttgtaatagccatttcaaatttgtttttcaacttcaggaccatgaaagaataatcatccttttgtttaaaatatgcataaatgcatttctttgctgtgatttgaattgttcactgcagtgtcaagcagattctctcttctcaccacctaaatagattacacaatgtgcatatttattcaggtgcattctcatgctttttcccagctccaggaaagtgtaagtcacagtctgaagggaaatgtgctttttatttttggctccaaactactttttttaaacgttaaaaaggttttttgccacaggaaaaaaaacatttaatttcccctccttctcctccttttgctccttttttaaatgttaggcttttggaggacagaagataatgagcataattaatctgatattgaaaaagaaagggtagcaagtggataaagcaattacagtaagccctcagcccttttctcatgcctcaaagcttaaggattgtctcttcttttccatgtaaatttccataatattttacacattgctttattacagcatttatttcactggtcctagatagctcttctgacccacctcctatcctctcagcctaactttttactccagccatcagttgcatacagtgaactgactggccagttgcctcagctgtactgtgtatgtcttacttcctgcccctagggcttctctgcttcctctgctgtgtggaacacttgcaggaacccatttagccattctctcacatgaactacccgggatgtgtgaagggactaaaacaccccatggggcacctcttgaccaaagagggtgggagttgatggataactacttctctgttacatccctcagtttaacaatttatggtcccttccacacagctcctcagaagttctcttaaaaggattccaccctgattacccacagcagtggccaactagtaacacatttttgcattatctttccttcatttccatcattttctgttttgctcttcctggtacctctctcctctctggaattgcttaactacagtcaacctctttggaagttattgtcctatgtttgcttcatggggaacccaggctaagtcagtgattacctaaagcagccctagaaagccgttcgtcaggatgagaatctagaattgtatcacagggcatttggtgacaaggaccccattgttggtggtaatggctctgctataagtaacttcacagttattaaaacagtggtagactggcttgaggtgcagctgaggcacctgaagctatgaaagccatctagtcataatgactcttcgtgtcaactgttcagcaggcaaatagaagcgggctaccatgcagagctagagttataactattaatggaagcagtatagagtatgtccttcctaggggattcattgagtcatcctttggtgtttcaatgtcaagtggtaatcttaaatgggcaactgtagcaaccacagcctgacaaggtaaagcaactaaggactctgaccctttgaggataaaggtctaggtcacctcaccattcaaaccacttgaaactactgaagagtttggccaaatgtgagagaaatacagaatttgtgatggaagagagagatgataactatcaattatagacttgaaatcagttacaggagccacataacttgttccactaaatcttttgcatttagtatttgtataatggctgcccacttccttgaagactctgtgacagattggactcaatgtggaatgtgtgtggctctgagtgctgcaaggagtggactgtatttaatatctcttgtgtcctacctcacatcctcttaggccatttttcaattcacccattttactctttgatagcactttacctcttttgtcccatgtatctctagatttctgtattagtgcttttctgacacctcagttatgtggaacacctgtgggaatctgctaatctactctgacgtatatgcaaacctggaagtttgagggaattgacaatagggacaggattcagtggataaatactccccttttccgtcccttgggcagacaattctgaagtgcattctgtatagttccttagtggtctccagtaggactccactagggtcttcagttacctacagtactgatcagcttaaaaatgcaatcttagattggcttgctttatttaatttttccaaagttcccaatcccattccttagaatcacattccaaaattaatgcactgcacacaaccctctgcttttgtcaggggtagaaggggtatccagcctaaggcacctaagtccaagaggaatatgtgcctaacaaatcttctaactaaatatatatatatatatatatatatatataaaatatatatgtttatatataacatatatatatagagagagagcataaaatgtgctgtgtatgtgtgtagcatattttttgttaaatcaccattcctgggccctactcattttctgataatttcttatcttaatttgctctgaaagagcaaaacttataaaattgactattgtaactctattttttaccaactatcatttttcatggaaggaatagtaaaaagagttacctctgaagctaagatgacacatgtatgaggaatataggaagccagaaatcatgaatctatgaaaagtgaggggtgtctgtgcatattttattttatttcataataaataaccagtaattaaaatattcttttccatgtaatgggatctacgagtaaatttttgtctgatatttataaatctaatatgtaatataaaggagaaataggaaatgctgtcaaatgacatttcactttactacttatttgaattacaatgaaataatatatagctacatcactggctcctgagagagctttgggtgttctgtaaattttttactttgcactcttgaaaaattcgcagagaatgcaaggtttagtaaaaatttattttcttttggcagcctatcacctgtaatttccgttaaacagcatttctgactcaatagtacactgaaagcccatgtttgtaataatgccctaaagcactgcagtacctagagtatatattttgaagagatagctttgctgaaatagaaaaccaaactgtaaattgaagtctgagcattcagagaaataaaaattatgctaaaaacaaacgt

SEQ ID NO: 2518 - DNA, 1126 bp, Homo sapiens
  source 1..1126: mol_type = unassigned DNA; mol_type = unassigned DNA
gagaacctggatgacagcgggctgagccaccggcttggcgcggcggccaaactggtgggacagtgtctccaggtagtgaggcccaacctctttaaaacaaacaaacaaacaaacaaaaaaccaaaatgcaaacgtgagtagagaatgaaatacacagtttaaatgccctcactatctttgggttactaatatactaagcctttctggactaagtaaaagatgcaggttcctgcggctagggatagaagccagactggcgtcttcagaatctcccaccaaggctgtacctctggaggagttctaggtttggatttggtcatctcaagaagagacttcagatggattttaaaattgaacacacttgggatggttttccagtgaagcatgagcccgtatttatcaggctgaatccaggtgacagaggagtgatgatggacattagtgctccatttttcagggatcctccagccccacttggagaaccaggaaaacctttcaatgaactgtgggattatgaagttgtggaagcatttttcttgaatgatataactgagcaatatttagaagttgaactttgtccccacggacagcatttagtgcttttactttctggaagaagaaatgtgtggaaacaagaacttcctttatcgttcagaatgtccagaggagagacaaaatgggaaggcaaagcttatctcccttggagttattttccaccaaatgtgacaaaattcaattcatttgcaattcatggatcaaaagataaacgaagttatgaagctctttaccctgtacctcagcatgaactgcagcaaggacaaaaacctgatttgtaagtagaaaataaatgaagatatgttccaaatacacgagttttttcgaaattaattcttagtggagcagaagtaacacttttgatcaaagaagacgacatatgtgcacaagtatctagtagagtccaatgttcactgatggtcctcagaaaatacttggaaaactttggactgtcataatctctctcactactgtcagtagagcacttatttttccatagtggtatgagaaaagtgttgtttgcatgtgagaaaagtaaatgttgtaatagctgatatagaagtatggtcac

SEQ ID NO: 2519 - DNA, 519 bp, Homo sapiens
  source 1..519: mol_type = unassigned DNA; mol_type = unassigned DNA
gcagctgggtggagcctaaagccgagccctctcctgtgacctcggctgaaaagaagaagccagtgtttgagaaaagcttcgtgagacttcagatggattttaaaattgaacacacttgggatggttttccagtgaagcatgagcccgtatttatcaggctgaatccaggtgacagaggagtgatgatggacattagtgctccatttttcagggatcctccagccccacttggagaaccaggaaaacctttcaatgaactgtgggattatgaaggtaagtggaagtactgtattttattgcaaacataaatcttcttataataacctctcacagaactattattttatcttgctgttgggaagtaagtgcttctgagcaattgacatgtacagtttctgatatttcctaccaatctctcattctgactttttctccattacctgtgtgactttaactatataacaaaaacagttaaaaaatggcaattacaaatccagattttttttttttttttttttt

SEQ ID NO: 2520 - DNA, 396 bp, Homo sapiens
  source 1..396: mol_type = unassigned DNA; mol_type = unassigned DNA
agctgggtggagcctaaagccgagccctctcctgtgacctcggctgaaaagaagaagccagtgtttgagaaaagcttcgtgagacttcagatggattttaaaattgaacacacttgggatggttttccagtgaagcatgagcccgtatttatcaggctgaatccaggtgacagaggagtgatgatggacattagtgctccatttttcagggatcctccagccccacttggagaaccaggaaaacctttcaatgaactgtgggattatgaagttgtggaagcatttttcttgaatgatataactgagcaatatttagaagttgaactttgtcccaagaacttcctttatcgttcagaatgtccagaggagagacaaaatgggaaggcaaagcttatc

SEQ ID NO: 2521 - DNA, 465 bp, Homo sapiens
  source 1..465: mol_type = unassigned DNA; mol_type = unassigned DNA
ggctgaaaagaagaagccagtgtttgagaaaagcttcgtggtctgtgttctctagttgttccctcttctctctgacattcctttcgtcgtcgccagaatttttgtggatttggtggttgtatgaagaataagtgaatctaccagaacttcctagtagctaagatcttgattcccagaggatccagtaactgagacacctgcacactttacaataaataaaagacaaaggatgacataagaacccatggtgcttatagttacaagacttcagatggattttaaaattgaacacacttgggatggttttccagtgaagcatgagcccgtatttatcaggctgaatccaggtgacagaggagtgatgatggacattagtgctccatttttcagggatcctccagccccacttggagaaccaggaaaacctttcaatgaactgtgggattatgaagttgtggaagcatt

SEQ ID NO: 2522 - DNA, 1588 bp, Homo sapiens
  source 1..1588: mol_type = unassigned DNA; mol_type = unassigned DNA
gcagctgggtggagcctaaagccgagccctctcctgtgacctcggctgaaaagaagaagccagtgtttgagaaaagcttcgtgagacttcagatggattttaaaattgaacacacttgggatggttttccagtgaagcatgagcccgtatttatcaggctgaatccaggtgacagaggagtgatgatggacattagtgctccatttttcagggatcctccagccccacttggagaaccaggaaaacctttcaatgaactgtgggattatgaagttgtggaagcatttttcttgaatgatataactgagcaatatttagaagttgaactttgtccccacggacagcatttagtgcttttactttctggaagaagaaatgtgtggaaacaagaacttcctttatcgttcagaatgtccagaggagagacaaaatgggaaggcaaagcttatctcccttggagttattttccaccaaatgtgacaaaattcaattcatttgcaattcatggatcaaaagataaacgaagttatgaagctctttaccctgtacctcagcatgaactgcagcaaggacaaaaacctgatttccattgcctagaatacttcaagtctttcaattttaacacactgcttggagaagagtggaaacaaccggaatcagacctgtggctaatagagaaatgtgatatataggagtaatagataaccataccgatcattttttcctctataccttttaagataaacaaaaaataaatatcaattttttaagatgtcatgcatacatttcaacaacaaatatcttcatagaagtcactgaaaatatagtatctgtggcaaattgtatatgattaacaagaaaatatatgattctttgtagatgatttcatctgtaaagtcacaatgtttctcagagtcacttagtccaggatgttgcattcccagcacacagtacagttattcttgaaaactacaagtgaaaaagggggaacaattgaggttgtccaaggccacctagaggactgtcttgcactaccttgtgattcaaccatttcattcctagatatataccccagaaaaatgactgctcatagcagctttattcataatagcacaaaattgtaaacagtgaaatttccatccataggaaaatggatagacaaactacaatatagtcagtggaatactgttcatttaaaaaaggactgctgatacatgcaacaacctgtatgaatctcaaaaacattaagttgagcaaaacaaaccaaacataacatactatctaattacttttatattaaagccacttccaggcaaaactaatatttgatgatagataccagaacagtggctgcttagagtgagggcagggaattcaaattgaatggaaaaggggcctgaggaaattttccggggtgattgaaatgttttgtattttgatctggatgatggttatgtagctgcatatatttgtcaacattcctcatgctgtatgtttagatttgtgattttactatatgtaaattaattccttaataaaatactattataaaataagctgtaaattaaatggaattaacttcaagttt

SEQ ID NO: 2523 - DNA, 4418 bp, Homo sapiens
  source 1..4418: mol_type = unassigned DNA; mol_type = unassigned DNA
ggcggagtggcgagaggcgagaggcggcggaggcggcggagctggggggggtgggaggggggggagagtgagtgagtggcagagtgagtttacccctatgagactgtgagaggcccggggcctacctcaaaggagcggggtcgcgaagctagctagcagcggcccccctccaggtccccgggcccggcggcgcggcggcggcttggttgtgaagaggcggggaagcgggtgtccggtccccgccatggagggcatggacgtagacctggacccggagctgatgcagaagttcagctgcctgggcaccaccgacaaggacgtgctcatctccgagttccagaggctgctcggcttccagctcaatcctgccggttgcgccttcttcctggacatgaccaactggaacctacaagcagcaattggcgcctattatgactttgagagcccaaacatcagtgtgccctctatgtcctttgttgaagatgtcaccataggagaaggggagtcaatacctccggatactcagtttgtaaaaacatggcggatccagaattctggggcagaggcctggcctccaggggtttgtcttaaatatgtcgggggagaccaatttggacatgtgaacatggtgatggtgagatcgctagagccccaagagattgcagatgtcagcgtccagatgtgcagccccagcagagcaggaatgtatcagggacagtggcggatgtgcactgctacaggactctactatggagatgtcatctgggtgattctcagtgtggaggtgggtggacttttaggagtaacgcagcagctgtcatcttttgaaacggagttcaacacacagccgcatcgtaaggtagaaggaaacttcaacccttttgcctctccccaaaagaaccgacaatcagatgaaaacaacttaaaagaccctgggggctccgagttcgactcgatcagcaaaaacacatgggctcctgctcctgacacatgggctcctgctcctgaccaaactgagcaagaccagaatagactgtcacagaactctgtaaatctgtctcccagcagtcacgcaaacaacttatcagtagtgacttacagtaaggggctccatgggccttaccccttcggccagtcttaaacgggtgtcagcaagaagaaaaattaacaaaagacagaaggcctgactttggggggttagggcaaggggttcctctggattgcagaccacatcgcacagacccctggctctgaccccctctcatcccggaagaagaggaagaagcagaacagactagttttgagtaaactcagtatgcatgtgtgaatgctgaatcacaggaatggtgttgaggctaccaagaagaaatccatgcagccactttgggttttgttataggcatcagtctaacaagtcattaggtcactcgggaagggggaaaaagtttaaaatgggggaaaaaaagccatctttttaaacaaaaattattttgcctacagaaaggttgtagttttgagcacatgttaatttttttccctctttccccacttttatttttttaaataagggataacatattctttatagaatagtgcttgttctggaagagattcaggtgaaaagttggcgtggcatgtttgaggactctgcggatcagtgctacaggagtacatctgccctgccacatgactccagaagtctctgaccccatttgtttttaatggcatcagccaatgagttatcacccttttcctcctcttttctctttaatcttctgttgatttacacctttgacatttgtattcgtcaaccctgtggcttgttagcatcagaacctctctgaagaccaaacttccctgtgtggccagcagaggaagccttgaggatagatctcgggtgacgtgggattttctaagcctgagaggtgtccttctgcacacccttgtaacaattaaaattgcttttcttccatgtttctcttggcagagagaaatgccatcatgcttactgctcttttggattcttcatgcagtggcttcccatttgctctgggaacagtgcctctgtgctggttatatgtatgcaccacatgtgcacacacgggtgttggtgcaactcaccagcaggtgtgcagtaggcaagcttgaaggtggcccatgcttctctgttgtcacacaacacctttccctgtttctcttcagttgtcctctgatattttcacagcctgttagtggcggctgatctgtagaggtatgaaaatacagccccaaagggggaatttgtcatggggaagggccagccactgactacttgatcttggagaccacatttagatggaaatgagaggacctccacagccccgcctccctgccaggatgctagattattggctgggaggtgggcaagtggcagcccagctgaagcaagaggctgattgactggctgctcactcaggcaggtggcctgccctggcatcctgtagattctgagcaggttgagatgtggatatctccatgggaagcttgaaccaggctagaacagctgtctgccaaagatacaagaatatgcaaagtccctcttacccccctccttccctcaagtcttagttggtttgagagccagggatatggatccagggtgctgttgcagggtcacctgcctgttaccacacccccatccagctgggtggtgggtgagggtgtgagacaggcagggagaccaggtaatgagtggctgcaaggagtcatatagcctgggtgtgggtgagggtctgcctgcctgtttctgtctgggtgtctgagttccaaaaaatgtgtgttgtttgttcctcctcatcctcttctgagactgttgtttttttagagcttgattgtgggagaaaagcttgtgtgaaattccctcttcacctccccaccccccaaaaaataaaagggggcataaactttattccactggagaagccctgggggtggctggagccagcctgctgagaagcgtggtgcagctgggtctgggacttcactagagcttactctggagcacctattttctgtgcacatgggagtgctccactccctagcagagcagagggaagtctctgccaggtacccacgccacaggcctcaggatggctttttgtctgagggcctcattaggcccagactgctgctgctggtaccagtctcctgagacactgcctccctggagcccatgcatgcccagctgttcttactgcttagtagccttgaagcagcacatctccactgtccctggcaggattgtgggaggcttcacaacccctgctttcctgacttcctcttctgcccaacactgggtgccccttcccagtttcccagcaggggcttcatgggccaccgtcagtgggtctgggcctgccagagtcgtcttgctcttcctcttgcttctaggcaaccacacttggcaagttaaatgtcccaagcaccttgtctcccttcccaagaacaaaccatttctgtgcacatccttggaggcgagatgagctccttgcagagggccagagtaagtgcaagtcatggagtgcaggcagaggggtccatggcttccccagcccagggagggtatcagtatcattcattctctctcccctcactggtatgggttcagagcaatgcctagggcccctctctgctcccctgcctagtggggtggtagtggctacctctcagccccaatagtccctgctcctcttagaatcttcaccaagtggcaggccacctctgggcaggaccacctgcgtctggcacccaggaggtgaggcagacaccatggttaggtgatagggtctgaacccagttggggagacagaggggttcagacttgggaagaatctgtcagtgtgcatggagtgaggtgtgtgtgtgtggatggatgtgcacgtgtgcatgctttttttctttttgccgtgaggacagttgaatttggggcatttttctacaagaagcagtcagccttctctcccccataaggactggctgtaaccttaagcccatcaaagttacttccagcctggagagaacctcaccaaacagctggtgtggcctgagggtggccatggtgggaaatgggcatgagaataaatacctccccaaattcaatctgagcccagcaggagaggatggtagggttgccagggctcagaagtgcaagctgattactcaccccaccctgcctcgccgcacctttcctttgtttccttgggtgaatgcaggagcagcagtggctgcccttcccacctggacagtggtgtgtgtagaaagccagctggatgtttgtggtggggcctcatggtgcctaggaggagataaagatgaggaggtttttccttattgtataaatgaatatttgtatgattaaattaacacacacaccaaaaaaa

SEQ ID NO: 2524 - DNA, 4232 bp, Homo sapiens
  source 1..4232: mol_type = unassigned DNA; mol_type = unassigned DNA
ggaggcggaggcggcggagtggcgagaggcgagaggcggcggaggcggcggagctggggggggtgggaggggggggagagtgagtgagtggcagagtgagtttacccctatgagactgtgagaggcccggggcctacctcaaaggagcggggtcgcgaagctagctagcagcggcccccctccaggtccccgggcccggcggcgcggcggcggcttggttgtgaagaggcggggaagcgggtgtccggtccccgccatggagggcatggacgtagacctggacccggagctgatgcagaagttcagctgcctgggcaccaccgacaaggacgtgctcatctccgagttccagaggctgctcggcttccagctcaatcctgccggttgcgccttcttcctggacatgaccaactggaacctacaagcagcaattggcgcctattatgactttgagagcccaaacatcagtgtgccctctatgtcctttgttgaagatgtcaccataggagaaggggagtcaatacctccggatactcagtttgtaaaaacatggcggatccagaattctgatgtcatctgggtgattctcagtgtggaggtgggtggacttttaggagtaacgcagcagctgtcatcttttgaaacggagttcaacacacagccgcatcgtaaggtagaaggaaacttcaacccttttgcctctccccaaaagaaccgacaatcagatgaaaacaacttaaaagaccctgggggctccgagttcgactcgatcagcaaaaacacatgggctcctgctcctgacacatgggctcctgctcctgaccaaactgagcaagaccagaatagactgtcacagaactctgtaaatctgtctcccagcagtcacgcaaacaacttatcagtagtgacttacagtaaggggctccatgggccttaccccttcggccagtcttaaacgggtgtcagcaagaagaaaaattaacaaaagacagaaggcctgactttggggggttagggcaaggggttcctctggattgcagaccacatcgcacagacccctggctctgaccccctctcatcccggaagaagaggaagaagcagaacagactagttttgagtaaactcagtatgcatgtgtgaatgctgaatcacaggaatggtgttgaggctaccaagaagaaatccatgcagccactttgggttttgttataggcatcagtctaacaagtcattaggtcactcgggaagggggaaaaagtttaaaatgggggaaaaaaagccatctttttaaacaaaaattattttgcctacagaaaggttgtagttttgagcacatgttaatttttttccctctttccccacttttatttttttaaataagggataacatattctttatagaatagtgcttgttctggaagagattcaggtgaaaagttggcgtggcatgtttgaggactctgcggatcagtgctacaggagtacatctgccctgccacatgactccagaagtctctgaccccatttgtttttaatggcatcagccaatgagttatcacccttttcctcctcttttctctttaatcttctgttgatttacacctttgacatttgtattcgtcaaccctgtggcttgttagcatcagaacctctctgaagaccaaacttccctgtgtggccagcagaggaagccttgaggatagatctcgggtgacgtgggattttctaagcctgagaggtgtccttctgcacacccttgtaacaattaaaattgcttttcttccatgtttctcttggcagagagaaatgccatcatgcttactgctcttttggattcttcatgcagtggcttcccatttgctctgggaacagtgcctctgtgctggttatatgtatgcaccacatgtgcacacacgggtgttggtgcaactcaccagcaggtgtgcagtaggcaagcttgaaggtggcccatgcttctctgttgtcacacaacacctttccctgtttctcttcagttgtcctctgatattttcacagcctgttagtggcggctgatctgtagaggtatgaaaatacagccccaaagggggaatttgtcatggggaagggccagccactgactacttgatcttggagaccacatttagatggaaatgagaggacctccacagccccgcctccctgccaggatgctagattattggctgggaggtgggcaagtggcagcccagctgaagcaagaggctgattgactggctgctcactcaggcaggtggcctgccctggcatcctgtagattctgagcaggttgagatgtggatatctccatgggaagcttgaaccaggctagaacagctgtctgccaaagatacaagaatatgcaaagtccctcttacccccctccttccctcaagtcttagttggtttgagagccagggatatggatccagggtgctgttgcagggtcacctgcctgttaccacacccccatccagctgggtggtgggtgagggtgtgagacaggcagggagaccaggtaatgagtggctgcaaggagtcatatagcctgggtgtgggtgagggtctgcctgcctgtttctgtctgggtgtctgagttccaaaaaatgtgtgttgtttgttcctcctcatcctcttctgagactgttgtttttttagagcttgattgtgggagaaaagcttgtgtgaaattccctcttcacctccccaccccccaaaaaataaaagggggcataaactttattccactggagaagccctgggggtggctggagccagcctgctgagaagcgtggtgcagctgggtctgggacttcactagagcttactctggagcacctattttctgtgcacatgggagtgctccactccctagcagagcagagggaagtctctgccaggtacccacgccacaggcctcaggatggctttttgtctgagggcctcattaggcccagactgctgctgctggtaccagtctcctgagacactgcctccctggagcccatgcatgcccagctgttcttactgcttagtagccttgaagcagcacatctccactgtccctggcaggattgtgggaggcttcacaacccctgctttcctgacttcctcttctgcccaacactgggtgccccttcccagtttcccagcaggggcttcatgggccaccgtcagtgggtctgggcctgccagagtcgtcttgctcttcctcttgcttctaggcaaccacacttggcaagttaaatgtcccaagcaccttgtctcccttcccaagaacaaaccatttctgtgcacatccttggaggcgagatgagctccttgcagagggccagagtaagtgcaagtcatggagtgcaggcagaggggtccatggcttccccagcccagggagggtatcagtatcattcattctctctcccctcactggtatgggttcagagcaatgcctagggcccctctctgctcccctgcctagtggggtggtagtggctacctctcagccccaatagtccctgctcctcttagaatcttcaccaagtggcaggccacctctgggcaggaccacctgcgtctggcacccaggaggtgaggcagacaccatggttaggtgatagggtctgaacccagttggggagacagaggggttcagacttgggaagaatctgtcagtgtgcatggagtgaggtgtgtgtgtgtggatggatgtgcacgtgtgcatgctttttttctttttgccgtgaggacagttgaatttggggcatttttctacaagaagcagtcagccttctctcccccataaggactggctgtaaccttaagcccatcaaagttacttccagcctggagagaacctcaccaaacagctggtgtggcctgagggtggccatggtgggaaatgggcatgagaataaatacctccccaaattcaatctgagcccagcaggagaggatggtagggttgccagggctcagaagtgcaagctgattactcaccccaccctgcctcgccgcacctttcctttgtttccttgggtgaatgcaggagcagcagtggctgcccttcccacctggacagtggtgtgtgtagaaagccagctggatgtttgtggtggggcctcatggtgcctaggaggagataaagatgaggaggtttttccttattgtataaatgaatatttgtatgattaaattaacacacacaccaaaaaaa

SEQ ID NO: 2525 - DNA, 916 bp, Homo sapiens
  source 1..916: mol_type = unassigned DNA; mol_type = unassigned DNA
gtgtaacctctcctgtttttgtacatgtgtttattcctgaactgttttgggctactcattgttaaccaggttgctgctctacttttcccactgctggctaaggaagattcaactttttcaggaacctacaagcagcaattggcgcctattatgactttgagagcccaaacatcagtgtgccctctatgtcctttgttgaagatgtcaccataggagaaggggagtcaatacctccggatactcagtttgtaaaaacatggcggatccagaattctggggcagaggcctggcctccaggggtttgtcttaaatatgtcgggggagaccaatttggacatgtgaacatggtgatggtgagatcgctagagccccaagagattgcagatgtcagcgtccagatgtgcagccccagcagagcaggaatgtatcagggacagtggcggatgtgcactgctacaggactctactatggagatgtcatctgggtgattctcagtgtggaggtgggtggacttttaggagtaacgcagcagctgtcatcttttgaaacggagttcaacacacagccgcatcgtaaggtagaaggaaacttcaacccttttgcctctccccaaaagaaccgacaatcagatgaaaacaacttaaaagaccctgggggctccgagttcgactcgatcagcaaaaacacatgggctcctgctcctgacacatgggctcctgctcctgaccaaactgagcaagaccagaatagactgtcacagaactctgtaaatctgtctcccagcagtcacgcaaacaacttatcagtagtgacttacagtaaggggctccatgggccttaccccttcggccagtcttaaacgggtgtcagcaagaagaaaaattaacaaaagacagaaggcctgactttgggggg

SEQ ID NO: 2526 - DNA, 2223 bp, Homo sapiens
  source 1..2223: mol_type = unassigned DNA; mol_type = unassigned DNA
agcctcggggagcagcccgggctgtttgttccgtcaccggggaaaggaggtacacacagtcgcgcgcgcacggacacacacacacacgcacgcacgcacacacaccggtggcgagttcgagccccgcggcccctgtccgcccgcgtgcgcccctcgacacagctcgcctcccgccccctgattcctgctgctgccgcccagaggagaaaggaacctctgcctcgaatttccccactgcgccgggcgctgcggagagcggcgagggtgggcgcgaggcggagaacgcgatgaatgagttctcccctcgcctcggagttgtctgagttggcggcgctgcgcccaggcttccggctctcagcgccccacgcgcgcgtggctccccgggctgccacccacgcccgcggccggggccgagccagccacgcagggcagccgaggctccggagctcctgtcccggccccagtccgggtaaaaggagggttgtccccagcggaggcgcacagccgcgcgttctccctgcactctcttcgcggtcccatctgttccccatggcgtctcatccgcaaacccggatccaggcttacctggagaagaacaagatcggtcccctgtttgaggaattaatgaccaagttaataactgagacacctgaccagccaatcccatttctcattgaccatcttcagtctaaacaagggaaccgtggacaacttcaaagaactttgtctggatctgcagctctatgggcagaaagtgaaaaatcagaatccaaaggaacaagaagggatttcagaagctatgataaaccttggcaattaaatgcaaagaagcctaaaaaatcaaaaagtgaccttgctgtgtctaatatttctccaccatcaccggactccaaatcattgccaaggtcagtagagcatccaaagtggaactggaggactaaaccacaaagccgtgattttgatgaattgaatcacatccttcaggagagcaagaagctggggaaagcccttgagaatctctctcgaagtattgcaatttcagatgaactcgataaggaaacagtgacatttaattcttctcttctgaggccccgtgtgattggagaatggattggtagagaagaaaatgatgctgatcccctagctgctgaaatgctacagcctccaattccaagaagcaaaaatgaccaatgggaaagtgaagatagtggctctagtcctgcaggaagcttaaagatggagcctaagaacaaaggattaaaacagcagcaacagcaacataagaaactcctggccgcaatgctctctcaagattcttttgagtccatccacagccctaccccatctgtaacagaagaagatattgataatgaagatgatgcaatggaattgctggaggatcttaatgatttaagaatggagggagtaacaaccctggtaccttctgggagcaaatttaaccaaggccgtcctacttaccctgctgagcctcaggccaaggtcacactgaacatctgttcaaggtgtgccaggcttcaaggagacaacctggaagaaaggacagaagagtcactaccaatactccattctccagatgaaaaaatcccagattcattcgattccttgcctgggactgaagaagcactaatggaggagggtgacgaatttgagaaagcatctaaactaacaggacctggagaagcctccagtggagtaggacactcactgaaaaactacatggaagaagatgaatccttaaagcaattgcaggtagttcatcaaccatggatcttgccaagtgacacagaaagtgaaggagtggaagcagaacaagagaaacgttccgctgatcttcttctttgcgttccatgctcttcttgtcctacgctggtctactctggtttgtgaaacagagagaagaagttgcaagtggtccttaaagaaatgcagttattcaaatccttatgtatagttctaattttatttactatgtgtaatcatttagagaatggttatttttataatctcaataataaacaagtactatcgtagccagggggtgcccaagtatgtaatcagagaacactaatcctggcaaaggattgtggggtggtcaggaggccggctgccttttgacatggttagagtcctgggtttagattactttataaatagttattaagattaatatttgatatattaaatattgcctgattcaaataa

SEQ ID NO: 2527 - DNA, 648 bp, Homo sapiens
  source 1..648: mol_type = unassigned DNA; mol_type = unassigned DNA
cacgcagggcagccgaggctccggagctcctgtcccggccccagtccgggtaaaaggagggttgtccccagcggaggcgcacagccgcgcgttctccctgcactctcttcgcggtcccatctgttccccatggcgtctcatccgcaaacccggatccaggcttacctggagaagaacaagatcggtcccctgtttgaggaattaatgaccaagttaataactgagacacctgaccagccaatcccatttctcattgaccatcttcagtctaaacaagggaaccgtggacaacttcaaagaactttgtctggatctgcagctctatgggcagaaagtgaaaaatcagaatccaaaggaacaagaagggatttcagaagctatgataaaccttggcaattaaatgcaaagaagcctaaaaaatcaaaaagtgaccttgctgtgtctaatatttctccaccatcaccggactccaaatcatgtattgcaatttcagatgaactcgataaggaaacagtgacatttaattcttctcttctgaggccccgtgtgattggagaatggattggtagagaagaaaatgatgctgatcccctagctgctgaaatgctacagcctccaattccaagaagcaaaaatgaccaatgggaa

SEQ ID NO: 2528 - DNA, 1948 bp, Homo sapiens
  source 1..1948: mol_type = unassigned DNA; mol_type = unassigned DNA
acagccgcgcgttctccctgcactctcttcgcggtcccatctgttccccatggcgtctcatccgcaaacccggatccaggcttacctggagaagaacaagatcggtcccctgtttgaggaattaatgaccaagttaataactgagacacctgaccagccaatcccatttctcattgaccatcttcagtctaaacaagggaaccgtggacaacttcaaagaactttgtctggatctgcagctctatgggcagaaagtgaaaaatcagaatccaaaggaacaagaagggatttcagaagctatgataaaccttggcaattaaatgcaaagaagcctaaaaaatcaaaaagtgaccttgctgtgtctaatatttctccaccatcaccggactccaaatcatgtaaggaagtctcttattcaaatgctattcaaagcatgtaagtttatgttgttaagaaaatgaagaaaaggtattaattgaagcccaacttttcatctgatatttctggcctttaatcttagtgaatttcacttttactccgcatttacattgatcttcattcatacgtatgtatttgcttgcttatattctcaaacatgtgtaattcacttggacccttttgagtataatattccttgaagaatataaactgcatggagcgggtctcttgtttctcatagccaattgtagcattacatcatattgaaagcagtagctacctatatttaatgaagtatgtaaaagcaaattaaatctcttagaatagaagcaaagaagatttctattcaaaacatttcataaaatttcttaaaaaatatttcatctgggattttcctgaagtcctactcattaatttgtgatggaagtccctatattctcttcactactactgtaatatctttgtttttatgttactacaaaggaatgactgaggttgggtattttataaagaaaaaaggtttatttggcttacggttctgcagactgtacaagaagcatgacactagcatctgcttcttgtgagagccgcaggaagcttccactcatggcagaaggtgaaggggtgcacgcatcatatggcgagaggaaggagaaagagatagcagagggaggtgccaggctctttttaacagtcagatcttgtaagaaccaacagagtgagaagtcactccttaccatgaggacagcaccaagccactcatgagggattgacccccataacccaaataccttccaccaggccccacctccgatattggtgatcaaatttaccatgtgatttggagaggacaaatatccaagctataccacctaagtatcccttctctctcaatggcctactgctttggtagctactgggattctccagtgctctgctatccccacatatgtataaacatgtcaaaaatctcaggagcctctagcaaatcacagctattcttggaagaaaagagaacttgcaagctgttcttcttatacatcaattccttgtgcttgttacagggtgagatgtttgattttagtttcaacagagaaaggagtaggcagaaaatatttatctttgtttgaaaatgtttgaaaaaccactatgtgctaactggaatctgcatctgggtcatttgtgaaagcaactaaatttaactttgtgagcagcttcatttacatagtggtactcataaaaagtattgcattaaccacaccaagttcttgtgagaattatatgaagtgttaacaacttaaaatgttcttcagaaattgtgattgtaaccaaattgtcctgcttcatcagtttggtatatagaattaggtcccaacattttaaaaaatatacaagtttaaaatttgcatgtcttttttacaacagtatagccagtaatatccagcacagtgcctgtttcaattaataaatgctaaatgataaaaatgaataaaggaagaaataaaaaatg

SEQ ID NO: 2529 - DNA, 3571 bp, Homo sapiens
  source 1..3571: mol_type = unassigned DNA; mol_type = unassigned DNA
gccgcgcgttctccctgcactctcttcgcggtcccatctgttccccatggcgtctcatccgcaaacccggatccaggcttacctggagaagaacaagatcggtcccctgtttgaggaattaatgaccaagttaataactgagacacctgaccagccaatcccatttctcattgaccatcttcagtctaaacaagggaaccgtggacaacttcaaagaactttgtctggatctgcagctctatgggcagaaagtgaaaaatcagaatccaaaggaacaagaagggatttcagaagctatgataaaccttggcaattaaatgcaaagaagcctaaaaaatcaaaaagtgaccttgctgtgtctaatatttctccaccatcaccggactccaaatcattgccaaggtcagtagagcatccaaagtggaactggaggactaaaccacaaagccgtgattttgatgaattgaatcacatccttcaggagagcaagaagctggggaaagcccttgagaatctctctcgaagtattgcaatttcagatgaactcgataaggaaacagtgacatttaattcttctcttctgaggccccgtgtgattggagaatggattggtagagaagaaaatgatgctgatcccctagctgctgaaatgctacagcctccaattccaagaagcaaaaatgaccaatgggaaagtgaagatagtggctctagtcctgcaggaagcttaaagatggagcctaagaacaaaggattaaaacagcagcaacagcaacataagaaactcctggccgcaatgctctctcaagattcttttgagtccatccacagccctaccccatctgtaacagaagaagatattgataatgaagatgatgcaatggaattgctgggtaattttaaaaattaataatttctcattttcttctttgacattgtaaaaaaaacgtgtggtgattaagagattttaaaagttttgaatagccttgtcttagggaaaagaaaccatttagtacatattttatttacattagactcacataaagttgcatgtaagaactaaattgaaataccctaagcatatgaatatttattagactgtattttgtgctttgtgtatgctgcactttaccttctgactacgtaatgaagcgttattctgtgtgcaactgtgatcaaaattcaagtctgtctgctttattctctgataataattgccttgtttacatctattgtctataaaatatacccaaagtacatatttcagccctcactccaaaatgtctaccttttattttgaggatgctttagaaaaatagaataaagttgaaaggggcagatagtaaattcaggttttatgttttccgtaaatgacgggaaagtttgcagagatttcaaagtttcttcaggcctgttactttcatgaaaccttattaatcttgtatatgtaggatatctttttatattttttaatgtagtatatgtatgtttttgcttcatcagaaatctcttcatataaatttttaaactgaacttctctttggaacatcatttttctgaagaaagaaaatgaaatgttatttcagagtgatccacatataaaacaatgagttttgaagtcagtggtatcaattattctgctacaaataaagagtatgattttcaaatactttataacaatatgctgttgtattttatttagaaagagaataaataatataattatttgaaagccttaaacacgttttacatatagaatatggaatctcagaaaaatataggccattttctgaagtttttgttaaaaatgagattccttggttttaagtgtttatggcagtaaaatactatcattataaaaaatgatatattgcttatcatttttgcataggcctacaaaggtgttatttggtcaatggtgacaggtttgaaagatgttttctgatgctgtaaaaactgcattcatgctaacattaaggagattgtatcatggcgttttcattacatgctgttggtcccttccaattgggtcttttcctcacctccaaatcattaacatggcagacgtgccctatgtggcagtggtagcttcattcaacaaacatttactgagcacttactctatgctaagcacttggctggggtctgggaacataaaaataaaatcattgtgatctgtgtttgaaggaattttacattgtaatgttcaagatacaatacgtcactacctgtgctaactgcgctaattggatgaagcacacagttgtgtataggggtaacacctaaagcagaggtaagggacagtgacccaggaatgtttcctagagaagccgattactctggctagtcctgaaaagcaaatagatgtaagctcagcaggtggggtgtggtcattgtaggtttgctcacgtaggtatgggctgttttgcgattgtgctccataactatacctgtaaatggttcctctgctttggacagtaacagggaaggggcaactgagatccagggtttctttcaggagatgcagttgtccactccatgctggtactccctagatctcagctgccctgactgaaggttctagtctcccaagctgaagaccgaggattgagtcttggagactatctaatgatgagcaattaataactagtcctcattaattctttttttagacattttagcctgtggtctgagcaagtttaataataagagatagttgaaggtttggactttcttcatgtaattccacatatctcagcacaggtggcaagcagtgtaataatgttggtctctaggtcatgagattatcctcttatagcttggaatgttacaagtccactggactttatcttaaaataatgccatattcaatttcttgtttttgaaatggattccagcaaaatgtatgtgattgtgtctatttcagaaaaatataaatgctaagttcttggaaatttatgtgaaatctaattttatagagtttatatagaatcattgtaagatgcaatagagacatctggtatttaaaatctttttgaatctacattttgtagatgtgtgtgctatagcttatgtgtttgtaaatgtttaacttgtctttgttatctataccaagatataactggctgaaaaatatttattatgcatggaaagcactctgtaaaccttgtgaagtgataaataagtgaaaggtataattgttagttgacattaatataaaaaaggattattcttcaataaaattggttgatttgaagggaaaaaatccttttagttgaactagtagaagttagtaataactattgactcttgttttgtttattaaggaaactagcattgttaatatatactgattaatatttaattattcacagttgtttaattatatatttgtggatttcttttctaaatgttttaggcatatgaaaatattatagtacaacacctgtaatttttaagtagatcaaatattttctgtaagattgctttaaatgctccttataaattcacattgcaaaagtaacttaatatggaattaacacttgtcagataataaaacagccaaacttgt

SEQ ID NO: 2530 - DNA, 3652 bp, Homo sapiens
  source 1..3652: mol_type = unassigned DNA; mol_type = unassigned DNA
gcccaggtaaagccatgttttcctacacttaaaaatgtaaataaatatcccttagataatctggacagcagtttcttatatagcatgtctgagcactatattttgctgggctataaaaggtttaattgttgtttattggtacaataagggattctagttactaatatctacctgtagtcaataaagcaaacattgattggttgatcgaatcattgattcattcaataggtattgattcagcaccagctatgagctaggcagagttctaggccctacagagaaaactgatatcaaactaagaaagtctttttccaagtgctacagtaggggtgggggaggagagagataacaaactggtgagcaaatgttaaacaaaatgattctagagagtgctaaatactgtgaggaagataaaatgataaaataataaagacttctgaagattggttagggtaacctcttgtagaagtatcattggagaccgaaggatgacacaccagccatctgaccatgagagaacatcattcaaggcaaaggaaacagaccaccaccaacaaaaaaagatgcactggggaatttccagtaacacttttgttagctctcttaatatctgattttttgagcactagaacactgcctctcacagaatcctagcttaaaacagcaatgaacagactagaattctaggctaaaaccaacaagatgaaatgtgactgatatgaatataaatggtgcacataagttcacaaacccaattacacagcacaaaatgatatccacgtggcttgacagctgttcatattagaaaaatctagggattctaatggactacatattggagattgctctttgctgttcctgactggaaaaaaaaatatgtagatattacccttgggcagatttcagcccaacttaaagtatcattagagctgtccaaaatggaacagcctgctttgcacatagagaactcacattgctcaactcaaaaaagagcagaaggaaggaagaaggaaggacacgtaacagggatttttacaaaaacagaattcggtatttcttggagactactttaagacagtttttggtttctgtaagtctgtgacttattacttgttcctttaattccaataaaattttcttcatttttgttatttttaaaacattaagaagaaaaaaatgatattgatataaggtagatggtgaagtttagcaaaagtttagtttataatgatatctctcaaaatagcaaactgaagtttaaaattcttaagctataattttaaaggaatttagattaaacttttaatatgttgttggctaagtataatacaaaataaaaactaaataaatcttggttttgccacatattagctgtgtaatatagacaatttacttctctgttattgtttcctcagaatgagggcagtaacttgtagccgtctgaaaagattgttataagcatggagttagttgctgtatataaagcagttagaccagtacctgacaatattacatgctaagtaagtgcttgctattactgttgctgttattattaattataattgtgtgctctattctgccttcaggaattaatgaccaagttaataactgagacacctgaccagccaatcccatttctcattgaccatcttcagtctaaacaagggaaccgtggacaacttcaaagaactttgtctggatctgcagctctatgggcagaaagtgaaaaatcagaatccaaaggaacaagaagggatttcagaagctatgataaaccttggcaattaaatgcaaagaagcctaaaaaatcaaaaagtgaccttgctgtgtctaatatttctccaccatcaccggactccaaatcattgccaaggtcagtagagcatccaaagtggaactggaggactaaaccacaaagccgtgattttgatgaattgaatcacatccttcaggagagcaagaagctggggaaagcccttgagaatctctctcgaagtattgcaatttcagatgaactcgataaggaaacagtgacatttaattcttctcttctgaggccccgtgtgattggagaatggattggtagagaagaaaatgatgctgatcccctagctgctgaaatgctacagcctccaattccaagaagcaaaaatgaccaatgggaaagtgaagatagtggctctagtcctgcaggaagcttaaagatggagcctaagaacaaaggattaaaacagcagcaacagcaacataagaaactcctggccgcaatgctctctcaagattcttttgagtccatccacagccctaccccatctgtaacagaagaagatattgataatgaagatgatgcaatggaattgctggaggatcttaatgatttaagaatggagggagtaacaaccctggtaccttctgggagcaaatttaaccaaggccgtcctacttaccctgctgagcctcaggccaaggtcacactgaacatctgttcaaggtgtgccaggcttcaaggagacaacctggaagaaaggacagaagagtcactaccaatactccattctccagatgaaaaaatcccagattcattcgattccttgcctgggactgaagaagcactaatggaggagggtgacgaatttgagaaagcatctaaactaacaggacctggagaagcctccagtggagtaggacactcactgaaaaactacatggaagaagatgaatccttaaagcaattgcaggtagttcatcaaccatggatcttgccaagtgacacagaaagtgaaggagtggaagcagaacaagagaaacgttccgctgatcttcttctttgcgttccatgctcttcttgtcctacgctggtctactctggtttgtgaaacagagagaagaagttgcaagtggtccttaaagaaatgcagttattcaaatccttatgtatagttctaattttatttactatgtgtaatcatttagagaatggttatttttataatctcaataataaacaagtactatcgtagccagggggtgcccaagtatgtaatcagagaacactaatcctggcaaaggattgtggggtggtcaggaggccggctgccttttgacatggttagagtcctgggtttagattactttataaatagttattaagattaatatttgatatattaaatattgcctgattcaaataactttgcttaaaatttttctgtattttaacttgtctagggttttctacttcttctatttttataatattttctcattttttagattactaaacattctacttatccacatgtgccaagatgtgccatttaggtctctgcagaaattagctgtttggtatcatcacctgccatacatgttgtgtgcagcagtgagaagtatattctctaccactgctctttctcatgattattttctctattcctattaaaatgaataattgatatgttaattaagtaaagcaaatcaataaggaatgaaatgcatggcccaaaacatagaaaatgaaaatcgtttgaccatttatccaattattgaacccaattaagatgatccattttaaatttaatatatgctcgcttttggaatgtgttatgcattgatgttaagtgaatggatctaagtaaatctattgatatctcta

SEQ ID NO: 2531 - DNA, 1428 bp, Homo sapiens
  source 1..1428: mol_type = unassigned DNA; mol_type = unassigned DNA
tgtgtgctctattctgccttcaggaattaatgaccaagttaataactgagacacctgaccagccaatcccatttctcattgaccatcttcagtctaaacaagggaaccgtggacaacttcaaagaactttgtctggatctgcagctctatgggcagaaagtgaaaaatcagaatccaaaggaacaagaagggatttcagaagctatgataaaccttggcaattaaatgcaaagaagcctaaaaaatcaaaaagtgaccttgctgtgtctaatatttctccaccatcaccggactccaaatcattgccaaggtcagtagagcatccaaagtggaactggaggactaaaccacaaagccgtgattttgatgaattgaatcacatccttcaggagagcaagaagctggggaaagcccttgagaatctctctcgaagtattgcaatttcagatgaactcgataaggaaacagtgacatttaattcttctcttctgaggccccgtgtgattggagaatggattggtagagaagaaaatgatgctgatcccctagctgctgaaatgctacagcctccaattccaagaagcaaaaatgaccaatgggaaagtgaagatagtggctctagtcctgcaggaagtttagaagacacgtaatgcaatgatgcagaggacagatgccatggcaagagactgaagctaaataaacttcttccttccattttcaacttaaagatggagcctaagaacaaaggattaaaacagcagcaacagcaacataagaaactcctggccgcaatgctctctcaagattcttttgagtccatccacagccctaccccatctgtaacagaagaagatattgataatgaagatgatgcaatggaattgctggaggatcttaatgatttaagaatggagggagtaacaaccctggtaccttctgggagcaaatttaaccaaggccgtcctacttaccctgctgagcctcaggccaaggtcacactgaacatctgttcaaggtgtgccaggcttcaaggagacaacctggaagaaaggacagaagagtcactaccaatactccattctccagatgaaaaaatcccagattcattcgattccttgcctgggactgaagaagcactaatggaggagggtgacgaatttgagaaagcatctaaactaacaggacctggagaagcctccagtggagtaggacactcactgaaaaactacatggaagaagatgaatccttaaagcaattgcaggtagttcatcaaccatggatcttgccaagtgacacagaaagtgaaggagtggaagcagaacaagagaaacgttccgctgatcttcttctttgcgttccatgctcttcttgtcctacgctggtctactctggtttgtgaaacagagagaagaagttgcaagtggtcc

SEQ ID NO: 2532 - DNA, 464 bp, Homo sapiens
  source 1..464: mol_type = unassigned DNA; mol_type = unassigned DNA
cagcaacagcaacataagaaactcctggccgcaatgctctctcaagattcttttgagtccatccacagccctaccccatctgtaacagaagaagatattgataatgaagatgatgcaatggaattgctgggcttcaaggagacaacctggaagaaaggacagaagagtcactaccaatactccattctccagatgaaaaaatcccagattcattcgattccttgcctgggactgaagaagcactaatggaggagggtgacgaatttgagaaagcatctaaactaacaggacctgatgaatccttaaagcaattgcaggtagttcatcaaccatggatcttgccaagtgacacagaaagtgaaggagtggaagcagaacaagagaaacgtgagtagacactattgtttattgacaaatttcttttaccagaaggaaatccacaataaagctatttcactttcata

SEQ ID NO: 2533 - DNA, 2281 bp, Homo sapiens
  source 1..2281: mol_type = unassigned DNA; mol_type = unassigned DNA
aagaaaatgaaacagaattgaaaatggtcttgtaaaattccacttggggtggcgatgctttgtggcttgaagtgtaagggatgagaacagcatgtgaattccaagaaagcaacacagaatggaaaatggatttacaatgtgtcagacagggaggcaacatcctgtggcatgtggcttgcatctcagcggtgggaaagaggatcttaatgatttaagaatggagggagtaacaaccctggtaccttctgggagcaaatttaaccaaggccgtcctacttaccctgctgagcctcaggccaaggtcacactgaacatctgttcaaggtgtgccaggcttcaaggagacaacctggaagaaaggacagaagagtcactaccaatactccattctccagatgaaaaaatcccagattcattcgattccttgcctgggactgaagaagcactaatggaggagggtgacgaatttgagaaagcatctaaactaacaggacctggagaagcctccagtggagtaggacactcactgaaaaactacatggaagaagatgaatccttaaagcaattgcaggtagttcatcaaccatggatcttgccaagtgacacagaaagtgaaggagtggaagcagaacaagagaaacacctactaaatcagaatctctgtggctgggactctgaattctgcatttttcatactttggcttctttcctcatctataaataagtttgaatataaaatgtgagtctggagaaaaaggaaggctaaaatttgaagaaatatacatggagaagacatgcaagacagtgtattagtcggttttcacactgctataaagaactgcctgagactgggtaattgtaaagaaaaaaggtttaattgactcacagttccccatgtctggggaggcctcaggaaacttacagtcatggcagaaggaaaaggagaagcaagcactttcttctaaggagagagagagagcagtgaaagccacacatttttaaaccatcagctctcgtgagaactcattatcaagagaacaacaagggggatatctgcccccatgatccaactacctcccaccaggcccctcttctgacacatggggattacaatttgacatgagatttgggtggggacactgagccaaataatatcagacaggtcctccagactgtgggttcaatgcttacaaaatcaaaacacaaaacatttagaatcaatttagccagtaccctctaattacattttagatttttaaaaacacaaataaataagctaaaaacacacaagcaaacaaacaaccaaaccaaaccaaaccaacaaaacaacacaaatgtcccaaataaagaaataatagccaaagtcacagatgaaagctaatgctgtcataaaacattaagacttccccacttgggtttgggtcctagttcttcctgaggtcttaatgtctgtaacaataggtaatttggccctgggtctccttaaggcagggagattgagatgatgacacggtatagagcctgtcacctgcaaggactgactcaggtataaaaagggaaataaaatacctgtactctctaactgtggaacaagccatgaaatttgctattggtattagactttgaacgaaaaatgtaaagatacacatagggaatcaaactctcagctctgtactttggttattcggttcaaacttaaactatctgtattgtcagaaaccccacattataataacaattggccagcttcattaaaattcacagggtcctctcatgtgtaaatgtaagaactggggcatttagaactcccaaagatttaaatatcaactcctgctgaagacgagctctcaatcaaattacaagctgcctgaaaagttatagtaaaacaacagagtcagcaaatgctaaaaacactagaattagaatgatgagaaaggaaagaaataagacaatcagaaagagaccatattaaaagtatgcttaagatatttaaagatatagatcaggcgcaatggctcacgtctgtaatcccagcactttcggaggccaaggcgggcagatcacgaggtcaggagatcgagaccatcctggctaacacggtgaaacgccgtctctactaaaaatacaaaaaattagtcgggcgtggtggcacacgcctgtaatcccagctactcgggaggctgaggcaggagaatcgtttgaacccgggaggtggaggttgcagtgagccgagatcacaccactgcactccagcctgggtgacagagtgagactccatctc

SEQ ID NO: 2534 - DNA, 590 bp, Homo sapiens
  source 1..590: mol_type = unassigned DNA; mol_type = unassigned DNA
ttcctccatcccagcaccagccgactttcttgccttgttctgcacctctcttcttgtctttgttcctcttcttcctaccacacaaggggcaagagccgacacccgcactgccaggatccaagatgcagggctggtgttggcagacacgctccggaaattcttattcgatctggatgttgatgatggcctagcagctgttggttactccaaagctgatatccccgcactagtgaaaggaacgctgccccagtatccagtccagccagaagaagagccaaaagctctcagcacctcttgaccaagaatgtggtgatcgagtcggacctgtacacgcaccagcccctggagctgctgccccaccgcggagaccgcagggaccctggcgaccgccgcaggtttgggcggctccagaccgcgcggccgcccacagcccacccggccaaagcctctgccagacccgtggggatttctgaacccaaaacatcaaatctgtgtgggaatcgagcatatggaaaatctctgataccgccagtgccccggatctcagtgaaaacttcagcctctgcctcattggaggcgacagccatggg

SEQ ID NO: 2535 - DNA, 570 bp, Homo sapiens
  source 1..570: mol_type = unassigned DNA; mol_type = unassigned DNA
ctaggagccgacacccgcactgccaggatccaagatgcagggctggtgttggcagacacgctccggaaattcttattcgatctggatgttgatgatggcctagcagctgttggttactccaaagctgatatccccgcactagtgaaaggaacgctgccccagtatccagtccagccagaagaagagccaaaagctctcagcacctcttgaccaagaatgtggtgatcgagtcggacctgtacacgcaccagcccctggagctgctgccccaccgcggagaccgcagggaccctggcgaccgccgcaggtttgggcggctccagaccgcgcggccgcccacagcccacccggccaaagcctctgccagacccgtggggatttctgaacccaaaacatcaaatctgtgtgggaatcgagcatatggaaaatctctgataccgccagtgccccggatctcagtgaaaacttcagcctctgcctcattggaggcgacagccatgggcacagagaagggagctgttctgatgagaggatccagacatctcaagaagatgactgaagagtatccag

SEQ ID NO: 2536 - DNA, 478 bp, Homo sapiens
  source 1..478: mol_type = unassigned DNA; mol_type = unassigned DNA
acagtagccagacgtctgaatgtgactcaccaagaggagtgtttggtattcatattgatgatgactctgtagaggaagaatttaaaggtcaagcatgaagaaacagatttaggaagacttggtgtttttatctggatacccatcattctggcccttacaattagagattatggaaaagagccctctgtggccccctaagcctgtaggtctgtgtttttcagttttgctggccgagaaaaaagacccaagggagtaacatattattttctacaaggatgttctaaaactgctcaggcctgtgagtgaaatgatttgctgcactgcaagggagggtctttcacagacgaaaggttcttaatttgatgaagttcagtttatcaccttttcctttttattcatcatgcatttgatgtcaagtcaaagaactctgcctacccataaatctctaaggttttctcccgagtgttttcctaaaaat

SEQ ID NO: 2537 - DNA, 305 bp, Homo sapiens
  source 1..305: mol_type = unassigned DNA; mol_type = unassigned DNA
agagccctctgtggccccctaagcctgtaggtctgtgtttttcagttttgctggccgagaaaaaagacccaagggagtaacatattattttctacaaggatgttctaaaactgctcaggcctgtgagtgaaatgatttgctgcactgcaagggagtatccagtccagccagaagaagagccaaaagctctcagcacctcttgaccaagaatgtggtgatcgagtcggacctgtacacgcaccagcccctggagctgctgccccaccgcggagaccgcagggaccctggcgaccgccgcaggtttg

SEQ ID NO: 2538 - DNA, 208 bp, Homo sapiens
  source 1..208: mol_type = unassigned DNA; mol_type = unassigned DNA
caaggatgttctaaaactgctcaggcctgtgagtgaaatgatttgctgcactgcaagggagggtctttcacagacgaaaggttcttaatttgatgaagttcagtttatcaccttttcctttttattcatcatgcatttgatgtcaagtcaaagaactctgcctacccataaatctctaaggttttctcccgagtgttttcctaaaaat

SEQ ID NO: 2539 - DNA, 3513 bp, Homo sapiens
  source 1..3513: mol_type = unassigned DNA; mol_type = unassigned DNA
atttctgaaatgagaaagggaattgctggtaccaaaattcacgtttcctttttggtggaaattctccagccaagcttggcgctaacagagtaggcgatttcacttcgtcgtcacctcacaaaaggcttccaaattcactgcggcagacaccgcaaaataaaaatgttaaatacatcctagctgggaggggattgaagcctccaggctcaatcaaaggtttgcaataataggattcatttaaaaaaaaaaaaaaaaaaaaggacagatgggtttagaaaatgttgcagtgaagactggaacgagatgagctcatagcaccagcctgtcttttgtggacccgcacaatgatccctgagccagactggattaggatgcctcgcgactaggggtccagagacagaggcctccagttcccaggcacttcgggaagaggaggctgaaatgatgcatcagatttacagctgcagtgacgagaacatagaagttttcaccaccgtgattccttccaaggtatccagtccagccagaagaagagccaaaagctctcagcacctcttgaccaagaatgtggtgatcgagtcggacctgtacacgcaccagcccctggagctgctgccccaccgcggagaccgcagggaccctggcgaccgccgcaggtttgggcggctccagaccgcgcggccgcccacagcccacccggccaaagcctctgccagacccgtggggatttctgaacccaaaacatcaaatctgtgtgggaatcgagcatatggaaaatctctgataccgccagtgccccggatctcagtgaaaacttcagcctctgcctcattggaggcgacagccatgggcacagagaagggagctgttctgatgagaggatccagacatctcaagaagatgactgaagagtatccagcccttccccaaggagcagaagcctctctaccactgacaggcagtgcttcctgcggcgtccccggcatcctccggaaaatgtggacaaggcacaagaagaagtctgaatatgtgggagccaccaacagcgcctttgaggccgactaaaggtgaccctcttcaagtgccctgtgttggccaaggttccccggacaagaggaaaaaccttcaggattgaaactgagccacacgcacctctgctagtagctggtccaaacccattatcctccctcactcattgattaccctgggatagggcacaggaaagaaatgtccctcgaaggcaatataaaactgccccttcttagaattgctaaagccattggtctgaaagtgactttgggaggtcataaagtttgtatctctatctttaagcaaaaaattaaactttcccagctcattttaaagacctccaaggaaggaaaaaagcaattcctctgtcttccttgtgagttgctctaaagtgtgtgattttctagtgtaaatggactttgaggcacttgtaaacacaatggttcttactgtttccattactgcatttacttcaccttgacaaggtacaattttcaaggacaaagcactatatataaagttagtagttctaatatccacttgagagtatactcaagattgattttcatggccatttggcatgattgcatgaattctctattcttttatgtgcagtttttctatagaaaaacattaaaagttaaatgttgactgctaatgttttctgaagtggcatagtctagtggaatcaataatcccttgctttggtataataatttgaacttttgaaagtgctttctcatccgttatctcttatcttcacaaaacccctgtggaagaaagcacaattattcccaatctgcagagggggaaatggaggccttcagagattacaggaccagataccaggtagtggaaccagacagcaggtccttaacttctctccagtggactccctgctttgcctactctctagcaactgacttggggaagtttttaaatggtgagagtgtgtctctgggggcaaccattgaaaagaagactctgatatgttggaacaagtaagggatttgaatgaaatacactattatatcttatatgttagcttgaaccagaaaaagttgacatttttgtaggtcaaaaacaattgagcatcaatttcatatggttcaacctcatatatgatactatgcttttcttctatcagtgaaaatgtcatcatcaattccattgtcaacattagtagccttaaaacaataacataataataatgatgataatgatacttatagctatcatctattaaatgcctatgtttcaggcatgatactaggcaatttatatatatcatcctaatctttctaaaaactctattaggtggccctatccacttaatagatgccaattcaaagaggttaaatgattagactaaggcacctaacttatgtgagtgtcaggcttcaatgcctgtgttagagctactccttcacacaaaatagttcagaacatagagaaggaccaaggttaataaatgattttcatcccaaacactaaacatgattgatgggtagaggctgcccgaagtactgtgtaaagatggaatctgagatagaagaatgctgtggtcaattagtaattcttgcccatggagggattagtgacacatgccttgtatatttgtcatctgtggcctaaactctgcccctgaaggtttgttttctaattcagaggtttaaattaatctagcccacttaataaaaccagagatcctatgggaaatttagcctaagacagtgctggaaattgccatatgttgatacaaagaagtgtttggccacattacaggtctcagactcaactgctatgtgtgactgccgctctgtgcctatgtcttgcttttttgctgagttccctatttccatatctccaggtgaatccatgagaagcgagagggtggctgagaggcctgggcctctgggattccaccttgctatctctgctcttcaaccattgttttagactctgaacaccagatcctcatatctgaaagtgatttggagacctgggcatcaagtgctcttttaagaaggggctatcccagaggactgttcaaaagtctcattcaatagagatgttggagtccagaacaaagttagggagcaaaccagtaacctatgctggtcgtaacagaggatcctacaattacgtttgtttttaagacaggattttgctgtgttgcccagactggtctcaaactcctgggttcaagagatccatcctcccacctcagtctcctgaaagctgggatgacaggcacatgccaccacacctagctccttacaaccatttattttaacttatttcatttataactggtatctttcatttgtatgtggcagctagagatttatataggatggaagtaatttatttttaatttaaatatttcatgttgaactgtttgccttgtatggaacattttacttggccaattcaaataaaaataaagtcagctttgtttgtgacattcatgcaccaccataa

SEQ ID NO: 2540 - DNA, 557 bp, Homo sapiens
  source 1..557: mol_type = unassigned DNA; mol_type = unassigned DNA
tagcaccagcctgtcttttgtggacccgcacaatgatccctgagccagactggattaggatgcctcgcgactaggggtccagagacagaggcctccagttcccaggcacttcgggaagaggaggctgaaatgatgcatcagatttacagctgcagtgacgagaacatagaagttttcaccaccgtgattccttccaaggtatccagtccagccagaagaagagccaaaagctctcagcacctcttgaccaagaatgtggtgatcgagtcggacctgtacacgcaccagcccctggagctgctgccccaccgcggagaccgcagggaccctggcgaccgccgcaggtttgggcggctccagaccgcgcggccgcccacagcccacccggccaaagcctctgccagacccgtggggatttctgaacccaaaacatcaaatctgtgtgggaatcgagcatatggaaaatctctgatccagacatctcaagaagatgactgaagagtatccagcccttccccaaggagcagaagcctctctaccactgacaggcagtgctt

SEQ ID NO: 2541 - DNA, 346 bp, Homo sapiens
  source 1..346: mol_type = unassigned DNA; mol_type = unassigned DNA
caatgatccctgagccagactggattaggatgcctcgcgactaggggtccagagacagaggcctccagttcccaggcacttcgggaagaggaggctgaaatgatgcatcagatttacagctgcagtgacgagaacatagaagttttcaccaccgtgattccttccaaggtatccagtccagccagaagaagagccaaaagctctcagcacctcttgaccaagaatagatctaggtgacaaataaggagaagtgtgaatcaaagacgtcagcagatgggatcctgaggcttgtgtgttagcccgtgtcttctgcttttcctatcttgacctctctatgaccagcaag

SEQ ID NO: 2542 - DNA, 3313 bp, Homo sapiens
  source 1..3313: mol_type = unassigned DNA; mol_type = unassigned DNA
gagccagactggattaggatgcctcgcgactaggggtccagagacagaggcctccagttcccaggcacttcgggaagaggaggctgaaatgatgcatcagatttacagctgcagtgacgagaacatagaagttttcaccaccgtgattccttccaaggtatccagtccagccagaagaagagccaaaagctctcagcacctcttgaccaagaatattttgtcgctgttcctagaattcactggaatcacgaaggatccagaaactccctcgatgcgagctccatctgcaaagctcctgccctggggttccatgggtccctaggcccgagcagaggagtgggctaaccgcgtttcccccgcccggcaggtggtgatcgagtcggacctgtacacgcaccagcccctggagctgctgccccaccgcggagaccgcagggaccctggcgaccgccgcaggtttgggcggctccagaccgcgcggccgcccacagcccacccggccaaagcctctgccagacccgtggggatttctgaacccaaaacatcaaatctgtgtgggaatcgagcatatggaaaatctctgataccgccagtgccccggatctcagtgaaaacttcagcctctgcctcattggaggcgacagccatgggcacagagaagggagctgttctgatgagaggatccagacatctcaagaagatgactgaagagtatccagcccttccccaaggagcagaagcctctctaccactgacaggcagtgcttcctgcggcgtccccggcatcctccggaaaatgtggacaaggcacaagaagaagtctgaatatgtgggagccaccaacagcgcctttgaggccgactaaaggtgaccctcttcaagtgccctgtgttggccaaggttccccggacaagaggaaaaaccttcaggattgaaactgagccacacgcacctctgctagtagctggtccaaacccattatcctccctcactcattgattaccctgggatagggcacaggaaagaaatgtccctcgaaggcaatataaaactgccccttcttagaattgctaaagccattggtctgaaagtgactttgggaggtcataaagtttgtatctctatctttaagcaaaaaattaaactttcccagctcattttaaagacctccaaggaaggaaaaaagcaattcctctgtcttccttgtgagttgctctaaagtgtgtgattttctagtgtaaatggactttgaggcacttgtaaacacaatggttcttactgtttccattactgcatttacttcaccttgacaaggtacaattttcaaggacaaagcactatatataaagttagtagttctaatatccacttgagagtatactcaagattgattttcatggccatttggcatgattgcatgaattctctattcttttatgtgcagtttttctatagaaaaacattaaaagttaaatgttgactgctaatgttttctgaagtggcatagtctagtggaatcaataatcccttgctttggtataataatttgaacttttgaaagtgctttctcatccgttatctcttatcttcacaaaacccctgtggaagaaagcacaattattcccaatctgcagagggggaaatggaggccttcagagattacaggaccagataccaggtagtggaaccagacagcaggtccttaacttctctccagtggactccctgctttgcctactctctagcaactgacttggggaagtttttaaatggtgagagtgtgtctctgggggcaaccattgaaaagaagactctgatatgttggaacaagtaagggatttgaatgaaatacactattatatcttatatgttagcttgaaccagaaaaagttgacatttttgtaggtcaaaaacaattgagcatcaatttcatatggttcaacctcatatatgatactatgcttttcttctatcagtgaaaatgtcatcatcaattccattgtcaacattagtagccttaaaacaataacataataataatgatgataatgatacttatagctatcatctattaaatgcctatgtttcaggcatgatactaggcaatttatatatatcatcctaatctttctaaaaactctattaggtggccctatccacttaatagatgccaattcaaagaggttaaatgattagactaaggcacctaacttatgtgagtgtcaggcttcaatgcctgtgttagagctactccttcacacaaaatagttcagaacatagagaaggaccaaggttaataaatgattttcatcccaaacactaaacatgattgatgggtagaggctgcccgaagtactgtgtaaagatggaatctgagatagaagaatgctgtggtcaattagtaattcttgcccatggagggattagtgacacatgccttgtatatttgtcatctgtggcctaaactctgcccctgaaggtttgttttctaattcagaggtttaaattaatctagcccacttaataaaaccagagatcctatgggaaatttagcctaagacagtgctggaaattgccatatgttgatacaaagaagtgtttggccacattacaggtctcagactcaactgctatgtgtgactgccgctctgtgcctatgtcttgcttttttgctgagttccctatttccatatctccaggtgaatccatgagaagcgagagggtggctgagaggcctgggcctctgggattccaccttgctatctctgctcttcaaccattgttttagactctgaacaccagatcctcatatctgaaagtgatttggagacctgggcatcaagtgctcttttaagaaggggctatcccagaggactgttcaaaagtctcattcaatagagatgttggagtccagaacaaagttagggagcaaaccagtaacctatgctggtcgtaacagaggatcctacaattacgtttgtttttaagacaggattttgctgtgttgcccagactggtctcaaactcctgggttcaagagatccatcctcccacctcagtctcctgaaagctgggatgacaggcacatgccaccacacctagctccttacaaccatttattttaacttatttcatttataactggtatctttcatttgtatgtggcagctagagatttatataggatggaagtaatttatttttaatttaaatatttcatgttgaactgtttgccttgtatggaacattttacttggccaattcaaataaaaataaagtcagctttgtttgtgacattcatgcaccaccataa

SEQ ID NO: 2543 - DNA, 3227 bp, Homo sapiens
  source 1..3227: mol_type = unassigned DNA; mol_type = unassigned DNA
agccagactggattaggatgcctcgcgactaggggtccagagacagaggcctccagttcccaggcacttcgggaagaggaggctgaaatgatgcatcagatttacagctgcagtgacgagaacatagaagttttcaccaccgtgattccttccaaggtatccagtccagccagaagaagagccaaaagctctcagcacctcttgaccaagaatactctacttgaccaagggtaactgaaaccatagatgaaagggactactgtatactatcagcaaatcctgagaagctgcagaagagaggggttaggtggtgatcgagtcggacctgtacacgcaccagcccctggagctgctgccccaccgcggagaccgcagggaccctggcgaccgccgcaggtttgggcggctccagaccgcgcggccgcccacagcccacccggccaaagcctctgccagacccgtggggatttctgaacccaaaacatcaaatctgtgtgggaatcgagcatatggaaaatctctgataccgccagtgccccggatctcagtgaaaacttcagcctctgcctcattggaggcgacagccatgggcacagagaagggagctgttctgatgagaggatccagacatctcaagaagatgactgaagagtatccagcccttccccaaggagcagaagcctctctaccactgacaggcagtgcttcctgcggcgtccccggcatcctccggaaaatgtggacaaggcacaagaagaagtctgaatatgtgggagccaccaacagcgcctttgaggccgactaaaggtgaccctcttcaagtgccctgtgttggccaaggttccccggacaagaggaaaaaccttcaggattgaaactgagccacacgcacctctgctagtagctggtccaaacccattatcctccctcactcattgattaccctgggatagggcacaggaaagaaatgtccctcgaaggcaatataaaactgccccttcttagaattgctaaagccattggtctgaaagtgactttgggaggtcataaagtttgtatctctatctttaagcaaaaaattaaactttcccagctcattttaaagacctccaaggaaggaaaaaagcaattcctctgtcttccttgtgagttgctctaaagtgtgtgattttctagtgtaaatggactttgaggcacttgtaaacacaatggttcttactgtttccattactgcatttacttcaccttgacaaggtacaattttcaaggacaaagcactatatataaagttagtagttctaatatccacttgagagtatactcaagattgattttcatggccatttggcatgattgcatgaattctctattcttttatgtgcagtttttctatagaaaaacattaaaagttaaatgttgactgctaatgttttctgaagtggcatagtctagtggaatcaataatcccttgctttggtataataatttgaacttttgaaagtgctttctcatccgttatctcttatcttcacaaaacccctgtggaagaaagcacaattattcccaatctgcagagggggaaatggaggccttcagagattacaggaccagataccaggtagtggaaccagacagcaggtccttaacttctctccagtggactccctgctttgcctactctctagcaactgacttggggaagtttttaaatggtgagagtgtgtctctgggggcaaccattgaaaagaagactctgatatgttggaacaagtaagggatttgaatgaaatacactattatatcttatatgttagcttgaaccagaaaaagttgacatttttgtaggtcaaaaacaattgagcatcaatttcatatggttcaacctcatatatgatactatgcttttcttctatcagtgaaaatgtcatcatcaattccattgtcaacattagtagccttaaaacaataacataataataatgatgataatgatacttatagctatcatctattaaatgcctatgtttcaggcatgatactaggcaatttatatatatcatcctaatctttctaaaaactctattaggtggccctatccacttaatagatgccaattcaaagaggttaaatgattagactaaggcacctaacttatgtgagtgtcaggcttcaatgcctgtgttagagctactccttcacacaaaatagttcagaacatagagaaggaccaaggttaataaatgattttcatcccaaacactaaacatgattgatgggtagaggctgcccgaagtactgtgtaaagatggaatctgagatagaagaatgctgtggtcaattagtaattcttgcccatggagggattagtgacacatgccttgtatatttgtcatctgtggcctaaactctgcccctgaaggtttgttttctaattcagaggtttaaattaatctagcccacttaataaaaccagagatcctatgggaaatttagcctaagacagtgctggaaattgccatatgttgatacaaagaagtgtttggccacattacaggtctcagactcaactgctatgtgtgactgccgctctgtgcctatgtcttgcttttttgctgagttccctatttccatatctccaggtgaatccatgagaagcgagagggtggctgagaggcctgggcctctgggattccaccttgctatctctgctcttcaaccattgttttagactctgaacaccagatcctcatatctgaaagtgatttggagacctgggcatcaagtgctcttttaagaaggggctatcccagaggactgttcaaaagtctcattcaatagagatgttggagtccagaacaaagttagggagcaaaccagtaacctatgctggtcgtaacagaggatcctacaattacgtttgtttttaagacaggattttgctgtgttgcccagactggtctcaaactcctgggttcaagagatccatcctcccacctcagtctcctgaaagctgggatgacaggcacatgccaccacacctagctccttacaaccatttattttaacttatttcatttataactggtatctttcatttgtatgtggcagctagagatttatataggatggaagtaatttatttttaatttaaatatttcatgttgaactgtttgccttgtatggaacattttacttggccaattcaaataaaaataaagtcagctttg

SEQ ID NO: 2544 - DNA, 582 bp, Homo sapiens
  source 1..582: mol_type = unassigned DNA; mol_type = unassigned DNA
aggggtccagagacagaggcctccagttcccaggcacttcgggaagaggaggctgaaatgatgcatcagatttacagctgcagtgacgagaacatagaagttttcaccaccgtgattccttccaaggtatccagtccagccagaagaagagccaaaagctctcagcacctcttgaccaagaatgtggtgatcgagtcggacctgtacacgcaccagcccctggagctgctgccccaccgcggagaccgcagggaccctggcgaccgccgcaggtttgggcggctccagaccgcgcggccgcccacagcccacccggccaaagcctctgccagacccgtggggatttctgaacccaaaacatcaaatctgtgtgggaatcgagcatatggaaaatctctggtaagtaaaataagcctgcttagttgtatctgttgtgcattaaacttctggtcatgtctgattctcctgtgccatgaagagagactcagtgttctttgttccaggcctgaggattattagaaaagcataactggcagttctttgctcccaaaagctctcagttggccctaatttgtacccttg

SEQ ID NO: 2545 - DNA, 1347 bp, Homo sapiens
  source 1..1347: mol_type = unassigned DNA; mol_type = unassigned DNA
agaggcctccagttcccaggcacttcgggaagaggaggctgaaatgatgcatcagatttacagctgcagtgacgagaacatagaagttttcaccaccgtgattccttccaaggtatccagtccagccagaagaagagccaaaagctctcagcacctcttgaccaagaatgtggtgatcgagtcggacctgtacacgcaccagcccctggagctgctgccccaccgcggagaccgcagggaccctggcgaccgccgcaggtttgggcggctccagaccgcgcggccgcccacagcccacccggccaaagcctctgccagacccgataccgccagtgccccggatctcagtgaaaacttcagcctctgcctcattggaggcgacagccatgggcacagagaagggagctgttctgatgagaggatccagacatctcaagaagatgactgaagagtatccagcccttccccaaggagcagaagcctctctaccactgacaggcagtgcttcctgcggcgtccccggcatcctccggaaaatgtggacaaggcacaagaagaagtctgaatatgtgggagccaccaacagcgcctttgaggccgactaaaggtgaccctcttcaagtgccctgtgttggccaaggttccccggacaagaggaaaaaccttcaggattgaaactgagccacacgcacctctgctagtagctggtccaaacccattatcctccctcactcattgattaccctgggatagggcacaggaaagaaatgtccctcgaaggcaatataaaactgccccttcttagaattgctaaagccattggtctgaaagtgactttgggaggtcataaagtttgtatctctatctttaagcaaaaaattaaactttcccagctcattttaaagacctccaaggaaggaaaaaagcaattcctctgtcttccttgtgagttgctctaaagtgtgtgattttctagtgtaaatggactttgaggcacttgtaaacacaatggttcttactgtttccattactgcatttacttcaccttgacaaggtacaattttcaaggacaaagcactatatataaagttagtagttctaatatccacttgagagtatactcaagattgattttcatggccatttggcatgattgcatgaattctctattcttttatgtgcagtttttctatagaaaaacattaaaagttaaatgttgactgctaatgttttctgaagtggcatagtctagtggaatcaataatcccttgctttggtataataatttgaacttttgaaagtgctttctcatccgttatctcttatcttcacaaaacccctgtggaa

SEQ ID NO: 2546 - DNA, 865 bp, Homo sapiens
  source 1..865: mol_type = unassigned DNA; mol_type = unassigned DNA
acttcgggaagaggaggctgaaatgatgcatcagatttacagctgcagtgacgagaacatagaagttttcaccaccgtgattccttccaaggtatccagtccagccagaagaagagccaaaagctctcagcacctcttgaccaagaatgtggtgatcgagtcggacctgtacacgcaccagcccctggagctgctgccccaccgcggagaccgcagggaccctggcgaccgccgcaggtttgggcggctccagaccgcgcggccgcccacagcccacccggccaaagcctctgccagacccgtggggatttctgaacccaaaacatcaaatctgtgtgggaatcgagcatatggaaaatctctgataccgccagtgccccggatctcagtgaaaacttcagcctctgcctcattggaggcgacagccatgggcacagagaagggagctgttctgatgagagggtaagtgctgcgtctctggccccactgcctgtggcctcccactgtcctgatccttccttccccagaagagcaccaggccgcctggttgacagaccctcgagaggccaacacaaacccatgccagctgcaaattatcttttaatgaggccaataatcctgggtctctgcagcgcctcatcaactgtttccctaggattaagcaggagggtttttcatggtttccacttcattaacgccactctttaggcttggagaagtcatttgggaggttttttggttaattagatgaatgtaatcacgagccatattcagaacctcccataggcatgcaggcgtcagaaatatctcatgagtaagttcaagatcccctgcccaccggttaagaagtgtgtcaagtacaaag

SEQ ID NO: 2547 - DNA, 565 bp, Homo sapiens
  source 1..565: mol_type = unassigned DNA; mol_type = unassigned DNA
gatgcatcagatttacagctgcagtgacgagaacatagaagttttcaccaccgtgattccttccaaggtatccagtccagccagaagaagagccaaaagctctcagcacctcttgaccaagaatgtggtgatcgagtcggacctgtacacgcaccagcccctggagctgctgccccaccgcggagaccgcagggaccctggcgaccgccgcaggtttgggcggctccagaccgcgcggccgcccacagcccacccggccaaagcctctgccagacccgtggggatttctgaacccaaaacatcaaatctgtgtgggaatcgagcatatggaaaatctctgataccgccagtgccccggatctcagtgaaaacttcagcctctgcctcattggaggcgacagccatgggcacagagaagggagctgttctgatgagaggacagtgagtcttcaactcgattcagcacatacctgtatgccctggactacatcctccacaccgcaggcagcagaaaaggcgtttcagggtggtgaagggttgggttattttctcagatctgctttct

SEQ ID NO: 2548 - DNA, 536 bp, Homo sapiens
  source 1..536: mol_type = unassigned DNA; mol_type = unassigned DNA
acattcaaacaattcctttcttcccctgtgtcagccgctgacagggccattgcacagtggggcagggagagattccgtttggccacaaagagacagcctgcaggacataaattaagctttagacatttactgccagatccagagagagggaaaagagctgggagtctgctgcccacgtgcaggagttggaattccctctggaaactctgaaagtccaagttgaccctcggaatcagcagtttcgcttttgggtggaactcctcttacccctggatgttcacggtggcattgattctaagaaggcacaactgaaaataacctgagtgtccatgaagaggggaatggttaaaatgtggtgctgtcatgctgtggaatactatacaatgtcaacaggaataaactagatgtatgcctgtgaacataggtagatctaagcataatgctgagtgccaaataagcaggctgaaaaattatatattatccagtccagccagaagaagagccaaaagctctcagcacctcttgaccaagaatgt

SEQ ID NO: 2549 - DNA, 590 bp, Homo sapiens; identical to SEQ ID NO: 2534
  source 1..590: mol_type = unassigned DNA; mol_type = unassigned DNA

SEQ ID NO: 2550 - DNA, 570 bp, Homo sapiens; identical to SEQ ID NO: 2535
  source 1..570: mol_type = unassigned DNA; mol_type = unassigned DNA

SEQ ID NO: 2551 - DNA, 478 bp, Homo sapiens; identical to SEQ ID NO: 2536
  source 1..478: mol_type = unassigned DNA; mol_type = unassigned DNA

SEQ ID NO: 2552 - DNA, 305 bp, Homo sapiens; identical to SEQ ID NO: 2537
  source 1..305: mol_type = unassigned DNA; mol_type = unassigned DNA

SEQ ID NO: 2553 - DNA, 208 bp, Homo sapiens; identical to SEQ ID NO: 2538
  source 1..208: mol_type = unassigned DNA; mol_type = unassigned DNA

SEQ ID NO: 2554 - DNA, 3513 bp, Homo sapiens; identical to SEQ ID NO: 2539
  source 1..3513: mol_type = unassigned DNA; mol_type = unassigned DNA

SEQ ID NO: 2555 - DNA, 557 bp, Homo sapiens; identical to SEQ ID NO: 2540
  source 1..557: mol_type = unassigned DNA; mol_type = unassigned DNA

SEQ ID NO: 2556 - DNA, 346 bp, Homo sapiens; identical to SEQ ID NO: 2541
  source 1..346: mol_type = unassigned DNA; mol_type = unassigned DNA

SEQ ID NO: 2557 - DNA, 3313 bp, Homo sapiens; identical to SEQ ID NO: 2542
  source 1..3313: mol_type = unassigned DNA; mol_type = unassigned DNA

SEQ ID NO: 2558 - DNA, 3227 bp, Homo sapiens; identical to SEQ ID NO: 2543
  source 1..3227: mol_type = unassigned DNA; mol_type = unassigned DNA

SEQ ID NO: 2559 - DNA, 582 bp, Homo sapiens; identical to SEQ ID NO: 2544
  source 1..582: mol_type = unassigned DNA; mol_type = unassigned DNA

SEQ ID NO: 2560 - DNA, 1347 bp, Homo sapiens; identical to SEQ ID NO: 2545
  source 1..1347: mol_type = unassigned DNA; mol_type = unassigned DNA

SEQ ID NO: 2561 - DNA, 865 bp, Homo sapiens; identical to SEQ ID NO: 2546
  source 1..865: mol_type = unassigned DNA; mol_type = unassigned DNA

SEQ ID NO: 2562 - DNA, 565 bp, Homo sapiens; identical to SEQ ID NO: 2547
  source 1..565: mol_type = unassigned DNA; mol_type = unassigned DNA

SEQ ID NO: 2563 - DNA, 536 bp, Homo sapiens; identical to SEQ ID NO: 2548
  source 1..536: mol_type = unassigned DNA; mol_type = unassigned DNA

SEQ ID NO: 2564 - DNA, 873 bp, Homo sapiens
  source 1..873: mol_type = unassigned DNA; mol_type = unassigned DNA
gagacgccgaatcttggtacttacgttcctgccgggcaggacaggtgcatagggaactcctcagaggtctgtacctcgagggctcccatggatagccttgacagatcctgccaggactggtgcgacaggaagcaacactggttggagatcggaccaccggacttggtggagcgcaagggctccctgaccctccgctcccatcacaagaaatactcgaagccggtgttggtgtattcctggcaccgtgacagagaagcttttcccaaaggttatgatatagagggtcctgagaaagttaaaaaactgtgtaattcaacatatcggcgactgggaaccgatgaatccccaatttggacatcagaaacacatgaaaagttgtcacaaatgtgtttaaacacagaatgggttgaaatgaagagcaaggctttattgaatgaggaaacagtgagctccgggattatcgaaagggtcaccggattgcctgccacaggttttggagctgtctttcctagacatccaccggattggagcaaaatgtgtgcattgacaacgtactcagaagattatgttccaccatatgattatcagccacatgcttatccctgtcaagatgattattccatagtccacagaaaatgccgttctcagttcacggatctaaatggttctaaaagatttggcatcaacacttggcatgatgagagtgggatttatgctaattcagatgtaaaacagaaactctatcccttgactagtgggcctattgtgccaatttaaaaataatgtatagaatcagcatctctgactaatgaaaaatggatgtagcagttgatgattttctatcttaataaatgcaatggaagtgttactata

SEQ ID NO: 2565 - DNA, 748 bp, Homo sapiens
  source 1..748: mol_type = unassigned DNA; mol_type = unassigned DNA
ggcaggacaggtgcatagggaactcctcagaggtctgtacctcgagggctcccatggatagccttgacagatcctgccaggactggtgcgacaggaagcaacactggttggagatcggaccaccggacttggtggagcgcaagggctccctgaccctccgctcccatcacaagaaatactcgaagccggtgttggtgtattcctggcaccgtgacagagaagcttttcccaaaggttatgatatagagggtcctgagaaagttaaaaaactgtgtaattcaacatatcggcgactgggaaccgatgaatccccaatttggacatcagaaacacatgaaaagttgtcacaaatgtgtttaaacacagaatgggttgaaatgaagagcaaggctttattgaatgaggaaacagtgagctccgggattatcgaaagggtcaccggattgcctgccacaggttttggagctgtctttcctagacatccaccggattggagcaaaatgcttatccctgtcaagatgattattccatagtccacagaaaatgccgttctcagttcacggatctaaatggttctaaaagatttggcatcaacacttggcatgatgagagtgggatttatgctaattcagatgtaaaacagaaactctatcccttgactagtgggcctattgtgccaatttaaaaataatgtatagaatcagcatctctgactaatgaaaaatggatgtagcagttgatgattttc

SEQ ID NO: 2566 - DNA, 697 bp, Homo sapiens
  source 1..697: mol_type = unassigned DNA; mol_type = unassigned DNA
ggcaggacaggtgcatagggaactcctcagaggtctgtacctcgagggctcccatggatagccttgacagatcctgccaggactggtgcgacaggaagcaacactggttggagatcggaccaccggacttggtggagcgcaagggctccctgaccctccgctcccatcacaagaaatactcgaagccggtgttggtgtattcctgatttggacatcagaaacacatgaaaagttgtcacaaatgtgtttaaacacagaatgggttgaaatgaagagcaaggctttattgaatgaggaaacagtgagctccgggattatcgaaagggtcaccggattgcctgccacaggttttggagctgtctttcctagacatccaccggattggagcaaaatgtgtgcattgacaacgtactcagaagattatgttccaccatatgattatcagccacatgcttatccctgtcaagatgattattccatagtccacagaaaatgccgttctcagttcacggatctaaatggttctaaaagatttggcatcaacacttggcatgatgagagtgggatttatgctaattcagatgtaaaacagaaactctatcccttgactagtgggcctattgtgccaatttaaaaataatgtatagaatcagcatctctgactaatgaaaaatggatgtagcagttgatgattttc

SEQ ID NO: 2567 - DNA, 825 bp, Homo sapiens
  source 1..825: mol_type = unassigned DNA; mol_type = unassigned DNA
gcaggacaggtgcatagggaactcctcagaggtctgtacctcgagggctcccatggatagccttgacagatcctgccaggactggtgcgacaggaagcaacactggttggagatcggaccaccggacttggtggagcgcaagggctccctgaccctccgctcccatcacaagaaatactcgaagccggtgttggtgtattcctgatttggacatcagaaacacatgaaaagttgtcacaaatgtgtttaaacacagaatgggttgaaatgaagagcaaggctttattgaatgaggaaacagtgagctccgggattatcgaaagggtcaccggattgcctgccacaggttttggagctgtctttcctagacatccaccggattggagcaaaatgtgtgcattgacaacgtactcagaagattatgttccaccatatgattatcagccacatgttcttccctatcttcctcctcttcatttcaactcttctctaagccttcatagcaaaggatattttctctacccatttggagaactctataatctcccaggtttgatcattgacattctaaagtcctcaaaactgcttatccctgtcaagatgattattccatagtccacagaaaatgccgttctcagttcacggatctaaatggttctaaaagatttggcatcaacacttggcatgatgagagtgggatttatgctaattcagatgtaaaacagaaactctatcccttgactagtgggcctattgtgccaatttaaaaataatgtatagaatcagcatctctgactaatgaaaaatggatgtagcagttgatga

SEQ ID NO: 2568 - DNA, 794 bp, Homo sapiens
  source 1..794: mol_type = unassigned DNA; mol_type = unassigned DNA
gcaggacaggtgcatagggaactcctcagaggtctgtacctcgagggctcccatggatagccttgacagatcctgccaggactggtgcgacaggaagcaacactggttggagatcggaccaccggacttggtggagcgcaagggctccctgaccctccgctcccatcacaagaaatactcgaagccggtgttggtgtattcctgatttggacatcagaaacacatgaaaagttgtcacaaatgtgtttaaacacagaatgggttgaaatgaagagcaaggctttattgaatgaggaaacagtgagctccgggattatcgaaagggtcaccggattgcctgccacaggttttggagctgtctttcctagacatccaccggattggagcaaaatgtactgctgctactactcaggaaatcaccacaacctgagggcctggcaagaattggtggttaccacccaggtgtgcattgacaacgtactcagaagattatgttccaccatatgattatcagccacatgcttatccctgtcaagatgattattccatagtccacagaaaatgccgttctcagttcacggatctaaatggttctaaaagatttggcatcaacacttggcatgatgagagtgggatttatgctaattcagatgtaaaacagaaactctatcccttgactagtgggcctattgtgccaatttaaaaataatgtatagaatcagcatctctgactaatgaaaaatggatgtagcagttgatgattttctatcttaataaatgcaatggaagtgtta

SEQ ID NO: 2569 - DNA, 502 bp, Homo sapiens
  source 1..502: mol_type = unassigned DNA; mol_type = unassigned DNA
ggaagcaacactggttggagatcggaccaccggacttggtggagcgcaagggctccctgaccctccgctcccatcacaagaaatactcgaagccggtgttggtgtattcctgatttggacatcagaaacacatgaaaagttgtcacaaatgtgtttaaacacagaatgggttgaaatgaagagcaaggctttattgaatgaggaaacagtgagctccgggattatcgaaagggtcaccggattgcctgccacaggttttggagctgtctttcctagacatccaccggattggagcaaaatgttagtagtccctaaactgctacaactgtacaaaatgtttcttgattcagaaggtttgtttgcaggggcaaaggtatgacagggtgagccaaggtcaacaaaatgccctttacatgacatcttcgacttgcctttaaccaaatgttttctcctttcacatgcacaacattaataaccgtaataataaaacagtaaatcctca

SEQ ID NO: 2570 - DNA, 550 bp, Homo sapiens
  source 1..550: mol_type = unassigned DNA; mol_type = unassigned DNA
ggagcgcaagggctccctgaccctccgctcccatcacaagaaatactcgaagccggtgttggtgtattcctggcaccgtgacagagaagcttttcccaaaggttatgatatagagggtcctgagaaagttaaaaaactgtgtaattcaacatatcggcgactgggaaccgatgaatccccaatttggacatcagaaacacatgaaaagttgtcacaaatgtgtttaaacacagaatgggttgaaatgaagagcaaggctttattgaatgaggaaacagtgagctccgggattatcgaaagggtcaccggattgcctgccacaggttttggagctgtctttcctagacatccaccggattggagcaaaatgttagtagtccctaaactgctacaactgtacaaaatgtttcttgattcagaaggtttgtttgcaggggcaaaggtatgacagggtgagccaaggtcaacaaaatgccctttacatgacatcttcgacttgcctttaaccaaatgttttctcctttcacatgcacaacattaataaccgtaa

SEQ ID NO: 2571 - DNA, 3200 bp, Homo sapiens
  source 1..3200: mol_type = unassigned DNA; mol_type = unassigned DNA
gcgcaggcggtggcgagtggatatctccggagcatttggataatgtgacagttggaatgcagtgatgtcgactctttgcccaccgccatctccagctgttgccaagacagagattgctttaagtggcaaatcacctttattagcagctacttttgcttactgggacaatattcttggtcctagagtaaggcacatttgggctccaaagacagaacaggtacttctcagtgatggagaaataacttttcttgccaaccacactctaaatggagaaatccttcgaaatgcagagagtggtgctatagatgtaaagttttttgtcttgtctgaaaagggagtgattattgtttcattaatctttgatggaaactggaatggggatcgcagcacatatggactatcaattatacttccacagacagaacttagtttctacctcccacttcatagagtgtgtgttgatagattaacacatataatccggaaaggaagaatatggatgcataaggaaagacaagaaaatgtccagaagattatcttagaaggcacagagagaatggaagatcagggtcagagtattattccaatgcttactggagaagtgattcctgtaatggaactgctttcatctatgaaatcacacagtgttcctgaagaaatagatatagctgatacagtactcaatgatgatgatattggtgacagctgtcatgaaggctttcttctcaatgccatcagctcacacttgcaaacctgtggctgttccgttgtagtaggtagcagtgcagagaaagtaaataagatagtcagaacattatgcctttttctgactccagcagagagaaaatgctccaggttatgtgaagcagaatcatcatttaaatatgagtcagggctctttgtacaaggcctgctaaaggattcaactggaagctttgtgctgcctttccggcaagtcatgtatgctccatatcccaccacacacatagatgtggatgtcaatactgtgaagcagatgccaccctgtcatgaacatatttataatcagcgtagatacatgagatccgagctgacagccttctggagagccacttcagaagaagacatggctcaggatacgatcatctacactgacgaaagctttactcctgatttgaatatttttcaagatgtcttacacagagacactctagtgaaagccttcctggatcaggtctttcagctgaaacctggcttatctctcagaagtactttccttgcacagtttctacttgtccttcacagaaaagccttgacactaataaaatatatagaagacgatacgcagaagggaaaaaagccctttaaatctcttcggaacctgaagatagaccttgatttaacagcagagggcgatcttaacataataatggctctggctgagaaaattaaaccaggcctacactcttttatctttggaagacctttctacactagtgtgcaagaacgagatgttctaatgactttttaaatgtgtaacttaataagcctattccatcacaatcatgatcgctggtaaagtagctcagtggtgtggggaaacgttcccctggatcatactccagaattctgctctcagcaattgcagttaagtaagttacactacagttctcacaagagcctgtgaggggatgtcaggtgcatcattacattgggtgtctcttttcctagatttatgcttttgggatacagacctatgtttacaatataataaatattattgctatcttttaaagatataataataggatgtaaacttgaccacaactactgtttttttgaaatacatgattcatggtttacatgtgtcaaggtgaaatctgagttggcttttacagatagttgactttctatcttttggcattctttggtgtgtagaattactgtaatacttctgcaatcaactgaaaactagagcctttaaatgatttcaattccacagaaagaaagtgagcttgaacataggatgagctttagaaagaaaattgatcaagcagatgtttaattggaattgattattagatcctactttgtggatttagtccctgggattcagtctgtagaaatgtctaatagttctctatagtccttgttcctggtgaaccacagttagggtgttttgtttattttattgttcttgctattgttgatattctatgtagttgagctctgtaaaaggaaattgtattttatgttttagtaattgttgccaactttttaaattaattttcattatttttgagccaaattgaaatgtgcacctcctgtgccttttttctccttagaaaatctaattacttggaacaagttcagatttcactggtcagtcattttcatcttgttttcttcttgctaagtcttaccatgtacctgctttggcaatcattgcaactctgagattataaaatgccttagagaatatactaactaataagatctttttttcagaaacagaaaatagttccttgagtacttccttcttgcatttctgcctatgtttttgaagttgttgctgtttgcctgcaataggctataaggaatagcaggagaaattttactgaagtgctgttttcctaggtgctactttggcagagctaagttatcttttgttttcttaatgcgtttggaccattttgctggctataaaataactgattaatataattctaacacaatgttgacattgtagttacacaaacacaaataaatattttatttaaaattctggaagtaatataaaagggaaaatatatttataagaaagggataaaggtaatagagcccttctgccccccacccaccaaatttacacaacaaaatgacatgttcgaatgtgaaaggtcataatagctttcccatcatgaatcagaaagatgtggacagcttgatgttttagacaaccactgaactagatgactgttgtactgtagctcagtcatttaaaaaatatataaatactaccttgtagtgtcccatactgtgttttttacatggtagattcttatttaagtgctaactggttattttctttggctggtttattgtactgttatacagaatgtaagttgtacagtgaaataagttattaaagcatgtgtaaacattgttatatatcttttctcctaaatggagaattttgaataaaatatatttgaaatttt

SEQ ID NO: 2572 - DNA, 4808 bp, Homo sapiens
  source 1..4808: mol_type = unassigned DNA; mol_type = unassigned DNA
gcaggcggtggcgagtggatatctccggagcatttggataatgtgacagttggaatgcagtgatgtcgactctttgcccaccgccatctccagctgttgccaagacagagattgctttaagtggcaaatcacctttattagcagctacttttgcttactgggacaatattcttggtcctagagtaaggcacatttgggctccaaagacagaacaggtacttctcagtgatggagaaataacttttcttgccaaccacactctaaatggagaaatccttcgaaatgcagagagtggtgctatagatgtaaagttttttgtcttgtctgaaaagggagtgattattgtttcattaatctttgatggaaactggaatggggatcgcagcacatatggactatcaattatacttccacagacagaacttagtttctacctcccacttcatagagtgtgtgttgatagattaacacatataatccggaaaggaagaatatggatgcataaggaaagacaagaaaatgtccagaagattatcttagaaggcacagagagaatggaagatcagggtcagagtattattccaatgcttactggagaagtgattcctgtaatggaactgctttcatctatgaaatcacacagtgttcctgaagaaatagatatagctgatacagtactcaatgatgatgatattggtgacagctgtcatgaaggctttcttctcaatgccatcagctcacacttgcaaacctgtggctgttccgttgtagtaggtagcagtgcagagaaagtaaataaggtagtttattttataatctagcaaatgatttgactctttaagactgatgatatatcatggattgtcatttaaatggtaggttgcaattaaaatgatctagtagtataaggaggcaatgtaatctcatcaaattgctaagacaccttgtggcaacagtgagtttgaaataaactgagtaagaatcatttatcagtttattttgatagctcggaaataccagtgtcagtagtgtataaatggttttgagaatatattaaaatcagatatataaaaaaaattactcttctatttcccaatgttatctttaacaaatctgaagatagtcatgtacttttggtagtagttccaaagaaatgttatttgtttattcatcttgatttcattgtcttcgctttccttctaaatctgtcccttctagggagctattgggattaagtggtcattgattattatactttattcagtaatgtttctgaccctttccttcagtgctacttgagttaattaaggattaatgaacagttacatttccaagcattagctaataaactaaaggattttgcacttttcttcactgaccattagttagaaagagttcagagataagtatgtgtatctttcaatttcagcaaacctaattttttaaaaaaagttttacataggaaatatgttggaaatgatactttacaaagatattcataatttttttttgtaatcagctactttgtatatttacatgagccttaatttatatttctcatataaccatttatgagagcttagtatacctgtgtcattatattgcatctacgaactagtgaccttattccttctgttacctcaaacaggtggctttccatctgtgatctccaaagccttaggttgcacagagtgactgccgagctgctttatgaagggagaaaggctccatagttggagtgtttttttttttttttttaaacatttttcccatcctccatcctcttgagggagaatagcttaccttttatcttgttttaatttgagaaagaagttgccaccactctaggttgaaaaccactcctttaacataataactgtggatatggtttgaatttcaagatagttacatgcctttttatttttcctaatagagctgtaggtcaaatattattagaatcagatttctaaatcccacccaatgacctgcttattttaaatcaaattcaataattaattctcttctttttggaggatctggacattctttgatatttcttacaacgaatttcatgtgtagacccactaaacagaagctataaaagttgcatggtcaaataagtctgagaaagtctgcagatgatataattcacctgaagagtcacagtatgtagccaaatgttaaaggttttgagatgccatacagtaaatttaccaagcattttctaaatttatttgaccacagaatccctattttaagcaacaactgttacatcccatggattccaggtgactaaagaatacttatttcttaggatatgttttattgataataacaattaaaatttcagatatctttcataagcaaatcagtggtctttttacttcatgttttaatgctaaaatattttcttttatagatagtcagaacattatgcctttttctgactccagcagagagaaaatgctccaggttatgtgaagcagaatcatcatttaaatatgagtcagggctctttgtacaaggcctgctaaaggattcaactggaagctttgtgctgcctttccggcaagtcatgtatgctccatatcccaccacacacatagatgtggatgtcaatactgtgaagcagatgccaccctgtcatgaacatatttataatcagcgtagatacatgagatccgagctgacagccttctggagagccacttcagaagaagacatggctcaggatacgatcatctacactgacgaaagctttactcctgatttgaatatttttcaagatgtcttacacagagacactctagtgaaagccttcctggatcaggtctttcagctgaaacctggcttatctctcagaagtactttccttgcacagtttctacttgtccttcacagaaaagccttgacactaataaaatatatagaagacgatacgcagaagggaaaaaagccctttaaatctcttcggaacctgaagatagaccttgatttaacagcagagggcgatcttaacataataatggctctggctgagaaaattaaaccaggcctacactcttttatctttggaagacctttctacactagtgtgcaagaacgagatgttctaatgactttttaaatgtgtaacttaataagcctattccatcacaatcatgatcgctggtaaagtagctcagtggtgtggggaaacgttcccctggatcatactccagaattctgctctcagcaattgcagttaagtaagttacactacagttctcacaagagcctgtgaggggatgtcaggtgcatcattacattgggtgtctcttttcctagatttatgcttttgggatacagacctatgtttacaatataataaatattattgctatcttttaaagatataataataggatgtaaacttgaccacaactactgtttttttgaaatacatgattcatggtttacatgtgtcaaggtgaaatctgagttggcttttacagatagttgactttctatcttttggcattctttggtgtgtagaattactgtaatacttctgcaatcaactgaaaactagagcctttaaatgatttcaattccacagaaagaaagtgagcttgaacataggatgagctttagaaagaaaattgatcaagcagatgtttaattggaattgattattagatcctactttgtggatttagtccctgggattcagtctgtagaaatgtctaatagttctctatagtccttgttcctggtgaaccacagttagggtgttttgtttattttattgttcttgctattgttgatattctatgtagttgagctctgtaaaaggaaattgtattttatgttttagtaattgttgccaactttttaaattaattttcattatttttgagccaaattgaaatgtgcacctcctgtgccttttttctccttagaaaatctaattacttggaacaagttcagatttcactggtcagtcattttcatcttgttttcttcttgctaagtcttaccatgtacctgctttggcaatcattgcaactctgagattataaaatgccttagagaatatactaactaataagatctttttttcagaaacagaaaatagttccttgagtacttccttcttgcatttctgcctatgtttttgaagttgttgctgtttgcctgcaataggctataaggaatagcaggagaaattttactgaagtgctgttttcctaggtgctactttggcagagctaagttatcttttgttttcttaatgcgtttggaccattttgctggctataaaataactgattaatataattctaacacaatgttgacattgtagttacacaaacacaaataaatattttatttaaaattctggaagtaatataaaagggaaaatatatttataagaaagggataaaggtaatagagcccttctgccccccacccaccaaatttacacaacaaaatgacatgttcgaatgtgaaaggtcataatagctttcccatcatgaatcagaaagatgtggacagcttgatgttttagacaaccactgaactagatgactgttgtactgtagctcagtcatttaaaaaatatataaatactaccttgtagtgtcccatactgtgttttttacatggtagattcttatttaagtgctaactggttattttctttggctggtttattgtactgttatacagaatgtaagttgtacagtgaaataagttattaaagcatgtgtaaacattgttatatatcttttctcctaaatggagaattttgaataaaatatatt

SEQ ID NO: 2573 - DNA, 1873 bp, Homo sapiens
  source 1..1873: mol_type = unassigned DNA; mol_type = unassigned DNA
acgtaacctacggtgtcccgctaggaaagagaggtgcgtcaaacagcgacaagttccgcccacgtaaaagatgacgcttgatatctccggagcatttggataatgtgacagttggaatgcagtgatgtcgactctttgcccaccgccatctccagctgttgccaagacagagattgctttaagtggcaaatcacctttattagcagctacttttgcttactgggacaatattcttggtcctagagtaaggcacatttgggctccaaagacagaacaggtacttctcagtgatggagaaataacttttcttgccaaccacactctaaatggagaaatccttcgaaatgcagagagtggtgctatagatgtaaagttttttgtcttgtctgaaaagggagtgattattgtttcattaatctttgatggaaactggaatggggatcgcagcacatatggactatcaattatacttccacagacagaacttagtttctacctcccacttcatagagtgtgtgttgatagattaacacatataatccggaaaggaagaatatggatgcataaggaaagacaagaaaatgtccagaagattatcttagaaggcacagagagaatggaagatcagggtcagagtattattccaatgcttactggagaagtgattcctgtaatggaactgctttcatctatgaaatcacacagtgttcctgaagaaatagatatagctgatacagtactcaatgatgatgatattggtgacagctgtcatgaaggctttcttctcaagtaagaatttttcttttcataaaagctggatgaagcagataccatcttatgctcacctatgacaagatttggaagaaagaaaataacagactgtctacttagattgttctagggacattacgtatttgaactgttgcttaaatttgtgttatttttcactcattatatttctatatatatttggtgttattccatttgctatttaaagaaaccgagtttccatcccagacaagaaatcatggccccttgcttgattctggtttcttgttttacttctcattaaagctaacagaatcctttcatattaagttgtactgtagatgaacttaagttatttaggcgtagaacaaaattattcatatttatactgatctttttccatccagcagtggagtttagtacttaagagtttgtgcccttaaaccagactccctggattaatgctgtgtacccgtgggcaaggtgcctgaattctctatacacctatttcctcatctgtaaaatggcaataatagtaatagtacctaatgtgtagggttgttataagcattgagtaagataaataatataaagcacttagaacagtgcctggaacataaaaacacttaataatagctcatagctaacatttcctatttacatttcttctagaaatagccagtatttgttgagtgcctacatgttagttcctttactagttgctttacatgtattatcttatattctgttttaaagtttcttcacagttacagattttcatgaaattttacttttaataaaagagaagtaaaagtataaagtattcacttttatgttcacagtcttttcctttaggctcatgatggagtatcagaggcatgagtgtgtttaacctaagagccttaatggcttgaatcagaagcactttagtcctgtatctgttcagtgtcagcctttcatacatcattttaaatcccatttgactttaagtaagtcacttaatctctctacatgtcaatttcttcagctataaaatgatggtatttcaataaataaatacattaattaaatgatattatactgactaattgggctgttttaaggc

SEQ ID NO: 2574 - DNA, 777 bp, Homo sapiens
  source 1..777: mol_type = unassigned DNA; mol_type = unassigned DNA
tctcttttgggggcggggtctagcaagagcagatatctccggagcatttggataatgtgacagttggaatgcagtgatgtcgactctttgcccaccgccatctccagctgttgccaagacagagattgctttaagtggcaaatcacctttattagcagctacttttgcttactgggacaatattcttggtcctagagtaaggcacatttgggctccaaagacagaacaggtacttctcagtgatggagaaataacttttcttgccaaccacactctaaatggagaaatccttcgaaatgcagagagtggtgctatagatgtaaagttttttgtcttgtctgaaaagggagtgattattgtttcattaatctttgatggaaactggaatggggatcgcagcacatatggactatcaattatacttccacagacagaacttagtttctacctcccacttcatagagtgtgtgttgatagattaacacatataatccggaaaggaagaatatggatgcataaggaaagacaagaaaatgtccagaagattatcttagaaggcacagagagaatggaagatcagggtcagagtattattccaatgcttactggagaagtgattcctgtaatggaactgctttcatctatgaaatcacacagtgttcctgaagaaatagatatagctgatacagtactcaatgatgatgatattggtgacagctgtcatgaaggctttcttctcaagtaagaatttttcttttcataaaagctggatgaagc

SEQ ID NO: 2575 - DNA, 862 bp, Homo sapiens
  source 1..862: mol_type = unassigned DNA; mol_type = unassigned DNA
acgtaacctacggtgtcccgctaggaaagagaggtgcgtcaaacagcgacaagttccgcccacgtaaaagatgacgcttggtgtgtcagccgtccctgctgcccggttgcttctcttttgggggcggggtctagcaagagcaggtgtgggtttaggagatatctccggagcatttggataatgtgacagttggaatgcagtgatgtcgactctttgcccaccgccatctccagctgttgccaagacagagattgctttaagtggcaaatcacctttattagcagctacttttgcttactgggacaatattcttggtcctagagtaaggcacatttgggctccaaagacagaacaggtacttctcagtgatggagaaataacttttcttgccaaccacactctaaatggagaaatccttcgaaatgcagagagtggtgctatagatgtaaagttttttgtcttgtctgaaaagggagtgattattgtttcattaatctttgatggaaactggaatggggatcgcagcacatatggactatcaattatacttccacagacagaacttagtttctacctcccacttcatagagtgtgtgttgatagattaacacatataatccggaaaggaagaatatggatgcataaggaaagacaagaaaatgtccagaagattatcttagaaggcacagagagaatggaagatcagggtcagagtattattccaatgcttactggagaagtgattcctgtaatggaactgctttcatctatgaaatcacacagtgttcctgaagaaatagatatagctgatacagtactcaatgatgatgatattggtgacagctgtcatgaaggctttctt

SEQ ID NO: 2576 - DNA, 3339 bp, Homo sapiens
  source 1..3339: mol_type = unassigned DNA; mol_type = unassigned DNA
acgtaacctacggtgtcccgctaggaaagagaggtgcgtcaaacagcgacaagttccgcccacgtaaaagatgacgcttggtgtgtcagccgtccctgctgcccggttgcttctcttttgggggcggggtctagcaagagcaggtgtgggtttaggagatatctccggagcatttggataatgtgacagttggaatgcagtgatgtcgactctttgcccaccgccatctccagctgttgccaagacagagattgctttaagtggcaaatcacctttattagcagctacttttgcttactgggacaatattcttggtcctagagtaaggcacatttgggctccaaagacagaacaggtacttctcagtgatggagaaataacttttcttgccaaccacactctaaatggagaaatccttcgaaatgcagagagtggtgctatagatgtaaagttttttgtcttgtctgaaaagggagtgattattgtttcattaatctttgatggaaactggaatggggatcgcagcacatatggactatcaattatacttccacagacagaacttagtttctacctcccacttcatagagtgtgtgttgatagattaacacatataatccggaaaggaagaatatggatgcataaggaaagacaagaaaatgtccagaagattatcttagaaggcacagagagaatggaagatcagggtcagagtattattccaatgcttactggagaagtgattcctgtaatggaactgctttcatctatgaaatcacacagtgttcctgaagaaatagatatagctgatacagtactcaatgatgatgatattggtgacagctgtcatgaaggctttcttctcaatgccatcagctcacacttgcaaacctgtggctgttccgttgtagtaggtagcagtgcagagaaagtaaataagatagtcagaacattatgcctttttctgactccagcagagagaaaatgctccaggttatgtgaagcagaatcatcatttaaatatgagtcagggctctttgtacaaggcctgctaaaggattcaactggaagctttgtgctgcctttccggcaagtcatgtatgctccatatcccaccacacacatagatgtggatgtcaatactgtgaagcagatgccaccctgtcatgaacatatttataatcagcgtagatacatgagatccgagctgacagccttctggagagccacttcagaagaagacatggctcaggatacgatcatctacactgacgaaagctttactcctgatttgaatatttttcaagatgtcttacacagagacactctagtgaaagccttcctggatcaggtctttcagctgaaacctggcttatctctcagaagtactttccttgcacagtttctacttgtccttcacagaaaagccttgacactaataaaatatatagaagacgatacgcagaagggaaaaaagccctttaaatctcttcggaacctgaagatagaccttgatttaacagcagagggcgatcttaacataataatggctctggctgagaaaattaaaccaggcctacactcttttatctttggaagacctttctacactagtgtgcaagaacgagatgttctaatgactttttaaatgtgtaacttaataagcctattccatcacaatcatgatcgctggtaaagtagctcagtggtgtggggaaacgttcccctggatcatactccagaattctgctctcagcaattgcagttaagtaagttacactacagttctcacaagagcctgtgaggggatgtcaggtgcatcattacattgggtgtctcttttcctagatttatgcttttgggatacagacctatgtttacaatataataaatattattgctatcttttaaagatataataataggatgtaaacttgaccacaactactgtttttttgaaatacatgattcatggtttacatgtgtcaaggtgaaatctgagttggcttttacagatagttgactttctatcttttggcattctttggtgtgtagaattactgtaatacttctgcaatcaactgaaaactagagcctttaaatgatttcaattccacagaaagaaagtgagcttgaacataggatgagctttagaaagaaaattgatcaagcagatgtttaattggaattgattattagatcctactttgtggatttagtccctgggattcagtctgtagaaatgtctaatagttctctatagtccttgttcctggtgaaccacagttagggtgttttgtttattttattgttcttgctattgttgatattctatgtagttgagctctgtaaaaggaaattgtattttatgttttagtaattgttgccaactttttaaattaattttcattatttttgagccaaattgaaatgtgcacctcctgtgccttttttctccttagaaaatctaattacttggaacaagttcagatttcactggtcagtcattttcatcttgttttcttcttgctaagtcttaccatgtacctgctttggcaatcattgcaactctgagattataaaatgccttagagaatatactaactaataagatctttttttcagaaacagaaaatagttccttgagtacttccttcttgcatttctgcctatgtttttgaagttgttgctgtttgcctgcaataggctataaggaatagcaggagaaattttactgaagtgctgttttcctaggtgctactttggcagagctaagttatcttttgttttcttaatgcgtttggaccattttgctggctataaaataactgattaatataattctaacacaatgttgacattgtagttacacaaacacaaataaatattttatttaaaattctggaagtaatataaaagggaaaatatatttataagaaagggataaaggtaatagagcccttctgccccccacccaccaaatttacacaacaaaatgacatgttcgaatgtgaaaggtcataatagctttcccatcatgaatcagaaagatgtggacagcttgatgttttagacaaccactgaactagatgactgttgtactgtagctcagtcatttaaaaaatatataaatactaccttgtagtgtcccatactgtgttttttacatggtagattcttatttaagtgctaactggttattttctttggctggtttattgtactgttatacagaatgtaagttgtacagtgaaataagttattaaagcatgtgtaaacattgttatatatcttttctcctaaatggagaattttgaataaaatatatttgaaattttg

SEQ ID NO: 2577 - DNA, 1555 bp, Homo sapiens
  source 1..1555: mol_type = unassigned DNA; mol_type = unassigned DNA
ccgctgctttaagaggctgctccgcggtagcgagcggggccggagccgcagcccgaacgagcggaccgagccgaccgggcaggtgcacggctgcggggacggcagcggcatgaccggccaccacggctggggctacggccaggacgacggcccctcgcattggcacaagctgtatcccattgcccagggagatcgccaatcacccatcaatatcatctccagccaggctgtgtactctcccagcctgcaaccactggagctttcctatgaggcctgcatgtccctcagcatcaccaacaatggccactctgtccaggtagacttcaatgacagcgatgaccgaaccgtggtgactgggggccccctggaagggccctaccgcctcaagcagtttcacttccactggggcaagaagcacgatgtgggttctgagcacacggtggacggcaagtccttccccagcgagctgcatctggttcactggaatgccaagaagtacagcacttttggggaggcggcctcagcacctgatggcctggctgtggttggtgtttttttggagacaggagacgagcaccccagcatgaatcgtctgacagatgcgctctacatggtccggttcaagggcaccaaagcccagttcagctgcttcaaccccaagtgcctcctgcctgccagccggcactactggacctacccgggctctctgacgactcccccactcagtgagagtgtcacctggattgtgctccgggagcccatctgcatctctgaaaggcagatggggaagttccggagcctgctttttacctcggaggacgatgagaggatccacatggtgaacaacttccggccaccacagccactgaagggccgcgtggtaaaggcctccttccgggcctgagctgcccatctgcctagccggccactagggcaccatcttctcaagggcttccatgtcagcagacaccaaaccatctgaggcttcctccctggggggtgctggggaccctccttcagccagtttgctccttggtcaccctggaggcttctggatgggacccttgagtctggggcacccttcagctgccctggggacaggaaggacaggagctaagcagggtccaagcctggggctgcctctgctctccaagacccaaagaccctgggaacctcctctggtcttccccactggcagtggcagcagccccaccccgagcgcacactgtgatggaggagactgagctccctggggcgggcagctgacactaccagagagactcaagcaataattagaggtgggcagagctgccctctcggcattacctcttctgcaggctctgccatgcacgcacctcactgccaggccattaaaatcagcacccagcatgctggaggtgacgtggccttctccctccagccacctgctgccacgggcaggccctggctatagcttatacagtatctccccttgtccccacccagtcaccaaagccacctacatgacagtccatccctgttgaattaataaattaatgtatccatgcaacaaata

SEQ ID NO: 2578 - DNA, 1161 bp, Homo sapiens
  source 1..1161: mol_type = unassigned DNA; mol_type = unassigned DNA
cggcaagtgagcggggacctcgggggagcggggctccgcgtggcaagggcgcagtgtcccccggagagaatttccccgcagaagtggccgagctgccttctcggccggtacgtgagggaagggggcacttgggggcgcaagcatgtgtctgggtgtctacaccgagcagggtgtttgcgcacgtccgggtgtgagtcgtgggagcccgtggcccacaccagcctcctgggctgacgcggaagagagctccttcatcctgcctcagtttccttaggactcagagaaagggagaagaggcagaaggcccctcgcattggcacaagctgtatcccattgcccagggagatcgccaatcacccatcaatatcatctccagccaggctgtgtactctcccagcctgcaaccactggagctttcctatgaggcctgcatgtccctcagcatcaccaacaatggccactctgtccaggtagacttcaatgacagcgatgaccgaaccgctgcatctggttcactggaatgccaagaagtacagcacttttggggaggcggcctcagcacctgatggcctggctgtggttggtgtttttttggagacaggagacgagcaccccagcatgaatcgtctgacagatgcgctctacatggtccggttcaagggcaccaaagcccagttcagctgcttcaaccccaagtgcctcctgcctgccagccggcactactggacctacccgggctctctgacgactcccccactcagtgagagtgtcacctggattgtgctccgggagcccatctgcatctctgaaaggcagatggggaagttccggagcctgctttttacctcggaggacgatgagaggatccacatggtgaacaacttccggccaccacagccactgaagggccgcgtggtaaaggcctccttccgggcctgagctgcccatctgcctagccggccactagggcaccatcttctcaagggcttccatgtcagcagacaccaaaccatctgaggcttcctccctggggggtgctggggaccctccttcagccagtttgctccttggtcaccctggaggcttctggatgggacccttgagtctggggcacccttcagctgccctggggacaggaaggacaggagctaagcagggtcc

SEQ ID NO: 2579 - DNA, 1713 bp, Homo sapiens
  source 1..1713: mol_type = unassigned DNA; mol_type = unassigned DNA
cggcaagtgagcggggacctcgggggagcggggctccgcgtggcaagggcgcagtgtcccccggagagaatttccccgcagaagtggccgagctgccttctcggccggtacgtgagggaagggggcacttgggggcgcaagcatgtgtctgggtgtctacaccgagcagggtgtttgcgcacgtccgggtgtgagtcgtgggagcccgtggcccacaccagcctcctgggctgacgcggaagagagctccttcatcctgcctcagtttccttaggactcagagaaagggagaagaggcagaaggcccctcgcattggcacaagctgtatcccattgcccagggagatcgccaatcacccatcaatatcatctccagccaggctgtgtactctcccagcctgcaaccactggagctttcctatgaggcctgcatgtccctcagcatcaccaacaatggccactctgtccaggtagacttcaatgacagcgatgaccgaaccgtggtgactgggggccccctggaagggccctaccgcctcaagcagtttcacttccactggggcaagaagcacgatgtgggttctgagcacacggtggacggcaagtccttccccagcgagctgcatctggttcactggaatgccaagaagtacagcacttttggggaggcggcctcagcacctgatggcctggctgtggttggtgtttttttggagacaggagacgagcaccccagcatgaatcgtctgacagatgcgctctacatggtccggttcaagggcaccaaagcccagttcagctgcttcaaccccaagtgcctcctgcctgccagccggcactactggacctacccgggctctctgacgactcccccactcagtgagagtgtcacctggattgtgctccgggagcccatctgcatctctgaaaggcagatggggaagttccggagcctgctttttacctcggaggacgatgagaggatccacatggtgaacaacttccggccaccacagccactgaagggccgcgtggtaaaggcctccttccgggcctgagctgcccatctgcctagccggccactagggcaccatcttctcaagggcttccatgtcagcagacaccaaaccatctgaggcttcctccctggggggtgctggggaccctccttcagccagtttgctccttggtcaccctggaggcttctggatgggacccttgagtctggggcacccttcagctgccctggggacaggaaggacaggagctaagcagggtccaagcctggggctgcctctgctctccaagacccaaagaccctgggaacctcctctggtcttccccactggcagtggcagcagccccaccccgagcgcacactgtgatggaggagactgagctccctggggcgggcagctgacactaccagagagactcaagcaataattagaggtgggcagagctgccctctcggcattacctcttctgcaggctctgccatgcacgcacctcactgccaggccattaaaatcagcacccagcatgctggaggtgacgtggccttctccctccagccacctgctgccacgggcaggccctggctatagcttatacagtatctccccttgtccccacccagtcaccaaagccacctacatgacagtccatccctgttgaattaataaattaatgtatccatgcaacaaataccaa

SEQ ID NO: 2580 - DNA, 1555 bp, Homo sapiens; identical to SEQ ID NO: 2577
  source 1..1555: mol_type = unassigned DNA; mol_type = unassigned DNA

SEQ ID NO: 2581 - DNA, 1161 bp, Homo sapiens; identical to SEQ ID NO: 2578
  source 1..1161: mol_type = unassigned DNA; mol_type = unassigned DNA

SEQ ID NO: 2582 - DNA, 1713 bp, Homo sapiens; identical to SEQ ID NO: 2579
  source 1..1713: mol_type = unassigned DNA; mol_type = unassigned DNA

SEQ ID NO: 2583 - DNA, 3676 bp, Homo sapiens
  source 1..3676: mol_type = unassigned DNA; mol_type = unassigned DNA
gtgacgttacaggactgaggagggaggaagtaaaagggagctgtgactgtggtacgtatctgaaagcaagtgttagagagggagtggagaacgcataagcaagctggtttgaccagaaacagaactgcctgtgacagattaagagacaagcaaggcttggaatctgagagcaagcaaagagagtggaaatttacagctgccctatgtgagtgttcaagtgatcattttctggtaacgttttccagtggtaactgttactcttcaaaaagagggacagaaagtcaagacctaattgtggaaactcttttctctgccacgcttggtaataggaggcaacctctattaaatggacgataaaggctacttcatctaaagtgctttgagctcaagaaagagctgtcttcagcacctcaccatgtgtctacattttgttgcttagaaaagcctaggcatttctgtaacatttgcattccatattggaagaagagatttctacacatgaaaaaaatgcctttgtttagtaaatcacacaaaaatccagcagaaattgtgaaaatcctgaaagacaatttggccattttggaaaagcaagacaaaaagacagacaaggcttcagaagaagtgtctaaatcactgcaagcaatgaaagaaattctgtgtggtacaaacgagaaagaacccccaacagaagcagtggctcagctagcacaagaactctacagcagtggcctgctagtgacactgatagctgacctgcagctgatagactttgagggaaaaaaagatgtgacccagatatttaacaacatcttgagaagacagataggcactcggagtcctactgtggagtatattagtgctcatcctcatatcctgtttatgctcctcaaaggatatgaagccccacagattgccttacgttgtgggattatgctgagagaatgtattcgacatgaaccacttgccaaaatcatcctcttttctaatcaattcagagatttctttaagtacgtggagttgtcaacatttgatattgcttcagatgcctttgctactttcaaggatttactaaccagacataaagtgttggtagcagacttcttagaacaaaattacgacactatttttgaagactatgagaaattgcttcagtctgagaattatgttactaagagacagtctttaaagctgctaggggagctgatcctggaccgtcacaactttgccatcatgacaaagtatatcagcaagccggagaacctgaaactcatgatgaacctccttcgggataaaagtcccaacatccagtttgaagcctttcatgtttttaaggtgtttgtggccagtcctcacaaaacacagcctattgtggagatcctgttaaaaaatcagcccaaactcattgagtttctgagcagcttccaaaaagaaaggacggatgatgagcagttcgctgacgagaagaactacttgattaaacagatccgagacttgaagaaaacggccccttgaagagctccccggcccctgtcacagtcagtcgtctcatttgtccagtttgtacagtgtgtcatttcagaaagtcatcattcttgggaagactttggaggtgcctattttttctgctgtaattgttctgggtagatggagtataaacatttgaatggaaaaaaattaacctagaataatatattcattttagtcaagtctgtgattatttatgtgaaatgagaaccattgtatcagatgttgataaaagcaattttaacttgcagatgtgagcccctgggcacaatgagccgctaaatgggagctcaattgacaggcatcaccaagtcttcaaggaggactgagttctcaggggagaactgggaatggggccagggtgcaaaaatgctttgcccatctgtaggtagacacacagatcgctcagggcactgagagatcccagaaggtaacgttaatgttttcagtcattgtgtgtcctttgttgctgccaatgtctttggactgtaatcagtgcatccacacctcccaggatccagtgctccctctcagctcagtctcccctctctccctgtcctgcattccatcccagctcctcagcatggcctcagtgggcgcacccatgcctcccgcagtccaggtgagcaggggagcaactgagcaggaagaggatggatcaacaagggtcacggggaataggggacccacggggtgtgacctgcttgctagagaactgtgaacatgtggctctggatagagtgactgctgctccatattagcttccagagggtgagtgagggacagaatatttccttcataatggtcatgggtgaatgctttctgctgtaagtgtcttttagagtaggaatcagcatagtgggatgcccagcaggcacaaaccatgggtccagggagtctcagcggggaacttctatcagtatcaataaccattggaaggagaaatgattcatgtgtgaaaaaattctcagatccatcaataaatttttttcagagccattgtatcagatgttgataaaagcaatttttttctaataagctgtcattctataattgcccatcacagtctttagtgaacacatagaaagcctatacagttttggtcctgaatagtctcttgtgactaggatgattgaggtgttaattcctcttccttataaaaaggcttggaatcaaaaatattttaaaaggccgtggtttcgtttcagacatcaaccatctaaaacgggattttaaagcgatattttacaagaatgaaaggcacaattgttgatctgtattttttacacttcagtttctaaatcatgaatcgttgccttccacaggaaccctcccttatacattacttgagtgttgtgtagtttttcttcagccaggtatttctctgcctagagaggggaagagaaatgtgttctccaggactgatcccctttgtagattttgtacctgaagagttacctggcagggcaccacccttggctaggcccaggtgtgtgtttctttcttgcctggcatggaccccgaggcaggtgatgtggggcctggcgcacctccccgctttggcagctgtggcctccctggccagtgcccttgcaggaggccggccggcagcctgatgacccgtactctttagtcactgacgtcagattatttttataacgttccctgacagttcagagtcccttcgaattgcacttttctggtttcgcttatttaattaaaagagatgagtgtaagtataaaaaatgaaggtgaaataaccattggaattgtatttggttacttaatactgttccacaacatcttgggacgtctgttttcctttggagagtgaggccttgttattattcttttctgataaagaaaacattttatttcctttgggcttgcattagctctttcctagcaacccattatcccagctcagtacctttcaaacagaaaactagagtctggggttttgttgtgatctgaatttgtaagttattaatgtgaaagggggagcaggaagctccccctttgcacaaagggggatttgtttgcacaaagttcactgtaaatactgtgagaattgaattctgaaaaggtcatatttagtgatttcaaaagcacacatttaaatgaagactgactaaataaaaggtaccacaca

SEQ ID NO: 2584 - DNA, 2416 bp, Homo sapiens
  source 1..2416: mol_type = unassigned DNA; mol_type = unassigned DNA
ccgcagtggcgcccgagcgcgccgcctcccgattgactgctagcgctctcggcttgtctcgcgcactgtagctgagccaatggagttactcgtagtcgagaggccggcatcactggagtggtggcgcagctgtttcctccggatatccatcaaatattgagaagaaagaatatcaggagcaaagtgttctaagttgctgttcagaacgtaaagatgcgaaccccaaatcagtggtttgttcattcttcatgcaagagcaatgcactaaaggagagaagcaagctgtggtgatcagtgactttggtgaaagctaagaaggttcaaacaaatttgcaaatgatatacaacttctaagcattccatattggaagaagagatttctacacatgaaaaaaatgcctttgtttagtaaatcacacaaaaatccagcagaaattgtgaaaatcctgaaagacaatttggccattttggaaaagcaagacaaaaagacagacaaggcttcagaagaagtgtctaaatcactgcaagcaatgaaagaaattctgtgtggtacaaacgagaaagaacccccaacagaagcagtggctcagctagcacaagaactctacagcagtggcctgctagtgacactgatagctgacctgcagctgatagactttgagggaaaaaaagatgtgacccagatatttaacaacatcttgagaagacagataggcactcggagtcctactgtggagtatattagtgctcatcctcatatcctgtttatgctcctcaaaggatatgaagccccacagattgccttacgttgtgggattatgctgagagaatgtattcgacatgaaccacttgccaaaatcatcctcttttctaatcaattcagagatttctttaagtacgtggagttgtcaacatttgatattgcttcagatgcctttgctactttcaaggatttactaaccagacataaagtgttggtagcagacttcttagaacaaaattacgacactatttttgaagactatgagaaattgcttcagtctgagaattatgttactaagagacagtctttaaagctgctaggggagctgatcctggaccgtcacaactttgccatcatgacaaagtatatcagcaagccggagaacctgaaactcatgatgaacctccttcgggataaaagtcccaacatccagtttgaagcctttcatgtttttaaggtgtttgtggccagtcctcacaaaacacagcctattgtggagatcctgttaaaaaatcagcccaaactcattgagtttctgagcagcttccaaaaagaaaggacggatgatgagcagttcgctgacgagaagaactacttgattaaacagatccgagacttgaagaaaacggccccttgaagagctccccggcccctgtcacagtcagtcgtctcatttgtccagtttgtacagtgtgtcatttcagaaagtcatcattcttgggaagactttggaggtgcctattttttctgctgtaattgttctgggtagatggagtataaacatttgaatggaaaaaaattaacctagaataatatattcattttagtcaagtctgtgattatttatgtgaaatgagaaccattgtatcagatgttgataaaagcaattttaacttgcagatgtgagcccctgggcacaatgagccgctaaatgggagctcaattgacaggcatcaccaagtcttcaaggaggactgagttctcaggggagaactgggaatggggccagggtgcaaaaatgctttgcccatctgtaggtagacacacagatcgctcagggcactgagagatcccagaaggtaacgttaatgttttcagtcattgtgtgtcctttgttgctgccaatgtctttggactgtaatcagtgcatccacacctcccaggatccagtgctccctctcagctcagtctcccctctctccctgtcctgcattccatcccagctcctcagcatggcctcagtgggcgcacccatgcctcccgcagtccaggtgagcaggggagcaactgagcaggaagaggatggatcaacaagggtcacggggaataggggacccacggggtgtgacctgcttgctagagaactgtgaacatgtggctctggatagagtgactgctgctccatattagcttccagagggtgagtgagggacagaatatttccttcataatggtcatgggtgaatgctttctgctgtaagtgtcttttagagtaggaatcagcatagtgggatgcccagcaggcacaaaccatgggtccagggagtctcagcggggaacttctatcagtatcaataaccattggaaggagaaatgattcatgtgtgaaaaaattctcagatccatcaataaatttttttcagagccattgta

SEQ ID NO: 2585 - DNA, 1411 bp, Homo sapiens
  source 1..1411: mol_type = unassigned DNA; mol_type = unassigned DNA
gagtatatctaagtgtttcagaatacactcaaattccagaatacgtctgcaatagtgccaggcacatagtagatcttcagtggatattgaatgaatcgtgacaaatgatatgaagccccacagattgccttacgttgtgggattatgctgagagaatgtattcgacatgaaccacttgccaaaatcatcctcttttctaatcaattcagagatttctttaagtacgtggagttgtcaacatttgatattgcttcagatgcctttgctactttcaaggatttactaaccagacataaagtgttggtagcagacttcttagaacaaaattacgacactatttttgaagactatgagaaattgcttcagtctgagaattatgttactaagagacagtctttaaagctgctaggggagctgatcctggaccgtcacaactttgccatcatgacaaagtatatcagcaagccggagaacctgaaactcatgatgaacctccttcgggataaaagtcccaacatccagtttgaagcctttcatgtttttaaggtgtttgtggccagtcctcacaaaacacagcctattgtggagatcctgttaaaaaatcagcccaaactcattgagtttctgagcagcttccaaaaagaaaggacggatgatgagcagttcgctgacgagaagaactacttgattaaacagatccgagacttgaagaaaacggccccttgaagagctccccggcccctgtcacagtcagtcgtctcatttgtccagtttgtacagtgtgtcatttcagaaagtcatcattcttgggaagactttggaggtgcctattttttctgctgtaattgttctgggtagatggagtataaacatttgaatggaaaaaaattaacctagaataatatattcattttagtcaagtctgtgattatttatgtgaaatgagaaccattgtatcagatgttgataaaagcaattttaacttgcagatgtgagcccctgggcacaatgagccgctaaatgggagctcaattgacaggcatcaccaagtcttcaaggaggactgagttctcaggggagaactgggaatggggccagggtgcaaaaatgctttgcccatctgtaggtagacacacagatcgctcagggcactgagagatcccagaaggtaacgttaatgttttcagtcattgtgtgtcctttgttgctgccaatgtctttggactgtaatcagtgcatccacacctcccaggatccagtgctccctctcagctcagtctcccctctctccctgtcctgcattccatcccagctcctcagcatggcctcagtgggcgcacccatgcctcccgcagtccaggtgagcaggggagcaactgagcaggaagaggatggatcaacaagggtcacg

SEQ ID NO: 2586 - DNA, 1035 bp, Homo sapiens
  source 1..1035: mol_type = unassigned DNA; mol_type = unassigned DNA
gcttcagaagaagtgtctaaatcactgcaagcaatgaaagaaattctgtgtggtacaaacgagaaagaacccccaacagaagcagtggctcagctagcacaagaactctacagcagtggcctgctagtgacactgatagctgacctgcagctgatagactttgagggaaaaaaagatgtgacccagatatttaacaacatcttgagaagacagataggcactcggagtcctactgtggagtatattagtgctcatcctcatatcctgtttatgctcctcaaaggatatgaagccccacagattgccttacgttgtgggattatgctgagagaatgtattcgacatgaaccacttgccaaaatcatcctcttttctaatcaattcagagatttctttaagtacgtggagttgtcaacatttgatattgcttcagatgcctttgctactttcaagatttttgaagactatgagaaattgcttcagtctgagaattatgttactaagagacagtctttaaagctgctaggggagctgatcctggaccgtcacaactttgccatcatgacaaagtatatcagcaagccggagaacctgaaactcatgatgaacctccttcgggataaaagtcccaacatccagtttgaagcctttcatgtttttaaggtgtttgtggccagtcctcacaaaacacagcctattgtggagatcctgttaaaaaatcagcccaaactcattgagtttctgagcagcttccaaaaagaaaggacggatgatgagcagttcgctgacgagaagaactacttgattaaacagatccgagacttgaagaaaacggccccttgaagagctccccggcccctgtcacagtcagtcgtctcatttgtccagtttgtacagtgtgtcatttcagaaagtcatcattcttgggaagactttggaggtgcctattttttctgctgtaattgttctgggtagatggagtataaacatttgaatggaaaaaaattaacctagaataatatattcattttagtc

SEQ ID NO: 2587 - DNA, 1627 bp, Homo sapiens
  source 1..1627: mol_type = unassigned DNA; mol_type = unassigned DNA
gagccaatggagttactcgtagtcgagaggccggcatcactggagtggtggcgcagctgtttcctccggatatccatcaaatattgagaagaaagaatatcaggagcaaagtgttctaagttgctgttcagaacgtaaagatgcgaaccccaaatcagtggtttgttcattcttcatgcaagagcaatgcactaaaggagagaagcaagctgtggtgatcagtgactttggtgaaagctaagaaggttcaaacaaatttgcaaatgatatacaacttctaaggaggcaacctctattaaatggacgataaaggctacttcatctaaagtgctttgagctcaagaaagagctgtcttcagcacctcaccatgtgtctacattttgttgcttagaaaagcctaggcatttctgtaacatttgcattccatattggaagaagagatttctacacatgaaaaaaatgcctttgtttagtaaatcacacaaaaatccagcagaaattgtgaaaatcctgaaagacaatttggccattttggaaaagcaagacaaaaagacagacaaggcttcagaagaagtgtctaaatcactgcaagcaatgaaagaaattctgtgtggtacaaacgagaaagaacccccaacagaagcagtggctcagctagcacaagaactctacagcagtggcctgctagtgacactgatagctgacctgcagctgatagactttgagggaaaaaaagatgtgacccagatatttaacaacatcttgagaagacagataggcactcggagtcctactgtggagtatattagtgctcatcctcatatcctgtttatgctcctcaaaggatatgaagccccacagattgccttacgttgtgggattatgctgagagaatgtattcgacatgaaccacttgccaaaatcatcctcttttctaatcaattcagagatttctttaagtacgtggagttgtcaacatttgatattgcttcagatgcctttgctactttcaaggatttactaaccagacataaagtgttggtagcagacttcttagaacaaaattacgacactatttttgaagactatgagaaattgcttcagtctgagaattatgttactaagagacagtctttaaagctgctaggggagctgatcctggaccgtcacaactttgccatcatgacaaagtatatcagcaagccggagaacctgaaactcatgatgaacctccttcgggataaaagtcccaacatccagtttgaagcctttcatgtttttaaggtgtttgtggccagtcctcacaaaacacagcctattgtggagatcctgttaaaaaatcagcccaaactcattgagtttctgagcagcttccaaaaagaaaggacggatgatgagcagttcgctgacgagaagaactacttgattaaacagatccgagacttgaagaaaacggccccttgaagagctccccggcccctgtcacagtcagtcgtctcatttgtccagtttgtacagtgtgtcatttcagaaagtcatcattcttgggaagactttggaggtgcctattttttctgctgtaattgttctgggtagatggagtataaacatttgaatggaaaaaaa

SEQ ID NO: 2588 - DNA, 727 bp, Homo sapiens
  source 1..727: mol_type = unassigned DNA
agagagggagtggagaacgcataagcaagctggtttgaccagaaacagaactgcctgtgacagattaagagacaagcaaggcttggaatctgagagcaagcaaagagagtggaaatttacagctgccctatcattccatattggaagaagagatttctacacatgaaaaaaatgcctttgtttagtaaatcacacaaaaatccagcagaaattgtgaaaatcctgaaagacaatttggccattttggaaaagcaagacaaaaagacagacaaggcttcagaagaagtgtctaaatcactgcaagcaatgaaagaaattctgtgtggtacaaacgagaaagaacccccaacagaagcagtggctcagctagcacaagaactctacagcagtggcctgctagtgacactgatagctgacctgcagctgatagactttgagggaaaaaaagatgtgacccagatatttaacaacatcttgagaagacagataggcactcggagtcctactgtggagtatattagtgctcatcctcatatcctgtttatgctcctcaaaggatatgaagccccacagattgccttacgttgtgggattatgctgagagaatgtattcgacatgaaccacttgccaaaatcatcctcttttctaatcaattcagagatttctttaagtacgtggagttgtcaacatttgatattgcttcagatgcctttgctactttcaagg

SEQ ID NO: 2589 - DNA, 633 bp, Homo sapiens
  source 1..633: mol_type = unassigned DNA; mol_type = unassigned DNA
agcgttttgttagggaagaagtggagaacagatattggaaggcaattagctgtctctaatacattgataaaatatataactataactgcaaaatgctaataacccagcagaggagtagatttgggaacataagatgaaaaagtcaacaagtgcattgatcacaacatatggtaatgatagcgtgattgtgatgacctttgttttatacctccttttacattccatattggaagaagagatttctacacatgaaaaaaatgcctttgtttagtaaatcacacaaaaatccagcagaaattgtgaaaatcctgaaagacaatttggccattttggaaaagcaagacaaaaagacagacaaggcttcagaagaagtgtctaaatcactgcaagcaatgaaagaaattctgtgtggtacaaacgagaaagaacccccaacagaagcagtggctcagctagcacaagaactctacagcagtggcctgctagtgacactgatagctgacctgcagctgatagactttgagggaaaaaaagatgtgacccagatatttaacaacatcttgagaagacagataggcactcggagtcctactgtggagtatattagtgctcatcctcatatcctgtttatgc

SEQ ID NO: 2590 - DNA, 468 bp, Homo sapiens
  source 1..468: mol_type = unassigned DNA; mol_type = unassigned DNA
ggatttcttgtagaagccagttaaaaggagaacctagtatcacactaggcttctgaaaacaccaatcaagagttgcttaatgcaggggtcccttacccctgggctgcagacctgtacctgtccatggcctgttaggaaccgggcagcacagtaggagcattccatattggaagaagagatttctacacatgaaaaaaatgcctttgtttagtaaatcacacaaaaatccagcagaaattgtgaaaatcctgaaagacaatttggccattttggaaaagcaagacaaaaagacagacaaggcttcagaagaagtgtctaaatcactgcaagcaatgaaagaaattctgtgtggtacaaacgagaaagaacccccaacagaagcagtggctcagctagcacaagaactctacagcagtggcctgctagtgacactgatagctgacctgcagctgatagactttgaggtaa

SEQ ID NO: 2591 - DNA, 895 bp, Homo sapiens
  source 1..895: mol_type = unassigned DNA; mol_type = unassigned DNA
agaacctagtatcacactaggcttctgaaaacaccaatcaagagttgcttaatgcaggggtcccttacccctgggctgcagacctgtacctgtccatggcctgttaggaaccgggcagcacagtaggaggactgaggagggaggaagtaaaagggagctgtgactgtggtacgtatctgaaagcaagtgttagagagggagtggagaacgcataagcaagctggtttgaccagaaacagaactgcctgtgacagattaagagacaagcaaggcttggaatctgagagcaagcaaagagagtggaaatttacagctgccctatgaggcaacctctattaaatggacgataaaggctacttcatctaaagtgctttgagctcaagaaagagctgtcttcagcacctcaccatgtgtctacattttgttgcttagaaaagcctaggcatttctgtaacatttgcattccatattggaagaagagatttctacacatgaaaaaaatgcctttgtttagtaaatcacacaaaaatccagcagaaattgtgaaaatcctgaaagacaatttggccattttggaaaagcaagacaaaaagacagacaaggtaagagctaaaacagtaacattatgattaaagtacatgcatcgcaatgccaaaaaccaatgtaaaagcttaatgaagaattcaaaatatggtctgtgatgtgcacatagaccctctataaatagatttaagttgatttcaggttttatgcaactgattattatttagtctgttgtgatgaactttaggttcactctctagagactctgaccacaccggatccctctagactacacagcttaaagatctaaaaggttatactggtgtgtaatgttacatttacatgaaaggta

SEQ ID NO: 2592 - DNA, 581 bp, Homo sapiens
  source 1..581: mol_type = unassigned DNA; mol_type = unassigned DNA
gcactgtagctgagccaatggagttactcgtagtcgagaggccggcatcactggagtggtggcgcagctgtttcctccggatatccatcaaatattgagaagaaagaatatcaggagcaaagtgttctaagttgctgttcagaacgtaaagatgcgaaccccaaatcagtggtttgttcattcttcatgcaagagcaatgcactaaaggagagaagcaagctgtggtgatcagtgactttggtgaaagctaagaaggttcaaacaaatttgcaaatgatatacaacttctaaggcaaatctttcatctgcagttttgactctatcccaatggagaaattgttaatcttttagtaagcattaagaattgtatagaaaatgcagaatttgtttggaagaaaagcatggataattcatttgtgatgaatgttgactccacaaagggtttgttcaagtatttggagacggttgttaaattgccttttaaggaggactgaggagggaggaagtaaaagggagctgtgactgtggtacgtatctgaaagcaagtgttagagagggagtggagaacgcataagcaagc

SEQ ID NO: 2593 - DNA, 3692 bp, Homo sapiens
  source 1..3692: mol_type = unassigned DNA; mol_type = unassigned DNA
ggatttcttgtagaagccagttaaaaggagaacctagtatcacactaggcttctgaaaacaccaatcaagagttgcttaatgcaggggtcccttacccctgggctgcagacctgtacctgtccatggcctgttaggaaccgggcagcacagtaggaggactgaggagggaggaagtaaaagggagctgtgactgtggtacgtatctgaaagcaagtgttagagagggagtggagaacgcataagcaagctggtttgaccagaaacagaactgcctgtgacagattaagagacaagcaaggcttggaatctgagagcaagcaaagagagtggaaatttacagctgccctatgaggcaacctctattaaatggacgataaaggctacttcatctaaagtgctttgagctcaagaaagagctgtcttcagcacctcaccatgtgtctacattttgttgcttagaaaagcctaggcatttctgtaacatttgcattccatattggaagaagagatttctacacatgaaaaaaatgcctttgtttagtaaatcacacaaaaatccagcagaaattgtgaaaatcctgaaagacaatttggccattttggaaaagcaagacaaaaagacagacaaggcttcagaagaagtgtctaaatcactgcaagcaatgaaagaaattctgtgtggtacaaacgagaaagaacccccaacagaagcagtggctcagctagcacaagaactctacagcagtggcctgctagtgacactgatagctgacctgcagctgatagactttgagggaaaaaaagatgtgacccagatatttaacaacatcttgagaagacagataggcactcggagtcctactgtggagtatattagtgctcatcctcatatcctgtttatgctcctcaaaggatatgaagccccacagattgccttacgttgtgggattatgctgagagaatgtattcgacatgaaccacttgccaaaatcatcctcttttctaatcaattcagagatttctttaagtacgtggagttgtcaacatttgatattgcttcagatgcctttgctactttcaaggatttactaaccagacataaagtgttggtagcagacttcttagaacaaaattacgacactatttttgaagactatgagaaattgcttcagtctgagaattatgttactaagagacagtctttaaagctgctaggggagctgatcctggaccgtcacaactttgccatcatgacaaagtatatcagcaagccggagaacctgaaactcatgatgaacctccttcgggataaaagtcccaacatccagtttgaagcctttcatgtttttaaggtgtttgtggccagtcctcacaaaacacagcctattgtggagatcctgttaaaaaatcagcccaaactcattgagtttctgagcagcttccaaaaagaaaggacggatgatgagcagttcgctgacgagaagaactacttgattaaacagatccgagacttgaagaaaacggccccttgaagagctccccggcccctgtcacagtcagtcgtctcatttgtccagtttgtacagtgtgtcatttcagaaagtcatcattcttgggaagactttggaggtgcctattttttctgctgtaattgttctgggtagatggagtataaacatttgaatggaaaaaaattaacctagaataatatattcattttagtcaagtctgtgattatttatgtgaaatgagaaccattgtatcagatgttgataaaagcaattttaacttgcagatgtgagcccctgggcacaatgagccgctaaatgggagctcaattgacaggcatcaccaagtcttcaaggaggactgagttctcaggggagaactgggaatggggccagggtgcaaaaatgctttgcccatctgtaggtagacacacagatcgctcagggcactgagagatcccagaaggtaacgttaatgttttcagtcattgtgtgtcctttgttgctgccaatgtctttggactgtaatcagtgcatccacacctcccaggatccagtgctccctctcagctcagtctcccctctctccctgtcctgcattccatcccagctcctcagcatggcctcagtgggcgcacccatgcctcccgcagtccaggtgagcaggggagcaactgagcaggaagaggatggatcaacaagggtcacggggaataggggacccacggggtgtgacctgcttgctagagaactgtgaacatgtggctctggatagagtgactgctgctccatattagcttccagagggtgagtgagggacagaatatttccttcataatggtcatgggtgaatgctttctgctgtaagtgtcttttagagtaggaatcagcatagtgggatgcccagcaggcacaaaccatgggtccagggagtctcagcggggaacttctatcagtatcaataaccattggaaggagaaatgattcatgtgtgaaaaaattctcagatccatcaataaatttttttcagagccattgtatcagatgttgataaaagcaatttttttctaataagctgtcattctataattgcccatcacagtctttagtgaacacatagaaagcctatacagttttggtcctgaatagtctcttgtgactaggatgattgaggtgttaattcctcttccttataaaaaggcttggaatcaaaaatattttaaaaggccgtggtttcgtttcagacatcaaccatctaaaacgggattttaaagcgatattttacaagaatgaaaggcacaattgttgatctgtattttttacacttcagtttctaaatcatgaatcgttgccttccacaggaaccctcccttatacattacttgagtgttgtgtagtttttcttcagccaggtatttctctgcctagagaggggaagagaaatgtgttctccaggactgatcccctttgtagattttgtacctgaagagttacctggcagggcaccacccttggctaggcccaggtgtgtgtttctttcttgcctggcatggaccccgaggcaggtgatgtggggcctggcgcacctccccgctttggcagctgtggcctccctggccagtgcccttgcaggaggccggccggcagcctgatgacccgtactctttagtcactgacgtcagattatttttataacgttccctgacagttcagagtcccttcgaattgcacttttctggtttcgcttatttaattaaaagagatgagtgtaagtataaaaaatgaaggtgaaataaccattggaattgtatttggttacttaatactgttccacaacatcttgggacgtctgttttcctttggagagtgaggccttgttattattcttttctgataaagaaaacattttatttcctttgggcttgcattagctctttcctagcaacccattatcccagctcagtacctttcaaacagaaaactagagtctggggttttgttgtgatctgaatttgtaagttattaatgtgaaagggggagcaggaagctccccctttgcacaaagggggatttgtttgcacaaagttcactgtaaatactgtgagaattgaattctgaaaaggtcatatttagtgatttcaaaagcacacatttaaatgaagactgactaaataaaaggtacc

SEQ ID NO: 2594 - DNA, 3361 bp, Homo sapiens
  source 1..3361: mol_type = unassigned DNA; mol_type = unassigned DNA
ggatttcttgtagaagccagttaaaaggagaacctagtatcacactaggcttctgaaaacaccaatcaagagttgcttaatgcaggggtcccttacccctgggctgcagacctgtacctgtccatggcctgttaggaaccgggcagcacagtaggagcattccatattggaagaagagatttctacacatgaaaaaaatgcctttgtttagtaaatcacacaaaaatccagcagaaattgtgaaaatcctgaaagacaatttggccattttggaaaagcaagacaaaaagacagacaaggcttcagaagaagtgtctaaatcactgcaagcaatgaaagaaattctgtgtggtacaaacgagaaagaacccccaacagaagcagtggctcagctagcacaagaactctacagcagtggcctgctagtgacactgatagctgacctgcagctgatagactttgagggaaaaaaagatgtgacccagatatttaacaacatcttgagaagacagataggcactcggagtcctactgtggagtatattagtgctcatcctcatatcctgtttatgctcctcaaaggatatgaagccccacagattgccttacgttgtgggattatgctgagagaatgtattcgacatgaaccacttgccaaaatcatcctcttttctaatcaattcagagatttctttaagtacgtggagttgtcaacatttgatattgcttcagatgcctttgctactttcaaggatttactaaccagacataaagtgttggtagcagacttcttagaacaaaattacgacactatttttgaagactatgagaaattgcttcagtctgagaattatgttactaagagacagtctttaaagctgctaggggagctgatcctggaccgtcacaactttgccatcatgacaaagtatatcagcaagccggagaacctgaaactcatgatgaacctccttcgggataaaagtcccaacatccagtttgaagcctttcatgtttttaaggtgtttgtggccagtcctcacaaaacacagcctattgtggagatcctgttaaaaaatcagcccaaactcattgagtttctgagcagcttccaaaaagaaaggacggatgatgagcagttcgctgacgagaagaactacttgattaaacagatccgagacttgaagaaaacggccccttgaagagctccccggcccctgtcacagtcagtcgtctcatttgtccagtttgtacagtgtgtcatttcagaaagtcatcattcttgggaagactttggaggtgcctattttttctgctgtaattgttctgggtagatggagtataaacatttgaatggaaaaaaattaacctagaataatatattcattttagtcaagtctgtgattatttatgtgaaatgagaaccattgtatcagatgttgataaaagcaattttaacttgcagatgtgagcccctgggcacaatgagccgctaaatgggagctcaattgacaggcatcaccaagtcttcaaggaggactgagttctcaggggagaactgggaatggggccagggtgcaaaaatgctttgcccatctgtaggtagacacacagatcgctcagggcactgagagatcccagaaggtaacgttaatgttttcagtcattgtgtgtcctttgttgctgccaatgtctttggactgtaatcagtgcatccacacctcccaggatccagtgctccctctcagctcagtctcccctctctccctgtcctgcattccatcccagctcctcagcatggcctcagtgggcgcacccatgcctcccgcagtccaggtgagcaggggagcaactgagcaggaagaggatggatcaacaagggtcacggggaataggggacccacggggtgtgacctgcttgctagagaactgtgaacatgtggctctggatagagtgactgctgctccatattagcttccagagggtgagtgagggacagaatatttccttcataatggtcatgggtgaatgctttctgctgtaagtgtcttttagagtaggaatcagcatagtgggatgcccagcaggcacaaaccatgggtccagggagtctcagcggggaacttctatcagtatcaataaccattggaaggagaaatgattcatgtgtgaaaaaattctcagatccatcaataaatttttttcagagccattgtatcagatgttgataaaagcaatttttttctaataagctgtcattctataattgcccatcacagtctttagtgaacacatagaaagcctatacagttttggtcctgaatagtctcttgtgactaggatgattgaggtgttaattcctcttccttataaaaaggcttggaatcaaaaatattttaaaaggccgtggtttcgtttcagacatcaaccatctaaaacgggattttaaagcgatattttacaagaatgaaaggcacaattgttgatctgtattttttacacttcagtttctaaatcatgaatcgttgccttccacaggaaccctcccttatacattacttgagtgttgtgtagtttttcttcagccaggtatttctctgcctagagaggggaagagaaatgtgttctccaggactgatcccctttgtagattttgtacctgaagagttacctggcagggcaccacccttggctaggcccaggtgtgtgtttctttcttgcctggcatggaccccgaggcaggtgatgtggggcctggcgcacctccccgctttggcagctgtggcctccctggccagtgcccttgcaggaggccggccggcagcctgatgacccgtactctttagtcactgacgtcagattatttttataacgttccctgacagttcagagtcccttcgaattgcacttttctggtttcgcttatttaattaaaagagatgagtgtaagtataaaaaatgaaggtgaaataaccattggaattgtatttggttacttaatactgttccacaacatcttgggacgtctgttttcctttggagagtgaggccttgttattattcttttctgataaagaaaacattttatttcctttgggcttgcattagctctttcctagcaacccattatcccagctcagtacctttcaaacagaaaactagagtctggggttttgttgtgatctgaatttgtaagttattaatgtgaaagggggagcaggaagctccccctttgcacaaagggggatttgtttgcacaaagttcactgtaaatactgtgagaattgaattctgaaaaggtcatatttagtgatttcaaaagcacacatttaaatgaagactgactaaataaaaggtacc

SEQ ID NO: 2595 - DNA, 1321 bp, Homo sapiens
  source 1..1321: mol_type = unassigned DNA; mol_type = unassigned DNA
gtagccgtctgcagggccccagctaagcagcccgcggagagcgagcggcgcgtgcgcccccgctgattggctggcacaaccggcaccggagccaatgggagcacgccttgttgtcaggcgcgcagccggacggcgcggtggtcgggacagactggccgttgctgtggagacgcctggagagttgtggactggggcaacctttgccagtgatgagaagtgatgctcgtggcagtgctgaatctctctgaatatgattcgaattgcagccttaaatgccagctccaccattgaggatgatcatgaaggaagctttaaaagtcacaaaacccagacaaaggaggctcaggaagcagaggcttttgcattgtaccacaaggcccttgatctgcagaaacatgaccggtttgaggagtctgccaaagcctaccatgagctcttggaggcgagcctgctgcgggaggcagtgatgctggactccacagatgtcaacctctggtataagattggacatgtggccctgaggctcatccggatccccctggctcgccatgcttttgaggaagggctgcggtgcaatcctgaccactggccctgtttggataacctaatcactgtcctgtacaccctcagtgattacacaacatgtctgtacttcatctgcaaagctttggagaaggattgccggtacagcaaagggctggtcctcaaggagaagatttttgaggagcagccttgtctccggaaggactctctcagaatgttcctcaaatgtgacatgtcgattcacgatgtttcggtgagtgcagctgagacacaggcgattgtagatgaggccttggggctgcgaaaaaagaggcaagcgctgattgtgcgggagaaggagccggacctgaaacttgtgcagcccattcctttcttcacctggaagtgcctcggagagagcttgctggccatgtacaatcatctcaccacctgtgagcccccacgtcccagccttggcaaaaggattgatttgtcggactaccaggaccccagccagcctcttgagtcctccatggtggtgacgccagttaacgtgatccagccaagcactgtcagcaccaacccagctgtggctgtcgccgagcctgtggtctcctacacctctgtggctacaaccagcttcccactgcacagtcctggtctgttggagacaggcgctcctgtgggtgatatttctgggggagataaatccaagaaaggggtaaaacggaagaagatttcagaagagagtggagaaacagcaaagcggcggtctgcccgtgtccgaaacaccaagtgc

SEQ ID NO: 2596 - DNA, 7222 bp, Homo sapiens
  source 1..7222: mol_type = unassigned DNA; mol_type = unassigned DNA
agccggacggcgcggtggtcgggacagactggccgttgctgtggagacgcctggagagttgtggactggggcaacctttgccagtgatgagaagtgatgctcgtggcagtgctgaatctctctgaatatgattcgaattgcagccttaaatgccagctccaccattgaggatgatcatgaaggaagctttaaaagtcacaaaacccagacaaaggaggctcaggaagcagaggcttttgcattgtaccacaaggcccttgatctgcagaaacatgaccggtttgaggagtctgccaaagcctaccatgagctcttggaggcgagcctgctgcgggaggcagtttcatccggtgatgagaaagaggggttgaaacaccctgggctgatactgaaatattccacttataagaacttggcccagctggcagcccagcgggaggatctggagacagccatggagttctacttagaggcagtgatgctggactccacagatgtcaacctctggtataagattggacatgtggccctgaggctcatccggatccccctggctcgccatgcttttgaggaagggctgcggtgcaatcctgaccactggccctgtttggataacctaatcactgtcctgtacaccctcagtgattacacaacatgtctgtacttcatctgcaaagctttggagaaggattgccggtacagcaaagggctggtcctcaaggagaagatttttgaggagcagccttgtctccggaaggactctctcagaatgttcctcaaatgtgacatgtcgattcacgatgtttcggtgagtgcagctgagacacaggcgattgtagatgaggccttggggctgcgaaaaaagaggcaagcgctgattgtgcgggagaaggagccggacctgaaacttgtgcagcccattcctttcttcacctggaagtgcctcggagagagcttgctggccatgtacaatcatctcaccacctgtgagcccccacgtcccagccttggcaaaaggattgatttgtcggactaccaggaccccagccagcctcttgagtcctccatggtggtgacgccagttaacgtgatccagccaagcactgtcagcaccaacccagctgtggctgtcgccgagcctgtggtctcctacacctctgtggctacaaccagcttcccactgcacagtcctggtctgttggagacaggcgctcctgtgggtgatatttctgggggagataaatccaagaaaggggtaaaacggaagaagatttcagaagagagtggagaaacagcaaagcggcggtctgcccgtgtccgaaacaccaagtgcaaaaaagaagagaaagtagacttccaggagcttctgatgaagttcttgccgtccaggttaagaaagctggaccctgaggaggaagatgattcctttaataactatgaagtccagtcagaagccaaactggaaagcttcccaagcattgggcctcaaaggctgtcatttgactcagccacattcatggaatctgaaaagcaggacgtgcatgagttcctgctggagaacctaaccaacgggggcatcctggagctgatgatgcgctacctgaaagccatgggccacaagttcttggtaaggtggcctccaggcttggcggaggtcgtgctcagcgtctaccacagctggaggaggcacagcaccagcctgcccaacccgctgctgagggactgcagcaacaagcacatcaaggacatgatgctgatgtctctctcctgcatggaactccagctggaccagtggctgctgaccaaaggcagaagctctgcagtgtctcctcggaactgccctgctggtatggtgaatggcagatttggacctgacttcccagggacccactgcctgggtgacctcctacagctgtcatttgcctcgtcccagcgcgacctgttcgaggatggttggctggagtttgtggtccgtgtttactggctgaaggctcgcttcctggcgctgcagggagacatggagcaggccctggagaactatgacatctgcacagaaatgctccagagttccaccgccatccaggtggaggcaggggctgaacgaagagacattgtcatccggctgcccaacctccataatgactctgtggtttccctggaggagattgataagaacctgaagtcgctggagcggtgccagtccctggaggagattcagcggctgtatgaagcaggcgactacaaggctgttgtgcatctgctccgccccactttgtgcaccagtgggtttgaccgggccaaacacctggagtttatgacttccattcctgagaggccagcccagctgcttcttctgcaggactccttgctccggctgaaggactatcggcagtgttttgagtgttccgatgtggctctgaacgaggctgtccagcagatggtgaactcaggtgaggctgccgccaaggaggagtgggtggccacagtgacccaactgctgatgggcatcgagcaggccctctctgcggacagcagtggtagcatcctgaaggtatcatcctccaccactggccttgtgcggctcaccaacaacctcatccaggtcattgactgcagcatggctgtgcaggaggaggccaaggagccccacgtctcttcagtgctaccctggatcattctacaccggatcatctggcaggaggaagacaccttccattctctgtgccaccagcagcagctccaaaacccagcggaggaagggatgtcagagacgcccatgctcccatcctccctcatgctgctgaacacagcccacgagtatttgggcagaaggtcctggtgctgcaattcagatggggctctgctgcgattctatgtgcgagtactccagaaggaactggctgcatccacctctgaagacacgcacccttacaaggaggagctggagacagccttggagcagtgcttctactgcctgtacagcttccccagcaagaagagtaaggccaggtacctggaggaacactcggcccagcaggtggatcttatatgggaggatgcactgttcatgtttgagtattttaagcccaagacccttcctgaatttgacagctataagaccagcaccgtgtctgctgacttggccaacctactgaagagaattgccaccattgtgcctcgcacagagaggccagcccttagcctggacaaagtctctgcctacattgagggaacttcaactgaggtaccctgcctcccagagggggctgacccctcccctccagtggtgaacgagctttactacctcctggctgattatcatttcaaaaacaaggagcagtccaaggccatcaagttctacatgcatgacatctgcatctgccccaataggtttgattcctgggcaggcatggctctggcccgggccagccgcattcaggacaagctgaactccaatgagctgaagagtgatgggcccatttggaagcatgccacgcccgtcttgaactgcttccgtcgggccctggagattgacagctccaacttgtccctatggattgagtatggcaccatgtcctatgccttgcactcattcgcctcacgtcaattgaagcagtggagaggcgagctgccccctgagctcgtgcagcagatggagggccggcgcgacagcatgctagagacagccaagcactgtttcacatcagcagcccgctgcgagggtgatggtgacgaggaggagtggctcatccactacatgctgggcaaggtggctgagaagcagcagcagccacccaccgtttacttgctgcactacaggcaggctggccactacctgcacgaggaggctgcccgctaccccaagaagatccactaccacaacccacctgagctggccatggaggccctggaggtgtactttcggctccatgcttccatcctgaagctcctggggaagcccgattctggggttggtgcagaggtcctggtcaactttatgaaggaggctgcagaaggaccctttgccaggggcgaggagaagaacacacccaaagcttcagaaaaggagaaggcctgcctggtggacgaggactcccactcttcagctgggacactgccgggccccggagcctccctcccctcctcctctggcccaggtctgacatccccaccttacacagccactccgattgaccacgattacgtcaaatgtaaaaaaccccaccagcaggcaacgccggacgaccgaagccaggacagcacagccgtagcactctcagactctagctcaacgcaggacttctttaatgagcccaccagcttactggaaggctccaggaaatcctacacagagaagaggctgcccattctcagttcccaagcaggagcgacgggtaaagatcttcagggggccacagaagaaagaggaaaaaacgaggagtcattggagagtacagaaggcttccgggctgcagagcaaggtgtccagaagcctgctgcagaaaccccagcctctgcttgcatccctggcaagccctcagcatccacacccaccctgtgggatgggaagaagagaggggacctcccaggggagccagtggccttcccccaggggctgccggctggtgctgaggagcagcggcagtttctcacagagcagtgcatcgcctccttccgcctgtgcctgagccgcttcccccagcactataagagtctctaccgtctggccttcctctacacctacagcaagacccaccggaacctccagtgggcccgcgacgtgttgctaggcagcagtatcccgtggcaacaactgcagcacatgccggcacaggggctcttctgcgagaggaacaagaccaatttcttcaacggcatctggcggatccccgtggacgagattgaccggccgggcagctttgcctggcacatgaaccgctccatcgtgctgctgctcaaggtgctggcccagctgcgggaccacagcaccctgctgaaggtgtcctccatgcttcagcggaccccagaccagggcaagaagtatctgcgagatgctgaccgccaggtcctggcgcagcgggccttcatcctcactgtgaaggtgctcgaagacacgctgagcgagctcgcagaggggtcagaacgcccagggcccaaggtctgtggcctccccggagccaggatgaccaccgatgtctcacacaaggccagtcctgaggatggccaggagggcctcccccagccgaagaagccccctctggctgatggctcagggccagggcccgagccaggaggcaaagtgggcctcctcaaccaccggcctgtggccatggatgcaggagacagtgcagaccaaagcggggagcggaaggataaagagagcccacgggcagggcccactgagcccatggacacgagtgaggccactgtttgccactcagacttggagcggacaccacccctgctgccaggtcgccccgcaagggaccggggccccgagagccggcccactgagctgtccctggaggagctgagcatcagtgcccggcagcagcccaccccgctcaccccagcccagccagcccccgcccccgcccccgccaccaccacagggaccagggcagggggccacccggaggagccgctctcccggctcagccgcaagaggaagctcctggaggacacagagtcaggcaagacacttctgttggatgcctaccgtgtgtggcagcagggccagaagggtgtggcctatgacctgggccgtgtggagaggatcatgtcggagacctacatgctcatcaagcaggtggatgaggaggctgcgctggagcaggctgtgaagttctgccaggtccatcttggggctgccgcccagagacaggcctcgggggacacccccaccactccaaagcaccccaaagacagccgagagaacttctttcctgtgacagtggtgcccacagcccctgaccctgtgccagctgactctgtccagcggcccagtgatgctcacaccaagcctcgccctgcactagctgccgccacaactattatcacctgccctccgtcagcatcagcttccaccctggaccagtccaaggaccctgggcctccccggccacacaggcctgaagctacccccagcatggcctctctgggcccagagggagaagagctggcgagagtggcagagggcaccagcttcccgcctcaggagccacggcacagtccgcaggtgaagatggcccccacaagttccccggcagagccacactgctggccggcagaggctgccctgggcacaggcgctgagcccacctgcagccaggaggggaaactgaggcctgagccgagaagggatggggaggctcaggaggctgcgagtgagactcagcccctgagctctcccccaacagctgccagctccaaggcccccagcagtgggagtgcccagccaccagagggtcacccaggcaagcctgagcccagccgggctaagtcccgccccctgcccaacatgccaaagctggtcatcccctccgccgccaccaagttcccccctgagatcaccgtcacgccacccaccccaaccctgctctcccccaaaggcagcatctcggaggagaccaagcagaagctgaagtcagccatcctttctgcccagtctgctgccaacgtgaggaaggagagcctatgccagccagccctggaggtcctggagacatccagccaggagtcctcgctggagagcgagacagacgaggacgacgactacatggacatttgaggggccactgcagccccaccgccacgccccaggggaccagccaggcctggaatgccccctgggcaggaccctgggcaggaccagaggcccacatggatgccactccccacacagcccccaggcctgcccagcccacctcctcatggcatcctccctgtacccaggtcaggctgtccacaccacatgggagcccagaggaggaggggcccgccttagccatgtgaaggtggattggtcgccatctgcacgccaggcggcatccttttctatgaagtgttgactttgtaaatctgcccacacccagctggccatatccacccctcgacgccgggatgagccggctctgcctgtgtcacagtggaggggtcctttagggccaggctcacccctcaccctttttttggttgcttttctaataaagatggaacagtt

SEQ ID NO: 2597 - DNA, 6952 bp, Homo sapiens
  source 1..6952: mol_type = unassigned DNA; mol_type = unassigned DNA
cgttgctgtggagacgcctggagagttgtggactggggcaacctttgccagtgatgagaagtgatgctcgtggcagtgctgaatctctctgaatatgattcgaattgcagccttaaatgccagctccaccattgaggatgatcatgaaggaagctttaaaagtcacaaaacccagacaaaggaggctcaggaagcagaggcttttgcattgtaccacaaggcccttgatctgcagaaacatgaccggtttgaggagtctgccaaagcctaccatgagctcttggaggcgagcctgctgcgggaggcagtttcatccggtgatgagaaagaggggttgaaacaccctgggctgatactgaaatattccacttataagaacttggcccagctggcagcccagcgggaggatctggagacagccatggagttctacttagaggcagtgatgctggactccacagatgtcaacctctggtataagattggacatgtggccctgaggctcatccggatccccctggctcgccatgcttttgaggaagggctgcggtgcaatcctgaccactggccctgtttggataacctaatcactgtcctgtacaccctcagtgattacacaacatgtctgtacttcatctgcaaagctttggagaaggattgccggtacagcaaagggctggtcctcaaggagaagatttttgaggagcagccttgtctccggaaggactctctcagaatgttcctcaaatgctggaagtgcctcggagagagcttgctggccatgtacaatcatctcaccacctgtgagcccccacgtcccagccttggcaaaaggattgatttgtcggactaccaggaccccagccagcctcttgagtcctccatggtggtgacgccagttaacgtgatccagccaagcactgtcagcaccaacccagctgtggctgtcgccgagcctgtggtctcctacacctctgtggctacaaccagcttcccactgcacagtcctggtctgttggagacaggcgctcctgtgggtgatatttctgggggagataaatccaagaaaggggtaaaacggaagaagatttcagaagagagtggagaaacagcaaagcggcggtctgcccgtgtccgaaacaccaagtgcaaaaaagaagagaaagtagacttccaggagcttctgatgaagttcttgccgtccaggttaagaaagctggaccctgaggaggaagatgattcctttaataactatgaagtccagtcagaagccaaactggaaagcttcccaagcattgggcctcaaaggctgtcatttgactcagccacattcatggaatctgaaaagcaggacgtgcatgagttcctgctggagaacctaaccaacgggggcatcctggagctgatgatgcgctacctgaaagccatgggccacaagttcttggtaaggtggcctccaggcttggcggaggtcgtgctcagcgtctaccacagctggaggaggcacagcaccagcctgcccaacccgctgctgagggactgcagcaacaagcacatcaaggacatgatgctgatgtctctctcctgcatggaactccagctggaccagtggctgctgaccaaaggcagaagctctgcagtgtctcctcggaactgccctgctggtatggtgaatggcagatttggacctgacttcccagggacccactgcctgggtgacctcctacagctgtcatttgcctcgtcccagcgcgacctgttcgaggatggttggctggagtttgtggtccgtgtttactggctgaaggctcgcttcctggcgctgcagggagacatggagcaggccctggagaactatgacatctgcacagaaatgctccagagttccaccgccatccaggtggaggcaggggctgaacgaagagacattgtcatccggctgcccaacctccataatgactctgtggtttccctggaggagattgataagaacctgaagtcgctggagcggtgccagtccctggaggagattcagcggctgtatgaagcaggcgactacaaggctgttgtgcatctgctccgccccactttgtgcaccagtgggtttgaccgggccaaacacctggagtttatgacttccattcctgagaggccagcccagctgcttcttctgcaggactccttgctccggctgaaggactatcggcagtgttttgagtgttccgatgtggctctgaacgaggctgtccagcagatggtgaactcaggtgaggctgccgccaaggaggagtgggtggccacagtgacccaactgctgatgggcatcgagcaggccctctctgcggacagcagtggtagcatcctgaaggtatcatcctccaccactggccttgtgcggctcaccaacaacctcatccaggtcattgactgcagcatggctgtgcaggaggaggccaaggagccccacgtctcttcagtgctaccctggatcattctacaccggatcatctggcaggaggaagacaccttccattctctgtgccaccagcagcagctccaaaacccagcggaggaagggatgtcagagacgcccatgctcccatcctccctcatgctgctgaacacagcccacgagtatttgggcagaaggtcctggtgctgcaattcagatggggctctgctgcgattctatgtgcgagtactccagaaggaactggctgcatccacctctgaagacacgcacccttacaaggaggagctggagacagccttggagcagtgcttctactgcctgtacagcttccccagcaagaagagtaaggccaggtacctggaggaacactcggcccagcaggtggatcttatatgggaggatgcactgttcatgtttgagtattttaagcccaagacccttcctgaatttgacagctataagaccagcaccgtgtctgctgacttggccaacctactgaagagaattgccaccattgtgcctcgcacagagaggccagcccttagcctggacaaagtctctgcctacattgagggaacttcaactgaggtaccctgcctcccagagggggctgacccctcccctccagtggtgaacgagctttactacctcctggctgattatcatttcaaaaacaaggagcagtccaaggccatcaagttctacatgcatgacatctgcatctgccccaataggtttgattcctgggcaggcatggctctggcccgggccagccgcattcaggacaagctgaactccaatgagctgaagagtgatgggcccatttggaagcatgccacgcccgtcttgaactgcttccgtcgggccctggagattgacagctccaacttgtccctatggattgagtatggcaccatgtcctatgccttgcactcattcgcctcacgtcaattgaagcagtggagaggcgagctgccccctgagctcgtgcagcagatggagggccggcgcgacagcatgctagagacagccaagcactgtttcacatcagcagcccgctgcgagggtgatggtgacgaggaggagtggctcatccactacatgctgggcaaggtggctgagaagcagcagcagccacccaccgtttacttgctgcactacaggcaggctggccactacctgcacgaggaggctgcccgctaccccaagaagatccactaccacaacccacctgagctggccatggaggccctggaggtgtactttcggctccatgcttccatcctgaagctcctggggaagcccgattctggggttggtgcagaggtcctggtcaactttatgaaggaggctgcagaaggaccctttgccaggggcgaggagaagaacacacccaaagcttcagaaaaggagaaggcctgcctggtggacgaggactcccactcttcagctgggacactgccgggccccggagcctccctcccctcctcctctggcccagaccgaagccaggacagcacagccgtagcactctcagactctagctcaacgcaggacttctttaatgagcccaccagcttactggaaggctccaggaaatcctacacagagaagaggctgcccattctcagttcccaagcaggagcgacgggtaaagatcttcagggggccacagaagaaagaggaaaaaacgaggagtcattggagagtacagaaggcttccgggctgcagagcaaggtgtccagaagcctgctgcagaaaccccagcctctgcttgcatccctggcaagccctcagcatccacacccaccctgtgggatgggaagaagagaggggacctcccaggggagccagtggccttcccccaggggctgccggctggtgctgaggagcagcggcagtttctcacagagcagtgcatcgcctccttccgcctgtgcctgagccgcttcccccagcactataagagtctctaccgtctggccttcctctacacctacagcaagacccaccggaacctccagtgggcccgcgacgtgttgctaggcagcagtatcccgtggcaacaactgcagcacatgccggcacaggggctcttctgcgagaggaacaagaccaatttcttcaacggcatctggcggatccccgtggacgagattgaccggccgggcagctttgcctggcacatgaaccgctccatcgtgctgctgctcaaggtgctggcccagctgcgggaccacagcaccctgctgaaggtgtcctccatgcttcagcggaccccagaccagggcaagaagtatctgcgagatgctgaccgccaggtcctggcgcagcgggccttcatcctcactgtgaaggtgctcgaagacacgctgagcgagctcgcagaggggtcagaacgcccagggcccaaggtctgtggcctccccggagccaggatgaccaccgatgtctcacacaaggccagtcctgaggatggccaggagggcctcccccagccgaagaagccccctctggctgatggctcagggccagggcccgagccaggaggcaaagtgggcctcctcaaccaccggcctgtggccatggatgcaggagacagtgcagaccaaagcggggagcggaaggataaagagagcccacgggcagggcccactgagcccatggacacgagtgaggccactgtttgccactcagacttggagcggacaccacccctgctgccaggtcgccccgcaagggaccggggccccgagagccggcccactgagctgtccctggaggagctgagcatcagtgcccggcagcagcccaccccgctcaccccagcccagccagcccccgcccccgcccccgccaccaccacagggaccagggcagggggccacccggaggagccgctctcccggctcagccgcaagaggaagctcctggaggacacagagtcaggcaagacacttctgttggatgcctaccgtgtgtggcagcagggccagaagggtgtggcctatgacctgggccgtgtggagaggatcatgtcggagacctacatgctcatcaagcaggtggatgaggaggctgcgctggagcaggctgtgaagttctgccaggtccatcttggggctgccgcccagagacaggcctcgggggacacccccaccactccaaagcaccccaaagacagccgagagaacttctttcctgtgacagtggtgcccacagcccctgaccctgtgccagctgactctgtccagcggcccagtgatgctcacaccaagcctcgccctgcactagctgccgccacaactattatcacctgccctccgtcagcatcagcttccaccctggaccagtccaaggaccctgggcctccccggccacacaggcctgaagctacccccagcatggcctctctgggcccagagggagaagagctggcgagagtggcagagggcaccagcttcccgcctcaggagccacggcacagtccgcaggtgaagatggcccccacaagttccccggcagagccacactgctggccggcagaggctgccctgggcacaggcgctgagcccacctgcagccaggaggggaaactgaggcctgagccgagaagggatggggaggctcaggaggctgcgagtgagactcagcccctgagctctcccccaacagctgccagctccaaggcccccagcagtgggagtgcccagccaccagagggtcacccaggcaagcctgagcccagccgggctaagtcccgccccctgcccaacatgccaaagctggtcatcccctccgccgccaccaagttcccccctgagatcaccgtcacgccacccaccccaaccctgctctcccccaaaggcagcatctcggaggagaccaagcagaagctgaagtcagccatcctttctgcccagtctgctgccaacgtgaggaaggagagcctatgccagccagccctggaggtcctggagacatccagccaggagtcctcgctggagagcgagacagacgaggacgacgactacatggacatttgaggggccactgcagccccaccgccacgccccaggggaccagccaggcctggaatgccccctgggcaggaccctgggcaggaccagaggcccacatggatgccactccccacacagcccccaggcctgcccagcccacctcctcatggcatcctccctgtacccaggtcaggctgtccacaccacatgggagcccagaggaggaggggcccgccttagccatgtgaaggtggattggtcgccatctgcacgccaggcggcatccttttctatgaagtgttgactttgtaaatctgcccacacccagctggccatatccacccctcgacgccgggatgagccggctctgcctgtgtcacagtggaggggtcctttagggccaggctcacccctcaccctttttttggttgcttttctaataaagatggaacagtt

SEQ ID NO: 2598 - DNA, 1472 bp, Homo sapiens
  source 1..1472: mol_type = unassigned DNA; mol_type = unassigned DNA
ggctcagcagagcccggggcacaggccggaggggctgcaggcgcgaggctgggttacgtgaggaagctgggggtttcgcgggcagctttagagccccagtcagggaaaccgaggccgggcttcctggctgcctcgcgagcctcttcatggctctcgccgccgccctgaggtgcctagaatgggttccggcctccggggaggttcccagtaaccgcaggagccaccattgatttggcgtctgctgggtgcaaagcccagcgcgctaaccctttactcgcgacctttcgcttcaccttcacagcagccctgcgaggagagttgtggactggggcaacctttgccagtgatgagaagtgatgctcgtggcagtgctgaatctctctgaatatgattcgaattgcagccttaaatgccagctccaccattgaggatgatcatgaaggaagctttaaaagtcacaaaacccagacaaaggaggctcaggaagcagaggcttttgcattgtaccacaaggcccttgatctgcagaaacatgaccggtttgaggagtctgccaaagcctaccatgagctcttggaggcgagcctgctgcgggaggcagtgatgctggactccacagatgtcaacctctggtataagattggacatgtggccctgaggctcatccggatccccctggctcgccatgcttttgaggaagggctgcggtgcaatcctgaccactggccctgtttggataacctaatcactgtcctgtacaccctcagtgattacacaacatgtctgtacttcatctgcaaagctttggagaaggattgccggtacagcaaagggctggtcctcaaggagaagatttttgaggagcagccttgtctccggaaggactctctcagaatgttcctcaaatgtgacatgtcgattcacgatgtttcggtgagtgcagctgagacacaggcgattgtagatgaggccttggggctgcgaaaaaagaggcaagcgctgattgtgcgggagaaggagccggacctgaaacttgtgcagcccattcctttcttcacctggaagtgcctcggagagagcttgctggccatgtacaatcatctcaccacctgtgagcccccacgtcccagccttggcaaaaggattgatttgtcggactaccaggaccccagccagcctcttgagtcctccatggtggtgacgccagttaacgtgatccagccaagcactgtcagcaccaacccagctgtggctgtcgccgagcctgtggtctcctacacctctgtggctacaaccagcttcccactgcacagtcctggtctgttggagacaggcgctcctgtgggtgatatttctgggggagataaatccaagaaaggggtaaaacggaagaagatttcagaagagagtggagaaacagcaaagcggcggtctgcccgtgtccgaaacaccaagtgcaaaaaagaagagaa

SEQ ID NO: 2599 - DNA, 7480 bp, Homo sapiens
  source 1..7480: mol_type = unassigned DNA; mol_type = unassigned DNA
ctcagcagagcccggggcacaggccggaggggctgcaggcgcgaggctgggttacgtgaggaagctgggggtttcgcgggcagctttagagccccagtcagggaaaccgaggccgggcttcctggctgcctcgcgagcctcttcatggctctcgccgccgccctgaggtgcctagaatgggttccggcctccggggaggttcccagtaaccgcaggagccaccattgatttggcgtctgctgggtgcaaagcccagcgcgctaaccctttactcgcgacctttcgcttcaccttcacagcagccctgcgaggagagttgtggactggggcaacctttgccagtgatgagaagtgatgctcgtggcagtgctgaatctctctgaatatgattcgaattgcagccttaaatgccagctccaccattgaggatgatcatgaaggaagctttaaaagtcacaaaacccagacaaaggaggctcaggaagcagaggcttttgcattgtaccacaaggcccttgatctgcagaaacatgaccggtttgaggagtctgccaaagcctaccatgagctcttggaggcgagcctgctgcgggaggcagtttcatccggtgatgagaaagaggggttgaaacaccctgggctgatactgaaatattccacttataagaacttggcccagctggcagcccagcgggaggatctggagacagccatggagttctacttagaggcagtgatgctggactccacagatgtcaacctctggtataagattggacatgtggccctgaggctcatccggatccccctggctcgccatgcttttgaggaagggctgcggtgcaatcctgaccactggccctgtttggataacctaatcactgtcctgtacaccctcagtgattacacaacatgtctgtacttcatctgcaaagctttggagaaggattgccggtacagcaaagggctggtcctcaaggagaagatttttgaggagcagccttgtctccggaaggactctctcagaatgttcctcaaatgtgacatgtcgattcacgatgtttcggtgagtgcagctgagacacaggcgattgtagatgaggccttggggctgcgaaaaaagaggcaagcgctgattgtgcgggagaaggagccggacctgaaacttgtgcagcccattcctttcttcacctggaagtgcctcggagagagcttgctggccatgtacaatcatctcaccacctgtgagcccccacgtcccagccttggcaaaaggattgatttgtcggactaccaggaccccagccagcctcttgagtcctccatggtggtgacgccagttaacgtgatccagccaagcactgtcagcaccaacccagctgtggctgtcgccgagcctgtggtctcctacacctctgtggctacaaccagcttcccactgcacagtcctggtctgttggagacaggcgctcctgtgggtgatatttctgggggagataaatccaagaaaggggtaaaacggaagaagatttcagaagagagtggagaaacagcaaagcggcggtctgcccgtgtccgaaacaccaagtgcaaaaaagaagagaaagtagacttccaggagcttctgatgaagttcttgccgtccaggttaagaaagctggaccctgaggaggaagatgattcctttaataactatgaagtccagtcagaagccaaactggaaagcttcccaagcattgggcctcaaaggctgtcatttgactcagccacattcatggaatctgaaaagcaggacgtgcatgagttcctgctggagaacctaaccaacgggggcatcctggagctgatgatgcgctacctgaaagccatgggccacaagttcttggtaaggtggcctccaggcttggcggaggtcgtgctcagcgtctaccacagctggaggaggcacagcaccagcctgcccaacccgctgctgagggactgcagcaacaagcacatcaaggacatgatgctgatgtctctctcctgcatggaactccagctggaccagtggctgctgaccaaaggcagaagctctgcagtgtctcctcggaactgccctgctggtatggtgaatggcagatttggacctgacttcccagggacccactgcctgggtgacctcctacagctgtcatttgcctcgtcccagcgcgacctgttcgaggatggttggctggagtttgtggtccgtgtttactggctgaaggctcgcttcctggcgctgcagggagacatggagcaggccctggagaactatgacatctgcacagaaatgctccagagttccaccgccatccaggtggaggcaggggctgaacgaagagacattgtcatccggctgcccaacctccataatgactctgtggtttccctggaggagattgataagaacctgaagtcgctggagcggtgccagtccctggaggagattcagcggctgtatgaagcaggcgactacaaggctgttgtgcatctgctccgccccactttgtgcaccagtgggtttgaccgggccaaacacctggagtttatgacttccattcctgagaggccagcccagctgcttcttctgcaggactccttgctccggctgaaggactatcggcagtgttttgagtgttccgatgtggctctgaacgaggctgtccagcagatggtgaactcaggtgaggctgccgccaaggaggagtgggtggccacagtgacccaactgctgatgggcatcgagcaggccctctctgcggacagcagtggtagcatcctgaaggtatcatcctccaccactggccttgtgcggctcaccaacaacctcatccaggtcattgactgcagcatggctgtgcaggaggaggccaaggagccccacgtctcttcagtgctaccctggatcattctacaccggatcatctggcaggaggaagacaccttccattctctgtgccaccagcagcagctccaaaacccagcggaggaagggatgtcagagacgcccatgctcccatcctccctcatgctgctgaacacagcccacgagtatttgggcagaaggtcctggtgctgcaattcagatggggctctgctgcgattctatgtgcgagtactccagaaggaactggctgcatccacctctgaagacacgcacccttacaaggaggagctggagacagccttggagcagtgcttctactgcctgtacagcttccccagcaagaagagtaaggccaggtacctggaggaacactcggcccagcaggtggatcttatatgggaggatgcactgttcatgtttgagtattttaagcccaagacccttcctgaatttgacagctataagaccagcaccgtgtctgctgacttggccaacctactgaagagaattgccaccattgtgcctcgcacagagaggccagcccttagcctggacaaagtctctgcctacattgagggaacttcaactgaggtaccctgcctcccagagggggctgacccctcccctccagtggtgaacgagctttactacctcctggctgattatcatttcaaaaacaaggagcagtccaaggccatcaagttctacatgcatgacatctgcatctgccccaataggtttgattcctgggcaggcatggctctggcccgggccagccgcattcaggacaagctgaactccaatgagctgaagagtgatgggcccatttggaagcatgccacgcccgtcttgaactgcttccgtcgggccctggagattgacagctccaacttgtccctatggattgagtatggcaccatgtcctatgccttgcactcattcgcctcacgtcaattgaagcagtggagaggcgagctgccccctgagctcgtgcagcagatggagggccggcgcgacagcatgctagagacagccaagcactgtttcacatcagcagcccgctgcgagggtgatggtgacgaggaggagtggctcatccactacatgctgggcaaggtggctgagaagcagcagcagccacccaccgtttacttgctgcactacaggcaggctggccactacctgcacgaggaggctgcccgctaccccaagaagatccactaccacaacccacctgagctggccatggaggccctggaggtgtactttcggctccatgcttccatcctgaagctcctggggaagcccgattctggggttggtgcagaggtcctggtcaactttatgaaggaggctgcagaaggaccctttgccaggggcgaggagaagaacacacccaaagcttcagaaaaggagaaggcctgcctggtggacgaggactcccactcttcagctgggacactgccgggccccggagcctccctcccctcctcctctggcccaggtctgacatccccaccttacacagccactccgattgaccacgattacgtcaaatgtaaaaaaccccaccagcaggcaacgccggacgaccgaagccaggacagcacagccgtagcactctcagactctagctcaacgcaggacttctttaatgagcccaccagcttactggaaggctccaggaaatcctacacagagaagaggctgcccattctcagttcccaagcaggagcgacgggtaaagatcttcagggggccacagaagaaagaggaaaaaacgaggagtcattggagagtacagaaggcttccgggctgcagagcaaggtgtccagaagcctgctgcagaaaccccagcctctgcttgcatccctggcaagccctcagcatccacacccaccctgtgggatgggaagaagagaggggacctcccaggggagccagtggccttcccccaggggctgccggctggtgctgaggagcagcggcagtttctcacagagcagtgcatcgcctccttccgcctgtgcctgagccgcttcccccagcactataagagtctctaccgtctggccttcctctacacctacagcaagacccaccggaacctccagtgggcccgcgacgtgttgctaggcagcagtatcccgtggcaacaactgcagcacatgccggcacaggggctcttctgcgagaggaacaagaccaatttcttcaacggcatctggcggatccccgtggacgagattgaccggccgggcagctttgcctggcacatgaaccgctccatcgtgctgctgctcaaggtgctggcccagctgcgggaccacagcaccctgctgaaggtgtcctccatgcttcagcggaccccagaccagggcaagaagtatctgcgagatgctgaccgccaggtcctggcgcagcgggccttcatcctcactgtgaaggtgctcgaagacacgctgagcgagctcgcagaggggtcagaacgcccagggcccaaggtctgtggcctccccggagccaggatgaccaccgatgtctcacacaaggccagtcctgaggatggccaggagggcctcccccagccgaagaagccccctctggctgatggctcagggccagggcccgagccaggaggcaaagtgggcctcctcaaccaccggcctgtggccatggatgcaggagacagtgcagaccaaagcggggagcggaaggataaagagagcccacgggcagggcccactgagcccatggacacgagtgaggccactgtttgccactcagacttggagcggacaccacccctgctgccaggtcgccccgcaagggaccggggccccgagagccggcccactgagctgtccctggaggagctgagcatcagtgcccggcagcagcccaccccgctcaccccagcccagccagcccccgcccccgcccccgccaccaccacagggaccagggcagggggccacccggaggagccgctctcccggctcagccgcaagaggaagctcctggaggacacagagtcaggcaagacacttctgttggatgcctaccgtgtgtggcagcagggccagaagggtgtggcctatgacctgggccgtgtggagaggatcatgtcggagacctacatgctcatcaagcaggtggatgaggaggctgcgctggagcaggctgtgaagttctgccaggtccatcttggggctgccgcccagagacaggcctcgggggacacccccaccactccaaagcaccccaaagacagccgagagaacttctttcctgtgacagtggtgcccacagcccctgaccctgtgccagctgactctgtccagcggcccagtgatgctcacaccaagcctcgccctgcactagctgccgccacaactattatcacctgccctccgtcagcatcagcttccaccctggaccagtccaaggaccctgggcctccccggccacacaggcctgaagctacccccagcatggcctctctgggcccagagggagaagagctggcgagagtggcagagggcaccagcttcccgcctcaggagccacggcacagtccgcaggtgaagatggcccccacaagttccccggcagagccacactgctggccggcagaggctgccctgggcacaggcgctgagcccacctgcagccaggaggggaaactgaggcctgagccgagaagggatggggaggctcaggaggctgcgagtgagactcagcccctgagctctcccccaacagctgccagctccaaggcccccagcagtgggagtgcccagccaccagagggtcacccaggcaagcctgagcccagccgggctaagtcccgccccctgcccaacatgccaaagctggtcatcccctccgccgccaccaagttcccccctgagatcaccgtcacgccacccaccccaaccctgctctcccccaaaggcagcatctcggaggagaccaagcagaagctgaagtcagccatcctttctgcccagtctgctgccaacgtgaggaaggagagcctatgccagccagccctggaggtcctggagacatccagccaggagtcctcgctggagagcgagacagacgaggacgacgactacatggacatttgaggggccactgcagccccaccgccacgccccaggggaccagccaggcctggaatgccccctgggcaggaccctgggcaggaccagaggcccacatggatgccactccccacacagcccccaggcctgcccagcccacctcctcatggcatcctccctgtacccaggtcaggctgtccacaccacatgggagcccagaggaggaggggcccgccttagccatgtgaaggtggattggtcgccatctgcacgccaggcggcatccttttctatgaagtgttgactttgtaaatctgcccacacccagctggccatatccacccctcgacgccgggatgagccggctctgcctgtgtcacagtggaggggtcctttagggccaggctcacccctcaccctttttttggttgcttttctaataaagatggaacagtt

SEQ ID NO: 2600 - DNA, 426 bp, Homo sapiens
  source 1..426: mol_type = unassigned DNA; mol_type = unassigned DNA
tgtcgccgagcctgtggtctcctacacctctgtggctacaaccagcttcccactgcacagtcctggtctgttggagacaggcgctcctgtgggtgatatttctgggggagataaatccaagaaaggggtaaaacggaagaagatttcagaagagagtggagaaacagcaaagcggcggtctgcccgtgtccgaaacaccaagtgcaaaaaagaagagaaagtagacttccaggagcttctgatgaagttcttgccgtccaggtactgtgtattttttctgattgtcagaaacaaacccacaaagctccagcatacaccatcagtaacatttctcattccattgccaccctcttctctggtctcctcctctgtgttcccataacatctgtgcagatgtctgaagcacaaatctcactggagtaggat

SEQ ID NO: 2601 - DNA, 561 bp, Homo sapiens
  source 1..561: mol_type = unassigned DNA; mol_type = unassigned DNA
tcgctggagcggtgccagtccctggaggagattcagcggctgtatgaagcaggcgactacaaggctgttgtgcatctgctccgccccactttgtgcaccagtgggtttgaccgggccaaacacctggagtttatgacttccattcctgagaggccagcccagctgcttcttctgcaggactccttgctccggctgaaggactatcggcagtgttttgagtgttccgatgtggctctgaacgaggctgtccagcagatggtgaactcaggtgaggctgccgccaaggaggagtgggtggccacagtgacccaactgctgatgggcatcgagcaggccctctctgcggacagcagtggtagcatcctgaaggtatcatcctccaccactggccttgtgcggctcaccaacaacctcatccaggtaacccctggctccttctcaccctgccctgccccagcaggtatgtctctgtgacatcctgcttcttcagtagttcatagctttcattgctaattaggcacccaaaggggacatgatggcttctttggttggaactttcgg

SEQ ID NO: 2602 - DNA, 557 bp, Homo sapiens
  source 1..557: mol_type = unassigned DNA; mol_type = unassigned DNA
gagattgacagctccaacttgtccctatggattgagtatggcaccatgtcctatgccttgcactcattcgcctcacgtcaattgaagcagtggagaggcgagctgccccctgagctcgtgcagcagatggagggccggcgcgacagcatgctagagacagccaagcactgtttcacatcagcagcccgctgcgagggtgatggtgacgaggaggagtggctcatccactacatgctgggcaaggtggctgagaagcagcagcagccacccaccgtttacttgctgcactacaggcaggctggccactacctgcacgaggaggctgcccgctaccccaagaagatccactaccacaacccacctgagctggccatggaggccctggaggtgacaccatgctggcccagggcggggaagcagggcaggggcaggctggtttctttatctccctgggcatgtggctcaaggttccagtgaccgtccttcaacctgccgcaaacttatctgtgttgagcagcttcatgtgcaattgaattaaaacatcatttcctctcttt

SEQ ID NO: 2603 - DNA, 593 bp, Homo sapiens
  source 1..593: mol_type = unassigned DNA; mol_type = unassigned DNA
atccccaccttacacagccactccgattgaccacgattacgtcaaatgtaaaaaaccccaccagcaggcaacgccggacggtacagtccctgttctccctactgccagcccagggcggcacatcaatcacgggggggtgctcggacgactcattttgtcgcttcgttttgaccgaagccaggacagcacagccgtagcactctcagactctagctcaacgcaggacttctttaatgagcccaccagcttactggaaggctccaggaaatcctacacagagaagaggctgcccattctcagttcccaagcaggagcgacgggtaaagatcttcagggggccacagaagaaagaggaaaaaacgaggagtcattggagagtacagaaggcttccgggctgcagagcaaggtgtccagaagcctgctgcagaaaccccagcctctgcttgcatccctggcaagccctcagcatccacacccaccctgtgggatgggaagaagagaggggacctcccaggggagccagtggccttcccccaggggctgccggctggtgctgaggagcagcggcagtttctcacagagcagtgcatcg

SEQ ID NO: 2604 - DNA, 2422 bp, Homo sapiens
  source 1..2422: mol_type = unassigned DNA; mol_type = unassigned DNA
actttgcccggcagcggtccacagcccgccaccagcggccagtccagggaaccggagaggattggccggcaaaagtcagttgcgctcctgggcccgcttccagtagagtgccggcgccccgtccggccgcgcctgccccgccccggcccgccgcgagcgagagagcgaacgagcctccgcggccatggcccggcgctcgccctagctccactgcacagatgccacggcggagccggcggggcatctggcggatccccgtggacgagattgaccggccgggcagctttgcctggcacatgaaccgctccatcgtgctgctgctcaaggtgctggcccagctgcgggaccacagcaccctgctgaaggtgtcctccatgcttcagcggaccccagaccagggcaagaagtatctgcgagatgctgaccgccaggtcctggcgcagcgggccttcatcctcactgtgaaggtgctcgaagacacgctgagcgagctcgcagaggggtcagaacgcccagggcccaaggtctgtggcctccccggagccaggatgaccaccgatgtctcacacaaggccagtcctgaggatggccaggagggcctcccccagccgaagaagccccctctggctgatggctcagggccagggcccgagccaggaggcaaagtgggcctcctcaaccaccggcctgtggccatggatgcaggagacagtgcagaccaaagcggggagcggaaggataaagagagcccacgggcagggcccactgagcccatggacacgagtgaggccactgtttgccactcagacttggagcggacaccacccctgctgccaggtcgccccgcaagggaccggggccccgagagccggcccactgagctgtccctggaggagctgagcatcagtgcccggcagcagcccaccccgctcaccccagcccagccagcccccgcccccgcccccgccaccaccacagggaccagggcagggggccacccggaggagccgctctcccggctcagccgcaagaggaagctcctggaggacacagagtcaggcaagacacttctgttggatgcctaccgtgtgtggcagcagggccagaagggtgtggcctatgacctgggccgtgtggagaggatcatgtcggagacctacatgctcatcaagcaggtggatgaggaggctgcgctggagcaggctgtgaagttctgccaggtccatcttggggctgccgcccagagacaggcctcgggggacacccccaccactccaaagcaccccaaagacagccgagagaacttctttcctgtgacagtggtgcccacagcccctgaccctgtgccagctgactctgtccagcggcccagtgatgctcacaccaagcctcgccctgcactagctgccgccacaactattatcacctgccctccgtcagcatcagcttccaccctggaccagtccaaggaccctgggcctccccggccacacaggcctgaagctacccccagcatggcctctctgggcccagaggggaaactgaggcctgagccgagaagggatggggaggctcaggaggctgcgagtgagactcagcccctgagctctcccccaacagctgccagctccaaggcccccagcagtgggagtgcccagccaccagagggtcacccaggcaagcctgagcccagccgggctaagtcccgccccctgcccaacatgccaaagctggtcatcccctccgccgccaccaagttcccccctgagatcaccgtcacgccacccaccccaaccctgctctcccccaaaggcagcatctcggaggagaccaagcagaagctgaagtcagccatcctttctgcccagtctgctgccaacgtgaggaaggagagcctatgccagccagccctggaggtcctggagacatccagccaggagtcctcgctggagagcgagacagacgaggacgacgactacatggacatttgaggggccactgcagccccaccgccacgccccaggggaccagccaggcctggaatgccccctgggcaggaccctgggcaggaccagaggcccacatggatgccactccccacacagcccccaggcctgcccagcccacctcctcatggcatcctccctgtacccaggtcaggctgtccacaccacatgggagcccagaggaggaggggcccgccttagccatgtgaaggtggattggtcgccatctgcacgccaggcggcatccttttctatgaagtgttgactttgtaaatctgcccacacccagctggccatatccacccctcgacgccgggatgagccggctctgcctgtgtcacagtggaggggtcctttagggccaggctcacccctcaccctttttttggttgcttttctaataaagatggaacagt

SEQ ID NO: 2605 - DNA, 361 bp, Homo sapiens
  source 1..361: mol_type = unassigned DNA; mol_type = unassigned DNA
ggaaggcgccgacgaggagctgtgccgtgccgctcttggggatggggcacttgatttcctgaagagcctttgcctgtgccctagaagtggaggaagctctagaaggagtcatgactgaaagaagcccagctccacctggtgtaggcagaaagccagttggcttgctaccaccctgctggctcgtgactctgcctggtggcttcactcttcagaccagctttctctggaggccagcctcatggccataggaagtcccctcaccgttcgggagggcatctggcggatccccgtggacgagattgaccggccgggcagctttgcctggcacatgaaccgctccatcgtgctgctgctcaaggtg

SEQ ID NO: 2606 - DNA, 771 bp, Homo sapiens
  source 1..771: mol_type = unassigned DNA; mol_type = unassigned DNA
ccgtgtgtggcagcagggccagaagggtgtggcctatgacctgggccgtgtggagaggatcatgtcggagacctacatgctcatcaagcaggtggatgaggaggctgcgctggagcaggctgtgaagttctgccaggtccatcttggggctgccgcccagagacaggcctcgggggacacccccaccactccaaagcaccccaaagacagccgagagaacttctttcctgtgacagtggtgcccacagcccctgaccctgtgccagctgactctgtccagcggcccagtgatgctcacaccaagcctcgccctgcactagctgccgccacaactattatcacctgccctccgtcagcatcagcttccaccctggaccagtccaaggaccctgggcctccccggccacacaggcctgaagctacccccagcatggcctctctgggcccaggccctcccctgcttctccctccctgcctcaaggacccagcctgtttccttgccgcagaccctgcactggcccacagcctgtgtcacccctggaggctcacctgtcttcccagttgaatttcctacccatctgaaaaacgagacagccactctgcagaagtgcccagcagaaggcaggcctaagagcccccacagactgtgcgcctgagtggaggttgagttgagaagtcttcctcagctctttcccacggtggctcaagcagcaagcaggtgctgatgttttcacctgatgccatccacactgctttgaggattgtgaacat

SEQ ID NO: 2607 - DNA, 532 bp, Homo sapiens
  source 1..532: mol_type = unassigned DNA
ccatcccctctcactgccttgtgatgggatcttaagagaggctgggcctcgaagactcaggtgtggccccactgggtcaggtgtatagccctctcgggaggcggaggagccctctgggggtggggagccagcccctaccagtgtcctcttgggtggtgagtggtttcttggcagcaccaacctggactgcctcagccaggaccccagcattggccacactcccctgcccagtgtcccagggcacaacctgggcccataggacctgacacagatgcgttggagcctgcggggtggatgagtctattacctgcagtgagcccatgtccccacagagggagaagagctggcgagagtggcagagggcaccagcttcccgcctcaggagccacggcacagtccgcaggtgaagatggcccccacaagttccccggcagagccacactgctggccggcagaggctgccctgggcacaggcgctgagcccacctgcagccaggaggggaaactgaggcctgagccgagaagggatggg

SEQ ID NO: 2608 - DNA, 7072 bp, Homo sapiens
  source 1..7072: mol_type = unassigned DNA; mol_type = unassigned DNA
agccggacggcgcggtggtcgggacagactggccgttgctgtggagacgcctggagagttgtggactggggcaacctttgccagtgatgagaagtgatgctcgtggcagtgctgaatctctctgaatatgattcgaattgcagccttaaatgccagctccaccattgaggatgatcatgaaggaagctttaaaagtcacaaaacccagacaaaggaggctcaggaagcagaggcttttgcattgtaccacaaggcccttgatctgcagaaacatgaccggtttgaggagtctgccaaagcctaccatgagctcttggaggcgagcctgctgcgggaggcagtttcatccggtgatgagaaagaggggttgaaacaccctgggctgatactgaaatattccacttataagaacttggcccagctggcagcccagcgggaggatctggagacagccatggagttctacttagaggcagtgatgctggactccacagatgtcaacctctggtataagattggacatgtggccctgaggctcatccggatccccctggctcgccatgcttttgaggaagggctgcggtgcaatcctgaccactggccctgtttggataacctaatcactgtcctgtacaccctcagtgattacacaacatgtctgtacttcatctgcaaagctttggagaaggattgccggtacagcaaagggctggtcctcaaggagaagatttttgaggagcagccttgtctccggaaggactctctcagaatgttcctcaaatgctggaagtgcctcggagagagcttgctggccatgtacaatcatctcaccacctgtgagcccccacgtcccagccttggcaaaaggattgatttgtcggactaccaggaccccagccagcctcttgagtcctccatggtggtgacgccagttaacgtgatccagccaagcactgtcagcaccaacccagctgtggctgtcgccgagcctgtggtctcctacacctctgtggctacaaccagcttcccactgcacagtcctggtctgttggagacaggcgctcctgtgggtgatatttctgggggagataaatccaagaaaggggtaaaacggaagaagatttcagaagagagtggagaaacagcaaagcggcggtctgcccgtgtccgaaacaccaagtgcaaaaaagaagagaaagtagacttccaggagcttctgatgaagttcttgccgtccaggttaagaaagctggaccctgaggaggaagatgattcctttaataactatgaagtccagtcagaagccaaactggaaagcttcccaagcattgggcctcaaaggctgtcatttgactcagccacattcatggaatctgaaaagcaggacgtgcatgagttcctgctggagaacctaaccaacgggggcatcctggagctgatgatgcgctacctgaaagccatgggccacaagttcttggtaaggtggcctccaggcttggcggaggtcgtgctcagcgtctaccacagctggaggaggcacagcaccagcctgcccaacccgctgctgagggactgcagcaacaagcacatcaaggacatgatgctgatgtctctctcctgcatggaactccagctggaccagtggctgctgaccaaaggcagaagctctgcagtgtctcctcggaactgccctgctggtatggtgaatggcagatttggacctgacttcccagggacccactgcctgggtgacctcctacagctgtcatttgcctcgtcccagcgcgacctgttcgaggatggttggctggagtttgtggtccgtgtttactggctgaaggctcgcttcctggcgctgcagggagacatggagcaggccctggagaactatgacatctgcacagaaatgctccagagttccaccgccatccaggtggaggcaggggctgaacgaagagacattgtcatccggctgcccaacctccataatgactctgtggtttccctggaggagattgataagaacctgaagtcgctggagcggtgccagtccctggaggagattcagcggctgtatgaagcaggcgactacaaggctgttgtgcatctgctccgccccactttgtgcaccagtgggtttgaccgggccaaacacctggagtttatgacttccattcctgagaggccagcccagctgcttcttctgcaggactccttgctccggctgaaggactatcggcagtgttttgagtgttccgatgtggctctgaacgaggctgtccagcagatggtgaactcaggtgaggctgccgccaaggaggagtgggtggccacagtgacccaactgctgatgggcatcgagcaggccctctctgcggacagcagtggtagcatcctgaaggtatcatcctccaccactggccttgtgcggctcaccaacaacctcatccaggtcattgactgcagcatggctgtgcaggaggaggccaaggagccccacgtctcttcagtgctaccctggatcattctacaccggatcatctggcaggaggaagacaccttccattctctgtgccaccagcagcagctccaaaacccagcggaggaagggatgtcagagacgcccatgctcccatcctccctcatgctgctgaacacagcccacgagtatttgggcagaaggtcctggtgctgcaattcagatggggctctgctgcgattctatgtgcgagtactccagaaggaactggctgcatccacctctgaagacacgcacccttacaaggaggagctggagacagccttggagcagtgcttctactgcctgtacagcttccccagcaagaagagtaaggccaggtacctggaggaacactcggcccagcaggtggatcttatatgggaggatgcactgttcatgtttgagtattttaagcccaagacccttcctgaatttgacagctataagaccagcaccgtgtctgctgacttggccaacctactgaagagaattgccaccattgtgcctcgcacagagaggccagcccttagcctggacaaagtctctgcctacattgagggaacttcaactgaggtaccctgcctcccagagggggctgacccctcccctccagtggtgaacgagctttactacctcctggctgattatcatttcaaaaacaaggagcagtccaaggccatcaagttctacatgcatgacatctgcatctgccccaataggtttgattcctgggcaggcatggctctggcccgggccagccgcattcaggacaagctgaactccaatgagctgaagagtgatgggcccatttggaagcatgccacgcccgtcttgaactgcttccgtcgggccctggagattgacagctccaacttgtccctatggattgagtatggcaccatgtcctatgccttgcactcattcgcctcacgtcaattgaagcagtggagaggcgagctgccccctgagctcgtgcagcagatggagggccggcgcgacagcatgctagagacagccaagcactgtttcacatcagcagcccgctgcgagggtgatggtgacgaggaggagtggctcatccactacatgctgggcaaggtggctgagaagcagcagcagccacccaccgtttacttgctgcactacaggcaggctggccactacctgcacgaggaggctgcccgctaccccaagaagatccactaccacaacccacctgagctggccatggaggccctggaggtgtactttcggctccatgcttccatcctgaagctcctggggaagcccgattctggggttggtgcagaggtcctggtcaactttatgaaggaggctgcagaaggaccctttgccaggggcgaggagaagaacacacccaaagcttcagaaaaggagaaggcctgcctggtggacgaggactcccactcttcagctgggacactgccgggccccggagcctccctcccctcctcctctggcccaggtctgacatccccaccttacacagccactccgattgaccacgattacgtcaaatgtaaaaaaccccaccagcaggcaacgccggacgaccgaagccaggacagcacagccgtagcactctcagactctagctcaacgcaggacttctttaatgagcccaccagcttactggaaggctccaggaaatcctacacagagaagaggctgcccattctcagttcccaagcaggagcgacgggtaaagatcttcagggggccacagaagaaagaggaaaaaacgaggagtcattggagagtacagaaggcttccgggctgcagagcaaggtgtccagaagcctgctgcagaaaccccagcctctgcttgcatccctggcaagccctcagcatccacacccaccctgtgggatgggaagaagagaggggacctcccaggggagccagtggccttcccccaggggctgccggctggtgctgaggagcagcggcagtttctcacagagcagtgcatcgcctccttccgcctgtgcctgagccgcttcccccagcactataagagtctctaccgtctggccttcctctacacctacagcaagacccaccggaacctccagtgggcccgcgacgtgttgctaggcagcagtatcccgtggcaacaactgcagcacatgccggcacaggggctcttctgcgagaggaacaagaccaatttcttcaacggcatctggcggatccccgtggacgagattgaccggccgggcagctttgcctggcacatgaaccgctccatcgtgctgctgctcaaggtgctggcccagctgcgggaccacagcaccctgctgaaggtgtcctccatgcttcagcggaccccagaccagggcaagaagtatctgcgagatgctgaccgccaggtcctggcgcagcgggccttcatcctcactgtgaaggtgctcgaagacacgctgagcgagctcgcagaggggtcagaacgcccagggcccaaggtctgtggcctccccggagccaggatgaccaccgatgtctcacacaaggccagtcctgaggatggccaggagggcctcccccagccgaagaagccccctctggctgatggctcagggccagggcccgagccaggaggcaaagtgggcctcctcaaccaccggcctgtggccatggatgcaggagacagtgcagaccaaagcggggagcggaaggataaagagagcccacgggcagggcccactgagcccatggacacgagtgaggccactgtttgccactcagacttggagcggacaccacccctgctgccaggtcgccccgcaagggaccggggccccgagagccggcccactgagctgtccctggaggagctgagcatcagtgcccggcagcagcccaccccgctcaccccagcccagccagcccccgcccccgcccccgccaccaccacagggaccagggcagggggccacccggaggagccgctctcccggctcagccgcaagaggaagctcctggaggacacagagtcaggcaagacacttctgttggatgcctaccgtgtgtggcagcagggccagaagggtgtggcctatgacctgggccgtgtggagaggatcatgtcggagacctacatgctcatcaagcaggtggatgaggaggctgcgctggagcaggctgtgaagttctgccaggtccatcttggggctgccgcccagagacaggcctcgggggacacccccaccactccaaagcaccccaaagacagccgagagaacttctttcctgtgacagtggtgcccacagcccctgaccctgtgccagctgactctgtccagcggcccagtgatgctcacaccaagcctcgccctgcactagctgccgccacaactattatcacctgccctccgtcagcatcagcttccaccctggaccagtccaaggaccctgggcctccccggccacacaggcctgaagctacccccagcatggcctctctgggcccagagggagaagagctggcgagagtggcagagggcaccagcttcccgcctcaggagccacggcacagtccgcaggtgaagatggcccccacaagttccccggcagagccacactgctggccggcagaggctgccctgggcacaggcgctgagcccacctgcagccaggaggggaaactgaggcctgagccgagaagggatggggaggctcaggaggctgcgagtgagactcagcccctgagctctcccccaacagctgccagctccaaggcccccagcagtgggagtgcccagccaccagagggtcacccaggcaagcctgagcccagccgggctaagtcccgccccctgcccaacatgccaaagctggtcatcccctccgccgccaccaagttcccccctgagatcaccgtcacgccacccaccccaaccctgctctcccccaaaggcagcatctcggaggagaccaagcagaagctgaagtcagccatcctttctgcccagtctgctgccaacgtgaggaaggagagcctatgccagccagccctggaggtcctggagacatccagccaggagtcctcgctggagagcgagacagacgaggacgacgactacatggacatttgaggggccactgcagccccaccgccacgccccaggggaccagccaggcctggaatgccccctgggcaggaccctgggcaggaccagaggcccacatggatgccactccccacacagcccccaggcctgcccagcccacctcctcatggcatcctccctgtacccaggtcaggctgtccacaccacatgggagcccagaggaggaggggcccgccttagccatgtgaaggtggattggtcgccatctgcacgccaggcggcatccttttctatgaagtgttgactttgtaaatctgcccacacccagctggccatatccacccctcgacgccgggatgagccggctctgcctgtgtcacagtggaggggtcctttagggccaggctcacccctcaccctttttttggttgcttttctaataaagatggaacagtt

SEQ ID NO: 2609 - DNA, 176 bp, Homo sapiens
  source 1..176: mol_type = unassigned DNA; mol_type = unassigned DNA
gtagccgtctgcagggccccagctaagcagcccgcggagagcgagcggcgcgtgcgcccccgctgattggctggcacaaccggcaccggagccaatgggagcacgccttgttgtcaggcgcgcagccggacggcgcggtggtcgggacagactggccgttgctgtggagacgcctg

SEQ ID NO: 2610 - DNA, 53 bp, Homo sapiens
  source 1..53: mol_type = unassigned DNA
agccggacggcgcggtggtcgggacagactggccgttgctgtggagacgcctg

SEQ ID NO: 2611 - DNA, 20 bp, Homo sapiens
  source 1..20: mol_type = unassigned DNA; mol_type = unassigned DNA
cgttgctgtggagacgcctg

SEQ ID NO: 2612 - DNA, 313 bp, Homo sapiens
  source 1..313: mol_type = unassigned DNA; mol_type = unassigned DNA
ggctcagcagagcccggggcacaggccggaggggctgcaggcgcgaggctgggttacgtgaggaagctgggggtttcgcgggcagctttagagccccagtcagggaaaccgaggccgggcttcctggctgcctcgcgagcctcttcatggctctcgccgccgccctgaggtgcctagaatgggttccggcctccggggaggttcccagtaaccgcaggagccaccattgatttggcgtctgctgggtgcaaagcccagcgcgctaaccctttactcgcgacctttcgcttcaccttcacagcagccctgcgag

SEQ ID NO: 2613 - DNA, 311 bp, Homo sapiens
  source 1..311: mol_type = unassigned DNA; mol_type = unassigned DNA
ctcagcagagcccggggcacaggccggaggggctgcaggcgcgaggctgggttacgtgaggaagctgggggtttcgcgggcagctttagagccccagtcagggaaaccgaggccgggcttcctggctgcctcgcgagcctcttcatggctctcgccgccgccctgaggtgcctagaatgggttccggcctccggggaggttcccagtaaccgcaggagccaccattgatttggcgtctgctgggtgcaaagcccagcgcgctaaccctttactcgcgacctttcgcttcaccttcacagcagccctgcgag

SEQ ID NO: 2614 - DNA, 3824 bp, Homo sapiens
  source 1..3824: mol_type = unassigned DNA; mol_type = unassigned DNA
tgtgagaattgaaatgactagcattattgacccttttcagcatcccctgtgaatatttctgtttaggtttttcttcttgaaaagaaattgttattcagcccgtttaaaacaaatcaagaaacttttgggtaacattgcaattacatgaaattgataaccgcgaaaataattggaactcctgcttgcaagtgtcaacctaaaaaaagtgcttccttttgttatggaagatgtctttctgtgattgacttcaattgctgacttgtggagatgcagcgaatgtgaaatcccacgtatatgccatttccctctacgctcgctgaccgttctggaagatcttgaaccctcttctggaaaggggtacctattattactttatggggcagcagcctggaaaagtacttggggaccaaagaaggccaagcttgcctgccctgcattttatcaaaggagcagggaagaaggaatcatcgaggcatgggggtccacactgcaatgtttttgtggaacatgaagcccttcagcggccagtagcatctgactttgagcctcagggtctgagtgaagccgctcgttggaactccaaggaaaaccttctcgctggacccagtgaaaatgaccccaaccttttcgttgcactgtatgattttgtggccagtggagataacactctaagcataactaaaggtgaaaagctccgggtcttaggctataatcacaatggggaatggtgtgaagcccaaaccaaaaatggccaaggctgggtcccaagcaactacatcacgccagtcaacagtctggagaaacactcctggtaccatgggcctgtgtcccgcaatgccgctgagtatctgctgagcagcgggatcaatggcagcttcttggtgcgtgagagtgagagcagtcctggccagaggtccatctcgctgagatacgaagggagggtgtaccattacaggatcaacactgcttctgatggcaagctctacgtctcctccgagagccgcttcaacaccctggccgagttggttcatcatcattcaacggtggccgacgggctcatcaccacgctccattatccagccccaaagcgcaacaagcccactgtctatggtgtgtcccccaactacgacaagtgggagatggaacgcacggacatcaccatgaagcacaagctgggcgggggccagtacggggaggtgtacgagggcgtgtggaagaaatacagcctgacggtggccgtgaagaccttgaaggaggacaccatggaggtggaagagttcttgaaagaagctgcagtcatgaaagagatcaaacaccctaacctggtgcagctccttggggtctgcacccgggagcccccgttctatatcatcactgagttcatgacctacgggaacctcctggactacctgagggagtgcaaccggcaggaggtgaacgccgtggtgctgctgtacatggccactcagatctcgtcagccatggagtacctggagaagaaaaacttcatccacagagatcttgctgcccgaaactgcctggtaggggagaaccacttggtgaaggtagctgattttggcctgagcaggttgatgacaggggacacctacacagcccatgctggagccaagttccccatcaaatggactgcacccgagagcctggcctacaacaagttctccatcaagtccgacgtctgggcatttggagtattgctttgggaaattgctacctatggcatgtccccttacccgggaattgacctgtcccaggtgtatgagctgctagagaaggactaccgcatggagcgcccagaaggctgcccagagaaggtctatgaactcatgcgagcatgttggcagtggaatccctctgaccggccctcctttgctgaaatccaccaagcctttgaaacaatgttccaggaatccagtatctcagacgaagtggaaaaggagctggggaaacaaggcgtccgtggggctgtgagtaccttgctgcaggccccagagctgcccaccaagacgaggacctccaggagagctgcagagcacagagacaccactgacgtgcctgagatgcctcactccaagggccagggagagagcgatcctctggaccatgagcctgccgtgtctccattgctccctcgaaaagagcgaggtcccccggagggcggcctgaatgaagatgagcgccttctccccaaagacaaaaagaccaacttgttcagcgccttgatcaagaagaagaagaagacagccccaacccctcccaaacgcagcagctccttccgggagatggacggccagccggagcgcagaggggccggcgaggaagagggccgagacatcagcaacggggcactggctttcacccccttggacacagctgacccagccaagtccccaaagcccagcaatggggctggggtccccaatggagccctccgggagtccgggggctcaggcttccggtctccccacctgtggaagaagtccagcacgctgaccagcagccgcctagccaccggcgaggaggagggcggtggcagctccagcaagcgcttcctgcgctcttgctccgcctcctgcgttccccatggggccaaggacacggagtggaggtcagtcacgctgcctcgggacttgcagtccacgggaagacagtttgactcgtccacatttggagggcacaaaagtgagaagccggctctgcctcggaagagggcaggggagaacaggtctgaccaggtgacccgaggcacagtaacgcctccccccaggctggtgaaaaagaatgaggaagctgctgatgaggtcttcaaagacatcatggagtccagcccgggctccagcccgcccaacctgactccaaaacccctccggcggcaggtcaccgtggcccctgcctcgggcctcccccacaaggaagaagctggaaagggcagtgccttagggacccctgctgcagctgagccagtgacccccaccagcaaagcaggctcaggtgcaccagggggcaccagcaagggccccgccgaggagtccagagtgaggaggcacaagcactcctctgagtcgccagggagggacaaggggaaattgtccaggctcaaacctgccccgccgcccccaccagcagcctctgcagggaaggctggaggaaagccctcgcagagcccgagccaggaggcggccggggaggcagtcctgggcgcaaagacaaaagccacgagtctggttgatgctgtgaacagtgacgctgccaagcccagccagccgggagagggcctcaaaaagcccgtgctcccggccactccaaagccacagtccgccaagccgtcggggacccccatcagcccagcccccgttccctccacgttgccatcagcatcctcggccctggcaggggaccagccgtcttccaccgccttcatccctctcatatcaacccgagtgtctcttcggaaaacccgccagcctccagagcggatcgccagcggcgccatcaccaagggcgtggtcctggacagcaccgaggcgctgtgcctcgccatctctaggaactccgagcagatggccagccacagcgcagtgctggaggccggcaaaaacctctacacgttctgcgtgagctatgtggattccatccagcaaatgaggaacaagtttgccttccgagaggccatcaacaaactggagaataatctccgggagcttcagatctgcccggcgacagcaggcagtggtccagcggccactcaggacttcagcaagctcctcagttcggtgaaggaaatcagtgacatagtgcagaggtag

SEQ ID NO: 2615 - DNA, 532 bp, Homo sapiens
  source 1..532: mol_type = unassigned DNA; mol_type = unassigned DNA
tttcagcatcccctgtgaatatttctgtttaggtttttcttcttgaaaagaaattgttattcagcccgtttaaaacaaatcaagaaacttttgggtaacattgcaattacatgaaattgataaccgcgaaaataattggaactcctgcttgcaagtgtcaacctaaaaaaagtgcttccttttgttatggaagatgtctttctgtgattgacttcaattgctgacttgtggagatgcagcgaatgtgaaatcccacgtatatgccatttccctctacgctcgctgaccgttctggaagatcttgaaccctcttctggaaaggggtacctattattactttatggggcagcagcctggaaaagtacttggggaccaaagaaggccaagcttgcctgccctgcattttatcaaaggagcagggaagaaggaatcatcgaggcatgggggtccacactgcaatgtttttgtggaacatgcccttcagcggccagtagcatctgactttgagcctcagggtctgagtgaagccgct

SEQ ID NO: 2616 - DNA, 5766 bp, Homo sapiens
  source 1..5766: mol_type = unassigned DNA; mol_type = unassigned DNA
ggccttccccctgcgaggatcgccattggcccgggttggctttggaaagcggcggtggctttgggccgggctcggcctcgggaacgccaggggcccctgggtgcggacgggcgcggccaggagggggttaaggcgcaggcggcggcggggcgggggcgggcctggcgggcgccctctccgggccctttgttaacaggcgcgtcccggccaggcggagacgcggccgcggccatgggcgggcgcgggcgcgcggggcggcggtgagggcggctggcggggccgggggcgccgggggggcgcgcgggccgagccgggcctgagccgggcccgcggaccgagctgggagaggggttccggcccccgacgtgctggcgcgggaaaatgttggagatctgcctgaagctggtgggctgcaaatccaagaaggggctgtcctcgtcctccagctgttatctggaagaagcccttcagcggccagtagcatctgactttgagcctcagggtctgagtgaagccgctcgttggaactccaaggaaaaccttctcgctggacccagtgaaaatgaccccaaccttttcgttgcactgtatgattttgtggccagtggagataacactctaagcataactaaaggtgaaaagctccgggtcttaggctataatcacaatggggaatggtgtgaagcccaaaccaaaaatggccaaggctgggtcccaagcaactacatcacgccagtcaacagtctggagaaacactcctggtaccatgggcctgtgtcccgcaatgccgctgagtatctgctgagcagcgggatcaatggcagcttcttggtgcgtgagagtgagagcagtcctggccagaggtccatctcgctgagatacgaagggagggtgtaccattacaggatcaacactgcttctgatggcaagctctacgtctcctccgagagccgcttcaacaccctggccgagttggttcatcatcattcaacggtggccgacgggctcatcaccacgctccattatccagccccaaagcgcaacaagcccactgtctatggtgtgtcccccaactacgacaagtgggagatggaacgcacggacatcaccatgaagcacaagctgggcgggggccagtacggggaggtgtacgagggcgtgtggaagaaatacagcctgacggtggccgtgaagaccttgaaggaggacaccatggaggtggaagagttcttgaaagaagctgcagtcatgaaagagatcaaacaccctaacctggtgcagctccttggggtctgcacccgggagcccccgttctatatcatcactgagttcatgacctacgggaacctcctggactacctgagggagtgcaaccggcaggaggtgaacgccgtggtgctgctgtacatggccactcagatctcgtcagccatggagtacctggagaagaaaaacttcatccacagagatcttgctgcccgaaactgcctggtaggggagaaccacttggtgaaggtagctgattttggcctgagcaggttgatgacaggggacacctacacagcccatgctggagccaagttccccatcaaatggactgcacccgagagcctggcctacaacaagttctccatcaagtccgacgtctgggcatttggagtattgctttgggaaattgctacctatggcatgtccccttacccgggaattgacctgtcccaggtgtatgagctgctagagaaggactaccgcatggagcgcccagaaggctgcccagagaaggtctatgaactcatgcgagcatgttggcagtggaatccctctgaccggccctcctttgctgaaatccaccaagcctttgaaacaatgttccaggaatccagtatctcagacgaagtggaaaaggagctggggaaacaaggcgtccgtggggctgtgagtaccttgctgcaggccccagagctgcccaccaagacgaggacctccaggagagctgcagagcacagagacaccactgacgtgcctgagatgcctcactccaagggccagggagagagcgatcctctggaccatgagcctgccgtgtctccattgctccctcgaaaagagcgaggtcccccggagggcggcctgaatgaagatgagcgccttctccccaaagacaaaaagaccaacttgttcagcgccttgatcaagaagaagaagaagacagccccaacccctcccaaacgcagcagctccttccgggagatggacggccagccggagcgcagaggggccggcgaggaagagggccgagacatcagcaacggggcactggctttcacccccttggacacagctgacccagccaagtccccaaagcccagcaatggggctggggtccccaatggagccctccgggagtccgggggctcaggcttccggtctccccacctgtggaagaagtccagcacgctgaccagcagccgcctagccaccggcgaggaggagggcggtggcagctccagcaagcgcttcctgcgctcttgctccgcctcctgcgttccccatggggccaaggacacggagtggaggtcagtcacgctgcctcgggacttgcagtccacgggaagacagtttgactcgtccacatttggagggcacaaaagtgagaagccggctctgcctcggaagagggcaggggagaacaggtctgaccaggtgacccgaggcacagtaacgcctccccccaggctggtgaaaaagaatgaggaagctgctgatgaggtcttcaaagacatcatggagtccagcccgggctccagcccgcccaacctgactccaaaacccctccggcggcaggtcaccgtggcccctgcctcgggcctcccccacaaggaagaagctggaaagggcagtgccttagggacccctgctgcagctgagccagtgacccccaccagcaaagcaggctcaggtgcaccagggggcaccagcaagggccccgccgaggagtccagagtgaggaggcacaagcactcctctgagtcgccagggagggacaaggggaaattgtccaggctcaaacctgccccgccgcccccaccagcagcctctgcagggaaggctggaggaaagccctcgcagagcccgagccaggaggcggccggggaggcagtcctgggcgcaaagacaaaagccacgagtctggttgatgctgtgaacagtgacgctgccaagcccagccagccgggagagggcctcaaaaagcccgtgctcccggccactccaaagccacagtccgccaagccgtcggggacccccatcagcccagcccccgttccctccacgttgccatcagcatcctcggccctggcaggggaccagccgtcttccaccgccttcatccctctcatatcaacccgagtgtctcttcggaaaacccgccagcctccagagcggatcgccagcggcgccatcaccaagggcgtggtcctggacagcaccgaggcgctgtgcctcgccatctctaggaactccgagcagatggccagccacagcgcagtgctggaggccggcaaaaacctctacacgttctgcgtgagctatgtggattccatccagcaaatgaggaacaagtttgccttccgagaggccatcaacaaactggagaataatctccgggagcttcagatctgcccggcgacagcaggcagtggtccagcggccactcaggacttcagcaagctcctcagttcggtgaaggaaatcagtgacatagtgcagaggtagcagcagtcaggggtcaggtgtcaggcccgtcggagctgcctgcagcacatgcgggctcgcccatacccgtgacagtggctgacaagggactagtgagtcagcaccttggcccaggagctctgcgccaggcagagctgagggccctgtggagtccagctctactacctacgtttgcaccgcctgccctcccgcaccttcctcctccccgctccgtctctgtcctcgaattttatctgtggagttcctgctccgtggactgcagtcggcatgccaggacccgccagccccgctcccacctagtgccccagactgagctctccaggccaggtgggaacggctgatgtggactgtctttttcatttttttctctctggagcccctcctcccccggctgggcctccttcttccacttctccaagaatggaagcctgaactgaggccttgtgtgtcaggccctctgcctgcactccctggccttgcccgtcgtgtgctgaagacatgtttcaagaaccgcatttcgggaagggcatgcacgggcatgcacacggctggtcactctgccctctgctgctgcccggggtggggtgcactcgccatttcctcacgtgcaggacagctcttgatttgggtggaaaacagggtgctaaagccaaccagcctttgggtcctgggcaggtgggagctgaaaaggatcgaggcatggggcatgtcctttccatctgtccacatccccagagcccagctcttgctctcttgtgacgtgcactgtgaatcctggcaagaaagcttgagtctcaagggtggcaggtcactgtcactgccgacatccctcccccagcagaatggaggcaggggacaagggaggcagtggctagtggggtgaacagctggtgccaaatagccccagactgggcccaggcaggtctgcaagggcccagagtgaaccgtcctttcacacatctgggtgccctgaaagggcccttcccctcccccactcctctaagacaaagtagattcttacaaggccctttcctttggaacaagacagccttcacttttctgagttcttgaagcatttcaaagccctgcctctgtgtagccgccctgagagagaatagagctgccactgggcacctgcgcacaggtgggaggaaagggcctggccagtcctggtcctggctgcactcttgaactgggcgaatgtcttatttaattaccgtgagtgacatagcctcatgttctgtgggggtcatcagggagggttaggaaaaccacaaacggagcccctgaaagcctcacgtatttcacagagcacgcctgccatcttctccccgaggctgccccaggccggagcccagatacgggggctgtgactctgggcagggacccggggtctcctggaccttgacagagcagctaactccgagagcagtgggcaggtggccgcccctgaggcttcacgccgggagaagccaccttcccaccccttcataccgcctcgtgccagcagcctcgcacaggccctagctttacgctcatcacctaaacttgtactttatttttctgatagaaatggtttcctctggatcgttttatgcggttcttacagcacatcacctctttgcccccgacggctgtgacgcagccggagggaggcactagtcaccgacagcggccttgaagacagagcaaagcgcccacccaggtcccccgactgcctgtctccatgaggtactggtcccttccttttgttaacgtgatgtgccactatattttacacgtatctcttggtatgcatcttttatagacgctcttttctaagtggcgtgtgcatagcgtcctgccctgccccctcgggggcctgtggtggctccccctctgcttctcggggtccagtgcattttgtttctgtatatgattctctgtggttttttttgaatccaaatctgtcctctgtagtattttttaaataaatcagtgtttacattagaa

SEQ ID NO: 2617 - DNA, 1544 bp, Homo sapiens
  source 1..1544: mol_type = unassigned DNA; mol_type = unassigned DNA
gtgcttatgagataaacgacagggtaactgtccacattggtcccagtttatgagggagaagagatcataatctacaaaaatttgcaaggtgaccaggggaaaagagtacggcgcctcatctcccagagatcttccttggagaccctggaagatattgaggagaacgcccctctccggagatgtcgaactctctcaggttcacccagaccaaagaattttaagaagattcattttatcaagaacatgcggcaacacgataccaggaatggcagaatagtccttatcagtggcagaagatccttctgtagtatattttcagtgctgccgtatcgcgacagtacccaagtcggggacttgaagttggacggaggaagacaatcaactggtgcagtgagtttgaaagagatcattggtctggaaggtgtggagctgggtgctgatgggaagactgtttcctatacccaatttctgttacccacaaatgcctttggagcccggagaaataccatagactccacctcctctttctcccagttccgtaacctgagccaccgcagcctctccataggccgggcaagcggcacccaggggagcctcgacacaggtagtgacctgggagactttatggactatgacccaaatctcttggatgacccccagtggccttgtggcaaacacaaacgcgttctgatcttcccttcctacatgacaacagtgattgactacgtgaagccctcggatctcaagaaggacatgaacgagaccttcaaggagaagtttcctcacattaagctgacactcagcaaaattaggagtctgaaacgagagatgcggaagcttgcgcaggaggactgtggccttgaggagcccacggtggccatggccttcgtctactttgaaaagctcgccctcaaggggaaactcaacaaacagaaccggaagctgtgtgctggggcatgtgtgctgttagcagccaaaattggaagtgacctcaaaaaacacgaagtcaagcatttaattgacaaactggaagagaagttccggctgaacaggcgagaactgattgcctttgaattcccggtgttagtggccttggaattcgccctccacttgcccgagcacgaagtcatgccccactacagacggctggtccagagttcctagcactggccccgaggacagccaagggccatttcttctcagcttggtggagcagcacttacttactactggaaatgaaaaaaagtagaactcagaataccagacttttcttcctctcgacatagtttggggagaagcagtactagaaactttccaaggagtcttgggtgtgtagccaagaggagccatgagctatggactcctcaagcacgggaagaggaggtgtgtgctgagaacagagaggccctgccctctgtccactagcgagaatccctagctgccccagcccagtctttctccccggcattcacaaactttgcaagcgtggtccagggccttctccagatctgttccaacttggagtgtgaagggcttgagcatac

SEQ ID NO: 2618 - DNA, 2074 bp, Homo sapiens
  source 1..2074: mol_type = unassigned DNA; mol_type = unassigned DNA
gtgcttatgagataaacgacagggtaactgtccacattggtcccagtttatgagggagaagagatcataatctacaaaaatttgcaagacggcgcctcatctcccagagatcttccttggagaccctggaagatattgaggagaacgcccctctccggagatgtcgaactctctcaggttcacccagaccaaagaattttaagaagattcattttatcaagaacatgcggcaacacgataccaggaatggcagaatagtccttatcagtggcagaagatccttctgtagtatattttcagtgctgccgtatcgcgacagtacccaagtcggacaacagtgattgactacgtgaagccctcggatctcaagaaggacatgaacgagaccttcaaggagaagtttcctcacattaagctgacactcagcaaaattaggagtctgaaacgagagatgcggaagcttgcgcaggaggactgtggccttgaggagcccacggtggccatggccttcgtctactttgaaaagctcgccctcaaggggaaactcaacaaacagaaccggaagctgtgtgctggggcatgtgtgctgttagcagccaaaattggaagtgacctcaaaaaacacgaagtcaagcatttaattgacaaactggaagagaagttccggctgaacaggcgagaactgattgcctttgaattcccggtgttagtggccttggaattcgccctccacttgcccgagcacgaagtcatgccccactacagacggctggtccagagttcctagcactggccccgaggacagccaagggccatttcttctcagcttggtggagcagcacttacttactactggaaatgaaaaaaagtagaactcagaataccagacttttcttcctctcgacatagtttggggagaagcagtactagaaactttccaaggagtcttgggtgtgtagccaagaggagccatgagctatggactcctcaagcacgggaagaggaggtgtgtgctgagaacagagaggccctgccctctgtccactagcgagaatccctagctgccccagcccagtctttctccccggcattcacaaactttgcaagcgtggtccagggccttctccagatctgttccaacttggagtgtgaagggcttgagcatacgggggaagagagtctgcagaagttgggggaaaacttttaaaagataccctcattgtgtcaaagagtgtgccaatctatttttgtatcagcattggaagtgcactttcccctggggcgtgtgggtgtgtgaatgtgcaagtgtctgagagatactgcatcagccctagacccccagagccagtcccgccctttacagagcagcccttagcctggggccatgggtcaggctgaccttcaacaattatttctagatgatttctggataagaattgctctctcggtaccagacagtttgacatcctccacccttagaaaatgactgacattgttttgttactgctcctacccaccaaggggataaagaaggcgagttctgagtgttggatgagtcagtcgcgtggaaggacgtggagcgtggcgctctgtaacttcctgccgtctgccaccccgccacgtgtatttaaccctcgcactttctccactgtggagatggctggggcggcgccccacagtgtgtattcctgtcctctatgttagagtgcatcagaagcacatttactgtgctatctatatcgctatataaaagtgttttataaaaacccagaataggagcacgacgcatgattggtgtttgaggcgtttgccagctgggacaaactgcgtttggagctgtggttaagctgactaaggaggcggtggctctttcttaacattcccacgtgcccagggctgttcatgcaagattttaatggtgacttgtcctggcttactgggacagtctgtatgaggcatgtcaccacactgtcgcctcatagctgcaagagagaggcaccagctgaagttcccctgactgaagagagcctgtggccatgtaaaaagagaattaaactcttgttgctttttgtat

SEQ ID NO: 2619 - DNA, 343 bp, Homo sapiens
  source 1..343: mol_type = unassigned DNA; mol_type = unassigned DNA
acctataaatacggacacccggccccggagcccgcgagccagcggccaggcgaccggcgggcggccagccagcgagccgaactagccgagctaggccgacttcgcagaactactgctccctggagcagccaggccagggcggcagcaccagcgccttcgagcagctgcagaggtcccgacggcgcctcatctcccagagatcttccttggagaccctggaagatattgaggagaacgcccctctccggagatgtcgaactctctcaggttcacccagaccaaagaattttaagaagattcattttatcaagaacatgcggcaacacgataccaggaatggcag

SEQ ID NO: 2620 - DNA, 5002 bp, Homo sapiens
  source 1..5002: mol_type = unassigned DNA; mol_type = unassigned DNA
atggcggcggcggcggcggccgccaccacggccgcctgcagcagcggcagcgccggcaccgacgccgcgggcgccagcggattgcagcagccgccgccgcagccccagcctcagcccgcggccgccgcgccggcccagccgccgcccgaacccccccggaagccgcgcatggacccgcggcgccgccaggctgccctctccttcctcaccaacatctcgctggacggccggctgccgccgcaggacgcggagtggggcggtggcgaggagggcggcgcggccaagccgggcgccggcggcgcctgcggcgcgaggactcggttcagcttgctcgccgctgccgagcggggcggctgcatcgcgctcgccgcgccgggcacgccggctgcggggttagccgctgggtccggcccctgcctcccacagccctcgtcgctgccgcccttgattcctggcggccatgcgaccgtgtccggccccggggtggcgcgggggttcgcgagtcccctgggcgccggccgggcgtcgggggagcagtggcagccgccccggccggcgcctctcgccgcctgtgcccaactgcagctgctcgacgggtccggggccgccgggcaggaggagttggaggaggacgatgcctttatcagcgtgcaggtgccggcggccgcctttttgggctccgggacccccgggagtgggagcggcagtcggggacgcctcaactcgttcactcagggaatcctgcccatcgccttctccaggccgacttcgcagaactactgctccctggagcagccaggccagggcggcagcaccagcgccttcgagcagctgcagaggtcccgacggcgcctcatctcccagagatcttccttggagaccctggaagatattgaggagaacgcccctctccggagatgtcgaactctctcaggttcacccagaccaaagaattttaagaagattcattttatcaagaacatgcggcaacacgataccaggaatggcagaatagtccttatcagtggcagaagatccttctgtagtatattttcagtgctgccgtatcgcgacagtacccaagtcggggacttgaagttggacggaggaagacaatcaactggtgcagtgagtttgaaagagatcattggtctggaaggtgtggagctgggtgctgatgggaagactgtttcctatacccaatttctgttacccacaaatgcctttggagcccggagaaataccatagactccacctcctctttctcccagttccgtaacctgagccaccgcagcctctccataggccgggcaagcggcacccaggggagcctcgacacaggtagtgacctgggagactttatggactatgacccaaatctcttggatgacccccagtggccttgtggcaaacacaaacgcgttctgatcttcccttcctacatgacaacagtgattgactacgtgaagccctcggatctcaagaaggacatgaacgagaccttcaaggagaagtttcctcacattaagctgacactcagcaaaattaggagtctgaaacgagagatgcggaagcttgcgcaggaggactgtggccttgaggagcccacggtggccatggccttcgtctactttgaaaagctcgccctcaaggggaaactcaacaaacagaaccggaagctgtgtgctggggcatgtgtgctgttagcagccaaaattggaagtgacctcaaaaaacacgaagtcaagcatttaattgacaaactggaagagaagttccggctgaacaggcgagaactgattgcctttgaattcccggtgttagtggccttggaattcgccctccacttgcccgagcacgaagtcatgccccactacagacggctggtccagagttcctagcactggccccgaggacagccaagggccatttcttctcagcttggtggagcagcacttacttactactggaaatgaaaaaaagtagaactcagaataccagacttttcttcctctcgacatagtttggggagaagcagtactagaaactttccaaggagtcttgggtgtgtagccaagaggagccatgagctatggactcctcaagcacgggaagaggaggtgtgtgctgagaacagagaggccctgccctctgtccactagcgagaatccctagctgccccagcccagtctttctccccggcattcacaaactttgcaagcgtggtccagggccttctccagatctgttccaacttggagtgtgaagggcttgagcatacgggggaagagagtctgcagaagttgggggaaaacttttaaaagataccctcattgtgtcaaagagtgtgccaatctatttttgtatcagcattggaagtgcactttcccctggggcgtgtgggtgtgtgaatgtgcaagtgtctgagagatactgcatcagccctagacccccagagccagtcccgccctttacagagcagcccttagcctggggccatgggtcaggctgaccttcaacaattatttctagatgatttctggataagaattgctctctcggtaccagacagtttgacatcctccacccttagaaaatgactgacattgttttgttactgctcctacccaccaaggggataaagaaggcgagttctgagtgttggatgagtcagtcgcgtggaaggacgtggagcgtggcgctctgtaacttcctgccgtctgccaccccgccacgtgtatttaaccctcgcactttctccactgtggagatggctggggcggcgccccacagtgtgtattcctgtcctctatgttagagtgcatcagaagcacatttactgtgctatctatatcgctatataaaagtgttttataaaaacccagaataggagcacgacgcatgattggtgtttgaggcgtttgccagctgggacaaactgcgtttggagctgtggttaagctgactaaggaggcggtggctctttcttaacattcccacgtgcccagggctgttcatgcaagattttaatggtgacttgtcctggcttactgggacagtctgtatgaggcatgtcaccacactgtcgcctcatagctgcaagagagaggcaccagctgaagttcccctgactgaagagagcctgtggccatgtaaaaagagaattaaactcttgttgctttttgtatacctgtatgcgtttgtgtagacgtgtgtctcaccagtcacctttgccctgcattgctgatccccttgcgcacactgattctagtgaggtcacagattcggagcttcacacaccagcccagagaaagggcgatggaaccgaaccgagggtctgcagctttcgttagcagagctgtcagattcttgacagtcttggaggatggagaaattcaagcagcagctggtgagggccaaaacagaatacttggcttcttcagaatcttagattgcactgagtttagtcctaaatattttgctaacaaatttccttggccagaatcagttgtaagacagtgatttgggtggtggggggagggaggagggagaggatatgattaatgtggtctctttggctgatcgaaagctagatcaactggtacttagggcacttgctgtttataaagcaaaattgagaaaatattcaaggtgcctccatcgcctgaactacaaaatgcccttggccttcctcacatggggtctgtcaccttgcatctctgataagccatccaccttcctggtcagtgcctacagggggagagcctttctgagaagcaggtcctgtggtatctgagaatggtctagagagctccccactgcccatctgcccccgaatttcctgccaagctctggggagtggggtggggggagggacgtccgatggatgacaggccgccagcccagacgtggggagagaagcctgagtcctttcctgtgtgataaaatcaggctaatttacttggatttggggtgatttgtttggtttttagcatttatgaggtgagcccatgaagttagtggtccattactttttaaagatgcattttcattttaaactgtctcctggcctgtggatttgtggaatggacagttttgtgggttttaatttatttgtgaggagtcggggctgagaaggcattttatcaggaggtctccttttgcacgtccatgacatgagcttttcggaggcaaaggaagtggaggagggtgagagatgcaggtcactgccagaggcacctctgtgacacggaacattccagacacgtcgcagccttgggcttcggcgaggaggaagtctgagcctgtgaagcgagaaggccaggcagtagactggctctgaggttttgccctttgacctcctccacagagggcagcttcagccccttgtaagccctgccccctctcaggactgccctgaggcctctccagtcctccccacactcagagatctgtggggaagctccgcccagccacactccttgggataatactagccggttctgcctgattccttttcccccggagccagcctagggggcccgggactcctctagtgagccttgactgttaggtaagagacaggaagcagacaagccaagaggttgctgcagctgcccccaggaggaaacgggcagcagggagtgtggcccagcccccactgtacccctccaggggcccgagcccttgccagcccaatgacaccttgaagtcaccacttttcctttcttgcccgctaataaaacctatttaaacaggaaattcataccaaatgcaaatgggttttgttttccttggcattttgttgttccgatcacagatttccctgccagggtgtctgtggttatcagctgcaggctcagcttggggcggccgcttcacacaagccactctgtaccacgtgccctaccttagtgacgggagtaaggagcttccttcccctccatgtcattccttcctgttcccttcattccccaacagcaaataaaactgttgaatgct

SEQ ID NO: 2621 - DNA, 604 bp, Homo sapiens
  source 1..604: mol_type = unassigned DNA; mol_type = unassigned DNA
cggccgcctttttgggctccgggacccccgggagtgggagcggcagtcggggacgcctcaactcgttcactcagggaatcctgcccatcgccttctccaggccgacttcgcagaactactgctccctggagcagccaggccagggcggcagcaccagcgccttcgagcagctgcagaggtcccgacggcgcctcatctcccagagatcttccttggagaccctggaagatattgaggagaacgcccctctccggagatgtcgaactctctcaggttcacccagaccaaagaattttaagaagattcattttatcaagaacatgcggcaacacgataccaggaatggcagaatagtccttatcagtggcagaagatccttctgtagtatattttcagtgctgccgtatcgcgacagtacccaagtcgggtatgtatatgcatgcatgctttgtagttctctgggtgaaaagatctcacaccaatgtacataatgtggccatcctttccattttcaagaagttgccttgctttgatactgcaaattcagtatttgtacactggaatgataaaaagatgttccactttcttttcagccagaaagctt

SEQ ID NO: 2622 - DNA, 519 bp, Homo sapiens
  source 1..519: mol_type = unassigned DNA; mol_type = unassigned DNA
gggagcggcagtcggggacgcctcaactcgttcactcagggaatcctgcccatcgccttctccaggccgacttcgcagaactactgctccctggagcagccaggccagggcggcagcaccagcgccttcgagcagctgcagaggtcccgacggcgcctcatctcccagagatcttccttggagaccctggaagatattgaggagaacgcccctctccggagatgtcgaactctctcaggttcacccagaccaaagaattttaagaagattcattttatcaagaacatgcggcaacacgataccaggaatggcagctcctgagtctccttgggacccctgatgagcacagcccaggctctcagtctgcgggccagatccacggctgatttgctcttctgaccctgaaaacgctggcatggaggctcccgcgtccccagacctgctgaccgtgtgatagaggccccagtattgaggaggatttggacttctcatctcagcaaggaccagagtgcagctcaa

SEQ ID NO: 2623 - DNA, 413 bp, Homo sapiens
  source 1..413: mol_type = unassigned DNA; mol_type = unassigned DNA
ctcagggaatcctgcccatcgccttctccaggccgacttcgcagaactactgctccctggagcagccaggccagggcggcagcaccagcgccttcgagcagctgcagaggtcccgacggcgcctcatctcccagagatcttccttggagaccctggaagatattgaggagaacgcccctctccggaggaaaatccatgaataacgttgagaagcccctggagtttcgagaggctactagaagccatggtccttggaacaacgtggccactgtgagccgaaggaaaccgggtgactcggggtaccggctacagagggctctcccctcttcaggaattcccaggcagggctgttgagcctcgggatgcagtgtccttgagtctcgaggtgtcgaggagaggctggaggaggacgt

SEQ ID NO: 2624 - DNA, 579 bp, Homo sapiens
  source 1..579: mol_type = unassigned DNA; mol_type = unassigned DNA
ctggagcagccaggccagggcggcagcaccagcgccttcgagcagctgcagaggtcccgacggcgcctcatctcccagagatcttccttggagaccctggaagatattgaggagaacgcccctctccggaggtaattttctgtttcatttatgtatatgtaaacagtacaccatgacagccagagattgattttggttttttaacttcttgatctatagaattaaatttaaaaataaccatctgaactccagggactatgggacatctcctagtgtctaacccacctctgaagaccactagaactaaacaacgttaaatccaattaggtgttggagtagcccaatttgcatggagatttgggtgcttttctttccgtggcgcctcttcattttgtaaactgctgcttaatggaacaagagcccagcattgtcccggcctatcccccaggtgcagtcacacagtaggtacagtcctggacttcattctcagcaggaggggcaacaagaactcctcaggaggtaaccacgatgtcgctccctggctaggtgctgggaagcccaattaggatagttgtgagt

SEQ ID NO: 2625 - DNA, 584 bp, Homo sapiens
  source 1..584: mol_type = unassigned DNA; mol_type = unassigned DNA
agaaacacgatccccaggcccagcctcagacccactgggtcagaagctctggggcggggcccagcaatctatttcaacaaggccccaacttgcgcctgtcgcccgttcaggcttgggagcagccactgtggacaaagccttgtgtacctccagctttactggaccttctggaagatgtgaacagtgtctagtgctccagaaaagattttatttattctagcacaaatggacagaagttatcgctgatgtgggggctctgctatccagacggcgcctcatctcccagagatcttccttggagaccctggaagatattgaggagaacgcccctctccggagagatactgcatcagccctagacccccagagccagtcccgccctttacagagcagcccttagcctggggccatgggtcaggctgaccttcaacaattatttctagatgatttctggataagaattgctctctcggtaccagacagtttgacatcctccacccttagaaaatgactgacattgttttgttactgctcctacccaccaaggggataaagaaggcgagttctgagtgttggatgagtca

SEQ ID NO: 2626 - DNA, 2471 bp, Homo sapiens
  source 1..2471: mol_type = unassigned DNA; mol_type = unassigned DNA
ggccatttttcttcctggtgtttgaatgactcataaaatgagtttggagtggtctgaagcctctgcctccttccttgaatgctttctaagaggggctgccatgcaagaatatatgctgattttcccatacggcgcctcatctcccagagatcttccttggagaccctggaagatattgaggagaacgcccctctccggagatgtcgaactctctcaggttcacccagaccaaagaattttaagaagattcattttatcaagaacatgcggcaacacgataccaggaatggcagaatagtccttatcagtggcagaagatccttctgtagtatattttcagtgctgccgtatcgcgacagtacccaagtcggggacttgaagttggacggaggaagacaatcaactggtgcagtgagtttgaaagagatcattggtctggaaggtgtggagctgggtgctgatgggaagactgtttcctatacccaatttctgttacccacaaatgcctttggagcccggagaaataccatagactccacctcctctttctcccagttccgtaacctgagccaccgcagcctctccataggccgggcaagcggcacccaggggagcctcgacacaggtagtgacctgggagactttatggactatgacccaaatctcttggatgacccccagtggccttgtggcaaacacaaacgcgttctgatcttcccttcctacatgacaacagtgattgactacgtgaagccctcggatctcaagaaggacatgaacgagaccttcaaggagaagtttcctcacattaagctgacactcagcaaaattaggagtctgaaacgagagatgcggaagcttgcgcaggaggactgtggccttgaggagcccacggtggccatggccttcgtctactttgaaaagctcgccctcaaggggaaactcaacaaacagaaccggaagctgtgtgctggggcatgtgtgctgttagcagccaaaattggaagtgacctcaaaaaacacgaagtcaagcatttaattgacaaactggaagagaagttccggctgaacaggcgagaactgattgcctttgaattcccggtgttagtggccttggaattcgccctccacttgcccgagcacgaagtcatgccccactacagacggctggtccagagttcctagcactggccccgaggacagccaagggccatttcttctcagcttggtggagcagcacttacttactactggaaatgaaaaaaagtagaactcagaataccagacttttcttcctctcgacatagtttggggagaagcagtactagaaactttccaaggagtcttgggtgtgtagccaagaggagccatgagctatggactcctcaagcacgggaagaggaggtgtgtgctgagaacagagaggccctgccctctgtccactagcgagaatccctagctgccccagcccagtctttctccccggcattcacaaactttgcaagcgtggtccagggccttctccagatctgttccaacttggagtgtgaagggcttgagcatacgggggaagagagtctgcagaagttgggggaaaacttttaaaagataccctcattgtgtcaaagagtgtgccaatctatttttgtatcagcattggaagtgcactttcccctggggcgtgtgggtgtgtgaatgtgcaagtgtctgagagatactgcatcagccctagacccccagagccagtcccgccctttacagagcagcccttagcctggggccatgggtcaggctgaccttcaacaattatttctagatgatttctggataagaattgctctctcggtaccagacagtttgacatcctccacccttagaaaatgactgacattgttttgttactgctcctacccaccaaggggataaagaaggcgagttctgagtgttggatgagtcagtcgcgtggaaggacgtggagcgtggcgctctgtaacttcctgccgtctgccaccccgccacgtgtatttaaccctcgcactttctccactgtggagatggctggggcggcgccccacagtgtgtattcctgtcctctatgttagagtgcatcagaagcacatttactgtgctatctatatcgctatataaaagtgttttataaaaacccagaataggagcacgacgcatgattggtgtttgaggcgtttgccagctgggacaaactgcgtttggagctgtggttaagctgactaaggaggcggtggctctttcttaacattcccacgtgcccagggctgttcatgcaagattttaatggtgacttgtcctggcttactgggacagtctgtatgaggcatgtcaccacactgtcgcctcatagctgcaagagagaggcaccagctgaagttcccctgactgaagagagcctgtggccatgtaaaaagagaattaaactcttgttgctttttgta

SEQ ID NO: 2627 - DNA, 1658 bp, Homo sapiens
  source 1..1658: mol_type = unassigned DNA; mol_type = unassigned DNA
gggcggggcgcggcggtacctgggccgccagggagccgggggtgggctctccggggacagccggcagcgcccccagatctgcaccgccagccgccgggagctccgggctccgggcgtagaggctgcgctgtcacatgggcggcggcgacggggccgcatttaagcggccgggggacggcgcccgcctccagcgcgtcctcgggcttggctcccgccgggagccccgttctctgcccgccgggggccccgcgccgcgccgcaccgcgccgcccccgccgggccatgcgagcgcgggccccgccgcgatgagctcgcacatcgccaaaagcgagtccaagacgtcgctgctgaaggcggcggcggcggcggcgagcgggggcagccgggctccccgccacggccctgcccgggacccggggctgcctagccgccggctacccggctcctgcccggcgacgccgcagtcgtccggggaccccagttcgcggaggcccctgtgccggccggcgccgcgagaggagggcgcgcgggggagccagcgtgtgctcccccaggcgcactgcaggccccgggaggcgctgccggccgcggcgtcccgaccttcgccgtcgtcgccgctgccgccggcccgcgggcgggatggggaggaacggggactgtccccggcgctcggcctccggggctctctgcgagcccggggccgcggggactccgttccagccgccgcgtccgaggcggacccgttcctccaccggctgcgccccatgctcagctccgcctttggccaggatagatcactgcgaccagaggaaattgaagagctccgagaggccttcagagaattcgacaaggacaaggatggctacatcaactgccgggatctgggcaactgcatgcgcaccatgggctacatgcccaccgagatggagctcatcgaactgtcccagcagatcaacatgaacctgggtggccatgtagattttgatgacttcgtggagctaatggggcctaaactcctggcagagacagcagatatgattggtgtaaaggaactgcgagatgctttccgagagtttgacaccaatggtgatggggaaataagcaccagtgagctgcgagaggctatgaggaagctcctgggtcatcaggtgggacaccgagacatagaggaaattatccgagatgtggacctcaatggggatggacgagtggactttgaagagtttgtccggatgatgtcccgctgaggccgcgagggcccctccaggactgccaagctcccaaaggcggggctaagaggagctagagcttgcctcacccgctgtagccgccgagagcccaggatgtactggcggatggggcctgcctgcaccccggggaggcgcccaccccggacccccacccctccgcactgtgaaagactaactcctgcaactggaaagcgggggcgcccgccgacgaggaggccaccgtgccaagccggcagaggtcatgccaggcgccaagggccatgtgcccagctgctgctggctgggtgggccagggagcccgccagcagaccccacacagcatgtccgccccagggcaaagcctcccaccttcgctctgcgcccgtcccagctcgcctcagccctgttatctcagaaccaataaaaata

SEQ ID NO: 2628 - DNA, 1369 bp, Homo sapiens
  source 1..1369: mol_type = unassigned DNA; mol_type = unassigned DNA
cggcaggcaccctggcttcgggaacccaaactagccagcttccctttctgggcctgctggcctaattcccagccgcagctgccattctgggcccccctccctgaggccatctccctgcagatttggcagcggggaaaggaggggccgagagaaggggagagaaccagagacaggactgagcgctaatctgatgtagatgatccggcagccttctccagcttggttcccctctgccatcagctctccaggtgactttccctgtgccctgcactctccccttctgctttcatctccttaagaaagtgcccagaaagttaaacccacacacaaacacacacacaatccacccaaaaaaaaaaaaaatcggagagcaggagcaggcagacgagtaagagagcacgcgcgcaagagagggctcacatccgtcctggaggaagaacggcacagacggagggaggctggggttggcagagactgggacggaagtccctcagtcccccaggagcctccttcatggacccggggatcccaagaggggctgcctcaacttaggatgggcaactgtgtcaagtatccactgagaaatctctcaaggaagatgtgccaggaggaacagaccagctacatggtggtgcagacgagcgaggaggggctggcggctgacgccgagctcccgggaccgctcctgatgctggcccagaactgcgcagtcatgcacaacctgctgggccctgcctgcattttcctgcgcaagggcttcgctgagaacaggcagcctgatagatcactgcgaccagaggaaattgaagagctccgagaggccttcagagaattcgacaaggacaaggatggctacatcaactgccgggatctgggcaactgcatgcgcaccatgggctacatgcccaccgagatggagctcatcgaactgtcccagcagatcaacatgaacctgggtggccatgtagattttgatgacttcgtggagctaatggggcctaaactcctggcagagacagcagatatgattggtgtaaaggaactgcgagatgctttccgagagtttgacaccaatggtgatggggaaataagcaccagtgagctgcgagaggctatgaggaagctcctgggtcatcaggtgggacaccgagacatagaggaaattatccgagatgtggacctcaatggggatggacgagtggactttgaagagtttgtccggatgatgtcccgctgaggccgcgagggcccctccaggactgccaagctcccaaaggcggggctaagaggagctagagcttgcctcacccgctgtagccgccgagagcccaggatgtactggcggatggggcctgcctgcaccccgggg

SEQ ID NO: 2629 - DNA, 770 bp, Homo sapiens
  source 1..770: mol_type = unassigned DNA; mol_type = unassigned DNA
ccgtcctggaggaagaacggcacagacggagggaggctggggttggcagagactgggacggaagtccctcagtcccccaggagcctccttcatggacccggggatcccaagaggggctgcctcaacttaggatgggcaactgtgtcaagtatccactgagaaatctctcaaggaaggatagatcactgcgaccagaggaaattgaagagctccgagaggccttcagagaattcgacaaggacaaggatggctacatcaactgccgggatctgggcaactgcatgcgcaccatgggctacatgcccaccgagatggagctcatcgaactgtcccagcagatcaacatgaacctgggtggccatgtagattttgatgacttcgtggagctaatggggcctaaactcctggcagagacagcagatatgattggtgtaaaggaactgcgagatgctttccgagagtttgacaccaatggtgatggggaaataagcaccagtgagctgcgagaggctatgaggaagctcctgggtcatcaggtgggacaccgagacatagaggaaattatccgagatgtggacctcaatggggatggacgagtggactttgaagagtttgtccggatgatgtcccgctgaggccgcgagggcccctccaggactgccaagctcccaaaggcggggctaagaggagctagagcttgcctcacccgctgtagccgccgagagcccaggatgtactggcggatggggcctgcctgcaccccggggagg

SEQ ID NO: 2630 - DNA, 1857 bp, Homo sapiens
  source 1..1857: mol_type = unassigned DNA; mol_type = unassigned DNA
ggtgggtgcctgtaaaccaagctactcaggaggctgaggcaggagaatcacttgaatccgggagtcagaggttgcagtgagccaagatcacgccactgcactccagcctgggcgacagagtgcactagccacacacgaaaaaggagggggcatgtttccactttgccccagtccccacctctcacaccctgcctgcttcatttatgtcagcaatggcacctgcatgtgcaacctctggtctggcagaccagccaagcctggtctccatgctgccagctccgattgccctcactgccttccagcggggatctggctggagtaggacaagtctgtttgggagctgggaggaatgacttagccctggagattgactgaattgggaggttgggagcattttgggaaaggatgttgtctcattaggctctgagtgaacacttcccattggtgagaatagaagccccccgctgcccctgtctcttcatgcacttgggtgtgtgattctgtgcatatgtatgtgccagtgcgtgcgtgcgtgtgtgtgtgtgtgtgtgtgcgcatgtgccacacagagggcatcacattcagctctccccggaaccaccatttccgtcaaggattggagactctgtctgttggaccaatttgatgcctgtgcacgctcagggctctctgaaccccgctccttgactctcagggtcccctcttgcggaaagcccctcccgggaccaggagccaggctgggcagggaggtgacaccctgcctctcttttgcatttgcttggtgctggctgaagatgtgccaggaggaacagaccagctacatggtggtgcagacgagcgaggaggggctggcggctgacgccgagctcccgggaccgctcctgatgctggcccagaactgcgcagtcatgcacaacctgctgggccctgcctgcattttcctgcgcaagggcttcgctgagaacaggcagcctgatagatcactgcgaccagaggaaattgaagagctccgagaggccttcagagaattcgacaaggacaaggatggctacatcaactgccgggatctgggcaactgcatgcgcaccatgggctacatgcccaccgagatggagctcatcgaactgtcccagcagatcaacatgaacctgggtggccatgtagattttgatgacttcgtggagctaatggggcctaaactcctggcagagacagcagatatgattggtgtaaaggaactgcgagatgctttccgagagtttgacaccaatggtgatggggaaataagcaccagtgagctgcgagaggctatgaggaagctcctgggtcatcaggtgggacaccgagacatagaggaaattatccgagatgtggacctcaatggggatggacgagtggactttgaagagtttgtccggatgatgtcccgctgaggccgcgagggcccctccaggactgccaagctcccaaaggcggggctaagaggagctagagcttgcctcacccgctgtagccgccgagagcccaggatgtactggcggatggggcctgcctgcaccccggggaggcgcccaccccggacccccacccctccgcactgtgaaagactaactcctgcaactggaaagcgggggcgcccgccgacgaggaggccaccgtgccaagccggcagaggtcatgccaggcgccaagggccatgtgcccagctgctgctggctgggtgggccagggagcccgccagcagaccccacacagcatgtccgccccagggcaaagcctcccaccttcgctctgcgcccgtcccagctcgcctcagccctgttatctcagaaccaataaaaatatttccaagagcaa

SEQ ID NO: 2631 - DNA, 3048 bp, Homo sapiens
  source 1..3048: mol_type = unassigned DNA; mol_type = unassigned DNA
caactggcagctcaccaacctgagcttcctccaggcctgctccttggagatgtctctgccatctgttctgacgcctagattcagggttgccttgattgcccaggagacctgggcactgcttgaggctggagacatgtgctttttggaccctggctccagccagaagcactggtggcccccggggtcctatgtggtgtcctgtgatcccatgacaggggaacgtacagggatgggggtcaaattggagaaggtggggcagtgcccgcgaagcagtcacagccccattctgttgccacgtctcctcctgactcctccctgtcctcctaccctcgcttcaggatggccctgccttccctcccctcctgcgcctcttctgttgtcttgcagcctctgtcgccctgctcttcctgtttcattgggtggtgctctcttttccctgttgtgacctccctggactctgttttatttgcaggtttttgccaccaggcaagctctgttctctgactcattctttttttgttttttttttttgagacagggtctcactctgttgtccagggtgacagagtgcaatggcaccatcatagctcactacagcctcaaactcctgctgacccattcttgtatctggaacaaggggctggaggcacagaggttctgtgcccaggctggtggggctggtggcttcttgggcatctcctgttaggggcccaggagcttctatgtctaagggagatgtggggctttcttctcccctcaaggacctgatccaggcacacctgtgctgcatcctcgtcacctcctacccagtgcctgctgccacgtggatggcccccaggttaggtattttgtgacttccaggtcccttgtcgcggctaataggacatgttcttttgtttcaggatagatcactgcgaccagaggaaattgaaggtaaaacttggccccttgggggaaaggactgcctagccctctaggaaggtgtgggaagggaggttgatgggaagagaggcccctggaaatggggcctggtgcaacgcggggtatcttctgtgaaaccagctgctgaaggtgtgcacaggaggcaagagaaatgccccagcatcctgggaagctcctgggcctctctttccatgccggtgggcctttgggctgcctttgcccacagaggctctgcgggtcctacccctgaccacatccacctttgctcacttccccagagctccgagaggccttcagagaattcgacaaggacaaggatggctacatcaactgccgggatctgggcaactgcatgcgcaccatgggctacatgcccaccgagatggagctcatcgaactgtcccagcagatcaacatgaacctgggtggccatgtagattttgatgacttcgtggagctaatggggcctaaactcctggcagagacagcagatatgattggtgtaaaggaactgcgagatgctttccgagaggtaacggacagaggcaggcaggcatggggcggctattggaatcctatctgcagtataaatacttcaaaagaagcctgagcctcaagtcccagatcaggggagggagcttggacagagaaaggtctctggtaaaggggggcaatgacactggagaaggagctcaactttgggatctgctgctgccaatcgccatgctggggcgacctctccttccttcctgccttctctagtttgacaccaatggtgatggggaaataagcaccagtgagctgcgagaggctatgaggaagctcctgggtcatcaggtgggacaccgagacatagaggaaattatccgagatgtggacctcaatggggatggacgagtggactttgaaggtaggtggggcttgaaagtgggagagaagcaagccagcagtggccatccatggagccctccaattgtgtatccatcatgcaaccatcaatccgccctaattttccaacccccagccctttcatcctcttatccctccgtccatgcccccgtctaatccatctcccatcccttccccatgcatctattcatgcatctgtccatccatctatccatcctctacctttccattcatctgtccatttatccatccattcatctacctatctatccatctgtccaccatccatccatccatccatttatctacccatctatccatccatccatcctctacctatccatccatctgtccatttatccattcatccattcatctacctatctatctatctgtccatcatccatccatccatttatccatccatccatccgtccatccattcgtctacatatctatccatccatccatccatccatccacctatccatccatctgtccatccattcatctacctattcatctatctgtccatctttccatatctatctctccatttttcatctgtttatctccttatctgtccagatgcctatttatccattcctccatctctaagcaatcattcctatagcaatttatccatgcatttatctgtccattcgtgcatctattcattcttctctacattcacccatgaatctatctatgtattcatctactcatatagatctctctatgtgttcacacttctatacttccattcacacattcatgtctcttcgtctgcatatacttctacccatacttgcattgatctatccatctatctgttcagtcatttcctcatctatatccatctactcatccattcacccatccctgtgtccatctgcacccatccttctctatccatttatctgtctacccacgcatgcatccatccacggtaggtgttttctgaacattacattcctcaactggacactcaggctccctaagatctgaccacagctcacctccccagccacaactcaacagtccttcattcacactccaccaaaatacttgtgatcagtgaagctgctagggtccctcttgaatacactgatctttttgccaggagggcttttttgttgttgtttgtttgtttgtttgtttgagacagagtctcactctgttgcccaggctggagtg

SEQ ID NO: 2632 - DNA, 5275 bp, Homo sapiens
  source 1..5275: mol_type = unassigned DNA; mol_type = unassigned DNA
gcggccgcccctctggctgctctgcctggtcgcgtgctggctcctgggcgccggggccgaagccgacttctccatcctggacgaggcgcaagtgctggcgagccagatgcggaggctggcggccgaggagctgggggtcgtcaccatgcagcggatattcaactcctttgtttacactgagaaaatctcaaatggagaaagtgaagtacagcagctagccaaaaaaatccgagagaagttcaaccgttacttggatgtggtcaatcggaacaagcaagttgtagaagcatcctatacggctcacctaacctctcccctaactgcaattcaagactgctgtactatcccaccttccatgatggaattcgatgggaactttaataccaatgtgtctagaacaattagttgtgatcgactttctactactgttaatagccgggccttcaatccaggacgagacttaaattcagttcttgcagacaacctgaaatccaaccctggaattaagtggcaatatttcagttcagaagaaggaattttcactgttttcccagcacacaagttccggtgtaagggcagctacgaacaccgcagtagacccatctacgtctctacagtccggccgcagtcaaagcacatagtagtgattctggaccacggggcttcagtcacagacactcagcttcagattgccaaggacgctgctcaggtcatcctcagcgccatcgatgaacatgacaagatttctgtgttaactgtggcagataccgtccggacttgctcactagaccagtgctataagaccttcttgtctccagccaccagtgagacaaaaaggaaaatgtccacctttgttagcagcgtgaagtcttcagacagtcctacccagcacgcagtgggattccaaaaggcatttcagctgattcgaagtacaaacaataacacaaagttccaagcaaatacagacatggtcatcatttacctgtcagctggcattacatcaaaggactcttcggaagaagataaaaaagcgactctccaagtcatcaatgaagaaaatagctttctaaacaactctgtaatgattctcacctatgccctcatgaacgatggggtgactggtttgaaagagctggcttttctgagggatctagctgaacagaattcagggaagtacggtgtgccagaccggatggccttgcctgtgattaagggcagcatgatggtgctgaatcagttgagcaacctggagaccacagtgggcaggttctacacaaaccttcccaaccggatgattgatgaagccgtcttcagcctgcccttctctgatgagatgggagatggtttgataatgactgtgagtaaaccctgttattttggaaacctacttctgggaattgtaggtgtggacgtgaatctggcttacattcttgaagacgtgacgtattaccaagactctttggcttcctatacttttctcatagacgacaaaggatatacacttatgcacccatctcttaccaggccatatttattgtcagagcccccacttcatactgacatcatacattatgaaaatattccaaaatttgaattagttcggcaaaatatcctaagcctccctctgggcagccagattatcgcagtccctgtgaactcatccctgtcttggcacataaacaagctgagagaaactggaaaggaagcctacaatgttagctatgcctggaagatggtacaagacacttcctttattctgtgtattgtggtgatacaaccagaaatacctgtgaaacaactgaagaacctcaacactgttcccagcagcaagctgctgtaccaccggctggatctccttggccagcccagtgcttgcctccacttcaaacagctggcaaccctagaaagtcccaccatcatgctgtctgctggcagcttttcctccccctatgagcacctcagccagccagagacaaagcgcatggtagagcactacaccgcctatctcagcgacaacacccgcctcattgctaacccgggcctcaaattctctgtcagaaatgaagtaatggctaccagccacgtcacagatgaatggatgacacaaatggaaatgagtagcctgaacacttacattgtccgccgttacatagcaacacccaatggcgtcctcagaatttatcctggttccctcatggacaaagcatttgatcccactaggagacaatggtatctccatgcagtagctaatccagggttgatttctttgactggtccttacttagatgttggaggagctggttatgttgtgacaatcagtcacacaattcattcatccagtacacagctgtcttctgggcacactgtggctgtgatgggcattgacttcacactcagatacttctacaaagttctgatggacctattacctgtctgtaaccaagatggtggcaacaaaataaggtgcttcataatggaggacaggggttatctggtggcgcacccgactctcatcgaccccaaaggacatgcacctgtggagcagcagcacatcacccacaaggagcccctggtagcaaatgatatcctcaaccaccccaactttgtaaagaaaaacctgtgcaacagcttcagtgacagaacggtccagaggttttataaattcaacaccagccttgcgggggatttgacgaaccttgtgcatggcagccactgttccaaatacagattagcaaggatcccaggaaccaacgcgtttgttggcattgtcaacgaaacctgcgactctcttgccttctgtgcctgcagcatggtggaccgactctgtctcaactgtcaccgaatggaacaaaatgaatgtgaatgtccttgtgagtgccctctagaggtcaatgagtgcactggcaacctcaccaatgcagagaaccgaaaccccagctgcgaggtccaccaggagccggtgacatacacagctattgaccctggcctgcaagatgctcttcaccagtgtgtcaacagcaggtgcagtcagaggctggaaagtggggactgttttggggtgctggattgtgaatggtgcatggtggacagtgatggaaagactcacctggacaaaccctactgtgccccccagaaagaatgcttcggggggattgtgggagccaaaagtccctacgttgatgacatgggagcaataggtgatgaggtgatcacattaaacatgattaaaagcgcccctgtgggtcctgtggctggagggatcatgggatgcatcatggtcttggtcctggcggtgtatgcctaccgccaccagattcatcgccggagccatcagcatatgtctcctcttgctgcccaagaaatgtcagtgcgtatgtccaacctggagaatgacagagatgaaagggacgacgacagccacgaagacagaggcatcatcagcaacactcggtttatagctgcggtcatcgaacgacatgcacacagtccagaaagaaggcgccgctactggggtcgatcaggaacagaaagtgatcatggttacagcaccatgagcccacaggaggacagtgaaaatcctccatgcaacaatgaccccttgtcagccggggtcgatgtgggaaaccatgatgaggacttagacctggataccccccctcagactgctgccctactaagtcacaagttccaccactaccggtcacaccaccctacacttcatcatagccaccacttacaggcggccgtcacggtacacactgtcgatgcagaatgctaacaatctcctcacctccacgccaagatgagatctgggagctacagaatgttctggaaagaaaaagaaccggcttaaaacccacagcaagagacctcccttgtgtttgtgctttgtgcagagttgtttgagtcatttcctgcctgtcgacatggttaaaaacgagagaaacaacaacacagtcacatttgtgaagatgtgaggctggttctgaaatggaggggaaataagcctgatgaacagacctgccataacactaatggaaggtaacagaaggcgaacctccaaacacagagacggaacctgcaagtgaagctgagccagaggaatgttccaaagagccagaagcattcagctctccttaactggaagagagaaaaatctgctcacccagagactggaatgtggcacatgcagatacaaatgtgtgcattgaagatttcgctttgtttcttagcggtacctggataccacagttgctgtatggaactcatgttatgctctaaacgatgcatctcagaatttctaagtaaaggattatttttctactatttattgaactttcaaacattctcaaactttggggaaaaggaaaggaaacacaggagaagttttcagcagttgccccgagctgttttgtgtgtaatgaagtggttctttgattaaggagctctatttcttatttaactgatatcccactgccccactccacaaaataggaaaatgaagaaatctttctctctgacttgtttacatcatttcacggaaacacatctttgtttgtaatgcagtattctttctctgtgtttgacagagatggggaggggcagaggaatttaagaggttttaaaagaaatgttatgtttcttatgacttgtttccactcctcgtacaatgctattcttaggtttctacgaaacctaatgttagaaccgcatcctttcagctaagggagggttggatttattttccttgttttagagactacaaatttttaaatatcccattttgactgagaatattgacatataagggaagaagttttctaaattgtgaaagtctggttcttaattaaagaattttttttttaatatcacggttaaaagctgctgccagttagccaagacattatccaccaaattgctttgtgatttatacagggattaatcaaatctggctactataacatggggcattgtaactttaaagtagtgttttaattacagtgatgtattttagactcacattttgtgattcaaatatgttataaaggcattcttgcaccatggtaaagaatgtgtgtggtaaatctccgtttatatgtagttggaaaaaattcactgaataatgttttaatgatagggtattatgatacaatgtaaaaaacaattggttcttcagcagtacagaaagtaaactatatatgtgctatcaggaaaccccttcatactgtgtataaaattgcaatctagtgaaataaaccgtatgcaatggaccatt

SEQ ID NO: 2633 - DNA, 5547 bp, Homo sapiens
  source 1..5547: mol_type = unassigned DNA; mol_type = unassigned DNA
cccctcgctgttctgcccctttgtcttccacgcctgccccttcaactcctcttgccctgcaaaccccgggtcgccacctccacatcccttccacttctacctgcctgccttggcctgcattttattttcaaccaaggttgaaatggtagccccacgcaaaatccgatggtgtgtggaggaactgcccagtcattgcagtctgcacgccttcttaagtgccaggtgcgagcaaggccgaccaggaactgccgatgggcttcacctgtcagactggactgccacctgccacacattcattgaacttttaataagcactgccgctgtgcttggcgttttgctgggctccagaaataaaaaattcagagaggccaaagttcttcagggatgcagacaggtgatagaaccatcatttattgagcacttgctaagtgctaaatactcttacctgcgttatcttgtgtaatcctcacaaccacactcaacgacggcctattgaatgctctctaggtgtctggcagtgttccaaacagtttatgtgtattactttgtttgatcttcccaaccaccaatgagcggatattcaactcctttgtttacactgagaaaatctcaaatggagaaagtgaagtacagcagctagccaaaaaaatccgagagaagttcaaccgttacttggatgtggtcaatcggaacaagcaagttgtagaagcatcctatacggctcacctaacctctcccctaactgcaattcaagactgctgtactatcccaccttccatgatggaattcgatgggaactttaataccaatgtgtctagaacaattagttgtgatcgactttctactactgttaatagccgggccttcaatccaggacgagacttaaattcagttcttgcagacaacctgaaatccaaccctggaattaagtggcaatatttcagttcagaagaaggaattttcactgttttcccagcacacaagttccggtgtaagggcagctacgaacaccgcagtagatttctgtgttaactgtggcagataccgtccggacttgctcactagaccagtgctataagaccttcttgtctccagccaccagtgagacaaaaaggaaaatgtccacctttgttagcagcgtgaagtcttcagacagtcctacccagcacgcagtgggattccaaaaggcatttcagctgattcgaagtacaaacaataacacaaagttccaagcaaatacagacatggtcatcatttacctgtcagctggcattacatcaaaggactcttcggaagaagataaaaaagcgactctccaagtcatcaatgaagaaaatagctttctaaacaactctgtaatgattctcacctatgccctcatgaacgatggggtgactggtttgaaagagctggcttttctgagggatctagctgaacagaattcagggaagtacggtgtgccagaccggatggccttgcctgtgattaagggcagcatgatggtgctgaatcagttgagcaacctggagaccacagtgggcaggttctacacaaaccttcccaaccggatgattgatgaagccgtcttcagcctgcccttctctgatgagatgggagatggtttgataatgactgtgagtaaaccctgttattttggaaacctacttctgggaattgtaggtgtggacgtgaatctggcttacattcttgaagacgtgacgtattaccaagactctttggcttcctatacttttctcatagacgacaaaggatatacacttatgcacccatctcttaccaggccatatttattgtcagagcccccacttcatactgacatcatacattatgaaaatattccaaaatttgaattagttcggcaaaatatcctaagcctccctctgggcagccagattatcgcagtccctgtgaactcatccctgtcttggcacataaacaagctgagagaaactggaaaggaagcctacaatgttagctatgcctggaagatggtacaagacacttcctttattctgtgtattgtggtgatacaaccagaaatacctgtgaaacaactgaagaacctcaacactgttcccagcagcaagctgctgtaccaccggctggatctccttggccagcccagtgcttgcctccacttcaaacagctggcaaccctagaaagtcccaccatcatgctgtctgctggcagcttttcctccccctatgagcacctcagccagccagagacaaagcgcatggtagagcactacaccgcctatctcagcgacaacacccgcctcattgctaacccgggcctcaaattctctgtcagaaatgaagtaatggctaccagccacgtcacagatgaatggatgacacaaatggaaatgagtagcctgaacacttacattgtccgccgttacatagcaacacccaatggcgtcctcagaatttatcctggttccctcatggacaaagcatttgatcccactaggagacaatggtatctccatgcagtagctaatccagggttgatttctttgactggtccttacttagatgttggaggagctggttatgttgtgacaatcagtcacacaattcattcatccagtacacagctgtcttctgggcacactgtggctgtgatgggcattgacttcacactcagatacttctacaaagttctgatggacctattacctgtctgtaaccaagatggtggcaacaaaataaggtgcttcataatggaggacaggggttatctggtggcgcacccgactctcatcgaccccaaaggacatgcacctgtggagcagcagcacatcacccacaaggagcccctggtagcaaatgatatcctcaaccaccccaactttgtaaagaaaaacctgtgcaacagcttcagtgacagaacggtccagaggttttataaattcaacaccagccttgcgggggatttgacgaaccttgtgcatggcagccactgttccaaatacagattagcaaggatcccaggaaccaacgcgtttgttggcattgtcaacgaaacctgcgactctcttgccttctgtgcctgcagcatggtggaccgactctgtctcaactgtcaccgaatggaacaaaatgaatgtgaatgtccttgtgagtgccctctagaggtcaatgagtgcactggcaacctcaccaatgcagagaaccgaaaccccagctgcgaggtccaccaggagccggtgacatacacagctattgaccctggcctgcaagatgctcttcaccagtgtgtcaacagcaggtgcagtcagaggctggaaagtggggactgttttggggtgctggattgtgaatggtgcatggtggacagtgatggaaagactcacctggacaaaccctactgtgccccccagaaagaatgcttcggggggattgtgggagccaaaagtccctacgttgatgacatgggagcaataggtgatgaggtgatcacattaaacatgattaaaagcgcccctgtgggtcctgtggctggagggatcatgggatgcatcatggtcttggtcctggcggtgtatgcctaccgccaccagattcatcgccggagccatcagcatatgtctcctcttgctgcccaagaaatgtcagtgcgtatgtccaacctggagaatgacagagatgaaagggacgacgacagccacgaagacagaggcatcatcagcaacactcggtttatagctgcggtcatcgaacgacatgcacacagtccagaaagaaggcgccgctactggggtcgatcaggaacagaaagtgatcatggttacagcaccatgagcccacaggaggacagtgaaaatcctccatgcaacaatgaccccttgtcagccggggtcgatgtgggaaaccatgatgaggacttagacctggataccccccctcagactgctgccctactaagtcacaagttccaccactaccggtcacaccaccctacacttcatcatagccaccacttacaggcggccgtcacggtacacactgtcgatgcagaatgctaacaatctcctcacctccacgccaagatgagatctgggagctacagaatgttctggaaagaaaaagaaccggcttaaaacccacagcaagagacctcccttgtgtttgtgctttgtgcagagttgtttgagtcatttcctgcctgtcgacatggttaaaaacgagagaaacaacaacacagtcacatttgtgaagatgtgaggctggttctgaaatggaggggaaataagcctgatgaacagacctgccataacactaatggaaggtaacagaaggcgaacctccaaacacagagacggaacctgcaagtgaagctgagccagaggaatgttccaaagagccagaagcattcagctctccttaactggaagagagaaaaatctgctcacccagagactggaatgtggcacatgcagatacaaatgtgtgcattgaagatttcgctttgtttcttagcggtacctggataccacagttgctgtatggaactcatgttatgctctaaacgatgcatctcagaatttctaagtaaaggattatttttctactatttattgaactttcaaacattctcaaactttggggaaaaggaaaggaaacacaggagaagttttcagcagttgccccgagctgttttgtgtgtaatgaagtggttctttgattaaggagctctatttcttatttaactgatatcccactgccccactccacaaaataggaaaatgaagaaatctttctctctgacttgtttacatcatttcacggaaacacatctttgtttgtaatgcagtattctttctctgtgtttgacagagatggggaggggcagaggaatttaagaggttttaaaagaaatgttatgtttcttatgacttgtttccactcctcgtacaatgctattcttaggtttctacgaaacctaatgttagaaccgcatcctttcagctaagggagggttggatttattttccttgttttagagactacaaatttttaaatatcccattttgactgagaatattgacatataagggaagaagttttctaaattgtgaaagtctggttcttaattaaagaattttttttttaatatcacggttaaaagctgctgccagttagccaagacattatccaccaaattgctttgtgatttatacagggattaatcaaatctggctactataacatggggcattgtaactttaaagtagtgttttaattacagtgatgtattttagactcacattttgtgattcaaatatgttataaaggcattcttgcaccatggtaaagaatgtgtgtggtaaatctccgtttatatgtagttggaaaaaattcactgaataatgttttaatgatagggtattatgatacaatgtaaaaaacaattggttcttcagcagtacagaaagtaaactatatatgtgctatcaggaaaccccttcatactgtgtataaaattgcaatctagtgaaataaaccgtatgcaatgga

SEQ ID NO: 2634 - DNA, 5260 bp, Homo sapiens
  source 1..5260: mol_type = unassigned DNA; mol_type = unassigned DNA
agataccatggagacaaggccaaaggggttaggaaacttttctctagtcttttttggacagcctcagtaagggtagtgtgggatacagaatcaaagagcctcatcttttgagatggaaaactcaaggtccaagcaagactctgtcatttactgtttgatttgtaacagctagccaaaaaaatccgagagaagttcaaccgttacttggatgtggtcaatcggaacaagcaagttgtagaagcatcctatacggctcacctaacctctcccctaactgcaattcaagactgctgtactatcccaccttccatgatggaattcgatgggaactttaataccaatgtgtctagaacaattagttgtgatcgactttctactactgttaatagccgggccttcaatccaggacgagacttaaattcaggggtcgagaactgagctgcagtatctccaagttcttgcagacaacctgaaatccaaccctggaattaagtggcaatatttcagttcagaagaaggaattttcactgttttcccagcacacaagttccggtgtaagggcagctacgaacaccgcagtagacccatctacgtctctacagtccggccgcagtcaaagcacatagtagtgattctggaccacggggcttcagtcacagacactcagcttcagattgccaaggacgctgctcaggtcatcctcagcgccatcgatgaacatgacaagatttctgtgttaactgtggcagataccgtccggacttgctcactagaccagtgctataagaccttcttgtctccagccaccagtgagacaaaaaggaaaatgtccacctttgttagcagcgtgaagtcttcagacagtcctacccagcacgcagtgggattccaaaaggcatttcagctgattcgaagtacaaacaataacacaaagttccaagcaaatacagacatggtcatcatttacctgtcagctggcattacatcaaaggactcttcggaagaagataaaaaagcgactctccaagtcatcaatgaagaaaatagctttctaaacaactctgtaatgattctcacctatgccctcatgaacgatggggtgactggtttgaaagagctggcttttctgagggatctagctgaacagaattcagggaagtacggtgtgccagaccggatggccttgcctgtgattaagggcagcatgatggtgctgaatcagttgagcaacctggagaccacagtgggcaggttctacacaaaccttcccaaccggatgattgatgaagccgtcttcagcctgcccttctctgatgagatgggagatggtttgataatgactgtgagtaaaccctgttattttggaaacctacttctgggaattgtaggtgtggacgtgaatctggcttacattcttgaagacgtgacgtattaccaagactctttggcttcctatacttttctcatagacgacaaaggatatacacttatgcacccatctcttaccaggccatatttattgtcagagcccccacttcatactgacatcatacattatgaaaatattccaaaatttgaattagttcggcaaaatatcctaagcctccctctgggcagccagattatcgcagtccctgtgaactcatccctgtcttggcacataaacaagctgagagaaactggaaaggaagcctacaatgttagctatgcctggaagatggtacaagacacttcctttattctgtgtattgtggtgatacaaccagaaatacctgtgaaacaactgaagaacctcaacactgttcccagcagcaagctgctgtaccaccggctggatctccttggccagcccagtgcttgcctccacttcaaacagctggcaaccctagaaagtcccaccatcatgctgtctgctggcagcttttcctccccctatgagcacctcagccagccagagacaaagcgcatggtagagcactacaccgcctatctcagcgacaacacccgcctcattgctaacccgggcctcaaattctctgtcagaaatgaagtaatggctaccagccacgtcacagatgaatggatgacacaaatggaaatgagtagcctgaacacttacattgtccgccgttacatagcaacacccaatggcgtcctcagaatttatcctggttccctcatggacaaagcatttgatcccactaggagacaatggtatctccatgcagtagctaatccagggttgatttctttgactggtccttacttagatgttggaggagctggttatgttgtgacaatcagtcacacaattcattcatccagtacacagctgtcttctgggcacactgtggctgtgatgggcattgacttcacactcagatacttctacaaagttctgatggacctattacctgtctgtaaccaagatggtggcaacaaaataaggtgcttcataatggaggacaggggttatctggtggcgcacccgactctcatcgaccccaaaggacatgcacctgtggagcagcagcacatcacccacaaggagcccctggtagcaaatgatatcctcaaccaccccaactttgtaaagaaaaacctgtgcaacagcttcagtgacagaacggtccagaggttttataaattcaacaccagccttgcgggggatttgacgaaccttgtgcatggcagccactgttccaaatacagattagcaaggatcccaggaaccaacgcgtttgttggcattgtcaacgaaacctgcgactctcttgccttctgtgcctgcagcatggtggaccgactctgtctcaactgtcaccgaatggaacaaaatgaatgtgaatgtccttgtgagtgccctctagaggtcaatgagtgcactggcaacctcaccaatgcagagaaccgaaaccccagctgcgaggtccaccaggagccggtgacatacacagctattgaccctggcctgcaagatgctcttcaccagtgtgtcaacagcaggtgcagtcagaggctggaaagtggggactgttttggggtgctggattgtgaatggtgcatggtggacagtgatggaaagactcacctggacaaaccctactgtgccccccagaaagaatgcttcggggggattgtgggagccaaaagtccctacgttgatgacatgggagcaataggtgatgaggtgatcacattaaacatgattaaaagcgcccctgtgggtcctgtggctggagggatcatgggatgcatcatggtcttggtcctggcggtgtatgcctaccgccaccagattcatcgccggagccatcagcatatgtctcctcttgctgcccaagaaatgtcagtgcgtatgtccaacctggagaatgacagagatgaaagggacgacgacagccacgaagacagaggcatcatcagcaacactcggtttatagctgcggtcatcgaacgacatgcacacagtccagaaagaaggcgccgctactggggtcgatcaggaacagaaagtgatcatggttacagcaccatgagcccacaggaggacagtgaaaatcctccatgcaacaatgaccccttgtcagccggggtcgatgtgggaaaccatgatgaggacttagacctggataccccccctcagactgctgccctactaagtcacaagttccaccactaccggtcacaccaccctacacttcatcatagccaccacttacaggcggccgtcacggtacacactgtcgatgcagaatgctaacaatctcctcacctccacgccaagatgagatctgggagctacagaatgttctggaaagaaaaagaaccggcttaaaacccacagcaagagacctcccttgtgtttgtgctttgtgcagagttgtttgagtcatttcctgcctgtcgacatggttaaaaacgagagaaacaacaacacagtcacatttgtgaagatgtgaggctggttctgaaatggaggggaaataagcctgatgaacagacctgccataacactaatggaaggtaacagaaggcgaacctccaaacacagagacggaacctgcaagtgaagctgagccagaggaatgttccaaagagccagaagcattcagctctccttaactggaagagagaaaaatctgctcacccagagactggaatgtggcacatgcagatacaaatgtgtgcattgaagatttcgctttgtttcttagcggtacctggataccacagttgctgtatggaactcatgttatgctctaaacgatgcatctcagaatttctaagtaaaggattatttttctactatttattgaactttcaaacattctcaaactttggggaaaaggaaaggaaacacaggagaagttttcagcagttgccccgagctgttttgtgtgtaatgaagtggttctttgattaaggagctctatttcttatttaactgatatcccactgccccactccacaaaataggaaaatgaagaaatctttctctctgacttgtttacatcatttcacggaaacacatctttgtttgtaatgcagtattctttctctgtgtttgacagagatggggaggggcagaggaatttaagaggttttaaaagaaatgttatgtttcttatgacttgtttccactcctcgtacaatgctattcttaggtttctacgaaacctaatgttagaaccgcatcctttcagctaagggagggttggatttattttccttgttttagagactacaaatttttaaatatcccattttgactgagaatattgacatataagggaagaagttttctaaattgtgaaagtctggttcttaattaaagaattttttttttaatatcacggttaaaagctgctgccagttagccaagacattatccaccaaattgctttgtgatttatacagggattaatcaaatctggctactataacatggggcattgtaactttaaagtagtgttttaattacagtgatgtattttagactcacattttgtgattcaaatatgttataaaggcattcttgcaccatggtaaagaatgtgtgtggtaaatctccgtttatatgtagttggaaaaaattcactgaataatgttttaatgatagggtattatgatacaatgtaaaaaacaattggttcttcagcagtacagaaagtaaactatatatgtgctatcaggaaaccccttcatactgtgtataaaattgcaatctagtgaaataaaccgtatgcaatggaccatt

SEQ ID NO: 2635 - DNA, 564 bp, Homo sapiens
  source 1..564: mol_type = unassigned DNA; mol_type = unassigned DNA
aagctttagggttagtgtgtatatatgtgtatattaatgactcgctataggatttttcttcttaaactcagaaagcctaggtagggtgaacaattgagtgatcacgcatctgctgactgtatttctgcaagcttttattttcaccaagtttggttgcatccatctgctgtggaaagatttttaaaaagtaattcggcttggcttctctgcaacagagctttgggaacactgccagcagcccactctcttttcatgtgagttttaaaggatccctgctatgtcttcctttgtttcccagttctctgtcagaaatgaagtaatggctaccagccacgtcacagatgaatggatgacacaaatggaaatgagtagcctgaacacttacattgtccgccgttacatagcaacacccaatggcgtcctcagaatttatcctggttccctcatggacaaagcatttgatcccactaggagacaatggtatctccatgcagtagctaatccagggttgatttctttgactggtccttacttagatgttggaggagctggttatgttgtgac

SEQ ID NO: 2636 - DNA, 8627 bp, Homo sapiens
  source 1..8627: mol_type = unassigned DNA; mol_type = unassigned DNA
atgtcccgagctgctatccccggctcggcccgggcagccgccttctgagcccccgacccgaggcgccgagccgccgccgcccgatgggctgggccgtggagcgtctccgcagtcgtagctccagccgccgcgctcccagccccggcagcctcagcatcagcggcggcggcggcggcggcggcgtcttccgcatcgttcgccgcagcgtaacccggagccctttgctctttgcagaatggcccgcttcggagacgagatgccggcccgctacgggggaggaggctccggggcagccgccggggtggtcgtgggcagcggaggcgggcgaggagccgggggcagccggcagggcgggcagcccggggcgcaaaggatgtacaagcagtcaatggcgcagagagcgcggaccatggcactctacaaccccatccccgtccgacagaactgcctcacggttaaccggtctctcttcctcttcagcgaagacaacgtggtgagaaaatacgccaaaaagatcaccgaatggcctccctttgaatatatgattttagccaccatcatagcgaattgcatcgtcctcgcactggagcagcatctgcctgatgatgacaagaccccgatgtctgaacggctggatgacacagaaccatacttcattggaattttttgtttcgaggctggaattaaaatcattgcccttgggtttgccttccacaaaggctcctacttgaggaatggctggaatgtcatggactttgtggtggtgctaacgggcatcttggcgacagttgggacggagtttgacctacggacgctgagggcagttcgagtgctgcggccgctcaagctggtgtctggaatcccaagtttacaagtcgtcctgaagtcgatcatgaaggcgatgatccctttgctgcagatcggcctcctcctattttttgcaatccttatttttgcaatcatagggttagaattttatatgggaaaatttcataccacctgctttgaagaggggacagatgacattcagggtgagtctccggctccatgtgggacagaagagcccgcccgcacctgccccaatgggaccaaatgtcagccctactgggaagggcccaacaacgggatcactcagttcgacaacatcctgtttgcagtgctgactgttttccagtgcataaccatggaagggtggactgatctcctctacaatagcaacgatgcctcagggaacacttggaactggttgtacttcatccccctcatcatcatcggctccttttttatgctgaaccttgtgctgggtgtgctgtcaggggagtttgccaaagaaagggaacgggtggagaaccggcgggcttttctgaagctgaggcggcaacaacagattgaacgtgagctcaatgggtacatggagtggatctcaaaagcagaagaggtgatcctcgccgaggatgaaactgacggggagcagaggcatccctttgatgctctgcggagaaccaccataaagaaaagcaagacagatttgctcaaccccgaagaggctgaggatcagctggctgatatagcctctgtgggttctcccttcgcccgagccagcattaaaagtgccaagctggagaactcgaccttttttcacaaaaaggagaggaggatgcgtttctacatccgccgcatggtcaaaactcaggccttctactggactgtactcagtttggtagctctcaacacgctgtgtgttgctattgttcactacaaccagcccgagtggctctccgacttcctttactatgcagaattcattttcttaggactctttatgtccgaaatgtttataaaaatgtacgggcttgggacgcggccttacttccactcttccttcaactgctttgactgtggggttatcattgggagcatcttcgaggtcatctgggctgtcataaaacctggcacatcctttggaatcagcgtgttacgagccctcaggttattgcgtattttcaaagtcacaaagtactgggcatctctcagaaacctggtcgtctctctcctcaactccatgaagtccatcatcagcctgttgtttctccttttcctgttcattgtcgtcttcgcccttttgggaatgcaactcttcggcggccagtttaatttcgatgaagggactcctcccaccaacttcgatacttttccagcagcaataatgacggtgtttcagatcctgacgggcgaagactggaacgaggtcatgtacgacgggatcaagtctcaggggggcgtgcagggcggcatggtgttctccatctatttcattgtactgacgctctttgggaactacaccctcctgaatgtgttcttggccatcgctgtggacaatctggccaacgcccaggagctcaccaaggacgagcaagaggaagaagaagcagcgaaccagaaacttgccctacagaaagccaaggaggtggcagaagtgagtcctctgtccgcggccaacatgtctatagctgtgaaagagcaacagaagaatcaaaagccagccaagtccgtgtgggagcagcggaccagtgagatgcgaaagcagaacttgctggccagccgggaggccctgtataacgaaatggacccggacgagcgctggaaggctgcctacacgcggcacctgcggccagacatgaagacgcacttggaccggccgctggtggtggacccgcaggagaaccgcaacaacaacaccaacaagagccgggcggccgagcccaccgtggaccagcgcctcggccagcagcgcgccgaggacttcctcaggaaacaggcccgctaccacgatcgggcccgggaccccagcggctcggcgggcctggacgcacggaggccctgggcgggaagccaggaggccgagctgagccgggagggaccctacggccgcgagtcggaccaccacgcccgggagggcagcctggagcaacccgggttctgggagggcgaggccgagcgaggcaaggccggggacccccaccggaggcacgtgcaccggcaggggggcagcagggagagccgcagcgggtccccgcgcacgggcgcggacggggagcatcgacgtcatcgcgcgcaccgcaggcccggggaggagggtccggaggacaaggcggagcggagggcgcggcaccgcgagggcagccggccggcccggggcggcgagggcgagggcgagggccccgacgggggcgagcgcaggagaaggcaccggcatggcgctccagccacgtacgagggggacgcgcggagggaggacaaggagcggaggcatcggaggaggaaagagaaccagggctccggggtccctgtgtcgggccccaacctgtcaaccacccggccaatccagcaggacctgggccgccaagacccacccctggcagaggatattgacaacatgaagaacaacaagctggccaccgcggagtcggccgctccccacggcagccttggccacgccggcctgccccagagcccagccaagatgggaaacagcaccgaccccggccccatgctggccatccctgccatggccaccaacccccagaacgccgccagccgccggacgcccaacaacccggggaacccatccaatcccggcccccccaagacccccgagaatagccttatcgtcaccaaccccagcggcacccagaccaattcagctaagactgccaggaaacccgaccacaccacagtggacatccccccagcctgcccaccccccctcaaccacaccgtcgtacaagtgaacaaaaacgccaacccagacccactgccaaaaaaagaggaagagaagaaggaggaggaggaagacgaccgtggggaagacggccctaagccaatgcctccctatagctccatgttcatcctgtccacgaccaacccccttcgccgcctgtgccattacatcctgaacctgcgctactttgagatgtgcatcctcatggtcattgccatgagcagcatcgccctggccgccgaggaccctgtgcagcccaacgcacctcggaacaacgtgctgcgatactttgactacgtttttacaggcgtctttacctttgagatggtgatcaagatgattgacctggggctcgtcctgcatcagggtgcctacttccgtgacctctggaatattctcgacttcatagtggtcagtggggccctggtagcctttgccttcactggcaatagcaaaggaaaagacatcaacacgattaaatccctccgagtcctccgggtgctacgacctcttaaaaccatcaagcggctgccaaagctcaaggctgtgtttgactgtgtggtgaactcacttaaaaacgtcttcaacatcctcatcgtctacatgctattcatgttcatcttcgccgtggtggctgtgcagctcttcaaggggaaattcttccactgcactgacgagtccaaagagtttgagaaagattgtcgaggcaaatacctcctctacgagaagaatgaggtgaaggcgcgagaccgggagtggaagaagtatgaattccattacgacaatgtgctgtgggctctgctgaccctcttcaccgtgtccacgggagaaggctggccacaggtcctcaagcattcggtggacgccacctttgagaaccagggccccagccccgggtaccgcatggagatgtccattttctacgtcgtctactttgtggtgttccccttcttctttgtcaatatctttgtggccttgatcatcatcaccttccaggagcaaggggacaagatgatggaggaatacagcctggagaaaaatgagagggcctgcattgatttcgccatcagcgccaagccgctgacccgacacatgccgcagaacaagcagagcttccagtaccgcatgtggcagttcgtggtgtctccgcctttcgagtacacgatcatggccatgatcgccctcaacaccatcgtgcttatgatgaagttctatggggcttctgttgcttatgaaaatgccctgcgggtgttcaacatcgtcttcacctccctcttctctctggaatgtgtgctgaaagtcatggcttttgggattctgaattatttccgcgatgcctggaacatcttcgactttgtgactgttctgggcagcatcaccgatatcctcgtgactgagtttgggaataacttcatcaacctgagctttctccgcctcttccgagctgcccggctcatcaaacttctccgtcagggttacaccatccgcattcttctctggacctttgtgcagtccttcaaggccctgccttatgtctgtctgctgatcgccatgctcttcttcatctatgccatcattgggatgcaggtgtttggtaacattggcatcgacgtggaggacgaggacagtgatgaagatgagttccaaatcactgagcacaataacttccggaccttcttccaggccctcatgcttctcttccggagtgccaccggggaagcttggcacaacatcatgctttcctgcctcagcgggaaaccgtgtgataagaactctggcatcctgactcgagagtgtggcaatgaatttgcttatttttactttgtttccttcatcttcctctgctcgtttctgatgctgaatctctttgtcgccgtcatcatggacaactttgagtacctcacccgagactcctccatcctgggcccccaccacctggatgagtacgtgcgtgtctgggccgagtatgaccccgcagcttggggccgcatgccttacctggacatgtatcagatgctgagacacatgtctccgcccctgggtctggggaagaagtgtccggccagagtggcttacaagcggcttctgcggatggacctgcccgtcgcagatgacaacaccgtccacttcaattccaccctcatggctctgatccgcacagccctggacatcaagattgccaagggaggagccgacaaacagcagatggacgctgagctgcggaaggagatgatggcgatttggcccaatctgtcccagaagacgctagacctgctggtcacacctcacaagtccacggacctcaccgtggggaagatctacgcagccatgatgatcatggagtactaccggcagagcaaggccaagaagctgcaggccatgcgcgaggagcaggaccggacacccctcatgttccagcgcatggagcccccgtccccaacgcaggaagggggacctggccagaacgccctcccctccacccagctggacccaggaggagccctgatggctcacgaaagcggcctcaaggagagcccgtcctgggtgacccagcgtgcccaggagatgttccagaagacgggcacatggagtccggaacaaggcccccctaccgacatgcccaacagccagcctaactctcagtccgtggagatgcgagagatgggcagagatggctactccgacagcgagcactacctccccatggaaggccagggccgggctgcctccatgccccgcctccctgcagagaaccagaggagaaggggccggccacgtgggaataacctcagtaccatctcagacaccagccccatgaagcgttcagcctccgtgctgggccccaaggcccgacgcctggacgattactcgctggagcgggtcccgcccgaggagaaccagcggcaccaccagcggcgccgcgaccgcagccaccgcgcctctgagcgctccctgggccgctacaccgatgtggacacaggcttggggacagacctgagcatgaccacccaatccggggacctgccgtcgaaggagcgggaccaggagcggggccggcccaaggatcggaagcatcgacagcaccaccaccaccaccaccaccaccaccatcccccgccccccgacaaggaccgctatgcccaggaacggccggaccacggccgggcacgggctcgggaccagcgctggtcccgctcgcccagcgagggccgagagcacatggcgcaccggcagggcagtagttccgtaagtggaagcccagccccctcaacatctggtaccagcactccgcggcggggccgccgccagctcccccagaccccctccaccccccggccacacgtgtcctattcccctgtgatccgtaaggccggcggctcggggcccccgcagcagcagcagcagcagcagcagcagcagcagcagcaggcggtggccaggccgggccgggcggccaccagcggccctcggaggtacccaggccccacggccgagcctctggccggagatcggccgcccacggggggccacagcagcggccgctcgcccaggatggagaggcgggtcccaggcccggcccggagcgagtcccccagggcctgtcgacacggcggggcccggtggccggcatctggcccgcacgtgtccgaggggcccccgggtccccggcaccatggctactaccggggctccgactacgacgaggccgatggcccgggcagcgggggcggcgaggaggccatggccggggcctacgacgcgccaccccccgtacgacacgcgtcctcgggcgccaccgggcgctcgcccaggactccccgggcctcgggcccggcctgcgcctcgccttctcggcacggccggcgactccccaacggctactacccggcgcacggactggccaggccccgcgggccgggctccaggaagggcctgcacgaaccctacagcgagagtgacgatgattggtgctaagcccgggcgaggtggcgcccgcccggccccccacgcaccccacgcacacaccccacccgaggagccgcgcagaggccgcgggggcccagcacagagggcccgggagagggccagccgggagaccccagactctggagaggccagggctgggccacaagggtgtcccgcagagaccctcggccaaaagagaccctcctgggcagccacggcgccccccaaccagccccgatccccccacccacgacaggggctctcgggtgggaggcagggagcagacaaaccacacagccaagggatttgaattaactcagccatttttggagaactttggggaacatgaaaaaaaaaaaaaaaaaaaaaaaaaaaaacatttttaaaagaaaaaacggggagaaaaaaatagcttctattgatgagttttatcatctcaattgaatctttcctttccctgatgaagacagctggtggccgagtgcggcaaagaagccagaaggaaccagaatcccagtgccctacacccaccaccagacacactcacacccacacacgttctcagacacacacaagagtgcttgccggttataccaaaccctactattactgcctgcagaaatcaatttaaaaaaataataataacaataaacaattttaaaaaggacaaaaaaattaatgattgagaaaagaggcatttttttctgacatttggtcctgcttgaaacaacaaaagaagaagaaaaacccaccatcaccaccgattcctttgcttcttttttccttttttcctaccttgtttgaaaaccgtgggcttgggactgtgaattattgcatgacattcaaaaagaaaaaaaaaataaaaaaaagttgaatcaaa

SEQ ID NO: 2637 - DNA, 8648 bp, Homo sapiens
  source 1..8648: mol_type = unassigned DNA; mol_type = unassigned DNA
tctccggggtcagccaggaagatgtcccgagctgctatccccggctcggcccgggcagccgccttctgagcccccgacccgaggcgccgagccgccgccgcccgatgggctgggccgtggagcgtctccgcagtcgtagctccagccgccgcgctcccagccccggcagcctcagcatcagcggcggcggcggcggcggcggcgtcttccgcatcgttcgccgcagcgtaacccggagccctttgctctttgcagaatggcccgcttcggagacgagatgccggcccgctacgggggaggaggctccggggcagccgccggggtggtcgtgggcagcggaggcgggcgaggagccgggggcagccggcagggcgggcagcccggggcgcaaaggatgtacaagcagtcaatggcgcagagagcgcggaccatggcactctacaaccccatccccgtccgacagaactgcctcacggttaaccggtctctcttcctcttcagcgaagacaacgtggtgagaaaatacgccaaaaagatcaccgaatggcctccctttgaatatatgattttagccaccatcatagcgaattgcatcgtcctcgcactggagcagcatctgcctgatgatgacaagaccccgatgtctgaacggctggatgacacagaaccatacttcattggaattttttgtttcgaggctggaattaaaatcattgcccttgggtttgccttccacaaaggctcctacttgaggaatggctggaatgtcatggactttgtggtggtgctaacgggcatcttggcgacagttgggacggagtttgacctacggacgctgagggcagttcgagtgctgcggccgctcaagctggtgtctggaatcccaagtttacaagtcgtcctgaagtcgatcatgaaggcgatgatccctttgctgcagatcggcctcctcctattttttgcaatccttatttttgcaatcatagggttagaattttatatgggaaaatttcataccacctgctttgaagaggggacagatgacattcagggtgagtctccggctccatgtgggacagaagagcccgcccgcacctgccccaatgggaccaaatgtcagccctactgggaagggcccaacaacgggatcactcagttcgacaacatcctgtttgcagtgctgactgttttccagtgcataaccatggaagggtggactgatctcctctacaatagcaacgatgcctcagggaacacttggaactggttgtacttcatccccctcatcatcatcggctccttttttatgctgaaccttgtgctgggtgtgctgtcaggggagtttgccaaagaaagggaacgggtggagaaccggcgggcttttctgaagctgaggcggcaacaacagattgaacgtgagctcaatgggtacatggagtggatctcaaaagcagaagaggtgatcctcgccgaggatgaaactgacggggagcagaggcatccctttgatggagctctgcggagaaccaccataaagaaaagcaagacagatttgctcaaccccgaagaggctgaggatcagctggctgatatagcctctgtgggttctcccttcgcccgagccagcattaaaagtgccaagctggagaactcgaccttttttcacaaaaaggagaggaggatgcgtttctacatccgccgcatggtcaaaactcaggccttctactggactgtactcagtttggtagctctcaacacgctgtgtgttgctattgttcactacaaccagcccgagtggctctccgacttcctttactatgcagaattcattttcttaggactctttatgtccgaaatgtttataaaaatgtacgggcttgggacgcggccttacttccactcttccttcaactgctttgactgtggggttatcattgggagcatcttcgaggtcatctgggctgtcataaaacctggcacatcctttggaatcagcgtgttacgagccctcaggttattgcgtattttcaaagtcacaaagtactgggcatctctcagaaacctggtcgtctctctcctcaactccatgaagtccatcatcagcctgttgtttctccttttcctgttcattgtcgtcttcgcccttttgggaatgcaactcttcggcggccagtttaatttcgatgaagggactcctcccaccaacttcgatacttttccagcagcaataatgacggtgtttcagatcctgacgggcgaagactggaacgaggtcatgtacgacgggatcaagtctcaggggggcgtgcagggcggcatggtgttctccatctatttcattgtactgacgctctttgggaactacaccctcctgaatgtgttcttggccatcgctgtggacaatctggccaacgcccaggagctcaccaaggacgagcaagaggaagaagaagcagcgaaccagaaacttgccctacagaaagccaaggaggtggcagaagtgagtcctctgtccgcggccaacatgtctatagctgtgaaagagcaacagaagaatcaaaagccagccaagtccgtgtgggagcagcggaccagtgagatgcgaaagcagaacttgctggccagccgggaggccctgtataacgaaatggacccggacgagcgctggaaggctgcctacacgcggcacctgcggccagacatgaagacgcacttggaccggccgctggtggtggacccgcaggagaaccgcaacaacaacaccaacaagagccgggcggccgagcccaccgtggaccagcgcctcggccagcagcgcgccgaggacttcctcaggaaacaggcccgctaccacgatcgggcccgggaccccagcggctcggcgggcctggacgcacggaggccctgggcgggaagccaggaggccgagctgagccgggagggaccctacggccgcgagtcggaccaccacgcccgggagggcagcctggagcaacccgggttctgggagggcgaggccgagcgaggcaaggccggggacccccaccggaggcacgtgcaccggcaggggggcagcagggagagccgcagcgggtccccgcgcacgggcgcggacggggagcatcgacgtcatcgcgcgcaccgcaggcccggggaggagggtccggaggacaaggcggagcggagggcgcggcaccgcgagggcagccggccggcccggggcggcgagggcgagggcgagggccccgacgggggcgagcgcaggagaaggcaccggcatggcgctccagccacgtacgagggggacgcgcggagggaggacaaggagcggaggcatcggaggaggaaagagaaccagggctccggggtccctgtgtcgggccccaacctgtcaaccacccggccaatccagcaggacctgggccgccaagacccacccctggcagaggatattgacaacatgaagaacaacaagctggccaccgcggagtcggccgctccccacggcagccttggccacgccggcctgccccagagcccagccaagatgggaaacagcaccgaccccggccccatgctggccatccctgccatggccaccaacccccagaacgccgccagccgccggacgcccaacaacccggggaacccatccaatcccggcccccccaagacccccgagaatagccttatcgtcaccaaccccagcggcacccagaccaattcagctaagactgccaggaaacccgaccacaccacagtggacatccccccagcctgcccaccccccctcaaccacaccgtcgtacaagtgaacaaaaacgccaacccagacccactgccaaaaaaagaggaagagaagaaggaggaggaggaagacgaccgtggggaagacggccctaagccaatgcctccctatagctccatgttcatcctgtccacgaccaacccccttcgccgcctgtgccattacatcctgaacctgcgctactttgagatgtgcatcctcatggtcattgccatgagcagcatcgccctggccgccgaggaccctgtgcagcccaacgcacctcggaacaacgtgctgcgatactttgactacgtttttacaggcgtctttacctttgagatggtgatcaagatgattgacctggggctcgtcctgcatcagggtgcctacttccgtgacctctggaatattctcgacttcatagtggtcagtggggccctggtagcctttgccttcactggcaatagcaaaggaaaagacatcaacacgattaaatccctccgagtcctccgggtgctacgacctcttaaaaccatcaagcggctgccaaagctcaaggctgtgtttgactgtgtggtgaactcacttaaaaacgtcttcaacatcctcatcgtctacatgctattcatgttcatcttcgccgtggtggctgtgcagctcttcaaggggaaattcttccactgcactgacgagtccaaagagtttgagaaagattgtcgaggcaaatacctcctctacgagaagaatgaggtgaaggcgcgagaccgggagtggaagaagtatgaattccattacgacaatgtgctgtgggctctgctgaccctcttcaccgtgtccacgggagaaggctggccacaggtcctcaagcattcggtggacgccacctttgagaaccagggccccagccccgggtaccgcatggagatgtccattttctacgtcgtctactttgtggtgttccccttcttctttgtcaatatctttgtggccttgatcatcatcaccttccaggagcaaggggacaagatgatggaggaatacagcctggagaaaaatgagagggcctgcattgatttcgccatcagcgccaagccgctgacccgacacatgccgcagaacaagcagagcttccagtaccgcatgtggcagttcgtggtgtctccgcctttcgagtacacgatcatggccatgatcgccctcaacaccatcgtgcttatgatgaagttctatggggcttctgttgcttatgaaaatgccctgcgggtgttcaacatcgtcttcacctccctcttctctctggaatgtgtgctgaaagtcatggcttttgggattctgaattatttccgcgatgcctggaacatcttcgactttgtgactgttctgggcagcatcaccgatatcctcgtgactgagtttgggaataacttcatcaacctgagctttctccgcctcttccgagctgcccggctcatcaaacttctccgtcagggttacaccatccgcattcttctctggacctttgtgcagtccttcaaggccctgccttatgtctgtctgctgatcgccatgctcttcttcatctatgccatcattgggatgcaggtgtttggtaacattggcatcgacgtggaggacgaggacagtgatgaagatgagttccaaatcactgagcacaataacttccggaccttcttccaggccctcatgcttctcttccggagtgccaccggggaagcttggcacaacatcatgctttcctgcctcagcgggaaaccgtgtgataagaactctggcatcctgactcgagagtgtggcaatgaatttgcttatttttactttgtttccttcatcttcctctgctcgtttctgatgctgaatctctttgtcgccgtcatcatggacaactttgagtacctcacccgagactcctccatcctgggcccccaccacctggatgagtacgtgcgtgtctgggccgagtatgaccccgcagcttgcggtcggattcattataaggatatgtacagtttattacgagtaatatctccccctctcggcttaggcaagaaatgtcctcatagggttgcttgcaagcggcttctgcggatggacctgcccgtcgcagatgacaacaccgtccacttcaattccaccctcatggctctgatccgcacagccctggacatcaagattgccaagggaggagccgacaaacagcagatggacgctgagctgcggaaggagatgatggcgatttggcccaatctgtcccagaagacgctagacctgctggtcacacctcacaagtccacggacctcaccgtggggaagatctacgcagccatgatgatcatggagtactaccggcagagcaaggccaagaagctgcaggccatgcgcgaggagcaggaccggacacccctcatgttccagcgcatggagcccccgtccccaacgcaggaagggggacctggccagaacgccctcccctccacccagctggacccaggaggagccctgatggctcacgaaagcggcctcaaggagagcccgtcctgggtgacccagcgtgcccaggagatgttccagaagacgggcacatggagtccggaacaaggcccccctaccgacatgcccaacagccagcctaactctcagtccgtggagatgcgagagatgggcagagatggctactccgacagcgagcactacctccccatggaaggccagggccgggctgcctccatgccccgcctccctgcagagaaccagaggagaaggggccggccacgtgggaataacctcagtaccatctcagacaccagccccatgaagcgttcagcctccgtgctgggccccaaggcccgacgcctggacgattactcgctggagcgggtcccgcccgaggagaaccagcggcaccaccagcggcgccgcgaccgcagccaccgcgcctctgagcgctccctgggccgctacaccgatgtggacacaggcttggggacagacctgagcatgaccacccaatccggggacctgccgtcgaaggagcgggaccaggagcggggccggcccaaggatcggaagcatcgacagcaccaccaccaccaccaccaccaccaccatcccccgccccccgacaaggaccgctatgcccaggaacggccggaccacggccgggcacgggctcgggaccagcgctggtcccgctcgcccagcgagggccgagagcacatggcgcaccggcagggcagtagttccgtaagtggaagcccagccccctcaacatctggtaccagcactccgcggcggggccgccgccagctcccccagaccccctccaccccccggccacacgtgtcctattcccctgtgatccgtaaggccggcggctcggggcccccgcagcagcagcagcagcagcagcagcagcagcagcagcaggcggtggccaggccgggccgggcggccaccagcggccctcggaggtacccaggccccacggccgagcctctggccggagatcggccgcccacggggggccacagcagcggccgctcgcccaggatggagaggcgggtcccaggcccggcccggagcgagtcccccagggcctgtcgacacggcggggcccggtggccggcatctggcccgcacgtgtccgaggggcccccgggtccccggcaccatggctactaccggggctccgactacgacgaggccgatggcccgggcagcgggggcggcgaggaggccatggccggggcctacgacgcgccaccccccgtacgacacgcgtcctcgggcgccaccgggcgctcgcccaggactccccgggcctcgggcccggcctgcgcctcgccttctcggcacggccggcgactccccaacggctactacccggcgcacggactggccaggccccgcgggccgggctccaggaagggcctgcacgaaccctacagcgagagtgacgatgattggtgctaagcccgggcgaggtggcgcccgcccggccccccacgcaccccacgcacacaccccacccgaggagccgcgcagaggccgcgggggcccagcacagagggcccgggagagggccagccgggagaccccagactctggagaggccagggctgggccacaagggtgtcccgcagagaccctcggccaaaagagaccctcctgggcagccacggcgccccccaaccagccccgatccccccacccacgacaggggctctcgggtgggaggcagggagcagacaaaccacacagccaagggatttgaattaactcagccatttttggagaactttggggaacatgaaaaaaaaaaaaaaaaaaaaaaaaaaaaacatttttaaaagaaaaaacggggagaaaaaaatagcttctattgatgagttttatcatctcaattgaatctttcctttccctgatgaagacagctggtggccgagtgcggcaaagaagccagaaggaaccagaatcccagtgccctacacccaccaccagacacactcacacccacacacgttctcagacacacacaagagtgcttgccggttataccaaaccctactattactgcctgcagaaatcaatttaaaaaaataataataacaataaacaattttaaaaaggacaaaaaaattaatgattgagaaaagaggcatttttttctgacatttggtcctgcttgaaacaacaaaagaagaagaaaaacccaccatcaccaccgattcctttgcttcttttttccttttttcctaccttgtttgaaaaccgtgggcttgggactgtgaattattgcatgacattcaaaaagaaaaaaaaaataaaaaaaagttgaatc

SEQ ID NO: 2638 - DNA, 8657 bp, Homo sapiens
  source 1..8657: mol_type = unassigned DNA; mol_type = unassigned DNA
cctcccgcccctccttctccggggtcagccaggaagatgtcccgagctgctatccccggctcggcccgggcagccgccttctgagcccccgacccgaggcgccgagccgccgccgcccgatgggctgggccgtggagcgtctccgcagtcgtagctccagccgccgcgctcccagccccggcagcctcagcatcagcggcggcggcggcggcggcggcgtcttccgcatcgttcgccgcagcgtaacccggagccctttgctctttgcagaatggcccgcttcggagacgagatgccggcccgctacgggggaggaggctccggggcagccgccggggtggtcgtgggcagcggaggcgggcgaggagccgggggcagccggcagggcgggcagcccggggcgcaaaggatgtacaagcagtcaatggcgcagagagcgcggaccatggcactctacaaccccatccccgtccgacagaactgcctcacggttaaccggtctctcttcctcttcagcgaagacaacgtggtgagaaaatacgccaaaaagatcaccgaatggcctccctttgaatatatgattttagccaccatcatagcgaattgcatcgtcctcgcactggagcagcatctgcctgatgatgacaagaccccgatgtctgaacggctggatgacacagaaccatacttcattggaattttttgtttcgaggctggaattaaaatcattgcccttgggtttgccttccacaaaggctcctacttgaggaatggctggaatgtcatggactttgtggtggtgctaacgggcatcttggcgacagttgggacggagtttgacctacggacgctgagggcagttcgagtgctgcggccgctcaagctggtgtctggaatcccaagtttacaagtcgtcctgaagtcgatcatgaaggcgatgatccctttgctgcagatcggcctcctcctattttttgcaatccttatttttgcaatcatagggttagaattttatatgggaaaatttcataccacctgctttgaagaggggacagatgacattcagggtgagtctccggctccatgtgggacagaagagcccgcccgcacctgccccaatgggaccaaatgtcagccctactgggaagggcccaacaacgggatcactcagttcgacaacatcctgtttgcagtgctgactgttttccagtgcataaccatggaagggtggactgatctcctctacaatagcaacgatgcctcagggaacacttggaactggttgtacttcatccccctcatcatcatcggctccttttttatgctgaaccttgtgctgggtgtgctgtcaggggagtttgccaaagaaagggaacgggtggagaaccggcgggcttttctgaagctgaggcggcaacaacagattgaacgtgagctcaatgggtacatggagtggatctcaaaagcagaagaggtgatcctcgccgaggatgaaactgacggggagcagaggcatccctttgatggagctctgcggagaaccaccataaagaaaagcaagacagatttgctcaaccccgaagaggctgaggatcagctggctgatatagcctctgtgggttctcccttcgcccgagccagcattaaaagtgccaagctggagaactcgaccttttttcacaaaaaggagaggaggatgcgtttctacatccgccgcatggtcaaaactcaggccttctactggactgtactcagtttggtagctctcaacacgctgtgtgttgctattgttcactacaaccagcccgagtggctctccgacttcctttactatgcagaattcattttcttaggactctttatgtccgaaatgtttataaaaatgtacgggcttgggacgcggccttacttccactcttccttcaactgctttgactgtggggttatcattgggagcatcttcgaggtcatctgggctgtcataaaacctggcacatcctttggaatcagcgtgttacgagccctcaggttattgcgtattttcaaagtcacaaagtactgggcatctctcagaaacctggtcgtctctctcctcaactccatgaagtccatcatcagcctgttgtttctccttttcctgttcattgtcgtcttcgcccttttgggaatgcaactcttcggcggccagtttaatttcgatgaagggactcctcccaccaacttcgatacttttccagcagcaataatgacggtgtttcagatcctgacgggcgaagactggaacgaggtcatgtacgacgggatcaagtctcaggggggcgtgcagggcggcatggtgttctccatctatttcattgtactgacgctctttgggaactacaccctcctgaatgtgttcttggccatcgctgtggacaatctggccaacgcccaggagctcaccaaggacgagcaagaggaagaagaagcagcgaaccagaaacttgccctacagaaagccaaggaggtggcagaagtgagtcctctgtccgcggccaacatgtctatagctgtgaaagagcaacagaagaatcaaaagccagccaagtccgtgtgggagcagcggaccagtgagatgcgaaagcagaacttgctggccagccgggaggccctgtataacgaaatggacccggacgagcgctggaaggctgcctacacgcggcacctgcggccagacatgaagacgcacttggaccggccgctggtggtggacccgcaggagaaccgcaacaacaacaccaacaagagccgggcggccgagcccaccgtggaccagcgcctcggccagcagcgcgccgaggacttcctcaggaaacaggcccgctaccacgatcgggcccgggaccccagcggctcggcgggcctggacgcacggaggccctgggcgggaagccaggaggccgagctgagccgggagggaccctacggccgcgagtcggaccaccacgcccgggagggcagcctggagcaacccgggttctgggagggcgaggccgagcgaggcaaggccggggacccccaccggaggcacgtgcaccggcaggggggcagcagggagagccgcagcgggtccccgcgcacgggcgcggacggggagcatcgacgtcatcgcgcgcaccgcaggcccggggaggagggtccggaggacaaggcggagcggagggcgcggcaccgcgagggcagccggccggcccggggcggcgagggcgagggcgagggccccgacgggggcgagcgcaggagaaggcaccggcatggcgctccagccacgtacgagggggacgcgcggagggaggacaaggagcggaggcatcggaggaggaaagagaaccagggctccggggtccctgtgtcgggccccaacctgtcaaccacccggccaatccagcaggacctgggccgccaagacccacccctggcagaggatattgacaacatgaagaacaacaagctggccaccgcggagtcggccgctccccacggcagccttggccacgccggcctgccccagagcccagccaagatgggaaacagcaccgaccccggccccatgctggccatccctgccatggccaccaacccccagaacgccgccagccgccggacgcccaacaacccggggaacccatccaatcccggcccccccaagacccccgagaatagccttatcgtcaccaaccccagcggcacccagaccaattcagctaagactgccaggaaacccgaccacaccacagtggacatccccccagcctgcccaccccccctcaaccacaccgtcgtacaagtgaacaaaaacgccaacccagacccactgccaaaaaaagaggaagagaagaaggaggaggaggaagacgaccgtggggaagacggccctaagccaatgcctccctatagctccatgttcatcctgtccacgaccaacccccttcgccgcctgtgccattacatcctgaacctgcgctactttgagatgtgcatcctcatggtcattgccatgagcagcatcgccctggccgccgaggaccctgtgcagcccaacgcacctcggaacaacgtgctgcgatactttgactacgtttttacaggcgtctttacctttgagatggtgatcaagatgattgacctggggctcgtcctgcatcagggtgcctacttccgtgacctctggaatattctcgacttcatagtggtcagtggggccctggtagcctttgccttcactggcaatagcaaaggaaaagacatcaacacgattaaatccctccgagtcctccgggtgctacgacctcttaaaaccatcaagcggctgccaaagctcaaggctgtgtttgactgtgtggtgaactcacttaaaaacgtcttcaacatcctcatcgtctacatgctattcatgttcatcttcgccgtggtggctgtgcagctcttcaaggggaaattcttccactgcactgacgagtccaaagagtttgagaaagattgtcgaggcaaatacctcctctacgagaagaatgaggtgaaggcgcgagaccgggagtggaagaagtatgaattccattacgacaatgtgctgtgggctctgctgaccctcttcaccgtgtccacgggagaaggctggccacaggtcctcaagcattcggtggacgccacctttgagaaccagggccccagccccgggtaccgcatggagatgtccattttctacgtcgtctactttgtggtgttccccttcttctttgtcaatatctttgtggccttgatcatcatcaccttccaggagcaaggggacaagatgatggaggaatacagcctggagaaaaatgagagggcctgcattgatttcgccatcagcgccaagccgctgacccgacacatgccgcagaacaagcagagcttccagtaccgcatgtggcagttcgtggtgtctccgcctttcgagtacacgatcatggccatgatcgccctcaacaccatcgtgcttatgatgaagttctatggggcttctgttgcttatgaaaatgccctgcgggtgttcaacatcgtcttcacctccctcttctctctggaatgtgtgctgaaagtcatggcttttgggattctgaattatttccgcgatgcctggaacatcttcgactttgtgactgttctgggcagcatcaccgatatcctcgtgactgagtttgggaataacttcatcaacctgagctttctccgcctcttccgagctgcccggctcatcaaacttctccgtcagggttacaccatccgcattcttctctggacctttgtgcagtccttcaaggccctgccttatgtctgtctgctgatcgccatgctcttcttcatctatgccatcattgggatgcaggtgtttggtaacattggcatcgacgtggaggacgaggacagtgatgaagatgagttccaaatcactgagcacaataacttccggaccttcttccaggccctcatgcttctcttccggagtgccaccggggaagcttggcacaacatcatgctttcctgcctcagcgggaaaccgtgtgataagaactctggcatcctgactcgagagtgtggcaatgaatttgcttatttttactttgtttccttcatcttcctctgctcgtttctgatgctgaatctctttgtcgccgtcatcatggacaactttgagtacctcacccgagactcctccatcctgggcccccaccacctggatgagtacgtgcgtgtctgggccgagtatgaccccgcagcttggggccgcatgccttacctggacatgtatcagatgctgagacacatgtctccgcccctgggtctggggaagaagtgtccggccagagtggcttacaagcggcttctgcggatggacctgcccgtcgcagatgacaacaccgtccacttcaattccaccctcatggctctgatccgcacagccctggacatcaagattgccaagggaggagccgacaaacagcagatggacgctgagctgcggaaggagatgatggcgatttggcccaatctgtcccagaagacgctagacctgctggtcacacctcacaagtccacggacctcaccgtggggaagatctacgcagccatgatgatcatggagtactaccggcagagcaaggccaagaagctgcaggccatgcgcgaggagcaggaccggacacccctcatgttccagcgcatggagcccccgtccccaacgcaggaagggggacctggccagaacgccctcccctccacccagctggacccaggaggagccctgatggctcacgaaagcggcctcaaggagagcccgtcctgggtgacccagcgtgcccaggagatgttccagaagacgggcacatggagtccggaacaaggcccccctaccgacatgcccaacagccagcctaactctcagtccgtggagatgcgagagatgggcagagatggctactccgacagcgagcactacctccccatggaaggccagggccgggctgcctccatgccccgcctccctgcagagaaccagaggagaaggggccggccacgtgggaataacctcagtaccatctcagacaccagccccatgaagcgttcagcctccgtgctgggccccaaggcccgacgcctggacgattactcgctggagcgggtcccgcccgaggagaaccagcggcaccaccagcggcgccgcgaccgcagccaccgcgcctctgagcgctccctgggccgctacaccgatgtggacacaggcttggggacagacctgagcatgaccacccaatccggggacctgccgtcgaaggagcgggaccaggagcggggccggcccaaggatcggaagcatcgacagcaccaccaccaccaccaccaccaccaccatcccccgccccccgacaaggaccgctatgcccaggaacggccggaccacggccgggcacgggctcgggaccagcgctggtcccgctcgcccagcgagggccgagagcacatggcgcaccggcagtagttccgtaagtggaagcccagccccctcaacatctggtaccagcactccgcggcggggccgccgccagctcccccagaccccctccaccccccggccacacgtgtcctattcccctgtgatccgtaaggccggcggctcggggcccccgcagcagcagcagcagcagcagcagcagcagcagcagcaggcggtggccaggccgggccgggcggccaccagcggccctcggaggtacccaggccccacggccgagcctctggccggagatcggccgcccacggggggccacagcagcggccgctcgcccaggatggagaggcgggtcccaggcccggcccggagcgagtcccccagggcctgtcgacacggcggggcccggtggccggcatctggcccgcacgtgtccgaggggcccccgggtccccggcaccatggctactaccggggctccgactacgacgaggccgatggcccgggcagcgggggcggcgaggaggccatggccggggcctacgacgcgccaccccccgtacgacacgcgtcctcgggcgccaccgggcgctcgcccaggactccccgggcctcgggcccggcctgcgcctcgccttctcggcacggccggcgactccccaacggctactacccggcgcacggactggccaggccccgcgggccgggctccaggaagggcctgcacgaaccctacagcgagagtgacgatgattggtgctaagcccgggcgaggtggcgcccgcccggccccccacgcaccccacgcacacaccccacccgaggagccgcgcagaggccgcgggggcccagcacagagggcccgggagagggccagccgggagaccccagactctggagaggccagggctgggccacaagggtgtcccgcagagaccctcggccaaaagagaccctcctgggcagccacggcgccccccaaccagccccgatccccccacccacgacaggggctctcgggtgggaggcagggagcagacaaaccacacagccaagggatttgaattaactcagccatttttggagaactttggggaacatgaaaaaaaaaaaaaaaaaaaaaaaaaaaaacatttttaaaagaaaaaacggggagaaaaaaatagcttctattgatgagttttatcatctcaattgaatctttcctttccctgatgaagacagctggtggccgagtgcggcaaagaagccagaaggaaccagaatcccagtgccctacacccaccaccagacacactcacacccacacacgttctcagacacacacaagagtgcttgccggttataccaaaccctactattactgcctgcagaaatcaatttaaaaaaataataataacaataaacaattttaaaaaggacaaaaaaattaatgattgagaaaagaggcatttttttctgacatttggtcctgcttgaaacaacaaaagaagaagaaaaacccaccatcaccaccgattcctttgcttcttttttccttttttcctaccttgtttgaaaaccgtgggcttgggactgtgaattattgcatgacattcaaaaagaaaaaaaaaataaaaaaaagttgaat

SEQ ID NO: 2639 - DNA, 8665 bp, Homo sapiens
  source 1..8665: mol_type = unassigned DNA; mol_type = unassigned DNA
cgcaccctcctcccgcccctccttctccggggtcagccaggaagatgtcccgagctgctatccccggctcggcccgggcagccgccttctgagcccccgacccgaggcgccgagccgccgccgcccgatgggctgggccgtggagcgtctccgcagtcgtagctccagccgccgcgctcccagccccggcagcctcagcatcagcggcggcggcggcggcggcggcgtcttccgcatcgttcgccgcagcgtaacccggagccctttgctctttgcagaatggcccgcttcggagacgagatgccggcccgctacgggggaggaggctccggggcagccgccggggtggtcgtgggcagcggaggcgggcgaggagccgggggcagccggcagggcgggcagcccggggcgcaaaggatgtacaagcagtcaatggcgcagagagcgcggaccatggcactctacaaccccatccccgtccgacagaactgcctcacggttaaccggtctctcttcctcttcagcgaagacaacgtggtgagaaaatacgccaaaaagatcaccgaatggcctccctttgaatatatgattttagccaccatcatagcgaattgcatcgtcctcgcactggagcagcatctgcctgatgatgacaagaccccgatgtctgaacggctggatgacacagaaccatacttcattggaattttttgtttcgaggctggaattaaaatcattgcccttgggtttgccttccacaaaggctcctacttgaggaatggctggaatgtcatggactttgtggtggtgctaacgggcatcttggcgacagttgggacggagtttgacctacggacgctgagggcagttcgagtgctgcggccgctcaagctggtgtctggaatcccaagtttacaagtcgtcctgaagtcgatcatgaaggcgatgatccctttgctgcagatcggcctcctcctattttttgcaatccttatttttgcaatcatagggttagaattttatatgggaaaatttcataccacctgctttgaagaggggacagatgacattcagggtgagtctccggctccatgtgggacagaagagcccgcccgcacctgccccaatgggaccaaatgtcagccctactgggaagggcccaacaacgggatcactcagttcgacaacatcctgtttgcagtgctgactgttttccagtgcataaccatggaagggtggactgatctcctctacaatagcaacgatgcctcagggaacacttggaactggttgtacttcatccccctcatcatcatcggctccttttttatgctgaaccttgtgctgggtgtgctgtcaggggagtttgccaaagaaagggaacgggtggagaaccggcgggcttttctgaagctgaggcggcaacaacagattgaacgtgagctcaatgggtacatggagtggatctcaaaagcagaagaggtgatcctcgccgaggatgaaactgacggggagcagaggcatccctttgatggagctctgcggagaaccaccataaagaaaagcaagacagatttgctcaaccccgaagaggctgaggatcagctggctgatatagcctctgtgggttctcccttcgcccgagccagcattaaaagtgccaagctggagaactcgaccttttttcacaaaaaggagaggaggatgcgtttctacatccgccgcatggtcaaaactcaggccttctactggactgtactcagtttggtagctctcaacacgctgtgtgttgctattgttcactacaaccagcccgagtggctctccgacttcctttactatgcagaattcattttcttaggactctttatgtccgaaatgtttataaaaatgtacgggcttgggacgcggccttacttccactcttccttcaactgctttgactgtggggttatcattgggagcatcttcgaggtcatctgggctgtcataaaacctggcacatcctttggaatcagcgtgttacgagccctcaggttattgcgtattttcaaagtcacaaagtactgggcatctctcagaaacctggtcgtctctctcctcaactccatgaagtccatcatcagcctgttgtttctccttttcctgttcattgtcgtcttcgcccttttgggaatgcaactcttcggcggccagtttaatttcgatgaagggactcctcccaccaacttcgatacttttccagcagcaataatgacggtgtttcagatcctgacgggcgaagactggaacgaggtcatgtacgacgggatcaagtctcaggggggcgtgcagggcggcatggtgttctccatctatttcattgtactgacgctctttgggaactacaccctcctgaatgtgttcttggccatcgctgtggacaatctggccaacgcccaggagctcaccaaggacgagcaagaggaagaagaagcagcgaaccagaaacttgccctacagaaagccaaggaggtggcagaagtgagtcctctgtccgcggccaacatgtctatagctgtgaaagagcaacagaagaatcaaaagccagccaagtccgtgtgggagcagcggaccagtgagatgcgaaagcagaacttgctggccagccgggaggccctgtataacgaaatggacccggacgagcgctggaaggctgcctacacgcggcacctgcggccagacatgaagacgcacttggaccggccgctggtggtggacccgcaggagaaccgcaacaacaacaccaacaagagccgggcggccgagcccaccgtggaccagcgcctcggccagcagcgcgccgaggacttcctcaggaaacaggcccgctaccacgatcgggcccgggaccccagcggctcggcgggcctggacgcacggaggccctgggcgggaagccaggaggccgagctgagccgggagggaccctacggccgcgagtcggaccaccacgcccgggagggcagcctggagcaacccgggttctgggagggcgaggccgagcgaggcaaggccggggacccccaccggaggcacgtgcaccggcaggggggcagcagggagagccgcagcgggtccccgcgcacgggcgcggacggggagcatcgacgtcatcgcgcgcaccgcaggcccggggaggagggtccggaggacaaggcggagcggagggcgcggcaccgcgagggcagccggccggcccggggcggcgagggcgagggcgagggccccgacgggggcgagcgcaggagaaggcaccggcatggcgctccagccacgtacgagggggacgcgcggagggaggacaaggagcggaggcatcggaggaggaaagagaaccagggctccggggtccctgtgtcgggccccaacctgtcaaccacccggccaatccagcaggacctgggccgccaagacccacccctggcagaggatattgacaacatgaagaacaacaagctggccaccgcggagtcggccgctccccacggcagccttggccacgccggcctgccccagagcccagccaagatgggaaacagcaccgaccccggccccatgctggccatccctgccatggccaccaacccccagaacgccgccagccgccggacgcccaacaacccggggaacccatccaatcccggcccccccaagacccccgagaatagccttatcgtcaccaaccccagcggcacccagaccaattcagctaagactgccaggaaacccgaccacaccacagtggacatccccccagcctgcccaccccccctcaaccacaccgtcgtacaagtgaacaaaaacgccaacccagacccactgccaaaaaaagaggaagagaagaaggaggaggaggaagacgaccgtggggaagacggccctaagccaatgcctccctatagctccatgttcatcctgtccacgaccaacccccttcgccgcctgtgccattacatcctgaacctgcgctactttgagatgtgcatcctcatggtcattgccatgagcagcatcgccctggccgccgaggaccctgtgcagcccaacgcacctcggaacaacgtgctgcgatactttgactacgtttttacaggcgtctttacctttgagatggtgatcaagatgattgacctggggctcgtcctgcatcagggtgcctacttccgtgacctctggaatattctcgacttcatagtggtcagtggggccctggtagcctttgccttcactggcaatagcaaaggaaaagacatcaacacgattaaatccctccgagtcctccgggtgctacgacctcttaaaaccatcaagcggctgccaaagctcaaggctgtgtttgactgtgtggtgaactcacttaaaaacgtcttcaacatcctcatcgtctacatgctattcatgttcatcttcgccgtggtggctgtgcagctcttcaaggggaaattcttccactgcactgacgagtccaaagagtttgagaaagattgtcgaggcaaatacctcctctacgagaagaatgaggtgaaggcgcgagaccgggagtggaagaagtatgaattccattacgacaatgtgctgtgggctctgctgaccctcttcaccgtgtccacgggagaaggctggccacaggtcctcaagcattcggtggacgccacctttgagaaccagggccccagccccgggtaccgcatggagatgtccattttctacgtcgtctactttgtggtgttccccttcttctttgtcaatatctttgtggccttgatcatcatcaccttccaggagcaaggggacaagatgatggaggaatacagcctggagaaaaatgagagggcctgcattgatttcgccatcagcgccaagccgctgacccgacacatgccgcagaacaagcagagcttccagtaccgcatgtggcagttcgtggtgtctccgcctttcgagtacacgatcatggccatgatcgccctcaacaccatcgtgcttatgatgaagttctatggggcttctgttgcttatgaaaatgccctgcgggtgttcaacatcgtcttcacctccctcttctctctggaatgtgtgctgaaagtcatggcttttgggattctgaattatttccgcgatgcctggaacatcttcgactttgtgactgttctgggcagcatcaccgatatcctcgtgactgagtttgggaataacttcatcaacctgagctttctccgcctcttccgagctgcccggctcatcaaacttctccgtcagggttacaccatccgcattcttctctggacctttgtgcagtccttcaaggccctgccttatgtctgtctgctgatcgccatgctcttcttcatctatgccatcattgggatgcaggtgtttggtaacattggcatcgacgtggaggacgaggacagtgatgaagatgagttccaaatcactgagcacaataacttccggaccttcttccaggccctcatgcttctcttccggagtgccaccggggaagcttggcacaacatcatgctttcctgcctcagcgggaaaccgtgtgataagaactctggcatcctgactcgagagtgtggcaatgaatttgcttatttttactttgtttccttcatcttcctctgctcgtttctgatgctgaatctctttgtcgccgtcatcatggacaactttgagtacctcacccgagactcctccatcctgggcccccaccacctggatgagtacgtgcgtgtctgggccgagtatgaccccgcagcttgcggtcggattcattataaggatatgtacagtttattacgagtaatatctccccctctcggcttaggcaagaaatgtcctcatagggttgcttgcaagcggcttctgcggatggacctgcccgtcgcagatgacaacaccgtccacttcaattccaccctcatggctctgatccgcacagccctggacatcaagattgccaagggaggagccgacaaacagcagatggacgctgagctgcggaaggagatgatggcgatttggcccaatctgtcccagaagacgctagacctgctggtcacacctcacaagtccacggacctcaccgtggggaagatctacgcagccatgatgatcatggagtactaccggcagagcaaggccaagaagctgcaggccatgcgcgaggagcaggaccggacacccctcatgttccagcgcatggagcccccgtccccaacgcaggaagggggacctggccagaacgccctcccctccacccagctggacccaggaggagccctgatggctcacgaaagcggcctcaaggagagcccgtcctgggtgacccagcgtgcccaggagatgttccagaagacgggcacatggagtccggaacaaggcccccctaccgacatgcccaacagccagcctaactctcagtccgtggagatgcgagagatgggcagagatggctactccgacagcgagcactacctccccatggaaggccagggccgggctgcctccatgccccgcctccctgcagagaaccagaggagaaggggccggccacgtgggaataacctcagtaccatctcagacaccagccccatgaagcgttcagcctccgtgctgggccccaaggcccgacgcctggacgattactcgctggagcgggtcccgcccgaggagaaccagcggcaccaccagcggcgccgcgaccgcagccaccgcgcctctgagcgctccctgggccgctacaccgatgtggacacaggcttggggacagacctgagcatgaccacccaatccggggacctgccgtcgaaggagcgggaccaggagcggggccggcccaaggatcggaagcatcgacagcaccaccaccaccaccaccaccaccaccatcccccgccccccgacaaggaccgctatgcccaggaacggccggaccacggccgggcacgggctcgggaccagcgctggtcccgctcgcccagcgagggccgagagcacatggcgcaccggcagtagttccgtaagtggaagcccagccccctcaacatctggtaccagcactccgcggcggggccgccgccagctcccccagaccccctccaccccccggccacacgtgtcctattcccctgtgatccgtaaggccggcggctcggggcccccgcagcagcagcagcagcagcagcagcagcagcagcagcaggcggtggccaggccgggccgggcggccaccagcggccctcggaggtacccaggccccacggccgagcctctggccggagatcggccgcccacggggggccacagcagcggccgctcgcccaggatggagaggcgggtcccaggcccggcccggagcgagtcccccagggcctgtcgacacggcggggcccggtggccggcatctggcccgcacgtgtccgaggggcccccgggtccccggcaccatggctactaccggggctccgactacgacgaggccgatggcccgggcagcgggggcggcgaggaggccatggccggggcctacgacgcgccaccccccgtacgacacgcgtcctcgggcgccaccgggcgctcgcccaggactccccgggcctcgggcccggcctgcgcctcgccttctcggcacggccggcgactccccaacggctactacccggcgcacggactggccaggccccgcgggccgggctccaggaagggcctgcacgaaccctacagcgagagtgacgatgattggtgctaagcccgggcgaggtggcgcccgcccggccccccacgcaccccacgcacacaccccacccgaggagccgcgcagaggccgcgggggcccagcacagagggcccgggagagggccagccgggagaccccagactctggagaggccagggctgggccacaagggtgtcccgcagagaccctcggccaaaagagaccctcctgggcagccacggcgccccccaaccagccccgatccccccacccacgacaggggctctcgggtgggaggcagggagcagacaaaccacacagccaagggatttgaattaactcagccatttttggagaactttggggaacatgaaaaaaaaaaaaaaaaaaaaaaaaaaaaacatttttaaaagaaaaaacggggagaaaaaaatagcttctattgatgagttttatcatctcaattgaatctttcctttccctgatgaagacagctggtggccgagtgcggcaaagaagccagaaggaaccagaatcccagtgccctacacccaccaccagacacactcacacccacacacgttctcagacacacacaagagtgcttgccggttataccaaaccctactattactgcctgcagaaatcaatttaaaaaaataataataacaataaacaattttaaaaaggacaaaaaaattaatgattgagaaaagaggcatttttttctgacatttggtcctgcttgaaacaacaaaagaagaagaaaaacccaccatcaccaccgattcctttgcttcttttttccttttttcctaccttgtttgaaaaccgtgggcttgggactgtgaattattgcatgacattcaaaaagaaaaaaaaaataaaaaaaagttgaat

SEQ ID NO: 2640 - DNA, 3765 bp, Homo sapiens
  source 1..3765: mol_type = unassigned DNA; mol_type = unassigned DNA
caggagcaaggggacaagatgatggaggaatacagcctggagaaaaatgagagggcctgcattgatttcgccatcagcgccaagccgctgacccgacacatgccgcagaacaagcagagcttccagtaccgcatgtggcagttcgtggtgtctccgcctttcgagtacacgatcatggccatgatcgccctcaacaccatcgtgcttatgatgaagttctatggggcttctgttgcttatgaaaatgccctgcgggtgttcaacatcgtcttcacctccctcttctctctggaatgtgtgctgaaagtcatggcttttgggattctgaattatttccgcgatgcctggaacatcttcgactttgtgactgttctgggcagcatcaccgatatcctcgtgactgagtttgggaataacttcatcaacctgagctttctccgcctcttccgagctgcccggctcatcaaacttctccgtcagggttacaccatccgcattcttctctggacctttgtgcagtccttcaaggccctgccttatgtctgtctgctgatcgccatgctcttcttcatctatgccatcattgggatgcaggtgtttggtaacattggcatcgacgtggaggacgaggacagtgatgaagatgagttccaaatcactgagcacaataacttccggaccttcttccaggccctcatgcttctcttccggagtgccaccggggaagcttggcacaacatcatgctttcctgcctcagcgggaaaccgtgtgataagaactctggcatcctgactcgagagtgtggcaatgaatttgcttatttttactttgtttccttcatcttcctctgctcgtttctgatgctgaatctctttgtcgccgtcatcatggacaactttgagtacctcacccgagactcctccatcctgggcccccaccacctggatgagtacgtgcgtgtctgggccgagtatgaccccgcagcttgcggtcggattcattataaggatatgtacagtttattacgagtaatatctccccctctcggcttaggcaagaaatgtcctcatagggttgcttgcaagcggcttctgcggatggacctgcccgtcgcagatgacaacaccgtccacttcaattccaccctcatggctctgatccgcacagccctggacatcaagattgccaagggaggagccgacaaacagcagatggacgctgagctgcggaaggagatgatggcgatttggcccaatctgtcccagaagacgctagacctgctggtcacacctcacaagtccacggacctcaccgtggggaagatctacgcagccatgatgatcatggagtactaccggcagagcaaggccaagaagctgcaggccatgcgcgaggagcaggaccggacacccctcatgttccagcgcatggagcccccgtccccaacgcaggaagggggacctggccagaacgccctcccctccacccagctggacccaggaggagccctgatggctcacgaaagcggcctcaaggagagcccgtcctgggtgacccagcgtgcccaggagatgttccagaagacgggcacatggagtccggaacaaggcccccctaccgacatgcccaacagccagcctaactctcagtccgtggagatgcgagagatgggcagagatggctactccgacagcgagcactacctccccatggaaggccagggccgggctgcctccatgccccgcctccctgcagagaaccagaccatctcagacaccagccccatgaagcgttcagcctccgtgctgggccccaaggcccgacgcctggacgattactcgctggagcgggtcccgcccgaggagaaccagcggcaccaccagcggcgccgcgaccgcagccaccgcgcctctgagcgctccctgggccgctacaccgatgtggacacaggcttggggacagacctgagcatgaccacccaatccggggacctgccgtcgaaggagcgggaccaggagcggggccggcccaaggatcggaagcatcgacagcaccaccaccaccaccaccaccaccaccatcccccgccccccgacaaggaccgctatgcccaggaacggccggaccacggccgggcacgggctcgggaccagcgctggtcccgctcgcccagcgagggccgagagcacatggcgcaccggcagggcagtagttccgtaagtggaagcccagccccctcaacatctggtaccagcactccgcggcggggccgccgccagctcccccagaccccctccaccccccggccacacgtgtcctattcccctgtgatccgtaaggccggcggctcggggcccccgcagcagcagcagcagcagcagcagcagcagcagcagcaggcggtggccaggccgggccgggcggccaccagcggccctcggaggtacccaggccccacggccgagcctctggccggagatcggccgcccacggggggccacagcagcggccgctcgcccaggatggagaggcgggtcccaggcccggcccggagcgagtcccccagggcctgtcgacacggcggggcccggtggccggcatctggcccgcacgtgtccgaggggcccccgggtccccggcaccatggctactaccggggctccgactacgacgaggccgatggcccgggcagcgggggcggcgaggaggccatggccggggcctacgacgcgccaccccccgtacgacacgcgtcctcgggcgccaccgggcgctcgcccaggactccccgggcctcgggcccggcctgcgcctcgccttctcggcacggccggcgactccccaacggctactacccggcgcacggactggccaggccccgcgggccgggctccaggaagggcctgcacgaaccctacagcgagagtgacgatgattggtgctaagcccgggcgaggtggcgcccgcccggccccccacgcaccccacgcacacaccccacccgaggagccgcgcagaggccgcgggggcccagcacagagggcccgggagagggccagccgggagaccccagactctggagaggccagggctgggccacaagggtgtcccgcagagaccctcggccaaaagagaccctcctgggcagccacggcgccccccaaccagccccgatccccccacccacgacaggggctctcgggtgggaggcagggagcagacaaaccacacagccaagggatttgaattaactcagccatttttggagaactttggggaacatgaaaaaaaaaaaaaaaaaaaaaaaaaaaaacatttttaaaagaaaaaacggggagaaaaaaatagcttctattgatgagttttatcatctcaattgaatctttcctttccctgatgaagacagctggtggccgagtgcggcaaagaagccagaaggaaccagaatcccagtgccctacacccaccaccagacacactcacacccacacacgttctcagacacacacaagagtgcttgccggttataccaaaccctactattactgcctgcagaaatcaatttaaaaaaataataataacaataaacaattttaaaaaggacaaaaaaattaatgattgagaaaagaggcatttttttctgacatttggtcctgcttgaaacaacaaaagaagaagaaaaacccaccatcaccaccgattcctttgcttcttttttccttttttcctaccttgtttgaaaaccgtgggcttgggactgtgaa

SEQ ID NO: 2641 - DNA, 8340 bp, Homo sapiens
  source 1..8340: mol_type = unassigned DNA; mol_type = unassigned DNA
atgtcccgagctgctatccccggctcggcccgggcagccgccttctgagcccccgacccgaggcgccgagccgccgccgcccgatgggctgggccgtggagcgtctccgcagtcgtagctccagccgccgcgctcccagccccggcagcctcagcatcagcggcggcggcggcggcggcggcgtcttccgcatcgttcgccgcagcgtaacccggagccctttgctctttgcagaatggcccgcttcggagacgagatgccggcccgctacgggggaggaggctccggggcagccgccggggtggtcgtgggcagcggaggcgggcgaggagccgggggcagccggcagggcgggcagcccggggcgcaaaggatgtacaagcagtcaatggcgcagagagcgcggaccatggcactctacaaccccatccccgtccgacagaactgcctcacggttaaccggtctctcttcctcttcagcgaagacaacgtggatgacacagaaccatacttcattggaattttttgtttcgaggctggaattaaaatcattgcccttgggtttgccttccacaaaggctcctacttgaggaatggctggaatgtcatggactttgtggtggtgctaacgggcatcttggcgacagttgggacggagtttgacctacggacgctgagggcagttcgagtgctgcggccgctcaagctggtgtctggaatcccaagtttacaagtcgtcctgaagtcgatcatgaaggcgatgatccctttgctgcagatcggcctcctcctattttttgcaatccttatttttgcaatcatagggttagaattttatatgggaaaatttcataccacctgctttgaagaggggacagatgacattcagggtgagtctccggctccatgtgggacagaagagcccgcccgcacctgccccaatgggaccaaatgtcagccctactgggaagggcccaacaacgggatcactcagttcgacaacatcctgtttgcagtgctgactgttttccagtgcataaccatggaagggtggactgatctcctctacaatagcaacgatgcctcagggaacacttggaactggttgtacttcatccccctcatcatcatcggctccttttttatgctgaaccttgtgctgggtgtgctgtcaggggagtttgccaaagaaagggaacgggtggagaaccggcgggcttttctgaagctgaggcggcaacaacagattgaacgtgagctcaatgggtacatggagtggatctcaaaagcagaagaggtgatcctcgccgaggatgaaactgacggggagcagaggcatccctttgatggagctctgcggagaaccaccataaagaaaagcaagacagatttgctcaaccccgaagaggctgaggatcagctggctgatatagcctctgtgggttctcccttcgcccgagccagcattaaaagtgccaagctggagaactcgaccttttttcacaaaaaggagaggaggatgcgtttctacatccgccgcatggtcaaaactcaggccttctactggactgtactcagtttggtagctctcaacacgctgtgtgttgctattgttcactacaaccagcccgagtggctctccgacttcctttactatgcagaattcattttcttaggactctttatgtccgaaatgtttataaaaatgtacgggcttgggacgcggccttacttccactcttccttcaactgctttgactgtggggttatcattgggagcatcttcgaggtcatctgggctgtcataaaacctggcacatcctttggaatcagcgtgttacgagccctcaggttattgcgtattttcaaagtcacaaagtactgggcatctctcagaaacctggtcgtctctctcctcaactccatgaagtccatcatcagcctgttgtttctccttttcctgttcattgtcgtcttcgcccttttgggaatgcaactcttcggcggccagtttaatttcgatgaagggactcctcccaccaacttcgatacttttccagcagcaataatgacggtgtttcagatcctgacgggcgaagactggaacgaggtcatgtacgacgggatcaagtctcaggggggcgtgcagggcggcatggtgttctccatctatttcattgtactgacgctctttgggaactacaccctcctgaatgtgttcttggccatcgctgtggacaatctggccaacgcccaggagctcaccaaggacgagcaagaggaagaagaagcagcgaaccagaaacttgccctacagaaagccaaggaggtggcagaagtgagtcctctgtccgcggccaacatgtctatagctgtgaaagagcaacagaagaatcaaaagccagccaagtccgtgtgggagcagcggaccagtgagatgcgaaagcagaacttgctggccagccgggaggccctgtataacgaaatggacccggacgagcgctggaaggctgcctacacgcggcacctgcggccagacatgaagacgcacttggaccggccgctggtggtggacccgcaggagaaccgcaacaacaacaccaacaagagccgggcggccgagcccaccgtggaccagcgcctcggccagcagcgcgccgaggacttcctcaggaaacaggcccgctaccacgatcgggcccgggaccccagcggctcggcgggcctggacgcacggaggccctgggcgggaagccaggaggccgagctgagccgggagggaccctacggccgcgagtcggaccaccacgcccgggagggcagcctggagcaacccgggttctgggagggcgaggccgagcgaggcaaggccggggacccccaccggaggcacgtgcaccggcaggggggcagcagggagagccgcagcgggtccccgcgcacgggcgcggacggggagcatcgacgtcatcgcgcgcaccgcaggcccggggaggagggtccggaggacaaggcggagcggagggcgcggcaccgcgagggcagccggccggcccggggcggcgagggcgagggcgagggccccgacgggggcgagcgcaggagaaggcaccggcatggcgctccagccacgtacgagggggacgcgcggagggaggacaaggagcggaggcatcggaggaggaaagagaaccagggctccggggtccctgtgtcgggccccaacctgtcaaccacccggccaatccagcaggacctgggccgccaagacccacccctggcagaggatattgacaacatgaagaacaacaagctggccaccgcggagtcggccgctccccacggcagccttggccacgccggcctgccccagagcccagccaagatgggaaacagcaccgaccccggccccatgctggccatccctgccatggccaccaacccccagaacgccgccagccgccggacgcccaacaacccggggaacccatccaatcccggcccccccaagacccccgagaatagccttatcgtcaccaaccccagcggcacccagaccaattcagctaagactgccaggaaacccgaccacaccacagtggacatccccccagcctgcccaccccccctcaaccacaccgtcgtacaagtgaacaaaaacgccaacccagacccactgccaaaaaaagaggaagagaagaaggaggaggaggaagacgaccgtggggaagacggccctaagccaatgcctccctatagctccatgttcatcctgtccacgaccaacccccttcgccgcctgtgccattacatcctgaacctgcgctactttgagatgtgcatcctcatggtcattgccatgagcagcatcgccctggccgccgaggaccctgtgcagcccaacgcacctcggaacaacgtgctgcgatactttgactacgtttttacaggcgtctttacctttgagatggtgatcaagatgattgacctggggctcgtcctgcatcagggtgcctacttccgtgacctctggaatattctcgacttcatagtggtcagtggggccctggtagcctttgccttcactggcaatagcaaaggaaaagacatcaacacgattaaatccctccgagtcctccgggtgctacgacctcttaaaaccatcaagcggctgccaaagctcaaggctgtgtttgactgtgtggtgaactcacttaaaaacgtcttcaacatcctcatcgtctacatgctattcatgttcatcttcgccgtggtggctgtgcagctcttcaaggggaaattcttccactgcactgacgagtccaaagagtttgagaaagattgtcgaggcaaatacctcctctacgagaagaatgaggtgaaggcgcgagaccgggagtggaagaagtatgaattccattacgacaatgtgctgtgggctctgctgaccctcttcaccgtgtccacgggagaaggctggccacaggtcctcaagcattcggtggacgccacctttgagaaccagggccccagccccgggtaccgcatggagatgtccattttctacgtcgtctactttgtggtgttccccttcttctttgtcaatatctttgtggccttgatcatcatcaccttccaggagcaaggggacaagatgatggaggaatacagcctggagaaaaatgagagggcctgcattgatttcgccatcagcgccaagccgctgacccgacacatgccgcagaacaagcagagcttccagtaccgcatgtggcagttcgtggtgtctccgcctttcgagtacacgatcatggccatgatcgccctcaacaccatcgtgcttatgatgaagttctatggggcttctgttgcttatgaaaatgccctgcgggtgttcaacatcgtcttcacctccctcttctctctggaatgtgtgctgaaagtcatggcttttgggattctgaattatttccgcgatgcctggaacatcttcgactttgtgactgttctgggcagcatcaccgatatcctcgtgactgagtttgggaataacttcatcaacctgagctttctccgcctcttccgagctgcccggctcatcaaacttctccgtcagggttacaccatccgcattcttctctggacctttgtgcagtccttcaaggccctgccttatgtctgtctgctgatcgccatgctcttcttcatctatgccatcattgggatgcaggtgtttggtaacattggcatcgacgtggaggacgaggacagtgatgaagatgagttccaaatcactgagcacaataacttccggaccttcttccaggccctcatgcttctcttccggagtgccaccggggaagcttggcacaacatcatgctttcctgcctcagcgggaaaccgtgtgataagaactctggcatcctgactcgagagtgtggcaatgaatttgcttatttttactttgtttccttcatcttcctctgctcgtttctgatgctgaatctctttgtcgccgtcatcatggacaactttgagtacctcacccgagactcctccatcctgggcccccaccacctggatgagtacgtgcgtgtctgggccgagtatgaccccgcagcttgcggtcggattcattataaggatatgtacagtttattacgagtaatatctccccctctcggcttaggcaagaaatgtcctcatagggttgcttgcaagcggcttctgcggatggacctgcccgtcgcagatgacaacaccgtccacttcaattccaccctcatggctctgatccgcacagccctggacatcaagattgccaagggaggagccgacaaacagcagatggacgctgagctgcggaaggagatgatggcgatttggcccaatctgtcccagaagacgctagacctgctggtcacacctcacaagtccacggacctcaccgtggggaagatctacgcagccatgatgatcatggagtactaccggcagagcaaggccaagaagctgcaggccatgcgcgaggagcaggaccggacacccctcatgttccagcgcatggagcccccgtccccaacgcaggaagggggacctggccagaacgccctcccctccacccagctggacccaggaggagccctgatggctcacgaaagcggcctcaaggagagcccgtcctgggtgacccagcgtgcccaggagatgttccagaagacgggcacatggagtccggaacaaggcccccctaccgacatgcccaacagccagcctaactctcagtccgtggagatgcgagagatgggcagagatggctactccgacagcgagcactacctccccatggaaggccagggccgggctgcctccatgccccgcctccctgcagagaaccagaggagaaggggccggccacgtgggaataacctcagtaccatctcagacaccagccccatgaagcgttcagcctccgtgctgggccccaaggcccgacgcctggacgattactcgctggagcgggtcccgcccgaggagaaccagcggcaccaccagcggcgccgcgaccgcagccaccgcgcctctgagcgctccctgggccgctacaccgatgtggacacaggcttggggacagacctgagcatgaccacccaatccggggacctgccgtcgaaggagcgggaccaggagcggggccggcccaaggatcggaagcatcgacagcaccaccaccaccaccaccaccaccaccatcccccgccccccgacaaggaccgctatgcccaggaacggccggaccacggccgggcacgggctcgggaccagcgctggtcccgctcgcccagcgagggccgagagcacatggcgcaccggcagggcagtagttccgtaagtggaagcccagccccctcaacatctggtaccagcactccgcggcggggccgccgccagctcccccagaccccctccaccccccggccacacgtgtcctattcccctgtgatccgtaaggccggcggctcggggcccccgcagcagcagcagcagcagcagcagcagcagcagcagcaggcggtggccaggccgggccgggcggccaccagcggccctcggaggtacccaggccccacggccgagcctctggccggagatcggccgcccacggggggccacagcagcggccgctcgcccaggatggagaggcgggtcccaggcccggcccggagcgagtcccccagggcctgtcgacacggcggggcccggtggccggcatctggcccgcacgtgtccgaggggcccccgggtccccggcaccatggctactaccggggctccgactacgacgaggccgatggcccgggcagcgggggcggcgaggaggccatggccggggcctacgacgcgccaccccccgtacgacacgcgtcctcgggcgccaccgggcgctcgcccaggactccccgggcctcgggcccggcctgcgcctcgccttctcggcacggccggcgactccccaacggctactacccggcgcacggactggccaggccccgcgggccgggctccaggaagggcctgcacgaaccctacagcgagagtgacgatgattggtgctaagcccgggcgaggtggcgcccgcccggccccccacgcaccccacgcacacaccccacccgaggagccgcgcagaggccgcgggggcccagcacagagggcccgggagagggccagccgggagaccccagactctggagaggccagggctgggccacaagggtgtcccgcagagaccctcggccaaaagagaccctcctgggcagccacggcgccccccaaccagccccgatccccccacccacgacaggggctctcgggtgggaggcagggagcagacaaaccacacagccaagggatttgaattaactcagccatttttggagaactttggggaacatgaaaaaaaaaaaaaaaaaaaaaaaaaaaaacatttttaaaagaaaaaacggggagaaaaaaatagcttctattgatgagttttatcatctcaattgaatctttcctttccctgatgaagacagctggtggccgagtgcggcaaagaagccagaaggaaccagaatcccagtgccctacacccaccaccagacacactcacacccacacacgttctcagacacacacaagagtgcttgccggttataccaaaccctactattactgcctgcagaaatcaatttaaaaaaataataataacaataaacaattttaaaaaggacaaaaaaattaatgattgagaaaagaggcatttttttctgacatttggtcctgcttgaaacaac

SEQ ID NO: 2642 - DNA, 8137 bp, Homo sapiens
  source 1..8137: mol_type = unassigned DNA; mol_type = unassigned DNA
ccgcatcgttcgccgcagcgtaacccggagccctttgctctttgcagaatggcccgcttcggagacgagatgccggcccgctacgggggaggaggctccggggcagccgccggggtggtcgtgggcagcggaggcgggcgaggagccgggggcagccggcagggcgggcagcccggggcgcaaaggatgtacaagcagtcaatggcgcagagagcgcggaccatggcactctacaaccccatccccgtccgacagaactgcctcacggttaaccggtctctcttcctcttcagcgaagacaacgtggtgagaaaatacgccaaaaagatcaccgaatggcctccctttgaatatatgattttagccaccatcatagcgaattgcatcgtcctcgcactggagcagcatctgcctgatgatgacaagaccccgatgtctgaacggctggatgacacagaaccatacttcattggaattttttgtttcgaggctggaattaaaatcattgcccttgggtttgccttccacaaaggctcctacttgaggaatggctggaatgtcatggactttgtggtggtgctaacgggcatcttggcgacagttgggacggagtttgacctacggacgctgagggcagttcgagtgctgcggccgctcaagctggtgtctggaatcccaagtttacaagtcgtcctgaagtcgatcatgaaggcgatgatccctttgctgcagatcggcctcctcctattttttgcaatccttatttttgcaatcatagggttagaattttatatgggaaaatttcataccacctgctttgaagaggggacagatgacattcagggtgagtctccggctccatgtgggacagaagagcccgcccgcacctgccccaatgggaccaaatgtcagccctactgggaagggcccaacaacgggatcactcagttcgacaacatcctgtttgcagtgctgactgttttccagtgcataaccatggaagggtggactgatctcctctacaatagcaacgatgcctcagggaacacttggaactggttgtacttcatccccctcatcatcatcggctccttttttatgctgaaccttgtgctgggtgtgctgtcaggggagtttgccaaagaaagggaacgggtggagaaccggcgggcttttctgaagctgaggcggcaacaacagattgaacgtgagctcaatgggtacatggagtggatctcaaaagcagaagaggtgatcctcgccgaggatgaaactgacggggagcagaggcatccctttgatggagctctgcggagaaccaccataaagaaaagcaagacagatttgctcaaccccgaagaggctgaggatcagctggctgatatagcctctgtgggttctcccttcgcccgagccagcattaaaagtgccaagctggagaactcgaccttttttcacaaaaaggagaggaggatgcgtttctacatccgccgcatggtcaaaactcaggccttctactggactgtactcagtttggtagctctcaacacgctgtgtgttgctattgttcactacaaccagcccgagtggctctccgacttcctttactatgcagaattcattttcttaggactctttatgtccgaaatgtttataaaaatgtacgggcttgggacgcggccttacttccactcttccttcaactgctttgactgtggggttatcattgggagcatcttcgaggtcatctgggctgtcataaaacctggcacatcctttggaatcagcgtgttacgagccctcaggttattgcgtattttcaaagtcacaaagtactgggcatctctcagaaacctggtcgtctctctcctcaactccatgaagtccatcatcagcctgttgtttctccttttcctgttcattgtcgtcttcgcccttttgggaatgcaactcttcggcggccagtttaatttcgatgaagggactcctcccaccaacttcgatacttttccagcagcaataatgacggtgtttcagatcctgacgggcgaagactggaacgaggtcatgtacgacgggatcaagtctcaggggggcgtgcagggcggcatggtgttctccatctatttcattgtactgacgctctttgggaactacaccctcctgaatgtgttcttggccatcgctgtggacaatctggccaacgcccaggagctcaccaaggacgagcaagaggaagaagaagcagcgaaccagaaacttgccctacagaaagccaaggaggtggcagaagtgagtcctctgtccgcggccaacatgtctatagctgtgaaagagcaacagaagaatcaaaagccagccaagtccgtgtgggagcagcggaccagtgagatgcgaaagcagaacttgctggccagccgggaggccctgtataacgaaatggacccggacgagcgctggaaggctgcctacacgcggcacctgcggccagacatgaagacgcacttggaccggccgctggtggtggacccgcaggagaaccgcaacaacaacaccaacaagagccgggcggccgagcccaccgtggaccagcgcctcggccagcagcgcgccgaggacttcctcaggaaacaggcccgctaccacgatcgggcccgggaccccagcggctcggcgggcctggacgcacggaggccctgggcgggaagccaggaggccgagctgagccgggagggaccctacggccgcgagtcggaccaccacgcccgggagggcagcctggagcaacccgggttctgggagggcgaggccgagcgaggcaaggccggggacccccaccggaggcacgtgcaccggcaggggggcagcagggagagccgcagcgggtccccgcgcacgggcgcggacggggagcatcgacgtcatcgcgcgcaccgcaggcccggggaggagggtccggaggacaaggcggagcggagggcgcggcaccgcgagggcagccggccggcccggggcggcgagggcgagggcgagggccccgacgggggcgagcgcaggagaaggcaccggcatggcgctccagccacgtacgagggggacgcgcggagggaggacaaggagcggaggcatcggaggaggaaagagaaccagggctccggggtccctgtgtcgggccccaacctgtcaaccacccggccaatccagcaggacctgggccgccaagacccacccctggcagaggatattgacaacatgaagaacaacaagctggccaccgcggagtcggccgctccccacggcagccttggccacgccggcctgccccagagcccagccaagatgggaaacagcaccgaccccggccccatgctggccatccctgccatggccaccaacccccagaacgccgccagccgccggacgcccaacaacccggggaacccatccaatcccggcccccccaagacccccgagaatagccttatcgtcaccaaccccagcggcacccagaccaattcagctaagactgccaggaaacccgaccacaccacagtggacatccccccagcctgcccaccccccctcaaccacaccgtcgtacaagtgaacaaaaacgccaacccagacccactgccaaaaaaagaggaagagaagaaggaggaggaggaagacgaccgtggggaagacggccctaagccaatgcctccctatagctccatgttcatcctgtccacgaccaacccccttcgccgcctgtgccattacatcctgaacctgcgctactttgagatgtgcatcctcatggtcattgccatgagcagcatcgccctggccgccgaggaccctgtgcagcccaacgcacctcggaacaacgtgctgcgatactttgactacgtttttacaggcgtctttacctttgagatggtgatcaagatgattgacctggggctcgtcctgcatcagggtgcctacttccgtgacctctggaatattctcgacttcatagtggtcagtggggccctggtagcctttgccttcactggcaatagcaaaggaaaagacatcaacacgattaaatccctccgagtcctccgggtgctacgacctcttaaaaccatcaagcggctgccaaagctcaaggctgtgtttgactgtgtggtgaactcacttaaaaacgtcttcaacatcctcatcgtctacatgctattcatgttcatcttcgccgtggtggctgtgcagctcttcaaggggaaattcttccactgcactgacgagtccaaagagtttgagaaagattgtcgaggcaaatacctcctctacgagaagaatgaggtgaaggcgcgagaccgggagtggaagaagtatgaattccattacgacaatgtgctgtgggctctgctgaccctcttcaccgtgtccacgggagaaggctggccacaggtcctcaagcattcggtggacgccacctttgagaaccagggccccagccccgggtaccgcatggagatgtccattttctacgtcgtctactttgtggtgttccccttcttctttgtcaatatctttgtggccttgatcatcatcaccttccaggagcaaggggacaagatgatggaggaatacagcctggagaaaaatgagagggcctgcattgatttcgccatcagcgccaagccgctgacccgacacatgccgcagaacaagcagagcttccagtaccgcatgtggcagttcgtggtgtctccgcctttcgagtacacgatcatggccatgatcgccctcaacaccatcgtgcttatgatgaagttctatggggcttctgttgcttatgaaaatgccctgcgggtgttcaacatcgtcttcacctccctcttctctctggaatgtgtgctgaaagtcatggcttttgggattctgaattatttccgcgatgcctggaacatcttcgactttgtgactgttctgggcagcatcaccgatatcctcgtgactgagtttgggaataacttcatcaacctgagctttctccgcctcttccgagctgcccggctcatcaaacttctccgtcagggttacaccatccgcattcttctctggacctttgtgcagtccttcaaggccctgccttatgtctgtctgctgatcgccatgctcttcttcatctatgccatcattgggatgcaggtgtttggtaacattggcatcgacgtggaggacgaggacagtgatgaagatgagttccaaatcactgagcacaataacttccggaccttcttccaggccctcatgcttctcttccggagtgccaccggggaagcttggcacaacatcatgctttcctgcctcagcgggaaaccgtgtgataagaactctggcatcctgactcgagagtgtggcaatgaatttgcttatttttactttgtttccttcatcttcctctgctcgtttctgatgctgaatctctttgtcgccgtcatcatggacaactttgagtacctcacccgagactcctccatcctgggcccccaccacctggatgagtacgtgcgtgtctgggccgagtatgaccccgcagcttgcggtcggattcattataaggatatgtacagtttattacgagtaatatctccccctctcggcttaggcaagaaatgtcctcatagggttgcttgcaagcggcttctgcggatggacctgcccgtcgcagatgacaacaccgtccacttcaattccaccctcatggctctgatccgcacagccctggacatcaagattgccaagggaggagccgacaaacagcagatggacgctgagctgcggaaggagatgatggcgatttggcccaatctgtcccagaagacgctagacctgctggtcacacctcacaagtccacggacctcaccgtggggaagatctacgcagccatgatgatcatggagtactaccggcagagcaaggccaagaagctgcaggccatgcgcgaggagcaggaccggacacccctcatgttccagcgcatggagcccccgtccccaacgcaggaagggggacctggccagaacgccctcccctccacccagctggacccaggaggagccctgatggctcacgaaagcggcctcaaggagagcccgtcctgggtgacccagcgtgcccaggagatgttccagaagacgggcacatggagtccggaacaaggcccccctaccgacatgcccaacagccagcctaactctcagtccgtggagatgcgagagatgggcagagatggctactccgacagcgagcactacctccccatggaaggccagggccgggctgcctccatgccccgcctccctgcagagaaccagaggagaaggggccggccacgtgggaataacctcagtaccatctcagacaccagccccatgaagcgttcagcctccgtgctgggccccaaggcccgacgcctggacgattactcgctggagcgggtcccgcccgaggagaaccagcggcaccaccagcggcgccgcgaccgcagccaccgcgcctctgagcgctccctgggccgctacaccgatgtggacacaggcttggggacagacctgagcatgaccacccaatccggggacctgccgtcgaaggagcgggaccaggagcggggccggcccaaggatcggaagcatcgacagcaccaccaccaccaccaccaccaccaccatcccccgccccccgacaaggaccgctatgcccaggaacggccggaccacggccgggcacgggctcgggaccagcgctggtcccgctcgcccagcgagggccgagagcacatggcgcaccggcagttccgtaagtggaagcccagccccctcaacatctggtaccagcactccgcggcggggccgccgccagctcccccagaccccctccaccccccggccacacgtgtcctattcccctgtgatccgtaaggccggcggctcggggcccccgcagcagcagcagcagcagcagcagcagcagcagcagcaggcggtggccaggccgggccgggcggccaccagcggccctcggaggtacccaggccccacggccgagcctctggccggagatcggccgcccacggggggccacagcagcggccgctcgcccaggatggagaggcgggtcccaggcccggcccggagcgagtcccccagggcctgtcgacacggcggggcccggtggccggcatctggcccgcacgtgtccgaggggcccccgggtccccggcaccatggctactaccggggctccgactacgacgaggccgatggcccgggcagcgggggcggcgaggaggccatggccggggcctacgacgcgccaccccccgtacgacacgcgtcctcgggcgccaccgggcgctcgcccaggactccccgggcctcgggcccggcctgcgcctcgccttctcggcacggccggcgactccccaacggctactacccggcgcacggactggccaggccccgcgggccgggctccaggaagggcctgcacgaaccctacagcgagagtgacgatgattggtgctaagcccgggcgaggtggcgcccgcccggccccccacgcaccccacgcacacaccccacccgaggagccgcgcagaggccgcgggggcccagcacagagggcccgggagagggccagccgggagaccccagactctggagaggccagggctgggccacaagggtgtcccgcagagaccctcggccaaaagagaccctcctgggcagccacggcgccccccaaccagccccgatccccccacccacgacaggggctctcgggtgggaggcagggagcagacaaaccacacagccaagggatttgaattaactcagccatttttggagaactttggggaacatgaaaaaaaaaaaaaaaaaaaaaaaaaaaaacatttttaaaagaaaaaacggggagaaaaaaatagcttctattgatgagttttatcatctcaattgaatctttcctttccctgatgaagacagctggtggccgagtgcggcaaagaagccagaaggaaccagaatcccagtgccctacacccaccaccagacacactcacacccacacacgttctcagacacacacaagagtgct

SEQ ID NO: 2643 - DNA, 2693 bp, Homo sapiens
  source 1..2693: mol_type = unassigned DNA; mol_type = unassigned DNA
gtcatggcttttgggattctgaattatttccgcgatgcctggaacatcttcgactttgtgactgttctgggcagcatcaccgatatcctcgtgactgagtttgggaatccgaataacttcatcaacctgagctttctccgcctcttccgagctgcccggctcatcaaacttctccgtcagggttacaccatccgcattcttctctggacctttgtgcagtccttcaaggccctgccttatgtctgtctgctgatcgccatgctcttcttcatctatgccatcattgggatgcaggtgtttggtaacattggcatcgacgtggaggacgaggacagtgatgaagatgagttccaaatcactgagcacaataacttccggaccttcttccaggccctcatgcttctcttccggagtgccaccggggaagcttggcacaacatcatgctttcctgcctcagcgggaaaccgtgtgataagaactctggcatcctgactcgagagtgtggcaatgaatttgcttatttttactttgtttccttcatcttcctctgctcgtttctgatgctgaatctctttgtcgccgtcatcatggacaactttgagtacctcacccgagactcctccatcctgggcccccaccacctggatgagtacgtgcgtgtctgggccgagtatgaccccgcagcttggggccgcatgccttacctggacatgtatcagatgctgagacacatgtctccgcccctgggtctggggaagaagtgtccggccagagtggcttacaagcggcttctgcggatggacctgcccgtcgcagatgacaacaccgtccacttcaattccaccctcatggctctgatccgcacagccctggacatcaagattgccaagggaggagccgacaaacagcagatggacgctgagctgcggaaggagatgatggcgatttggcccaatctgtcccagaagacgctagacctgctggtcacacctcacaagtccacggacctcaccgtggggaagatctacgcagccatgatgatcatggagtactaccggcagagcaaggccaagaagctgcaggccatgcgcgaggagcaggaccggacacccctcatgttccagcgcatggagcccccgtccccaacgcaggaagggggacctggccagaacgccctcccctccacccagctggacccaggaggagccctgatggctcacgaaagcggcctcaaggagagcccgtcctgggtgacccagcgtgcccaggagatgttccagaagacgggcacatggagtccggaacaaggcccccctaccgacatgcccaacagccagcctaactctcagtccgtggagatgcgagagatgggcagagatggctactccgacagcgagcactacctccccatggaaggccagggccgggctgcctccatgccccgcctccctgcagagaaccagaccatctcagacaccagccccatgaagcgttcagcctccgtgctgggccccaaggcccgacgcctggacgattactcgctggagcgggtcccgcccgaggagaaccagcggcaccaccagcggcgccgcgaccgcagccaccgcgcctctgagcgctccctgggccgctacaccgatgtggacacaggcttggggacagacctgagcatgaccacccaatccggggacctgccgtcgaaggagcgggaccaggagcggggccggcccaaggatcggaagcatcgacagcaccaccaccaccaccaccaccaccaccatcccccgccccccgacaaggaccgctatgcccaggaacggccggaccacggccgggcacgggctcgggaccagcgctggtcccgctcgcccagcgagggccgagagcacatggcgcaccggcagggcagtagttccgtaagtggaagcccagccccctcaacatctggtaccagcactccgcggcggggccgccgccagctcccccagaccccctccaccccccggccacacgtgtcctattcccctgtgatccgtaaggccggcggctcggggcccccgcagcagcagcagcagcagcagcagcagcagcagcagcaggcggtggccaggccgggccgggcggccaccagcggccctcggaggtacccaggccccacggccgagcctctggccggagatcggccgcccacggggggccacagcagcggccgctcgcccaggatggagaggcgggtcccaggcccggcccggagcgagtcccccagggcctgtcgacacggcggggcccggtggccggcatctggcccgcacgtgtccgaggggcccccgggtccccggcaccatggctactaccggggctccgactacgacgaggccgatggcccgggcagcgggggcggcgaggaggccatggccggggcctacgacgcgccaccccccgtacgacacgcgtcctcgggcgccaccgggcgctcgcccaggactccccgggcctcgggcccggcctgcgcctcgccttctcggcacggccggcgactccccaacggctactacccggcgcacggactggccaggccccgcgggccgggctccaggaagggcctgcacgaaccctacagcgagagtgacgatgattggtgctaagcccgggcgaggtggcgcccgcccggccccccacgcaccccacgcac

SEQ ID NO: 2644 - DNA, 7809 bp, Homo sapiens
  source 1..7809: mol_type = unassigned DNA; mol_type = unassigned DNA
gatgtcccgagctgctatccccggctcggcccgggcagccgccttctgagcccccgacccgaggcgccgagccgccgccgcccgatgggctgggccgtggagcgtctccgcagtcgtagctccagccgccgcgctcccagccccggcagcctcagcatcagcggcggcggcggcggcggcggcgtcttccgcatcgttcgccgcagcgtaacccggagccctttgctctttgcagaatggcccgcttcggagacgagatgccggcccgctacgggggaggaggctccggggcagccgccggggtggtcgtgggcagcggaggcgggcgaggagccgggggcagccggcagggcgggcagcccggggcgcaaaggatgtacaagcagtcaatggcgcagagagcgcggaccatggcactctacaaccccatccccgtccgacagaactgcctcacggttaaccggtctctcttcctcttcagcgaagacaacgtggtgagaaaatacgccaaaaagatcaccgaatggcctccctttgaatatatgattttagccaccatcatagcgaattgcatcgtcctcgcactggagcagcatctgcctgatgatgacaagaccccgatgtctgaacggctggatgacacagaaccatacttcattggaattttttgtttcgaggctggaattaaaatcattgcccttgggtttgccttccacaaaggctcctacttgaggaatggctggaatgtcatggactttgtggtggtgctaacgggcatcttggcgacagttgggacggagtttgacctacggacgctgagggcagttcgagtgctgcggccgctcaagctggtgtctggaatcccaagtttacaagtcgtcctgaagtcgatcatgaaggcgatgatccctttgctgcagatcggcctcctcctattttttgcaatccttatttttgcaatcatagggttagaattttatatgggaaaatttcataccacctgctttgaagaggggacagatgacattcagggtgagtctccggctccatgtgggacagaagagcccgcccgcacctgccccaatgggaccaaatgtcagccctactgggaagggcccaacaacgggatcactcagttcgacaacatcctgtttgcagtgctgactgttttccagtgcataaccatggaagggtggactgatctcctctacaatagcaacgatgcctcagggaacacttggaactggttgtacttcatccccctcatcatcatcggctccttttttatgctgaaccttgtgctgggtgtgctgtcaggggagtttgccaaagaaagggaacgggtggagaaccggcgggcttttctgaagctgaggcggcaacaacagattgaacgtgagctcaatgggtacatggagtggatctcaaaagcagaagaggtgatcctcgccgaggatgaaactgacggggagcagaggcatccctttgatggagctctgcggagaaccaccataaagaaaagcaagacagatttgctcaaccccgaagaggctgaggatcagctggctgatatagcctctgtgggttctcccttcgcccgagccagcattaaaagtgccaagctggagaactcgaccttttttcacaaaaaggagaggaggatgcgtttctacatccgccgcatggtcaaaactcaggccttctactggactgtactcagtttggtagctctcaacacgctgtgtgttgctattgttcactacaaccagcccgagtggctctccgacttcctttactatgcagaattcattttcttaggactctttatgtccgaaatgtttataaaaatgtacgggcttgggacgcggccttacttccactcttccttcaactgctttgactgtggggttatcattgggagcatcttcgaggtcatctgggctgtcataaaacctggcacatcctttggaatcagcgtgttacgagccctcaggttattgcgtattttcaaagtcacaaagtactgggcatctctcagaaacctggtcgtctctctcctcaactccatgaagtccatcatcagcctgttgtttctccttttcctgttcattgtcgtcttcgcccttttgggaatgcaactcttcggcggccagtttaatttcgatgaagggactcctcccaccaacttcgatacttttccagcagcaataatgacggtgtttcagatcctgacgggcgaagactggaacgaggtcatgtacgacgggatcaagtctcaggggggcgtgcagggcggcatggtgttctccatctatttcattgtactgacgctctttgggaactacaccctcctgaatgtgttcttggccatcgctgtggacaatctggccaacgcccaggagctcaccaaggtggaggcggacgagcaagaggaagaagaagcagcgaaccagaaacttgccctacagaaagccaaggaggtggcagaagtgagtcctctgtccgcggccaacatgtctatagctgtgaaagagcaacagaagaatcaaaagccagccaagtccgtgtgggagcagcggaccagtgagatgcgaaagcagaacttgctggccagccgggaggccctgtataacgaaatggacccggacgagcgctggaaggctgcctacacgcggcacctgcggccagacatgaagacgcacttggaccggccgctggtggtggacccgcaggagaaccgcaacaacaacaccaacaagagccgggcggccgagcccaccgtggaccagcgcctcggccagcagcgcgccgaggacttcctcaggaaacaggcccgctaccacgatcgggcccgggaccccagcggctcggcgggcctggacgcacggaggccctgggcgggaagccaggaggccgagctgagccgggagggaccctacggccgcgagtcggaccaccacgcccgggagggcagcctggagcaacccgggttctgggagggcgaggccgagcgaggcaaggccggggacccccaccggaggcacgtgcaccggcaggggggcagcagggagagccgcagcgggtccccgcgcacgggcgcggacggggagcatcgacgtcatcgcgcgcaccgcaggcccggggaggagggtccggaggacaaggcggagcggagggcgcggcaccgcgagggcagccggccggcccggggcggcgagggcgagggcgagggccccgacgggggcgagcgcaggagaaggcaccggcatggcgctccagccacgtacgagggggacgcgcggagggaggacaaggagcggaggcatcggaggaggaaagagaaccagggctccggggtccctgtgtcgggccccaacctgtcaaccacccggccaatccagcaggacctgggccgccaagacccacccctggcagaggatattgacaacatgaagaacaacaagctggccaccgcggagtcggccgctccccacggcagccttggccacgccggcctgccccagagcccagccaagatgggaaacagcaccgaccccggccccatgctggccatccctgccatggccaccaacccccagaacgccgccagccgccggacgcccaacaacccggggaacccatccaatcccggcccccccaagacccccgagaatagccttatcgtcaccaaccccagcggcacccagaccaattcagctaagactgccaggaaacccgaccacaccacagtggacatccccccagcctgcccaccccccctcaaccacaccgtcgtacaagtgaacaaaaacgccaacccagacccactgccaaaaaaagaggaagagaagaaggaggaggaggaagacgaccgtggggaagacggccctaagccaatgcctccctatagctccatgttcatcctgtccacgaccaacccccttcgccgcctgtgccattacatcctgaacctgcgctactttgagatgtgcatcctcatggtcattgccatgagcagcatcgccctggccgccgaggaccctgtgcagcccaacgcacctcggaacaacgtgctgcgatactttgactacgtttttacaggcgtctttacctttgagatggtgatcaagatgattgacctggggctcgtcctgcatcagggtgcctacttccgtgacctctggaatattctcgacttcatagtggtcagtggggccctggtagcctttgccttcactggcaatagcaaaggaaaagacatcaacacgattaaatccctccgagtcctccgggtgctacgacctcttaaaaccatcaagcggctgccaaagctcaaggctgtgtttgactgtgtggtgaactcacttaaaaacgtcttcaacatcctcatcgtctacatgctattcatgttcatcttcgccgtggtggctgtgcagctcttcaaggggaaattcttccactgcactgacgagtccaaagagtttgagaaagattgtcgaggcaaatacctcctctacgagaagaatgaggtgaaggcgcgagaccgggagtggaagaagtatgaattccattacgacaatgtgctgtgggctctgctgaccctcttcaccgtgtccacgggagaaggctggccacaggtcctcaagcattcggtggacgccacctttgagaaccagggccccagccccgggtaccgcatggagatgtccattttctacgtcgtctactttgtggtgttccccttcttctttgtcaatatctttgtggccttgatcatcatcaccttccaggagcaaggggacaagatgatggaggaatacagcctggagaaaaatgagagggcctgcattgatttcgccatcagcgccaagccgctgacccgacacatgccgcagaacaagcagagcttccagtaccgcatgtggcagttcgtggtgtctccgcctttcgagtacacgatcatggccatgatcgccctcaacaccatcgtgcttatgatgaagttctatggggcttctgttgcttatgaaaatgccctgcgggtgttcaacatcgtcttcacctccctcttctctctggaatgtgtgctgaaagtcatggcttttgggattctgaattatttccgcgatgcctggaacatcttcgactttgtgactgttctgggcagcatcaccgatatcctcgtgactgagtttgggaatccgaataacttcatcaacctgagctttctccgcctcttccgagctgcccggctcatcaaacttctccgtcagggttacaccatccgcattcttctctggacctttgtgcagtccttcaaggccctgccttatgtctgtctgctgatcgccatgctcttcttcatctatgccatcattgggatgcaggtgtttggtaacattggcatcgacgtggaggacgaggacagtgatgaagatgagttccaaatcactgagcacaataacttccggaccttcttccaggccctcatgcttctcttccggagtgccaccggggaagcttggcacaacatcatgctttcctgcctcagcgggaaaccgtgtgataagaactctggcatcctgactcgagagtgtggcaatgaatttgcttatttttactttgtttccttcatcttcctctgctcgtttctgatgctgaatctctttgtcgccgtcatcatggacaactttgagtacctcacccgagactcctccatcctgggcccccaccacctggatgagtacgtgcgtgtctgggccgagtatgaccccgcagcttggggccgcatgccttacctggacatgtatcagatgctgagacacatgtctccgcccctgggtctggggaagaagtgtccggccagagtggcttacaagcggcttctgcggatggacctgcccgtcgcagatgacaacaccgtccacttcaattccaccctcatggctctgatccgcacagccctggacatcaagattgccaagggaggagccgacaaacagcagatggacgctgagctgcggaaggagatgatggcgatttggcccaatctgtcccagaagacgctagacctgctggtcacacctcacaagtccacggacctcaccgtggggaagatctacgcagccatgatgatcatggagtactaccggcagagcaaggccaagaagctgcaggccatgcgcgaggagcaggaccggacacccctcatgttccagcgcatggagcccccgtccccaacgcaggaagggggacctggccagaacgccctcccctccacccagctggacccaggaggagccctgatggctcacgaaagcggcctcaaggagagcccgtcctgggtgacccagcgtgcccaggagatgttccagaagacgggcacatggagtccggaacaaggcccccctaccgacatgcccaacagccagcctaactctcagtccgtggagatgcgagagatgggcagagatggctactccgacagcgagcactacctccccatggaaggccagggccgggctgcctccatgccccgcctccctgcagagaaccagaggagaaggggccggccacgtgggaataacctcagtaccatctcagacaccagccccatgaagcgttcagcctccgtgctgggccccaaggcccgacgcctggacgattactcgctggagcgggtcccgcccgaggagaaccagcggcaccaccagcggcgccgcgaccgcagccaccgcgcctctgagcgctccctgggccgctacaccgatgtggacacaggcttggggacagacctgagcatgaccacccaatccggggacctgccgtcgaaggagcgggaccaggagcggggccggcccaaggatcggaagcatcgacagcaccaccaccaccaccaccaccaccaccatcccccgccccccgacaaggaccgctatgcccaggaacggccggaccacggccgggcacgggctcgggaccagcgctggtcccgctcgcccagcgagggccgagagcacatggcgcaccggcagtagttccgtaagtggaagcccagccccctcaacatctggtaccagcactccgcggcggggccgccgccagctcccccagaccccctccaccccccggccacacgtgtcctattcccctgtgatccgtaaggccggcggctcggggcccccgcagcagcagcagcagcagcagcagcagcagcagcagcaggcggtggccaggccgggccgggcggccaccagcggccctcggaggtacccaggccccacggccgagcctctggccggagatcggccgcccacggggggccacagcagcggccgctcgcccaggatggagaggcgggtcccaggcccggcccggagcgagtcccccagggcctgtcgacacggcggggcccggtggccggcatctggcccgcacgtgtccgaggggcccccgggtccccggcaccatggctactaccggggctccgactacgacgaggccgatggcccgggcagcgggggcggcgaggaggccatggccggggcctacgacgcgccaccccccgtacgacacgcgtcctcgggcgccaccgggcgctcgcccaggactccccgggcctcgggcccggcctgcgcctcgccttctcggcacggccggcgactccccaacggctactacccggcgcacggactggccaggccccgcgggccgggctccaggaagggcctgcacgaaccctacagcgagagtgacgatgattggtgctaagcccgggcgaggtggcgcccgcccggccccccacgcacc

SEQ ID NO: 2645 - DNA, 7814 bp, Homo sapiens
  source 1..7814: mol_type = unassigned DNA; mol_type = unassigned DNA
gatgtcccgagctgctatccccggctcggcccgggcagccgccttctgagcccccgacccgaggcgccgagccgccgccgcccgatgggctgggccgtggagcgtctccgcagtcgtagctccagccgccgcgctcccagccccggcagcctcagcatcagcggcggcggcggcggcggcggcgtcttccgcatcgttcgccgcagcgtaacccggagccctttgctctttgcagaatggcccgcttcggagacgagatgccggcccgctacgggggaggaggctccggggcagccgccggggtggtcgtgggcagcggaggcgggcgaggagccgggggcagccggcagggcgggcagcccggggcgcaaaggatgtacaagcagtcaatggcgcagagagcgcggaccatggcactctacaaccccatccccgtccgacagaactgcctcacggttaaccggtctctcttcctcttcagcgaagacaacgtggtgagaaaatacgccaaaaagatcaccgaatggcctccctttgaatatatgattttagccaccatcatagcgaattgcatcgtcctcgcactggagcagcatctgcctgatgatgacaagaccccgatgtctgaacggctggatgacacagaaccatacttcattggaattttttgtttcgaggctggaattaaaatcattgcccttgggtttgccttccacaaaggctcctacttgaggaatggctggaatgtcatggactttgtggtggtgctaacgggcatcttggcgacagttgggacggagtttgacctacggacgctgagggcagttcgagtgctgcggccgctcaagctggtgtctggaatcccaagtttacaagtcgtcctgaagtcgatcatgaaggcgatgatccctttgctgcagatcggcctcctcctattttttgcaatccttatttttgcaatcatagggttagaattttatatgggaaaatttcataccacctgctttgaagaggggacagatgacattcagggtgagtctccggctccatgtgggacagaagagcccgcccgcacctgccccaatgggaccaaatgtcagccctactgggaagggcccaacaacgggatcactcagttcgacaacatcctgtttgcagtgctgactgttttccagtgcataaccatggaagggtggactgatctcctctacaatagcaacgatgcctcagggaacacttggaactggttgtacttcatccccctcatcatcatcggctccttttttatgctgaaccttgtgctgggtgtgctgtcaggggagtttgccaaagaaagggaacgggtggagaaccggcgggcttttctgaagctgaggcggcaacaacagattgaacgtgagctcaatgggtacatggagtggatctcaaaagcagaagaggtgatcctcgccgaggatgaaactgacggggagcagaggcatccctttgatggagctctgcggagaaccaccataaagaaaagcaagacagatttgctcaaccccgaagaggctgaggatcagctggctgatatagcctctgtgggttctcccttcgcccgagccagcattaaaagtgccaagctggagaactcgaccttttttcacaaaaaggagaggaggatgcgtttctacatccgccgcatggtcaaaactcaggccttctactggactgtactcagtttggtagctctcaacacgctgtgtgttgctattgttcactacaaccagcccgagtggctctccgacttcctttactatgcagaattcattttcttaggactctttatgtccgaaatgtttataaaaatgtacgggcttgggacgcggccttacttccactcttccttcaactgctttgactgtggggttatcattgggagcatcttcgaggtcatctgggctgtcataaaacctggcacatcctttggaatcagcgtgttacgagccctcaggttattgcgtattttcaaagtcacaaagtactgggcatctctcagaaacctggtcgtctctctcctcaactccatgaagtccatcatcagcctgttgtttctccttttcctgttcattgtcgtcttcgcccttttgggaatgcaactcttcggcggccagtttaatttcgatgaagggactcctcccaccaacttcgatacttttccagcagcaataatgacggtgtttcagatcctgacgggcgaagactggaacgaggtcatgtacgacgggatcaagtctcaggggggcgtgcagggcggcatggtgttctccatctatttcattgtactgacgctctttgggaactacaccctcctgaatgtgttcttggccatcgctgtggacaatctggccaacgcccaggagctcaccaaggtggaggcggacgagcaagaggaagaagaagcagcgaaccagaaacttgccctacagaaagccaaggaggtggcagaagtgagtcctctgtccgcggccaacatgtctatagctgtgaaagagcaacagaagaatcaaaagccagccaagtccgtgtgggagcagcggaccagtgagatgcgaaagcagaacttgctggccagccgggaggccctgtataacgaaatggacccggacgagcgctggaaggctgcctacacgcggcacctgcggccagacatgaagacgcacttggaccggccgctggtggtggacccgcaggagaaccgcaacaacaacaccaacaagagccgggcggccgagcccaccgtggaccagcgcctcggccagcagcgcgccgaggacttcctcaggaaacaggcccgctaccacgatcgggcccgggaccccagcggctcggcgggcctggacgcacggaggccctgggcgggaagccaggaggccgagctgagccgggagggaccctacggccgcgagtcggaccaccacgcccgggagggcagcctggagcaacccgggttctgggagggcgaggccgagcgaggcaaggccggggacccccaccggaggcacgtgcaccggcaggggggcagcagggagagccgcagcgggtccccgcgcacgggcgcggacggggagcatcgacgtcatcgcgcgcaccgcaggcccggggaggagggtccggaggacaaggcggagcggagggcgcggcaccgcgagggcagccggccggcccggggcggcgagggcgagggcgagggccccgacgggggcgagcgcaggagaaggcaccggcatggcgctccagccacgtacgagggggacgcgcggagggaggacaaggagcggaggcatcggaggaggaaagagaaccagggctccggggtccctgtgtcgggccccaacctgtcaaccacccggccaatccagcaggacctgggccgccaagacccacccctggcagaggatattgacaacatgaagaacaacaagctggccaccgcggagtcggccgctccccacggcagccttggccacgccggcctgccccagagcccagccaagatgggaaacagcaccgaccccggccccatgctggccatccctgccatggccaccaacccccagaacgccgccagccgccggacgcccaacaacccggggaacccatccaatcccggcccccccaagacccccgagaatagccttatcgtcaccaaccccagcggcacccagaccaattcagctaagactgccaggaaacccgaccacaccacagtggacatccccccagcctgcccaccccccctcaaccacaccgtcgtacaagtgaacaaaaacgccaacccagacccactgccaaaaaaagaggaagagaagaaggaggaggaggaagacgaccgtggggaagacggccctaagccaatgcctccctatagctccatgttcatcctgtccacgaccaacccccttcgccgcctgtgccattacatcctgaacctgcgctactttgagatgtgcatcctcatggtcattgccatgagcagcatcgccctggccgccgaggaccctgtgcagcccaacgcacctcggaacaacgtgctgcgatactttgactacgtttttacaggcgtctttacctttgagatggtgatcaagatgattgacctggggctcgtcctgcatcagggtgcctacttccgtgacctctggaatattctcgacttcatagtggtcagtggggccctggtagcctttgccttcactggcaatagcaaaggaaaagacatcaacacgattaaatccctccgagtcctccgggtgctacgacctcttaaaaccatcaagcggctgccaaagctcaaggctgtgtttgactgtgtggtgaactcacttaaaaacgtcttcaacatcctcatcgtctacatgctattcatgttcatcttcgccgtggtggctgtgcagctcttcaaggggaaattcttccactgcactgacgagtccaaagagtttgagaaagattgtcgaggcaaatacctcctctacgagaagaatgaggtgaaggcgcgagaccgggagtggaagaagtatgaattccattacgacaatgtgctgtgggctctgctgaccctcttcaccgtgtccacgggagaaggctggccacaggtcctcaagcattcggtggacgccacctttgagaaccagggccccagccccgggtaccgcatggagatgtccattttctacgtcgtctactttgtggtgttccccttcttctttgtcaatatctttgtggccttgatcatcatcaccttccaggagcaaggggacaagatgatggaggaatacagcctggagaaaaatgagagggcctgcattgatttcgccatcagcgccaagccgctgacccgacacatgccgcagaacaagcagagcttccagtaccgcatgtggcagttcgtggtgtctccgcctttcgagtacacgatcatggccatgatcgccctcaacaccatcgtgcttatgatgaagttctatggggcttctgttgcttatgaaaatgccctgcgggtgttcaacatcgtcttcacctccctcttctctctggaatgtgtgctgaaagtcatggcttttgggattctgaattatttccgcgatgcctggaacatcttcgactttgtgactgttctgggcagcatcaccgatatcctcgtgactgagtttgggaatccgaataacttcatcaacctgagctttctccgcctcttccgagctgcccggctcatcaaacttctccgtcagggttacaccatccgcattcttctctggacctttgtgcagtccttcaaggccctgccttatgtctgtctgctgatcgccatgctcttcttcatctatgccatcattgggatgcaggtgtttggtaacattggcatcgacgtggaggacgaggacagtgatgaagatgagttccaaatcactgagcacaataacttccggaccttcttccaggccctcatgcttctcttccggagtgccaccggggaagcttggcacaacatcatgctttcctgcctcagcgggaaaccgtgtgataagaactctggcatcctgactcgagagtgtggcaatgaatttgcttatttttactttgtttccttcatcttcctctgctcgtttctgatgctgaatctctttgtcgccgtcatcatggacaactttgagtacctcacccgagactcctccatcctgggcccccaccacctggatgagtacgtgcgtgtctgggccgagtatgaccccgcagcttggggccgcatgccttacctggacatgtatcagatgctgagacacatgtctccgcccctgggtctggggaagaagtgtccggccagagtggcttacaagcggcttctgcggatggacctgcccgtcgcagatgacaacaccgtccacttcaattccaccctcatggctctgatccgcacagccctggacatcaagattgccaagggaggagccgacaaacagcagatggacgctgagctgcggaaggagatgatggcgatttggcccaatctgtcccagaagacgctagacctgctggtcacacctcacaagtccacggacctcaccgtggggaagatctacgcagccatgatgatcatggagtactaccggcagagcaaggccaagaagctgcaggccatgcgcgaggagcaggaccggacacccctcatgttccagcgcatggagcccccgtccccaacgcaggaagggggacctggccagaacgccctcccctccacccagctggacccaggaggagccctgatggctcacgaaagcggcctcaaggagagcccgtcctgggtgacccagcgtgcccaggagatgttccagaagacgggcacatggagtccggaacaaggcccccctaccgacatgcccaacagccagcctaactctcagtccgtggagatgcgagagatgggcagagatggctactccgacagcgagcactacctccccatggaaggccagggccgggctgcctccatgccccgcctccctgcagagaaccagaggagaaggggccggccacgtgggaataacctcagtaccatctcagacaccagccccatgaagcgttcagcctccgtgctgggccccaaggcccgacgcctggacgattactcgctggagcgggtcccgcccgaggagaaccagcggcaccaccagcggcgccgcgaccgcagccaccgcgcctctgagcgctccctgggccgctacaccgatgtggacacaggcttggggacagacctgagcatgaccacccaatccggggacctgccgtcgaaggagcgggaccaggagcggggccggcccaaggatcggaagcatcgacagcaccaccaccaccaccaccaccaccaccatcccccgccccccgacaaggaccgctatgcccaggaacggccggaccacggccgggcacgggctcgggaccagcgctggtcccgctcgcccagcgagggccgagagcacatggcgcaccggcagggcagtagttccgtaagtggaagcccagccccctcaacatctggtaccagcactccgcggcggggccgccgccagctcccccagaccccctccaccccccggccacacgtgtcctattcccctgtgatccgtaaggccggcggctcggggcccccgcagcagcagcagcagcagcagcagcagcagcagcagcaggcggtggccaggccgggccgggcggccaccagcggccctcggaggtacccaggccccacggccgagcctctggccggagatcggccgcccacggggggccacagcagcggccgctcgcccaggatggagaggcgggtcccaggcccggcccggagcgagtcccccagggcctgtcgacacggcggggcccggtggccggcatctggcccgcacgtgtccgaggggcccccgggtccccggcaccatggctactaccggggctccgactacgacgaggccgatggcccgggcagcgggggcggcgaggaggccatggccggggcctacgacgcgccaccccccgtacgacacgcgtcctcgggcgccaccgggcgctcgcccaggactccccgggcctcgggcccggcctgcgcctcgccttctcggcacggccggcgactccccaacggctactacccggcgcacggactggccaggccccgcgggccgggctccaggaagggcctgcacgaaccctacagcgagagtgacgatgattggtgctaagcccgggcgaggtggcgcccgcccggccccccacgcacc

SEQ ID NO: 2646 - DNA, 7500 bp, Homo sapiens
  source 1..7500: mol_type = unassigned DNA; mol_type = unassigned DNA
atggcccgcttcggagacgagatgccggcccgctacgggggaggaggctccggggcagccgccggggtggtcgtgggcagcggaggcgggcgaggagccgggggcagccggcagggcgggcagcccggggcgcaaaggatgtacaagcagtcaatggcgcagagagcgcggaccatggcactctacaaccccatccccgtccgacagaactgcctcacggttaaccggtctctcttcctcttcagcgaagacaacgtggtgagaaaatacgccaaaaagatcaccgaatggcctccctttgaatatatgattttagccaccatcatagcgaattgcatcgtcctcgcactggagcagcatctgcctgatgatgacaagaccccgatgtctgaacggctggatgacacagaaccatacttcattggaattttttgtttcgaggctggaattaaaatcattgcccttgggtttgccttccacaaaggctcctacttgaggaatggctggaatgtcatggactttgtggtggtgctaacgggcatcttggcgacagttgggacggagtttgacctacggacgctgagggcagttcgagtgctgcggccgctcaagctggtgtctggaatcccaagtttacaagtcgtcctgaagtcgatcatgaaggcgatgatccctttgctgcagatcggcctcctcctattttttgcaatccttatttttgcaatcatagggttagaattttatatgggaaaatttcataccacctgctttgaagaggggacagatgacattcagggtgagtctccggctccatgtgggacagaagagcccgcccgcacctgccccaatgggaccaaatgtcagccctactgggaagggcccaacaacgggatcactcagttcgacaacatcctgtttgcagtgctgactgttttccagtgcataaccatggaagggtggactgatctcctctacaatagcaacgatgcctcagggaacacttggaactggttgtacttcatccccctcatcatcatcggctccttttttatgctgaaccttgtgctgggtgtgctgtcaggggagtttgccaaagaaagggaacgggtggagaaccggcgggcttttctgaagctgaggcggcaacaacagattgaacgtgagctcaatgggtacatggagtggatctcaaaagcagaagaggtgatcctcgccgaggatgaaactgacggggagcagaggcatccctttgatggagctctgcggagaaccaccataaagaaaagcaagacagatttgctcaaccccgaagaggctgaggatcagctggctgatatagcctctgtgggttctcccttcgcccgagccagcattaaaagtgccaagctggagaactcgaccttttttcacaaaaaggagaggaggatgcgtttctacatccgccgcatggtcaaaactcaggccttctactggactgtactcagtttggtagctctcaacacgctgtgtgttgctattgttcactacaaccagcccgagtggctctccgacttcctttactatgcagaattcattttcttaggactctttatgtccgaaatgtttataaaaatgtacgggcttgggacgcggccttacttccactcttccttcaactgctttgactgtggggttatcattgggagcatcttcgaggtcatctgggctgtcataaaacctggcacatcctttggaatcagcgtgttacgagccctcaggttattgcgtattttcaaagtcacaaagtactgggcatctctcagaaacctggtcgtctctctcctcaactccatgaagtccatcatcagcctgttgtttctccttttcctgttcattgtcgtcttcgcccttttgggaatgcaactcttcggcggccagtttaatttcgatgaagggactcctcccaccaacttcgatacttttccagcagcaataatgacggtgtttcagatcctgacgggcgaagactggaacgaggtcatgtacgacgggatcaagtctcaggggggcgtgcagggcggcatggtgttctccatctatttcattgtactgacgctctttgggaactacaccctcctgaatgtgttcttggccatcgctgtggacaatctggccaacgcccaggagctcaccaaggacgagcaagaggaagaagaagcagcgaaccagaaacttgccctacagaaagccaaggaggtggcagaagtgagtcctctgtccgcggccaacatgtctatagctgtgaaagagcaacagaagaatcaaaagccagccaagtccgtgtgggagcagcggaccagtgagatgcgaaagcagaacttgctggccagccgggaggccctgtataacgaaatggacccggacgagcgctggaaggctgcctacacgcggcacctgcggccagacatgaagacgcacttggaccggccgctggtggtggacccgcaggagaaccgcaacaacaacaccaacaagagccgggcggccgagcccaccgtggaccagcgcctcggccagcagcgcgccgaggacttcctcaggaaacaggcccgctaccacgatcgggcccgggaccccagcggctcggcgggcctggacgcacggaggccctgggcgggaagccaggaggccgagctgagccgggagggaccctacggccgcgagtcggaccaccacgcccgggagggcagcctggagcaacccgggttctgggagggcgaggccgagcgaggcaaggccggggacccccaccggaggcacgtgcaccggcaggggggcagcagggagagccgcagcgggtccccgcgcacgggcgcggacggggagcatcgacgtcatcgcgcgcaccgcaggcccggggaggagggtccggaggacaaggcggagcggagggcgcggcaccgcgagggcagccggccggcccggggcggcgagggcgagggcgagggccccgacgggggcgagcgcaggagaaggcaccggcatggcgctccagccacgtacgagggggacgcgcggagggaggacaaggagcggaggcatcggaggaggaaagagaaccagggctccggggtccctgtgtcgggccccaacctgtcaaccacccggccaatccagcaggacctgggccgccaagacccacccctggcagaggatattgacaacatgaagaacaacaagctggccaccgcggagtcggccgctccccacggcagccttggccacgccggcctgccccagagcccagccaagatgggaaacagcaccgaccccggccccatgctggccatccctgccatggccaccaacccccagaacgccgccagccgccggacgcccaacaacccggggaacccatccaatcccggcccccccaagacccccgagaatagccttatcgtcaccaaccccagcggcacccagaccaattcagctaagactgccaggaaacccgaccacaccacagtggacatccccccagcctgcccaccccccctcaaccacaccgtcgtacaagtgaacaaaaacgccaacccagacccactgccaaaaaaagaggaagagaagaaggaggaggaggaagacgaccgtggggaagacggccctaagccaatgcctccctatagctccatgttcatcctgtccacgaccaacccccttcgccgcctgtgccattacatcctgaacctgcgctactttgagatgtgcatcctcatggtcattgccatgagcagcatcgccctggccgccgaggaccctgtgcagcccaacgcacctcggaacaacgtgctgcgatactttgactacgtttttacaggcgtctttacctttgagatggtgatcaagatgattgacctggggctcgtcctgcatcagggtgcctacttccgtgacctctggaatattctcgacttcatagtggtcagtggggccctggtagcctttgccttcactggcaatagcaaaggaaaagacatcaacacgattaaatccctccgagtcctccgggtgctacgacctcttaaaaccatcaagcggctgccaaagctcaaggctgtgtttgactgtgtggtgaactcacttaaaaacgtcttcaacatcctcatcgtctacatgctattcatgttcatcttcgccgtggtggctgtgcagctcttcaaggggaaattcttccactgcactgacgagtccaaagagtttgagaaagattgtcgaggcaaatacctcctctacgagaagaatgaggtgaaggcgcgagaccgggagtggaagaagtatgaattccattacgacaatgtgctgtgggctctgctgaccctcttcaccgtgtccacgggagaaggctggccacaggtcctcaagcattcggtggacgccacctttgagaaccagggccccagccccgggtaccgcatggagatgtccattttctacgtcgtctactttgtggtgttccccttcttctttgtcaatatctttgtggccttgatcatcatcaccttccaggagcaaggggacaagatgatggaggaatacagcctggagaaaaatgagagggcctgcattgatttcgccatcagcgccaagccgctgacccgacacatgccgcagaacaagcagagcttccagtaccgcatgtggcagttcgtggtgtctccgcctttcgagtacacgatcatggccatgatcgccctcaacaccatcgtgcttatgatgaagttctatggggcttctgttgcttatgaaaatgccctgcgggtgttcaacatcgtcttcacctccctcttctctctggaatgtgtgctgaaagtcatggcttttgggattctgaattatttccgcgatgcctggaacatcttcgactttgtgactgttctgggcagcatcaccgatatcctcgtgactgagtttgggaataacttcatcaacctgagctttctccgcctcttccgagctgcccggctcatcaaacttctccgtcagggttacaccatccgcattcttctctggacctttgtgcagtccttcaaggccctgccttatgtctgtctgctgatcgccatgctcttcttcatctatgccatcattgggatgcaggtgtttggtaacattggcatcgacgtggaggacgaggacagtgatgaagatgagttccaaatcactgagcacaataacttccggaccttcttccaggccctcatgcttctcttccggagtgccaccggggaagcttggcacaacatcatgctttcctgcctcagcgggaaaccgtgtgataagaactctggcatcctgactcgagagtgtggcaatgaatttgcttatttttactttgtttccttcatcttcctctgctcgtttctgatgctgaatctctttgtcgccgtcatcatggacaactttgagtacctcacccgagactcctccatcctgggcccccaccacctggatgagtacgtgcgtgtctgggccgagtatgaccccgcagcttggggccgcatgccttacctggacatgtatcagatgctgagacacatgtctccgcccctgggtctggggaagaagtgtccggccagagtggcttacaagcggcttctgcggatggacctgcccgtcgcagatgacaacaccgtccacttcaattccaccctcatggctctgatccgcacagccctggacatcaagattgccaagggaggagccgacaaacagcagatggacgctgagctgcggaaggagatgatggcgatttggcccaatctgtcccagaagacgctagacctgctggtcacacctcacaagtccacggacctcaccgtggggaagatctacgcagccatgatgatcatggagtactaccggcagagcaaggccaagaagctgcaggccatgcgcgaggagcaggaccggacacccctcatgttccagcgcatggagcccccgtccccaacgcaggaagggggacctggccagaacgccctcccctccacccagctggacccaggaggagccctgatggctcacgaaagcggcctcaaggagagcccgtcctgggtgacccagcgtgcccaggagatgttccagaagacgggcacatggagtccggaacaaggcccccctaccgacatgcccaacagccagcctaactctcagtccgtggagatgcgagagatgggcagagatggctactccgacagcgagcactacctccccatggaaggccagggccgggctgcctccatgccccgcctccctgcagagaaccagaccatctcagacaccagccccatgaagcgttcagcctccgtgctgggccccaaggcccgacgcctggacgattactcgctggagcgggtcccgcccgaggagaaccagcggcaccaccagcggcgccgcgaccgcagccaccgcgcctctgagcgctccctgggccgctacaccgatgtggacacaggcttggggacagacctgagcatgaccacccaatccggggacctgccgtcgaaggagcgggaccaggagcggggccggcccaaggatcggaagcatcgacagcaccaccaccaccaccaccaccaccaccatcccccgccccccgacaaggaccgctatgcccaggaacggccggaccacggccgggcacgggctcgggaccagcgctggtcccgctcgcccagcgagggccgagagcacatggcgcaccggcagggcagtagttccgtaagtggaagcccagccccctcaacatctggtaccagcactccgcggcggggccgccgccagctcccccagaccccctccaccccccggccacacgtgtcctattcccctgtgatccgtaaggccggcggctcggggcccccgcagcagcagcagcagcagcagcagcagcagcagcagcaggcggtggccaggccgggccgggcggccaccagcggccctcggaggtacccaggccccacggccgagcctctggccggagatcggccgcccacggggggccacagcagcggccgctcgcccaggatggagaggcgggtcccaggcccggcccggagcgagtcccccagggcctgtcgacacggcggggcccggtggccggcatctggcccgcacgtgtccgaggggcccccgggtccccggcaccatggctactaccggggctccgactacgacgaggccgatggcccgggcagcgggggcggcgaggaggccatggccggggcctacgacgcgccaccccccgtacgacacgcgtcctcgggcgccaccgggcgctcgcccaggactccccgggcctcgggcccggcctgcgcctcgccttctcggcacggccggcgactccccaacggctactacccggcgcacggactggccaggccccgcgggccgggctccaggaagggcctgcacgaaccctacagcgagagtgacgatgattggtgctaagcccgggcgagg

SEQ ID NO: 2647 - DNA, 7536 bp, Homo sapiens
  source 1..7536: mol_type = unassigned DNA; mol_type = unassigned DNA
atggcccgcttcggagacgagatgccggcccgctacgggggaggaggctccggggcagccgccggggtggtcgtgggcagcggaggcgggcgaggagccgggggcagccggcagggcgggcagcccggggcgcaaaggatgtacaagcagtcaatggcgcagagagcgcggaccatggcactctacaaccccatccccgtccgacagaactgcctcacggttaaccggtctctcttcctcttcagcgaagacaacgtggtgagaaaatacgccaaaaagatcaccgaatggcctccctttgaatatatgattttagccaccatcatagcgaattgcatcgtcctcgcactggagcagcatctgcctgatgatgacaagaccccgatgtctgaacggctggatgacacagaaccatacttcattggaattttttgtttcgaggctggaattaaaatcattgcccttgggtttgccttccacaaaggctcctacttgaggaatggctggaatgtcatggactttgtggtggtgctaacgggcatcttggcgacagttgggacggagtttgacctacggacgctgagggcagttcgagtgctgcggccgctcaagctggtgtctggaatcccaagtttacaagtcgtcctgaagtcgatcatgaaggcgatgatccctttgctgcagatcggcctcctcctattttttgcaatccttatttttgcaatcatagggttagaattttatatgggaaaatttcataccacctgctttgaagaggggacagatgacattcagggtgagtctccggctccatgtgggacagaagagcccgcccgcacctgccccaatgggaccaaatgtcagccctactgggaagggcccaacaacgggatcactcagttcgacaacatcctgtttgcagtgctgactgttttccagtgcataaccatggaagggtggactgatctcctctacaatagcaacgatgcctcagggaacacttggaactggttgtacttcatccccctcatcatcatcggctccttttttatgctgaaccttgtgctgggtgtgctgtcaggggagtttgccaaagaaagggaacgggtggagaaccggcgggcttttctgaagctgaggcggcaacaacagattgaacgtgagctcaatgggtacatggagtggatctcaaaagcagaagaggtgatcctcgccgaggatgaaactgacggggagcagaggcatccctttgatggagctctgcggagaaccaccataaagaaaagcaagacagatttgctcaaccccgaagaggctgaggatcagctggctgatatagcctctgtgggttctcccttcgcccgagccagcattaaaagtgccaagctggagaactcgaccttttttcacaaaaaggagaggaggatgcgtttctacatccgccgcatggtcaaaactcaggccttctactggactgtactcagtttggtagctctcaacacgctgtgtgttgctattgttcactacaaccagcccgagtggctctccgacttcctttactatgcagaattcattttcttaggactctttatgtccgaaatgtttataaaaatgtacgggcttgggacgcggccttacttccactcttccttcaactgctttgactgtggggttatcattgggagcatcttcgaggtcatctgggctgtcataaaacctggcacatcctttggaatcagcgtgttacgagccctcaggttattgcgtattttcaaagtcacaaagtactgggcatctctcagaaacctggtcgtctctctcctcaactccatgaagtccatcatcagcctgttgtttctccttttcctgttcattgtcgtcttcgcccttttgggaatgcaactcttcggcggccagtttaatttcgatgaagggactcctcccaccaacttcgatacttttccagcagcaataatgacggtgtttcagatcctgacgggcgaagactggaacgaggtcatgtacgacgggatcaagtctcaggggggcgtgcagggcggcatggtgttctccatctatttcattgtactgacgctctttgggaactacaccctcctgaatgtgttcttggccatcgctgtggacaatctggccaacgcccaggagctcaccaaggacgagcaagaggaagaagaagcagcgaaccagaaacttgccctacagaaagccaaggaggtggcagaagtgagtcctctgtccgcggccaacatgtctatagctgtgaaagagcaacagaagaatcaaaagccagccaagtccgtgtgggagcagcggaccagtgagatgcgaaagcagaacttgctggccagccgggaggccctgtataacgaaatggacccggacgagcgctggaaggctgcctacacgcggcacctgcggccagacatgaagacgcacttggaccggccgctggtggtggacccgcaggagaaccgcaacaacaacaccaacaagagccgggcggccgagcccaccgtggaccagcgcctcggccagcagcgcgccgaggacttcctcaggaaacaggcccgctaccacgatcgggcccgggaccccagcggctcggcgggcctggacgcacggaggccctgggcgggaagccaggaggccgagctgagccgggagggaccctacggccgcgagtcggaccaccacgcccgggagggcagcctggagcaacccgggttctgggagggcgaggccgagcgaggcaaggccggggacccccaccggaggcacgtgcaccggcaggggggcagcagggagagccgcagcgggtccccgcgcacgggcgcggacggggagcatcgacgtcatcgcgcgcaccgcaggcccggggaggagggtccggaggacaaggcggagcggagggcgcggcaccgcgagggcagccggccggcccggggcggcgagggcgagggcgagggccccgacgggggcgagcgcaggagaaggcaccggcatggcgctccagccacgtacgagggggacgcgcggagggaggacaaggagcggaggcatcggaggaggaaagagaaccagggctccggggtccctgtgtcgggccccaacctgtcaaccacccggccaatccagcaggacctgggccgccaagacccacccctggcagaggatattgacaacatgaagaacaacaagctggccaccgcggagtcggccgctccccacggcagccttggccacgccggcctgccccagagcccagccaagatgggaaacagcaccgaccccggccccatgctggccatccctgccatggccaccaacccccagaacgccgccagccgccggacgcccaacaacccggggaacccatccaatcccggcccccccaagacccccgagaatagccttatcgtcaccaaccccagcggcacccagaccaattcagctaagactgccaggaaacccgaccacaccacagtggacatccccccagcctgcccaccccccctcaaccacaccgtcgtacaagtgaacaaaaacgccaacccagacccactgccaaaaaaagaggaagagaagaaggaggaggaggaagacgaccgtggggaagacggccctaagccaatgcctccctatagctccatgttcatcctgtccacgaccaacccccttcgccgcctgtgccattacatcctgaacctgcgctactttgagatgtgcatcctcatggtcattgccatgagcagcatcgccctggccgccgaggaccctgtgcagcccaacgcacctcggaacaacgtgctgcgatactttgactacgtttttacaggcgtctttacctttgagatggtgatcaagatgattgacctggggctcgtcctgcatcagggtgcctacttccgtgacctctggaatattctcgacttcatagtggtcagtggggccctggtagcctttgccttcactggcaatagcaaaggaaaagacatcaacacgattaaatccctccgagtcctccgggtgctacgacctcttaaaaccatcaagcggctgccaaagctcaaggctgtgtttgactgtgtggtgaactcacttaaaaacgtcttcaacatcctcatcgtctacatgctattcatgttcatcttcgccgtggtggctgtgcagctcttcaaggggaaattcttccactgcactgacgagtccaaagagtttgagaaagattgtcgaggcaaatacctcctctacgagaagaatgaggtgaaggcgcgagaccgggagtggaagaagtatgaattccattacgacaatgtgctgtgggctctgctgaccctcttcaccgtgtccacgggagaaggctggccacaggtcctcaagcattcggtggacgccacctttgagaaccagggccccagccccgggtaccgcatggagatgtccattttctacgtcgtctactttgtggtgttccccttcttctttgtcaatatctttgtggccttgatcatcatcaccttccaggagcaaggggacaagatgatggaggaatacagcctggagaaaaatgagagggcctgcattgatttcgccatcagcgccaagccgctgacccgacacatgccgcagaacaagcagagcttccagtaccgcatgtggcagttcgtggtgtctccgcctttcgagtacacgatcatggccatgatcgccctcaacaccatcgtgcttatgatgaagttctatggggcttctgttgcttatgaaaatgccctgcgggtgttcaacatcgtcttcacctccctcttctctctggaatgtgtgctgaaagtcatggcttttgggattctgaattatttccgcgatgcctggaacatcttcgactttgtgactgttctgggcagcatcaccgatatcctcgtgactgagtttgggaataacttcatcaacctgagctttctccgcctcttccgagctgcccggctcatcaaacttctccgtcagggttacaccatccgcattcttctctggacctttgtgcagtccttcaaggccctgccttatgtctgtctgctgatcgccatgctcttcttcatctatgccatcattgggatgcaggtgtttggtaacattggcatcgacgtggaggacgaggacagtgatgaagatgagttccaaatcactgagcacaataacttccggaccttcttccaggccctcatgcttctcttccggagtgccaccggggaagcttggcacaacatcatgctttcctgcctcagcgggaaaccgtgtgataagaactctggcatcctgactcgagagtgtggcaatgaatttgcttatttttactttgtttccttcatcttcctctgctcgtttctgatgctgaatctctttgtcgccgtcatcatggacaactttgagtacctcacccgagactcctccatcctgggcccccaccacctggatgagtacgtgcgtgtctgggccgagtatgaccccgcagcttggggccgcatgccttacctggacatgtatcagatgctgagacacatgtctccgcccctgggtctggggaagaagtgtccggccagagtggcttacaagcggcttctgcggatggacctgcccgtcgcagatgacaacaccgtccacttcaattccaccctcatggctctgatccgcacagccctggacatcaagattgccaagggaggagccgacaaacagcagatggacgctgagctgcggaaggagatgatggcgatttggcccaatctgtcccagaagacgctagacctgctggtcacacctcacaagtccacggacctcaccgtggggaagatctacgcagccatgatgatcatggagtactaccggcagagcaaggccaagaagctgcaggccatgcgcgaggagcaggaccggacacccctcatgttccagcgcatggagcccccgtccccaacgcaggaagggggacctggccagaacgccctcccctccacccagctggacccaggaggagccctgatggctcacgaaagcggcctcaaggagagcccgtcctgggtgacccagcgtgcccaggagatgttccagaagacgggcacatggagtccggaacaaggcccccctaccgacatgcccaacagccagcctaactctcagtccgtggagatgcgagagatgggcagagatggctactccgacagcgagcactacctccccatggaaggccagggccgggctgcctccatgccccgcctccctgcagagaaccagaggagaaggggccggccacgtgggaataacctcagtaccatctcagacaccagccccatgaagcgttcagcctccgtgctgggccccaaggcccgacgcctggacgattactcgctggagcgggtcccgcccgaggagaaccagcggcaccaccagcggcgccgcgaccgcagccaccgcgcctctgagcgctccctgggccgctacaccgatgtggacacaggcttggggacagacctgagcatgaccacccaatccggggacctgccgtcgaaggagcgggaccaggagcggggccggcccaaggatcggaagcatcgacagcaccaccaccaccaccaccaccaccaccatcccccgccccccgacaaggaccgctatgcccaggaacggccggaccacggccgggcacgggctcgggaccagcgctggtcccgctcgcccagcgagggccgagagcacatggcgcaccggcagggcagtagttccgtaagtggaagcccagccccctcaacatctggtaccagcactccgcggcggggccgccgccagctcccccagaccccctccaccccccggccacacgtgtcctattcccctgtgatccgtaaggccggcggctcggggcccccgcagcagcagcagcagcagcagcagcagcagcagcagcaggcggtggccaggccgggccgggcggccaccagcggccctcggaggtacccaggccccacggccgagcctctggccggagatcggccgcccacggggggccacagcagcggccgctcgcccaggatggagaggcgggtcccaggcccggcccggagcgagtcccccagggcctgtcgacacggcggggcccggtggccggcatctggcccgcacgtgtccgaggggcccccgggtccccggcaccatggctactaccggggctccgactacgacgaggccgatggcccgggcagcgggggcggcgaggaggccatggccggggcctacgacgcgccaccccccgtacgacacgcgtcctcgggcgccaccgggcgctcgcccaggactccccgggcctcgggcccggcctgcgcctcgccttctcggcacggccggcgactccccaacggctactacccggcgcacggactggccaggccccgcgggccgggctccaggaagggcctgcacgaaccctacagcgagagtgacgatgattggtgctaagcccgggcgagg

SEQ ID NO: 2648 - DNA, 7569 bp, Homo sapiens
  source 1..7569: mol_type = unassigned DNA; mol_type = unassigned DNA
gcgtaacccggagccctttgctctttgcagaatggcccgcttcggagacgagatgccggcccgctacgggggaggaggctccggggcagccgccggggtggtcgtgggcagcggaggcgggcgaggagccgggggcagccggcagggcgggcagcccggggcgcaaaggatgtacaagcagtcaatggcgcagagagcgcggaccatggcactctacaaccccatccccgtccgacagaactgcctcacggttaaccggtctctcttcctcttcagcgaagacaacgtggtgagaaaatacgccaaaaagatcaccgaatggcctccctttgaatatatgattttagccaccatcatagcgaattgcatcgtcctcgcactggagcagcatctgcctgatgatgacaagaccccgatgtctgaacggctggatgacacagaaccatacttcattggaattttttgtttcgaggctggaattaaaatcattgcccttgggtttgccttccacaaaggctcctacttgaggaatggctggaatgtcatggactttgtggtggtgctaacgggcatcttggcgacagttgggacggagtttgacctacggacgctgagggcagttcgagtgctgcggccgctcaagctggtgtctggaatcccaagtttacaagtcgtcctgaagtcgatcatgaaggcgatgatccctttgctgcagatcggcctcctcctattttttgcaatccttatttttgcaatcatagggttagaattttatatgggaaaatttcataccacctgctttgaagaggggacagatgacattcagggtgagtctccggctccatgtgggacagaagagcccgcccgcacctgccccaatgggaccaaatgtcagccctactgggaagggcccaacaacgggatcactcagttcgacaacatcctgtttgcagtgctgactgttttccagtgcataaccatggaagggtggactgatctcctctacaatagcaacgatgcctcagggaacacttggaactggttgtacttcatccccctcatcatcatcggctccttttttatgctgaaccttgtgctgggtgtgctgtcaggggagtttgccaaagaaagggaacgggtggagaaccggcgggcttttctgaagctgaggcggcaacaacagattgaacgtgagctcaatgggtacatggagtggatctcaaaagcagaagaggtgatcctcgccgaggatgaaactgacggggagcagaggcatccctttgatgttggagctctgcggagaaccaccataaagaaaagcaagacagatttgctcaaccccgaagaggctgaggatcagctggctgatatagcctctgtgggttctcccttcgcccgagccagcattaaaagtgccaagctggagaactcgaccttttttcacaaaaaggagaggaggatgcgtttctacatccgccgcatggtcaaaactcaggccttctactggactgtactcagtttggtagctctcaacacgctgtgtgttgctattgttcactacaaccagcccgagtggctctccgacttcctttactatgcagaattcattttcttaggactctttatgtccgaaatgtttataaaaatgtacgggcttgggacgcggccttacttccactcttccttcaactgctttgactgtggggttatcattgggagcatcttcgaggtcatctgggctgtcataaaacctggcacatcctttggaatcagcgtgttacgagccctcaggttattgcgtattttcaaagtcacaaagtactgggcatctctcagaaacctggtcgtctctctcctcaactccatgaagtccatcatcagcctgttgtttctccttttcctgttcattgtcgtcttcgcccttttgggaatgcaactcttcggcggccagtttaatttcgatgaagggactcctcccaccaacttcgatacttttccagcagcaataatgacggtgtttcagatcctgacgggcgaagactggaacgaggtcatgtacgacgggatcaagtctcaggggggcgtgcagggcggcatggtgttctccatctatttcattgtactgacgctctttgggaactacaccctcctgaatgtgttcttggccatcgctgtggacaatctggccaacgcccaggagctcaccaaggacgagcaagaggaagaagaagcagcgaaccagaaacttgccctacagaaagccaaggaggtggcagaagtgagtcctctgtccgcggccaacatgtctatagctgtgaaagagcaacagaagaatcaaaagccagccaagtccgtgtgggagcagcggaccagtgagatgcgaaagcagaacttgctggccagccgggaggccctgtataacgaaatggacccggacgagcgctggaaggctgcctacacgcggcacctgcggccagacatgaagacgcacttggaccggccgctggtggtggacccgcaggagaaccgcaacaacaacaccaacaagagccgggcggccgagcccaccgtggaccagcgcctcggccagcagcgcgccgaggacttcctcaggaaacaggcccgctaccacgatcgggcccgggaccccagcggctcggcgggcctggacgcacggaggccctgggcgggaagccaggaggccgagctgagccgggagggaccctacggccgcgagtcggaccaccacgcccgggagggcagcctggagcaacccgggttctgggagggcgaggccgagcgaggcaaggccggggacccccaccggaggcacgtgcaccggcaggggggcagcagggagagccgcagcgggtccccgcgcacgggcgcggacggggagcatcgacgtcatcgcgcgcaccgcaggcccggggaggagggtccggaggacaaggcggagcggagggcgcggcaccgcgagggcagccggccggcccggggcggcgagggcgagggcgagggccccgacgggggcgagcgcaggagaaggcaccggcatggcgctccagccacgtacgagggggacgcgcggagggaggacaaggagcggaggcatcggaggaggaaagagaaccagggctccggggtccctgtgtcgggccccaacctgtcaaccacccggccaatccagcaggacctgggccgccaagacccacccctggcagaggatattgacaacatgaagaacaacaagctggccaccgcggagtcggccgctccccacggcagccttggccacgccggcctgccccagagcccagccaagatgggaaacagcaccgaccccggccccatgctggccatccctgccatggccaccaacccccagaacgccgccagccgccggacgcccaacaacccggggaacccatccaatcccggcccccccaagacccccgagaatagccttatcgtcaccaaccccagcggcacccagaccaattcagctaagactgccaggaaacccgaccacaccacagtggacatccccccagcctgcccaccccccctcaaccacaccgtcgtacaagtgaacaaaaacgccaacccagacccactgccaaaaaaagaggaagagaagaaggaggaggaggaagacgaccgtggggaagacggccctaagccaatgcctccctatagctccatgttcatcctgtccacgaccaacccccttcgccgcctgtgccattacatcctgaacctgcgctactttgagatgtgcatcctcatggtcattgccatgagcagcatcgccctggccgccgaggaccctgtgcagcccaacgcacctcggaacaacgtgctgcgatactttgactacgtttttacaggcgtctttacctttgagatggtgatcaagatgattgacctggggctcgtcctgcatcagggtgcctacttccgtgacctctggaatattctcgacttcatagtggtcagtggggccctggtagcctttgccttcactggcaatagcaaaggaaaagacatcaacacgattaaatccctccgagtcctccgggtgctacgacctcttaaaaccatcaagcggctgccaaagctcaaggctgtgtttgactgtgtggtgaactcacttaaaaacgtcttcaacatcctcatcgtctacatgctattcatgttcatcttcgccgtggtggctgtgcagctcttcaaggggaaattcttccactgcactgacgagtccaaagagtttgagaaagattgtcgaggcaaatacctcctctacgagaagaatgaggtgaaggcgcgagaccgggagtggaagaagtatgaattccattacgacaatgtgctgtgggctctgctgaccctcttcaccgtgtccacgggagaaggctggccacaggtcctcaagcattcggtggacgccacctttgagaaccagggccccagccccgggtaccgcatggagatgtccattttctacgtcgtctactttgtggtgttccccttcttctttgtcaatatctttgtggccttgatcatcatcaccttccaggagcaaggggacaagatgatggaggaatacagcctggagaaaaatgagagggcctgcattgatttcgccatcagcgccaagccgctgacccgacacatgccgcagaacaagcagagcttccagtaccgcatgtggcagttcgtggtgtctccgcctttcgagtacacgatcatggccatgatcgccctcaacaccatcgtgcttatgatgaagttctatggggcttctgttgcttatgaaaatgccctgcgggtgttcaacatcgtcttcacctccctcttctctctggaatgtgtgctgaaagtcatggcttttgggattctgaattatttccgcgatgcctggaacatcttcgactttgtgactgttctgggcagcatcaccgatatcctcgtgactgagtttgggaataacttcatcaacctgagctttctccgcctcttccgagctgcccggctcatcaaacttctccgtcagggttacaccatccgcattcttctctggacctttgtgcagtccttcaaggccctgccttatgtctgtctgctgatcgccatgctcttcttcatctatgccatcattgggatgcaggtgtttggtaacattggcatcgacgtggaggacgaggacagtgatgaagatgagttccaaatcactgagcacaataacttccggaccttcttccaggccctcatgcttctcttccggagtgccaccggggaagcttggcacaacatcatgctttcctgcctcagcgggaaaccgtgtgataagaactctggcatcctgactcgagagtgtggcaatgaatttgcttatttttactttgtttccttcatcttcctctgctcgtttctgatgctgaatctctttgtcgccgtcatcatggacaactttgagtacctcacccgagactcctccatcctgggcccccaccacctggatgagtacgtgcgtgtctgggccgagtatgaccccgcagcttgcggtcggattcattataaggatatgtacagtttattacgagtaatatctccccctctcggcttaggcaagaaatgtcctcatagggttgcttgcaagcggcttctgcggatggacctgcccgtcgcagatgacaacaccgtccacttcaattccaccctcatggctctgatccgcacagccctggacatcaagattgccaagggaggagccgacaaacagcagatggacgctgagctgcggaaggagatgatggcgatttggcccaatctgtcccagaagacgctagacctgctggtcacacctcacaagtccacggacctcaccgtggggaagatctacgcagccatgatgatcatggagtactaccggcagagcaaggccaagaagctgcaggccatgcgcgaggagcaggaccggacacccctcatgttccagcgcatggagcccccgtccccaacgcaggaagggggacctggccagaacgccctcccctccacccagctggacccaggaggagccctgatggctcacgaaagcggcctcaaggagagcccgtcctgggtgacccagcgtgcccaggagatgttccagaagacgggcacatggagtccggaacaaggcccccctaccgacatgcccaacagccagcctaactctcagtccgtggagatgcgagagatgggcagagatggctactccgacagcgagcactacctccccatggaaggccagggccgggctgcctccatgccccgcctccctgcagagaaccagaggagaaggggccggccacgtgggaataacctcagtaccatctcagacaccagccccatgaagcgttcagcctccgtgctgggccccaaggcccgacgcctggacgattactcgctggagcgggtcccgcccgaggagaaccagcggcaccaccagcggcgccgcgaccgcagccaccgcgcctctgagcgctccctgggccgctacaccgatgtggacacaggcttggggacagacctgagcatgaccacccaatccggggacctgccgtcgaaggagcgggaccaggagcggggccggcccaaggatcggaagcatcgacagcaccaccaccaccaccaccaccaccaccatcccccgccccccgacaaggaccgctatgcccaggaacggccggaccacggccgggcacgggctcgggaccagcgctggtcccgctcgcccagcgagggccgagagcacatggcgcaccggcagggcagtagttccgtaagtggaagcccagccccctcaacatctggtaccagcactccgcggcggggccgccgccagctcccccagaccccctccaccccccggccacacgtgtcctattcccctgtgatccgtaaggccggcggctcggggcccccgcagcagcagcagcagcagcagcagcagcagcagcagcaggcggtggccaggccgggccgggcggccaccagcggccctcggaggtacccaggccccacggccgagcctctggccggagatcggccgcccacggggggccacagcagcggccgctcgcccaggatggagaggcgggtcccaggcccggcccggagcgagtcccccagggcctgtcgacacggcggggcccggtggccggcatctggcccgcacgtgtccgaggggcccccgggtccccggcaccatggctactaccggggctccgactacgacgaggccgatggcccgggcagcgggggcggcgaggaggccatggccggggcctacgacgcgccaccccccgtacgacacgcgtcctcgggcgccaccgggcgctcgcccaggactccccgggcctcgggcccggcctgcgcctcgccttctcggcacggccggcgactccccaacggctactacccggcgcacggactggccaggccccgcgggccgggctccaggaagggcctgcacgaaccctacagcgagagtgacgatgattggtgctaagcccgggcgag

SEQ ID NO: 2649 - DNA, 7135 bp, Homo sapiens
  source 1..7135: mol_type = unassigned DNA; mol_type = unassigned DNA
atggcccgcttcggagacgagatgccggcccgctacgggggaggaggctccggggcagccgccggggtggtcgtgggcagcggaggcgggcgaggagccgggggcagccggcagggcgggcagcccggggcgcaaaggatgtacaagcagtcaatggcgcagagagcgcggaccatggcactctacaaccccatccccgtccgacagaactgcctcacggttaaccggtctctcttcctcttcagcgaagacaacgtggtgagaaaatacgccaaaaagatcaccgaatggcctccctttgaatatatgattttagccaccatcatagcgaattgcatcgtcctcgcactggagcagcatctgcctgatgatgacaagaccccgatgtctgaacggctggatgacacagaaccatacttcattggaattttttgtttcgaggctggaattaaaatcattgcccttgggtttgccttccacaaaggctcctacttgaggaatggctggaatgtcatggactttgtggtggtgctaacgggcatcttggcgacagttgggacggagtttgacctacggacgctgagggcagttcgagtgctgcggccgctcaagctggtgtctggaatcccaagtttacaagtcgtcctgaagtcgatcatgaaggcgatgatccctttgctgcagatcggcctcctcctattttttgcaatccttatttttgcaatcatagggttagaattttatatgggaaaatttcataccacctgctttgaagaggggacagatgacattcagggtgagtctccggctccatgtgggacagaagagcccgcccgcacctgccccaatgggaccaaatgtcagccctactgggaagggcccaacaacgggatcactcagttcgacaacatcctgtttgcagtgctgactgttttccagtgcataaccatggaagggtggactgatctcctctacaatagcaacgatgcctcagggaacacttggaactggttgtacttcatccccctcatcatcatcggctccttttttatgctgaaccttgtgctgggtgtgctgtcaggggagtttgccaaagaaagggaacgggtggagaaccggcgggcttttctgaagctgaggcggcaacaacagattgaacgtgagctcaatgggtacatggagtggatctcaaaagcagaagaggtgatcctcgccgaggatgaaactgacggggagcagaggcatccctttgatggagctctgcggagaaccaccataaagaaaagcaagacagatttgctcaaccccgaagaggctgaggatcagctggctgatatagcctctgtgggttctcccttcgcccgagccagcattaaaagtgccaagctggagaactcgaccttttttcacaaaaaggagaggaggatgcgtttctacatccgccgcatggtcaaaactcaggccttctactggactgtactcagtttggtagctctcaacacgctgtgtgttgctattgttcactacaaccagcccgagtggctctccgacttcctttactatgcagaattcattttcttaggactctttatgtccgaaatgtttataaaaatgtacgggcttgggacgcggccttacttccactcttccttcaactgctttgactgtggggttatcattgggagcatcttcgaggtcatctgggctgtcataaaacctggcacatcctttggaatcagcgtgttacgagccctcaggttattgcgtattttcaaagtcacaaagtactgggcatctctcagaaacctggtcgtctctctcctcaactccatgaagtccatcatcagcctgttgtttctccttttcctgttcattgtcgtcttcgcccttttgggaatgcaactcttcggcggccagtttaatttcgatgaagggactcctcccaccaacttcgatacttttccagcagcaataatgacggtgtttcagatcctgacgggcgaagactggaacgaggtcatgtacgacgggatcaagtctcaggggggcgtgcagggcggcatggtgttctccatctatttcattgtactgacgctctttgggaactacaccctcctgaatgtgttcttggccatcgctgtggacaatctggccaacgcccaggagctcaccaaggacgagcaagaggaagaagaagcagcgaaccagaaacttgccctacagaaagccaaggaggtggcagaagtgagtcctctgtccgcggccaacatgtctatagctgtgaaagagcaacagaagaatcaaaagccagccaagtccgtgtgggagcagcggaccagtgagatgcgaaagcagaacttgctggccagccgggaggccctgtataacgaaatggacccggacgagcgctggaaggctgcctacacgcggcacctgcggccagacatgaagacgcacttggaccggccgctggtggtggacccgcaggagaaccgcaacaacaacaccaacaagagccgggcggccgagcccaccgtggaccagcgcctcggccagcagcgcgccgaggacttcctcaggaaacaggcccgctaccacgatcgggcccgggaccccagcggctcggcgggcctggacgcacggaggccctgggcgggaagccaggaggccgagctgagccgggagggaccctacggccgcgagtcggaccaccacgcccgggagggcagcctggagcaacccgggttctgggagggcgaggccgagcgaggcaaggccggggacccccaccggaggcacgtgcaccggcaggggggcagcagggagagccgcagcgggtccccgcgcacgggcgcggacggggagcatcgacgtcatcgcgcgcaccgcaggcccggggaggagggtccggaggacaaggcggagcggagggcgcggcaccgcgagggcagccggccggcccggggcggcgagggcgagggcgagggccccgacgggggcgagcgcaggagaaggcaccggcatggcgctccagccacgtacgagggggacgcgcggagggaggacaaggagcggaggcatcggaggaggaaagagaaccagggctccggggtccctgtgtcgggccccaacctgtcaaccacccggccaatccagcaggacctgggccgccaagacccacccctggcagaggatattgacaacatgaagaacaacaagctggccaccgcggagtcggccgctccccacggcagccttggccacgccggcctgccccagagcccagccaagatgggaaacagcaccgaccccggccccatgctggccatccctgccatggccaccaacccccagaacgccgccagccgccggacgcccaacaacccggggaacccatccaatcccggcccccccaagacccccgagaatagccttatcgtcaccaaccccagcggcacccagaccaattcagctaagactgccaggaaacccgaccacaccacagtggacatccccccagcctgcccaccccccctcaaccacaccgtcgtacaagtgaacaaaaacgccaacccagacccactgccaaaaaaagaggaagagaagaaggaggaggaggaagacgaccgtggggaagacggccctaagccaatgcctccctatagctccatgttcatcctgtccacgaccaacccccttcgccgcctgtgccattacatcctgaacctgcgctactttgagatgtgcatcctcatggtcattgccatgagcagcatcgccctggccgccgaggaccctgtgcagcccaacgcacctcggaacaacgtgctgcgatactttgactacgtttttacaggcgtctttacctttgagatggtgatcaagatgattgacctggggctcgtcctgcatcagggtgcctacttccgtgacctctggaatattctcgacttcatagtggtcagtggggccctggtagcctttgccttcactggcaatagcaaaggaaaagacatcaacacgattaaatccctccgagtcctccgggtgctacgacctcttaaaaccatcaagcggctgccaaagctcaaggctgtgtttgactgtgtggtgaactcacttaaaaacgtcttcaacatcctcatcgtctacatgctattcatgttcatcttcgccgtggtggctgtgcagctcttcaaggggaaattcttccactgcactgacgagtccaaagagtttgagaaagattgtcgaggcaaatacctcctctacgagaagaatgaggtgaaggcgcgagaccgggagtggaagaagtatgaattccattacgacaatgtgctgtgggctctgctgaccctcttcaccgtgtccacgggagaaggctggccacaggtcctcaagcattcggtggacgccacctttgagaaccagggccccagccccgggtaccgcatggagatgtccattttctacgtcgtctactttgtggtgttccccttcttctttgtcaatatctttgtggccttgatcatcatcaccttccaggagcaaggggacaagatgatggaggaatacagcctggagaaaaatgagagggcctgcattgatttcgccatcagcgccaagccgctgacccgacacatgccgcagaacaagcagagcttccagtaccgcatgtggcagttcgtggtgtctccgcctttcgagtacacgatcatggccatgatcgccctcaacaccatcgtgcttatgatgaagttctatggggcttctgttgcttatgaaaatgccctgcgggtgttcaacatcgtcttcacctccctcttctctctggaatgtgtgctgaaagtcatggcttttgggattctgaattatttccgcgatgcctggaacatcttcgactttgtgactgttctgggcagcatcaccgatatcctcgtgactgagtttgggaataacttcatcaacctgagctttctccgcctcttccgagctgcccggctcatcaaacttctccgtcagggttacaccatccgcattcttctctggacctttgtgcagtccttcaaggccctgccttatgtctgtctgctgatcgccatgctcttcttcatctatgccatcattgggatgcaggtgtttggtaacattggcatcgacgtggaggacgaggacagtgatgaagatgagttccaaatcactgagcacaataacttccggaccttcttccaggccctcatgcttctcttccggagtgccaccggggaagcttggcacaacatcatgctttcctgcctcagcgggaaaccgtgtgataagaactctggcatcctgactcgagagtgtggcaatgaatttgcttatttttactttgtttccttcatcttcctctgctcgtttctgatgctgaatctctttgtcgccgtcatcatggacaactttgagtacctcacccgagactcctccatcctgggcccccaccacctggatgagtacgtgcgtgtctgggccgagtatgaccccgcagcttggggccgcatgccttacctggacatgtatcagatgctgagacacatgtctccgcccctgggtctggggaagaagtgtccggccagagtggcttacaagcggcttctgcggatggacctgcccgtcgcagatgacaacaccgtccacttcaattccaccctcatggctctgatccgcacagccctggacatcaagattgccaagggaggagccgacaaacagcagatggacgctgagctgcggaaggagatgatggcgatttggcccaatctgtcccagaagacgctagacctgctggtcacacctcacaagtccacggacctcaccgtggggaagatctacgcagccatgatgatcatggagtactaccggcagagcaaggccaagaagctgcaggccatgcgcgaggagcaggaccggacacccctcatgttccagcgcatggagcccccgtccccaacgcaggaagggggacctggccagaacgccctcccctccacccagctggacccaggaggagccctgatggctcacgaaagcggcctcaaggagagcccgtcctgggtgacccagcgtgcccaggagatgttccagaagacgggcacatggagtccggaacaaggcccccctaccgacatgcccaacagccagcctaactctcagtccgtggagatgcgagagatgggcagagatggctactccgacagcgagcactacctccccatggaaggccagggccgggctgcctccatgccccgcctccctgcagagaaccagaccatctcagacaccagccccatgaagcgttcagcctccgtgctgggccccaaggcccgacgcctggacgattactcgctggagcgggtcccgcccgaggagaaccagcggcaccaccagcggcgccgcgaccgcagccaccgcgcctctgagcgctccctgggccgctacaccgatgtggacacaggcttggggacagacctgagcatgaccacccaatccggggacctgccgtcgaaggagcgggaccaggagcggggccggcccaaggatcggaagcatcgacagcaccaccaccaccaccaccaccaccaccatcccccgccccccgacaaggaccgctatgcccaggaacggccggaccacggccgggcacgggctcgggaccagcgctggtcccgctcgcccagcgagggccgagagcacatggcgcaccggcagtagttccgtaagtggaagcccagccccctcaacatctggtaccagcactccgcggcggggccgccgccagctcccccagaccccctccaccccccggccacacgtgtcctattcccctgtgatccgtaaggccggcggctcggggcccccgcagcagcagcagcagcagcagcagcagcagcagcagcaggcggtggccaggccgggccgggcggccaccagcggccctcggaggtacccaggccccacggccgagcctctggccggagatcggccgcccacggggggccacagcagcggccgctcgcccaggatggagaggcgggtcccaggcccggcccggagcgagtcccccagggcctgtcgacacggcggggcccggtggccg

SEQ ID NO: 2650 - DNA, 6847 bp, Homo sapiens
  source 1..6847: mol_type = unassigned DNA; mol_type = unassigned DNA
gcgtaacccggagccctttgctctttgcagaatggcccgcttcggagacgagatgccggcccgctacgggggaggaggctccggggcagccgccggggtggtcgtgggcagcggaggcgggcgaggagccgggggcagccggcagggcgggcagcccggggcgcaaaggatgtacaagcagtcaatggcgcagagagcgcggaccatggcactctacaaccccatccccgtccgacagaactgcctcacggttaaccggtctctcttcctcttcagcgaagacaacgtggtgagaaaatacgccaaaaagatcaccgaatggcctccctttgaatatatgattttagccaccatcatagcgaattgcatcgtcctcgcactggagcagcatctgcctgatgatgacaagaccccgatgtctgaacggctggatgacacagaaccatacttcattggaattttttgtttcgaggctggaattaaaatcattgcccttgggtttgccttccacaaaggctcctacttgaggaatggctggaatgtcatggactttgtggtggtgctaacgggcatcttggcgacagttgggacggagtttgacctacggacgctgagggcagttcgagtgctgcggccgctcaagctggtgtctggaatcccaagtttacaagtcgtcctgaagtcgatcatgaaggcgatgatccctttgctgcagatcggcctcctcctattttttgcaatccttatttttgcaatcatagggttagaattttatatgggaaaatttcataccacctgctttgaagaggggacagatgacattcagggtgagtctccggctccatgtgggacagaagagcccgcccgcacctgccccaatgggaccaaatgtcagccctactgggaagggcccaacaacgggatcactcagttcgacaacatcctgtttgcagtgctgactgttttccagtgcataaccatggaagggtggactgatctcctctacaatagcaacgatgcctcagggaacacttggaactggttgtacttcatccccctcatcatcatcggctccttttttatgctgaaccttgtgctgggtgtgctgtcaggggagtttgccaaagaaagggaacgggtggagaaccggcgggcttttctgaagctgaggcggcaacaacagattgaacgtgagctcaatgggtacatggagtggatctcaaaagcagaagaggtgatcctcgccgaggatgaaactgacggggagcagaggcatccctttgatgttggagctctgcggagaaccaccataaagaaaagcaagacagatttgctcaaccccgaagaggctgaggatcagctggctgatatagcctctgtgggttctcccttcgcccgagccagcattaaaagtgccaagctggagaactcgaccttttttcacaaaaaggagaggaggatgcgtttctacatccgccgcatggtcaaaactcaggccttctactggactgtactcagtttggtagctctcaacacgctgtgtgttgctattgttcactacaaccagcccgagtggctctccgacttcctttactatgcagaattcattttcttaggactctttatgtccgaaatgtttataaaaatgtacgggcttgggacgcggccttacttccactcttccttcaactgctttgactgtggggttatcattgggagcatcttcgaggtcatctgggctgtcataaaacctggcacatcctttggaatcagcgtgttacgagccctcaggttattgcgtattttcaaagtcacaaagtactgggcatctctcagaaacctggtcgtctctctcctcaactccatgaagtccatcatcagcctgttgtttctccttttcctgttcattgtcgtcttcgcccttttgggaatgcaactcttcggcggccagtttaatttcgatgaagggactcctcccaccaacttcgatacttttccagcagcaataatgacggtgtttcagatcctgacgggcgaagactggaacgaggtcatgtacgacgggatcaagtctcaggggggcgtgcagggcggcatggtgttctccatctatttcattgtactgacgctctttgggaactacaccctcctgaatgtgttcttggccatcgctgtggacaatctggccaacgcccaggagctcaccaaggacgagcaagaggaagaagaagcagcgaaccagaaacttgccctacagaaagccaaggaggtggcagaagtgagtcctctgtccgcggccaacatgtctatagctgtgaaagagcaacagaagaatcaaaagccagccaagtccgtgtgggagcagcggaccagtgagatgcgaaagcagaacttgctggccagccgggaggccctgtataacgaaatggacccggacgagcgctggaaggctgcctacacgcggcacctgcggccagacatgaagacgcacttggaccggccgctggtggtggacccgcaggagaaccgcaacaacaacaccaacaagagccgggcggccgagcccaccgtggaccagcgcctcggccagcagcgcgccgaggacttcctcaggaaacaggcccgctaccacgatcgggcccgggaccccagcggctcggcgggcctggacgcacggaggccctgggcgggaagccaggaggccgagctgagccgggagggaccctacggccgcgagtcggaccaccacgcccgggagggcagcctggagcaacccgggttctgggagggcgaggccgagcgaggcaaggccggggacccccaccggaggcacgtgcaccggcaggggggcagcagggagagccgcagcgggtccccgcgcacgggcgcggacggggagcatcgacgtcatcgcgcgcaccgcaggcccggggaggagggtccggaggacaaggcggagcggagggcgcggcaccgcgagggcagccggccggcccggggcggcgagggcgagggcgagggccccgacgggggcgagcgcaggagaaggcaccggcatggcgctccagccacgtacgagggggacgcgcggagggaggacaaggagcggaggcatcggaggaggaaagagaaccagggctccggggtccctgtgtcgggccccaacctgtcaaccacccggccaatccagcaggacctgggccgccaagacccacccctggcagaggatattgacaacatgaagaacaacaagctggccaccgcggagtcggccgctccccacggcagccttggccacgccggcctgccccagagcccagccaagatgggaaacagcaccgaccccggccccatgctggccatccctgccatggccaccaacccccagaacgccgccagccgccggacgcccaacaacccggggaacccatccaatcccggcccccccaagacccccgagaatagccttatcgtcaccaaccccagcggcacccagaccaattcagctaagactgccaggaaacccgaccacaccacagtggacatccccccagcctgcccaccccccctcaaccacaccgtcgtacaagtgaacaaaaacgccaacccagacccactgccaaaaaaagaggaagagaagaaggaggaggaggaagacgaccgtggggaagacggccctaagccaatgcctccctatagctccatgttcatcctgtccacgaccaacccccttcgccgcctgtgccattacatcctgaacctgcgctactttgagatgtgcatcctcatggtcattgccatgagcagcatcgccctggccgccgaggaccctgtgcagcccaacgcacctcggaacaacgtgctgcgatactttgactacgtttttacaggcgtctttacctttgagatggtgatcaagatgattgacctggggctcgtcctgcatcagggtgcctacttccgtgacctctggaatattctcgacttcatagtggtcagtggggccctggtagcctttgccttcactggcaatagcaaaggaaaagacatcaacacgattaaatccctccgagtcctccgggtgctacgacctcttaaaaccatcaagcggctgccaaagctcaaggctgtgtttgactgtgtggtgaactcacttaaaaacgtcttcaacatcctcatcgtctacatgctattcatgttcatcttcgccgtggtggctgtgcagctcttcaaggggaaattcttccactgcactgacgagtccaaagagtttgagaaagattgtcgaggcaaatacctcctctacgagaagaatgaggtgaaggcgcgagaccgggagtggaagaagtatgaattccattacgacaatgtgctgtgggctctgctgaccctcttcaccgtgtccacgggagaaggctggccacaggtcctcaagcattcggtggacgccacctttgagaaccagggccccagccccgggtaccgcatggagatgtccattttctacgtcgtctactttgtggtgttccccttcttctttgtcaatatctttgtggccttgatcatcatcaccttccaggagcaaggggacaagatgatggaggaatacagcctggagaaaaatgagagggcctgcattgatttcgccatcagcgccaagccgctgacccgacacatgccgcagaacaagcagagcttccagtaccgcatgtggcagttcgtggtgtctccgcctttcgagtacacgatcatggccatgatcgccctcaacaccatcgtgcttatgatgaagttctatggggcttctgttgcttatgaaaatgccctgcgggtgttcaacatcgtcttcacctccctcttctctctggaatgtgtgctgaaagtcatggcttttgggattctgaattatttccgcgatgcctggaacatcttcgactttgtgactgttctgggcagcatcaccgatatcctcgtgactgagtttgggaataacttcatcaacctgagctttctccgcctcttccgagctgcccggctcatcaaacttctccgtcagggttacaccatccgcattcttctctggacctttgtgcagtccttcaaggccctgccttatgtctgtctgctgatcgccatgctcttcttcatctatgccatcattgggatgcaggtgtttggtaacattggcatcgacgtggaggacgaggacagtgatgaagatgagttccaaatcactgagcacaataacttccggaccttcttccaggccctcatgcttctcttccggagtgccaccggggaagcttggcacaacatcatgctttcctgcctcagcgggaaaccgtgtgataagaactctggcatcctgactcgagagtgtggcaatgaatttgcttatttttactttgtttccttcatcttcctctgctcgtttctgatgctgaatctctttgtcgccgtcatcatggacaactttgagtacctcacccgagactcctccatcctgggcccccaccacctggatgagtacgtgcgtgtctgggccgagtatgaccccgcagcttgcggtcggattcattataaggatatgtacagtttattacgagtaatatctccccctctcggcttaggcaagaaatgtcctcatagggttgcttgcaagcggcttctgcggatggacctgcccgtcgcagatgacaacaccgtccacttcaattccaccctcatggctctgatccgcacagccctggacatcaagattgccaagggaggagccgacaaacagcagatggacgctgagctgcggaaggagatgatggcgatttggcccaatctgtcccagaagacgctagacctgctggtcacacctcacaagtccacggacctcaccgtggggaagatctacgcagccatgatgatcatggagtactaccggcagagcaaggccaagaagctgcaggccatgcgcgaggagcaggaccggacacccctcatgttccagcgcatggagcccccgtccccaacgcaggaagggggacctggccagaacgccctcccctccacccagctggacccaggaggagccctgatggctcacgaaagcggcctcaaggagagcccgtcctgggtgacccagcgtgcccaggagatgttccagaagacgggcacatggagtccggaacaaggcccccctaccgacatgcccaacagccagcctaactctcagtccgtggagatgcgagagatgggcagagatggctactccgacagcgagcactacctccccatggaaggccagggccgggctgcctccatgccccgcctccctgcagagaaccagaggagaaggggccggccacgtgggaataacctcagtaccatctcagacaccagccccatgaagcgttcagcctccgtgctgggccccaaggcccgacgcctggacgattactcgctggagcgggtcccgcccgaggagaaccagcggcaccaccagcggcgccgcgaccgcagccaccgcgcctctgagcgctccctgggccgctacaccgatgtggacacaggcttggggacagacctgagcatgaccacccaatccggggacctgccgtcgaaggagcgggaccaggagcggggccggcccaaggatcggaagcatcgacagcaccaccaccaccaccaccaccaccaccatcccccgccccccgacaaggaccgctatgcccaggaacggccggaccacggccgggcacgggctcgggaccagcgctggtcccgctcgcccagcgagggccgagagcacatggcgcaccggcagtagttccgtaagtggaagcccagccccctc

SEQ ID NO: 2651 - DNA, 1653 bp, Homo sapiens
  source 1..1653: mol_type = unassigned DNA; mol_type = unassigned DNA
gtcatggcttttgggattctgaattatttccgcgatgcctggaacatcttcgactttgtgactgttctgggcagcatcaccgatatcctcgtgactgagtttgggaatccgaataacttcatcaacctgagctttctccgcctcttccgagctgcccggctcatcaaacttctccgtcagggttacaccatccgcattcttctctggacctttgtgcagtccttcaaggtgtttggtaacattggcatcgacgtggaggacgaggacagtgatgaagatgagttccaaatcactgagcacaataacttccggaccttcttccaggccctcatgcttctcttccggagtgccaccggggaagcttggcacaacatcatgctttcctgcctcagcgggaaaccgtgtgataagaactctggcatcctgactcgagagtgtggcaatgaatttgcttatttttactttgtttccttcatcttcctctgctcgtttctgcggcttctgcggatggacctgcccgtcgcagatgacaacaccgtccacttcaattccaccctcatggctctgatccgcacagccctggacatcaagattgccaagggaggagccgacaaacagcagatggacgctgagctgcggaaggagatgatggcgatttggcccaatctgtcccagaagacgctagacctgctggtcacacctcacaagtccacggacctcaccgtggggaagatctacgcagccatgatgatcatggagtactaccggcagagcaaggccaagaagctgcaggccatgcgcgaggagcaggaccggacacccctcatgttccagcgcatggagcccccgtccccaacgcaggaagggggacctggccagaacgccctcccctccacccagctggacccaggaggagccctgatggctcacgaaagcggcctcaaggagagcccgtcctgggtgacccagcgtgcccaggagatgttccagaagacgggcacatggagtccggaacaaggcccccctaccgacatgcccaacagccagcctaactctcagtccgtggagatgcgagagatgggcagagatggctactccgacagcgagcactacctccccatggaaggccagggccgggctgcctccatgccccgcctccctgcagagaaccagaggagaaggggccggccacgtgggaataacctcagtaccatctcagacaccagccccatgaagcgttcagcctccgtgctgggccccaaggcccgacgcctggacgattactcgctggagcgggtcccgcccgaggagaaccagcggcaccaccagcggcgccgcgaccgcagccaccgcgcctctgagcgctccctgggccgctacaccgatgtggacacaggcttggggacagacctgagcatgaccacccaatccggggacctgccgtcgaaggagcgggaccaggagcggggccggcccaaggatcggaagcatcgacagcaccaccaccaccaccaccaccaccaccatcccccgccccccgacaaggaccgctatgcccaggaacggccggaccacggccgggcacgggctcgggaccagcgctggtcccgctcgcccagcgagggccgagagcacatggcgcaccggcagtag

SEQ ID NO: 2652 - DNA, 6792 bp, Homo sapiens
  source 1..6792: mol_type = unassigned DNA; mol_type = unassigned DNA
atggcccgcttcggagacgagatgccggcccgctacgggggaggaggctccggggcagccgccggggtggtcgtgggcagcggaggcgggcgaggagccgggggcagccggcagggcgggcagcccggggcgcaaaggatgtacaagcagtcaatggcgcagagagcgcggaccatggcactctacaaccccatccccgtccgacagaactgcctcacggttaaccggtctctcttcctcttcagcgaagacaacgtggtgagaaaatacgccaaaaagatcaccgaatggcctccctttgaatatatgattttagccaccatcatagcgaattgcatcgtcctcgcactggagcagcatctgcctgatgatgacaagaccccgatgtctgaacggctggatgacacagaaccatacttcattggaattttttgtttcgaggctggaattaaaatcattgcccttgggtttgccttccacaaaggctcctacttgaggaatggctggaatgtcatggactttgtggtggtgctaacgggcatcttggcgacagttgggacggagtttgacctacggacgctgagggcagttcgagtgctgcggccgctcaagctggtgtctggaatcccaagtttacaagtcgtcctgaagtcgatcatgaaggcgatgatccctttgctgcagatcggcctcctcctattttttgcaatccttatttttgcaatcatagggttagaattttatatgggaaaatttcataccacctgctttgaagaggggacagatgacattcagggtgagtctccggctccatgtgggacagaagagcccgcccgcacctgccccaatgggaccaaatgtcagccctactgggaagggcccaacaacgggatcactcagttcgacaacatcctgtttgcagtgctgactgttttccagtgcataaccatggaagggtggactgatctcctctacaatagcaacgatgcctcagggaacacttggaactggttgtacttcatccccctcatcatcatcggctccttttttatgctgaaccttgtgctgggtgtgctgtcaggggagtttgccaaagaaagggaacgggtggagaaccggcgggcttttctgaagctgaggcggcaacaacagattgaacgtgagctcaatgggtacatggagtggatctcaaaagcagaagaggtgatcctcgccgaggatgaaactgacggggagcagaggcatccctttgatggagctctgcggagaaccaccataaagaaaagcaagacagatttgctcaaccccgaagaggctgaggatcagctggctgatatagcctctgtgggttctcccttcgcccgagccagcattaaaagtgccaagctggagaactcgaccttttttcacaaaaaggagaggaggatgcgtttctacatccgccgcatggtcaaaactcaggccttctactggactgtactcagtttggtagctctcaacacgctgtgtgttgctattgttcactacaaccagcccgagtggctctccgacttcctttactatgcagaattcattttcttaggactctttatgtccgaaatgtttataaaaatgtacgggcttgggacgcggccttacttccactcttccttcaactgctttgactgtggggttatcattgggagcatcttcgaggtcatctgggctgtcataaaacctggcacatcctttggaatcagcgtgttacgagccctcaggttattgcgtattttcaaagtcacaaagtactgggcatctctcagaaacctggtcgtctctctcctcaactccatgaagtccatcatcagcctgttgtttctccttttcctgttcattgtcgtcttcgcccttttgggaatgcaactcttcggcggccagtttaatttcgatgaagggactcctcccaccaacttcgatacttttccagcagcaataatgacggtgtttcagatcctgacgggcgaagactggaacgaggtcatgtacgacgggatcaagtctcaggggggcgtgcagggcggcatggtgttctccatctatttcattgtactgacgctctttgggaactacaccctcctgaatgtgttcttggccatcgctgtggacaatctggccaacgcccaggagctcaccaaggacgagcaagaggaagaagaagcagcgaaccagaaacttgccctacagaaagccaaggaggtggcagaagtgagtcctctgtccgcggccaacatgtctatagctgtgaaagagcaacagaagaatcaaaagccagccaagtccgtgtgggagcagcggaccagtgagatgcgaaagcagaacttgctggccagccgggaggccctgtataacgaaatggacccggacgagcgctggaaggctgcctacacgcggcacctgcggccagacatgaagacgcacttggaccggccgctggtggtggacccgcaggagaaccgcaacaacaacaccaacaagagccgggcggccgagcccaccgtggaccagcgcctcggccagcagcgcgccgaggacttcctcaggaaacaggcccgctaccacgatcgggcccgggaccccagcggctcggcgggcctggacgcacggaggccctgggcgggaagccaggaggccgagctgagccgggagggaccctacggccgcgagtcggaccaccacgcccgggagggcagcctggagcaacccgggttctgggagggcgaggccgagcgaggcaaggccggggacccccaccggaggcacgtgcaccggcaggggggcagcagggagagccgcagcgggtccccgcgcacgggcgcggacggggagcatcgacgtcatcgcgcgcaccgcaggcccggggaggagggtccggaggacaaggcggagcggagggcgcggcaccgcgagggcagccggccggcccggggcggcgagggcgagggcgagggccccgacgggggcgagcgcaggagaaggcaccggcatggcgctccagccacgtacgagggggacgcgcggagggaggacaaggagcggaggcatcggaggaggaaagagaaccagggctccggggtccctgtgtcgggccccaacctgtcaaccacccggccaatccagcaggacctgggccgccaagacccacccctggcagaggatattgacaacatgaagaacaacaagctggccaccgcggagtcggccgctccccacggcagccttggccacgccggcctgccccagagcccagccaagatgggaaacagcaccgaccccggccccatgctggccatccctgccatggccaccaacccccagaacgccgccagccgccggacgcccaacaacccggggaacccatccaatcccggcccccccaagacccccgagaatagccttatcgtcaccaaccccagcggcacccagaccaattcagctaagactgccaggaaacccgaccacaccacagtggacatccccccagcctgcccaccccccctcaaccacaccgtcgtacaagtgaacaaaaacgccaacccagacccactgccaaaaaaagaggaagagaagaaggaggaggaggaagacgaccgtggggaagacggccctaagccaatgcctccctatagctccatgttcatcctgtccacgaccaacccccttcgccgcctgtgccattacatcctgaacctgcgctactttgagatgtgcatcctcatggtcattgccatgagcagcatcgccctggccgccgaggaccctgtgcagcccaacgcacctcggaacaacgtgctgcgatactttgactacgtttttacaggcgtctttacctttgagatggtgatcaagatgattgacctggggctcgtcctgcatcagggtgcctacttccgtgacctctggaatattctcgacttcatagtggtcagtggggccctggtagcctttgccttcactggcaatagcaaaggaaaagacatcaacacgattaaatccctccgagtcctccgggtgctacgacctcttaaaaccatcaagcggctgccaaagctcaaggctgtgtttgactgtgtggtgaactcacttaaaaacgtcttcaacatcctcatcgtctacatgctattcatgttcatcttcgccgtggtggctgtgcagctcttcaaggggaaattcttccactgcactgacgagtccaaagagtttgagaaagattgtcgaggcaaatacctcctctacgagaagaatgaggtgaaggcgcgagaccgggagtggaagaagtatgaattccattacgacaatgtgctgtgggctctgctgaccctcttcaccgtgtccacgggagaaggctggccacaggtcctcaagcattcggtggacgccacctttgagaaccagggccccagccccgggtaccgcatggagatgtccattttctacgtcgtctactttgtggtgttccccttcttctttgtcaatatctttgtggccttgatcatcatcaccttccaggagcaaggggacaagatgatggaggaatacagcctggagaaaaatgagagggcctgcattgatttcgccatcagcgccaagccgctgacccgacacatgccgcagaacaagcagagcttccagtaccgcatgtggcagttcgtggtgtctccgcctttcgagtacacgatcatggccatgatcgccctcaacaccatcgtgcttatgatgaagttctatggggcttctgttgcttatgaaaatgccctgcgggtgttcaacatcgtcttcacctccctcttctctctggaatgtgtgctgaaagtcatggcttttgggattctgaattatttccgcgatgcctggaacatcttcgactttgtgactgttctgggcagcatcaccgatatcctcgtgactgagtttgggaatccgaataacttcatcaacctgagctttctccgcctcttccgagctgcccggctcatcaaacttctccgtcagggttacaccatccgcattcttctctggacctttgtgcagtccttcaaggccctgccttatgtctgtctgctgatcgccatgctcttcttcatctatgccatcattgggatgcaggtgtttggtaacattggcatcgacgtggaggacgaggacagtgatgaagatgagttccaaatcactgagcacaataacttccggaccttcttccaggccctcatgcttctcttccggagtgccaccggggaagcttggcacaacatcatgctttcctgcctcagcgggaaaccgtgtgataagaactctggcatcctgactcgagagtgtggcaatgaatttgcttatttttactttgtttccttcatcttcctctgctcgtttctgatgctgaatctctttgtcgccgtcatcatggacaactttgagtacctcacccgagactcctccatcctgggcccccaccacctggatgagtacgtgcgtgtctgggccgagtatgaccccgcagcttggggccgcatgccttacctggacatgtatcagatgctgagacacatgtctccgcccctgggtctggggaagaagtgtccggccagagtggcttacaagcggcttctgcggatggacctgcccgtcgcagatgacaacaccgtccacttcaattccaccctcatggctctgatccgcacagccctggacatcaagattgccaagggaggagccgacaaacagcagatggacgctgagctgcggaaggagatgatggcgatttggcccaatctgtcccagaagacgctagacctgctggtcacacctcacaagtccacggacctcaccgtggggaagatctacgcagccatgatgatcatggagtactaccggcagagcaaggccaagaagctgcaggccatgcgcgaggagcaggaccggacacccctcatgttccagcgcatggagcccccgtccccaacgcaggaagggggacctggccagaacgccctcccctccacccagctggacccaggaggagccctgatggctcacgaaagcggcctcaaggagagcccgtcctgggtgacccagcgtgcccaggagatgttccagaagacgggcacatggagtccggaacaaggcccccctaccgacatgcccaacagccagcctaactctcagtccgtggagatgcgagagatgggcagagatggctactccgacagcgagcactacctccccatggaaggccagggccgggctgcctccatgccccgcctccctgcagagaaccagaggagaaggggccggccacgtgggaataacctcagtaccatctcagacaccagccccatgaagcgttcagcctccgtgctgggccccaaggcccgacgcctggacgattactcgctggagcgggtcccgcccgaggagaaccagcggcaccaccagcggcgccgcgaccgcagccaccgcgcctctgagcgctccctgggccgctacaccgatgtggacacaggcttggggacagacctgagcatgaccacccaatccggggacctgccgtcgaaggagcgggaccaggagcggggccggcccaaggatcggaagcatcgacagcaccaccaccaccaccaccaccaccaccatcccccgccccccgacaaggaccgctatgcccaggaacggccggaccacggccgggcacgggctcgggaccagcgctggtcccgctcgcccagcgagggccgagagcacatggcgcaccggcagtag

SEQ ID NO: 2653 - DNA, 3011 bp, Homo sapiens
  source 1..3011: mol_type = unassigned DNA; mol_type = unassigned DNA
ccccgtcagtggggggctgcctgcctgctgcttctcagaggaatgatgtggtctgtgcccatctgctctgtcctggtctgggccaagccagggattgggtgtggggagccagtggcaccccccaccagcggctgtggtcctggccccctcagccttggctgttgcatgcactgctcaaatccagcttgtgctctttttctttggggtcagactgaaacggggccatccagaagaactctggggcagggcgggggtggggcaagggttgaggcaaaccctggaaatgccagctctcaggtcaagcaggtgggggaaaaaaggagagggcaggggaccagaagtacaagagagccttttgtgccctccctgcgggccaccaagagaaactgagtactgggacaggtaacctaagtaagagacacctcagccgccacagctttcagagttcttcctgggactccctgggtaggggcgggcgcggctcacgggagacccaggagggatgcctgggaatgactgcgcttgccttgggttttctgtagcggcttctgcggatggacctgcccgtcgcagatgacaacaccgtccacttcaattccaccctcatggctctgatccgcacagccctggacatcaagattgccaagggaggagccgacaaacagcagatggacgctgagctgcggaaggagatgatggcgatttggcccaatctgtcccagaagacgctagacctgctggtcacacctcacaagtccacggacctcaccgtggggaagatctacgcagccatgatgatcatggagtactaccggcagagcaaggccaagaagctgcaggccatgcgcgaggagcaggaccggacacccctcatgttccagcgcatggagcccccgtccccaacgcaggaagggggacctggccagaacgccctcccctccacccagctggacccaggaggagccctgatggctcacgaaagcggcctcaaggagagcccgtcctgggtgacccagcgtgcccaggagatgttccagaagacgggcacatggagtccggaacaaggcccccctaccgacatgcccaacagccagcctaactctcagtccgtggagatgcgagagatgggcagagatggctactccgacagcgagcactacctccccatggaaggccagggccgggctgcctccatgccccgcctccctgcagagaaccaggtgagggctttcaccactgccctggggctggacccctcactctgcactgggtagggccaggcccccccacaagcagcccagtgcatcccctccctgccggactcaggcctgggtagggactccttcagtctctgaagcagtctgcaggccccacccaccacctggtcacacctggagcacctgcagaccctcctccctcacagaggacagagaggaaagtgctccccctggggcagagggcagtggccactgcaaaatggtctctggctgccctggttggaggctgcagacaggggaggttgtggaagatttgtgggtgcagcagggttcaacagggccagctgagacctgccacgaagatcacccctacacaaacacacacacacatgctcaacatacatgcacacacatgtgcagctgtgcgcctactcagatgcttgcatacacacacgtgtgtgcacgtgggcatatacacactgcacatgtactcacacatgcacacatgtacgtgcacacgtgtctgcatatgggaacttggcaggtcctaggatacagtagcagagtctggggtgggtctgggggcagctgggctcgtattttctgtctggtctctgtgggagtcattggggggcacaggggtgtgtgcttgatgtgtgtctgtgtgtggccgcttcacccagctgccaggcccacctgcaggtgatcccgttgccttggactcatgggacagagggcccagaggcatagctggctgcccacccggcctgaacagcgggggcccatgcacgcagcccgcctctggaggagaacagggcatggctgtgagagcctggcccgggtgcgtggcatgtgtggctgtggcgagctttccgtgtgccgtgtgtggcgtctgcacggggcaggaggctgtgctgtgcctggctggaccagggtcacctgagggcctggcctctggctgctgggaacgtgggttggggagcacccagcgtgcatgctgctgctccctcaggaccgagctgctgggccccaggagagggttgggacaagcccagctgacggccaccacatggaagctttgagcatcggccggagccaggggttggggtgtgcatcgcatgaggcagagcccagggccaggggctcgaggctgcgccgtcctgtctttcggtcccatgcctctgccatttgtctgtctgcatctcctgtctgtctcctctgtacccatgggaatagaggacgcccagccccgggggcctgggacacccacccgccaggactttaacttttcttttcctccctgccttctccctccgatttctcttgatgccagtgccactcccctccttggcttcttctccatgcaccacctcctcactctccctcttgccttttatatttattttcttctttctgttttttctgtgtgcaccatcccatggggctgtgacagaggagaaggggccggccacgtgggaataacctcagtaccatctcagacaccagccccatgaagcgttcagcctccgtgctgggccccaaggcccgacgcctggacgattactcgctggagcgggtcccgcccgaggagaaccagcggcaccaccagcggcgccgcgaccgcagccaccgcgcctctgagcgctccctgggccgctacaccgatgtggacacaggcttggggacagacctgagcatgaccacccaatccggggacctgccgtcgaaggagcgggaccaggagcggggccggcccaaggatcggaagcatcgacagcaccaccaccaccacca

SEQ ID NO: 2654 - DNA, 1034 bp, Homo sapiens
  source 1..1034: mol_type = unassigned DNA; mol_type = unassigned DNA
tccttcatcttcctctgctcgtttctgatgctgaatctctttgtcgccgtcatcatggacaactttgagtacctcacccgagactcctccatcctgggcccccaccacctggatgagtacgtgcgtgtctgggccgagtatgaccccgcagcttgcggcttctgcggatggacctgcccgtcgcagatgacaacaccgtccacttcaattccaccctcatggctctgatccgcacagccctggacatcaagattgccaagggaggagccgacaaacagcagatggacgctgagctgcggaaggagatgatggcgatttggcccaatctgtcccagaagacgctagacctgctggtcacacctcacaagtccacggacctcaccgtggggaagatctacgcagccatgatgatcatggagtactaccggcagagcaaggccaagaagctgcaggccatgcgcgaggagcaggaccggacacccctcatgttccagcgcatggagcccccgtccccaacgcaggaagggggacctggccagaacgccctcccctccacccagctggacccaggaggagccctgatggctcacgaaagcggcctcaaggagagcccgtcctgggtgacccagcgtgcccaggagatgttccagaagacgggcacatggagtccggaacaaggcccccctaccgacatgcccaacagccagcctaactctcagtccgtggagatgcgagagatgggcagagatggctactccgacagcgagcactacctccccatggaaggccagggccgggctgcctccatgccccgcctccctgcagagaaccagaccatctcagacaccagccccatgaagcgttcagcctccgtgctgggccccaaggcccgacgcctggacgattactcgctggagcgggtcccgcccgaggagaaccagcggcaccaccagcggcgccgcgaccgcagccaccgcgcctctgagcgctccctgggccgctacaccgatgtggacacaggcttggggacagac

SEQ ID NO: 2655 - DNA, 1378 bp, Homo sapiens
  source 1..1378: mol_type = unassigned DNA; mol_type = unassigned DNA
gatttcgccatcagcgccaagccgctgacccgacacatgccgcagaacaagcagagcttccagtaccgcatgtggcagttcgtggtgtctccgcctttcgagtacacgatcatggccatgatcgccctcaacaccatcgtgcttatgatgaagttctatggggcttctgttgcttatgaaaatgccctgcgggtgttcaacatcgtcttcacctccctcttctctctggaatgtgtgctgaaagtcatggcttttgggattctgaattatttccgcgatgcctggaacatcttcgactttgtgactgttctgggcagcatcaccgatatcctcgtgactgagtttgggaatccgaataacttcatcaacctgagctttctccgcctcttccgagctgcccggctcatcaaacttctccgtcagggttacaccatccgcattcttctctggacctttgtgcagtccttcaaggccctgccttatgtctgtctgctgatcgccatgctcttcttcatctatgccatcattgggatgcaggtgtttggtaacattggcatcgacgtggaggacgaggacagtgatgaagatgagttccaaatcactgagcacaataacttccggaccttcttccaggccctcatgcttctcttccggagtgccaccggggaagcttggcacaacatcatgctttcctgcctcagcgggaaaccgtgtgataagaactctggcatcctgactcgagagtgtggcaatgaatttgcttatttttactttgtttccttcatcttcctctgctcgtttctgatgctgaatctctttgtcgccgtcatcatggacaactttgagtacctcacccgagactcctccatcctgggcccccaccacctggatgagtacgtgcgtgtctgggccgagtatgaccccgcagcttgcggtcggattcattataaggatatgtacagtttattacgagtaatatctccccctctcggcttaggcaagaaatgtcctcatagggttgcttgcaagcggcttctgcggatggacctgcccgtcgcagatgacaacaccgtccacttcaattccaccctcatggctctgatccgcacagccctggacatcaagattgccaagggaggagccgacaaacagcagatggacgctgagctgcggaaggagatgatggcgatttggcccaatctgtcccagaagacgctagacctgctggtcacacctcacaagtccacggacctcaccgtggggaagatctacgcagccatgatgatcatggagtactaccggcagagcaaggccaagaagctgcaggccatgcgcgaggagcaggaccggacacccctcatgttccagcgcatggagc

SEQ ID NO: 2656 - DNA, 1516 bp, Homo sapiens
  source 1..1516: mol_type = unassigned DNA; mol_type = unassigned DNA
gttcgagaccagcttgaccaacatggtgaaactccgtctctactaaaaatacaaaaaattagccaggcatggtggtgcatgtctgtaatcccagctactcgggaagctgagacaggagaattgcttgaacccaggagtcggaggttgcagtgagccaagctcgtgccactgcactccagcctgggcaacagagcaagactctgtctaaaaaaaaaaaaaaaacacacacacacacacacaacaaccaggtgaggcaagtactcttgctatcatctccatttcacagatggagaaactgagttactaagtggtagagtaacctaagtcatgcagccgataactgggagacaagattgggacccaggtcgcccagctgttctccatgccgggctgtctcctgcacagctgctccatggtcctggccccaccgaaaaccagagcccacaaggtcattccagcagcactgcccagggcctcctctgggccaggccgttggggaactggagaccccatggggaccagaaagattggggtctcgttctcgggagcctatggctttgcagctgacccagagtccagctgacacccaggcaggcagtcagggtctgtctacacccccattgcaggaggagccgacaaacagcagatggacgctgagctgcggaaggagatgatggcgatttggcccaatctgtcccagaagacgctagacctgctggtcacacctcacaagtgtaagagctgagcccagccctgggatccaatccaccaggacagatggagggggagggaaaggggaggcctggggagagtgttggcctgggctggtatacacagggacccaggacaagggccccaaagaggcctgcccttggtgagctcaccgtgtgtgtgcccccagccacggacctcaccgtggggaagatctacgcagccatgatgatcatggagtactaccggcagagcaaggccaagaagctgcaggccatgcgcgaggagcaggtgcgctgttcgccgctctggggacatctgggctggggacagtggcttgcatgtcaccacgggaaccaactggaatatgagggtggctgagccccagggcaggtccctgaaaagtaggggctgtgcacagcagctcacacctgcaatctcagtgctttgagaggccagggcagagggatcgtttgagaccaggatgagaccaccctgggcaacacagtgagactccatctctacaaaataaaacattagccaggcatggtggtgcacacctgtagtcccagctatttaggaggccaagatgggaggatcacttgaggccaggagtgggagaccagtctgggcaacatagaaagacccatatctctacaaaaaaaaaataaaattagctgcatgtggcgccatgcacctgtggtcccagctacttgggaggctgaggcaggagaatcacttgaacctgggaggtggaggttgcagcaagccaagatcaagccactgcactccagcccgggtgata

SEQ ID NO: 2657 - DNA, 2548 bp, Homo sapiens
  source 1..2548: mol_type = unassigned DNA; mol_type = unassigned DNA
aagaagttcagggatgacctttaaagattctccccacccaaaaagtattaccccatcatcctattctcccatccaccttgatcttccctgcgtccctatccatcaatgctatttgtacctgccccgtgttgccacctcattcctttccttcctctgtgcacccctcctcacctaacctatatgtctcccctccttctcaatcaaagccggggacaaggttgtcccaccagcatctcagacaatgagcctctcctggcacctgtcgctctgtgcccctccctgccgcccccccccccccccccggttttcctcaagtcgcttctctcagtctctgcttagatgaatgtgtgcgcatgtgcaagagagggagggcgagcccttcctctcctggtctttgtgcaggaccaccatgggtccataagacaactttgtgcaaatttgaaaaaggcaccctttccacagaacatgcctgttggaaaattgttgcaatctaccaatgtggtgagaacaagacactttttttctatcacctgggaagctgttatatttaatatacaaatcgggggctgggcgtggtggctcatgcctgtaatcctagtgctttgggaggctgagacgggaggatcacttgagcccagttcgagactagcctgggcaacatagcgagaccccatctctacaaaaagaaaaaatattttaattaataaataagtacataaatctatcatttccaagatgggagccctttgtgcggtgtacaacctgcacaactgtgcacagtggcccagtctatgtgtgtttctctatttcccacctccttccccaccctacccccagtgtcccctccagtgtcctgctctggatttaccatacccctccccatcttcaactctgtgtttcctgcccacttgtgtctgaatccccacccaagttgccctcaccccccttctctgtgccacttcagcctgggctggtgcacaccagcccagcatcctctcccatgccaccaagcatggtggacagagcccctgcctgggacatggggaatcttttcttccctgggctggaagggagtgcccctcaccccttccccctgccattgcacagagagccaagatctggacatgcccctgagatacacttcccacggagctatgaatgagtctcgagattccgtctgcatgcgcccctgtctgtgctgttctgtgtcacagcctcgctgcatgcctgcgaggggcctgccccgtcagtggggggctgcctgcctgctgcttctcagaggaatgatgtggtctgtgcccatctgctctgtcctggtctgggccaagccagggattgggtgtggggagccagtggcaccccccaccagcggctgtggtcctggccccctcagccttggctgttgcatgcactgctcaaatccagcttgtgctctttttctttggggtcagactgaaacggggccatccagaagaactctggggcagggcgggggtggggcaagggttgaggcaaaccctggaaatgccagctctcaggtcaagcaggtgggggaaaaaaggagagggcaggggaccagaagtacaagagagccttttgtgccctccctgcgggccaccaagagaaactgagtactgggacaggtaacctaagtaagagacacctcagccgccacagctttcagagttcttcctgggactccctgggtaggggcgggcgcggctcacgggagacccaggagggatgcctgggaatgactgcgcttgccttgggttttctgtagcggcttctgcggatggacctgcccgtcgcagatgacaacaccgtccacttcaattccaccctcatggctctgatccgcacagccctggacatcaagattgccaagggaggagccgacaaacagcagatggacgctgagctgcggaaggagatgatggcgatttggcccaatctgtcccagaagacgctagacctgctggtcacacctcacaagtccacggacctcaccgtggggaagatctacgcagccatgatgatcatggagtactaccggcagagcaaggccaagaagctgcaggccatgcgcgaggagcaggtgcgctgttcgccgctctggggacatctgggctggggacagtggcttgcatgtcaccacgggaaccaactggaatatgagggtggctgagccccagggcaggtccctgaaaagtaggggctgtgcacagcagctcacacctgcaatctcagtgctttgagaggccagggcagagggatcgtttgagaccaggatgagaccaccctgggcaacacagtgagactccatctctacaaaataaaacattagccaggcatggtggtgcacacctgtagtcccagctatttaggaggccaagatgggaggatcacttgaggccaggagtgggagaccagtctgggcaacatagaaagacccatatctctacaaaaaaaaaataaaattagctgcatgtggcgccatgcacctgtggtcccagctacttgggaggctgaggcaggagaatcactt

SEQ ID NO: 2658 - DNA, 517 bp, Homo sapiens
  source 1..517: mol_type = unassigned DNA; mol_type = unassigned DNA
ggcccaatctgtcccagaagacgctagacctgctggtcacacctcacaagtccacggacctcaccgtggggaagatctacgcagccatgatgatcatggagtactaccggcagagcaaggccaagaagctgcaggccatgcgcgaggagcaggtgcgctgttcgccgctctggggacatctgggctggggacagtggcttgcatgtcaccacgggaaccaactggaatatgagggtggctgagccccagggcaggtccctgaaaagtaggggctgtgcacagcagctcacacctgcaatctcagtgctttgagaggccagggcagagggatcgtttgagaccaggatgagaccaccctgggcaacacagtgagactccatctctacaaaataaaacattagccaggcatggtggtgcacacctgtagtcccagctatttaggaggccaagatgggaggatcacttgaggccaggagtgggagaccagtctgggcaacatagaaagacccatatctct

SEQ ID NO: 2659 - DNA, 459 bp, Homo sapiens
  source 1..459: mol_type = unassigned DNA; mol_type = unassigned DNA
tgccctccctgcgggccaccaagagaaactgagtactgggacaggtaacctaagtaagagacacctcagccgccacagctttcagagttcttcctgggactccctgggtaggggcgggcgcggctcacgggagacccaggagggatgcctgggaatgactgcgcttgccttgggttttctgtagcggcttctgcggatggacctgcccgtcgcagatgacaacaccgtccacttcaattccaccctcatggctctgatccgcacagccctggacatcaagattgccaagggaggagccgacaaacagcagatggacgctgagctgcggaaggagatgatggcgatttggcccaatctgtcccagaagacgctagacctgctggtcacacctcacaagtgtaagagctgagcccagccctgggatccaatccaccaggacagatggagggggagggaaag

SEQ ID NO: 2660 - DNA, 740 bp, Homo sapiens
  source 1..740: mol_type = unassigned DNA; mol_type = unassigned DNA
tctctgcatctttctctctctattttttcggctcgtgtggatttcttttttctttcttctgtttctccccacctctcttcctttggttctctgttcccattcccgttttgtttttttgtttttgtttttgtttttttcattttcggtgctgccaggggccgcatgccttacctggacatgtatcagatgctgagacacatgtctccgcccctgggtctggggaagaagtgtccggccagagtggcttacaaggtagactacccttgccgaccaccgacgtccaggcactgggtttttttttcttcttcttcttctttttttttagtgctgaccagaaacacccggccgactctctttttccaacgtttctcttcttttttgtttttgattcttttttttcttttctcgagtcaactgatcatgaccatcccttgattctaagcagcacactgtgtccgtcctttctgatgagtgtcttcgtgttttgagactccattatggccgacatgccggggggagggggaggggagcgcccaggtccccttgcacctggtctcccaggtaccaaattggaaacaaacacgcttcttcagggagtcaaaacccatgcttcccacttctgcccacccagagcggcccccatgcccaggctggggcaggcgccttgcagagaggggctttagcccccgaaagcaggcgaggtcccgggtccccgcccctgccacgcacacctgaagctg

SEQ ID NO: 2661 - DNA, 701 bp, Homo sapiens
  source 1..701: mol_type = unassigned DNA; mol_type = unassigned DNA
acttctccgtcagggttacaccatccgcattcttctctggacctttgtgcagtccttcaaggccctgccttatgtctgtctgctgatcgccatgctcttcttcatctatgccatcattgggatgcaggtgtttggtaacattggcatcgacgtggaggacgaggacagtgatgaagatgagttccaaatcactgagcacaataacttccggaccttcttccaggccctcatgcttctcttccggagtgccaccggggaagcttggcacaacatcatgctttcctgcctcagcgggaaaccgtgtgataagaactctggcatcctgactcgagagtgtggcaatgaatttgcttatttttactttgtttccttcatcttcctctgctcgtttctgatgctgaatctctttgtcgccgtcatcatggacaactttgagtacctcacccgagactcctccatcctgggcccccaccacctggatgagtacgtgcgtgtctgggccgagtatgaccccgcagcttgcggtcggattcattataaggatatgtacagtttattacgagtaatatctccccctctcggcttaggcaagaaatgtcctcatagggttgcttgcaaggtttgacttccactaaaacctgctagcatccatggaatgagtgtggcttggggttcttcaatatatatatttcatatatata

SEQ ID NO: 2662 - DNA, 728 bp, Homo sapiens
  source 1..728: mol_type = unassigned DNA; mol_type = unassigned DNA
cagcatcaccgatatcctcgtgactgagtttgggaatccggcctggtcccgtgctactccacccagccccagaagctgagaagccatccctgagaggggggaaaagggccccaaatgcatcttctccgactcagcgggcagcgaggactcaccctgcagccgaacagtcccagctccctcccgtcctccccattcccgctcgccaaggggaataacttcatcaacctgagctttctccgcctcttccgagctgcccggctcatcaaacttctccgtcagggttacaccatccgcattcttctctggacctttgtgcagtccttcaaggtgtttggtaacattggcatcgacgtggaggacgaggacagtgatgaagatgagttccaaatcactgagcacaataacttccggaccttcttccaggccctcatgcttctcttccggagtgccaccggggaagcttggcacaacatcatgctttcctgcctcagcgggaaaccgtgtgataagaactctggcatcctgactcgagagtgtggcaatgaatttgcttatttttactttgtttccttcatcttcctctgctcgtttctgatgctgaatctctttgtcgccgtcatcatggacaactttgagtacctcacccgagactcctccatcctgggcccccaccacctggatgagtacgtgcgtgtctgggccgagtatgaccccgcagcttgcggtcg

SEQ ID NO: 2663 - DNA, 806 bp, Homo sapiens
  source 1..806: mol_type = unassigned DNA; mol_type = unassigned DNA
tatgaaaatgccctgcgggtgttcaacatcgtcttcacctccctcttctctctggaatgtgtgctgaaagtcatggcttttgggattctgaattatttccgcgatgcctggaacatcttcgactttgtgactgttctgggcagcatcaccgatatcctcgtgactgagtttgggaataacttcatcaacctgagctttctccgcctcttccgagctgcccggctcatcaaacttctccgtcagggttacaccatccgcattcttctctggacctttgtgcagtccttcaaggccctgccttatgtctgtctgctgatcgccatgctcttcttcatctatgccatcattgggatgcaggtgtttggtaacattggcatcgacgtggaggacgaggacagtgatgaagatgagttccaaatcactgagcacaataacttccggaccttcttccaggccctcatgcttctcttccggagtgccaccggggaagcttggcacaacatcatgctttcctgcctcagcgggaaaccgtgtgataagaactctggcatcctgactcgagagtgtggcaatgaatttgcttatttttactttgtttccttcatcttcctctgctcgtttctgatgctgaatctctttgtcgccgtcatcatggacaactttgagtacctcacccgagactcctccatcctgggcccccaccacctggatgagtacgtgcgtgtctgggccgagtatgaccccgcagcttggtcacagcaattggatgctgtccccaaggcctctattccacaagccccccccca

SEQ ID NO: 2664 - DNA, 1910 bp, Homo sapiens
  source 1..1910: mol_type = unassigned DNA; mol_type = unassigned DNA
atcaacacgattaaatccctccgagtcctccgggtgctacgacctcttaaaaccatcaagcggctgccaaagctcaaggctgtgtttgactgtgtggtgaactcacttaaaaacgtcttcaacatcctcatcgtctacatgctattcatgttcatcttcgccgtggtggctgtgcagctcttcaaggggaaattcttccactgcactgacgagtccaaagagtttgagaaagattgtcgaggcaaatacctcctctacgagaagaatgaggtgaaggcgcgagaccgggagtggaagaagtatgaattccattacgacaatgtgctgtgggctctgctgaccctcttcaccgtgtccacgggagaaggctggccacaggtcctcaagcattcggtggacgccacctttgagaaccagggccccagccccgggtaccgcatggagatgtccattttctacgtcgtctactttgtggtgttccccttcttctttgtcaatatctttgtggccttgatcatcatcaccttccaggagcaaggggacaagatgatggaggaatacagcctggagaaaaatgagagggcctgcattgatttcgccatcagcgccaagccgctgacccgacacatgccgcagaacaagcagagcttccagtaccgcatgtggcagttcgtggtgtctccgcctttcgagtacacgatcatggccatgatcgccctcaacaccatcgtgcttatgatgaagttctatggggcttctgttgcttatgaaaatgccctgcgggtgttcaacatcgtcttcacctccctcttctctctggaatgtgtgctgaaagtcatggcttttgggattctgaattatttccgcgatgcctggaacatcttcgactttgtgactgttctgggcagcatcaccgatatcctcgtgactgagtttgggaataacttcatcaacctgagctttctccgcctcttccgagctgcccggctcatcaaacttctccgtcagggttacaccatccgcattcttctctggacctttgtgcagtccttcaaggccctgccttatgtctgtctgctgatcgccatgctcttcttcatctatgccatcattgggatgcaggtgtttggtaacattggcatcgacgtggaggacgaggacagtgatgaagatgagttccaaatcactgagcacaataacttccggaccttcttccaggccctcatgcttctcttccggagtgccaccggggaagcttggcacaacatcatgctttcctgcctcagcgggaaaccgtgtgataagaactctggcatcctgactcgagagtgtggcaatgaatttgcttatttttactttgtttccttcatcttcctctgctcgtttctgatgctgaatctctttgtcgccgtcatcatggacaactttgagtacctcacccgagactcctccatcctgggcccccaccacctggatgagtacgtgcgtgtctgggccgagtatgaccccgcagcttggtaagaagtcaccccgaatcctccagccacaatactcacctctccctggaactggaacacgggctaggtcaggccccagactctggagcactgaactcctggggtcctagcaggggtctcacaggttcagtcaggagagaagatataagaatcatcacccttgcataccccagattaaacacgtagggtgccaaccctgcccaaaccctggactttctgggaaatgagggagggcgtcaaccatgagatgtcctgaagagccctctcctcctacgagtctctcctgtctctcactgtgaagtctccagatggtgaggatgcattagccaggctccagggagaaaaccaacagcatcccagcctcagttctcttgagagtgtggggaggagggc

SEQ ID NO: 2665 - DNA, 871 bp, Homo sapiens
  source 1..871: mol_type = unassigned DNA; mol_type = unassigned DNA
gtggagctgaagcagggtctggaggccccctctggggccaggccaatcatgggaaggcccccaggagttcccagggagggagactcagcacagatgatgtcgaacagcctttaccgcagcccttcgaacaaccataactgtcccgggcactccgctgatgggcaactgtgcctctaacatgcacccggccagcctagggggccgggaaccaagccctctgttggcatctctgtcttgtgggtccccattctagaattatttccgcgatgcctggaacatcttcgactttgtgactgttctgggcagcatcaccgatatcctcgtgactgagtttgggaatccgaataacttcatcaacctgagctttctccgcctcttccgagctgcccggctcatcaaacttctccgtcagggttacaccatccgcattcttctctggacctttgtgcagtccttcaaggccctgccttatgtctgtctgctgatcgccatgctcttcttcatctatgccatcattgggatgcaggtgtttggtaacattggcatcgacgtggaggacgaggacagtgatgaagatgagttccaaatcactgagcacaataacttccggaccttcttccaggccctcatgcttctcttccggagtgccaccggggaagcttggcacaacatcatgctttcctgcctcagcgggaaaccgtgtgataagaactctggcatcctgactcgagagtgtggcaatgaatttgcttatttttactttgtttccttcatcttcctctgctcgtttctgatgctgaatctctttgtcgccgtcatcatggacaactttgagtacctcacccgagactcctccatcctgggcccccac

SEQ ID NO: 2666 - DNA, 896 bp, Homo sapiens
  source 1..896: mol_type = unassigned DNA; mol_type = unassigned DNA
gaagttctatggggcttctgttgcttatgaaaatgccctgcgggtgttcaacatcgtcttcacctccctcttctctctggaatgtgtgctgaaagtcatggcttttgggattctgaattatttccgcgatgcctggaacatcttcgactttgtgactgttctgggcagcatcaccgatatcctcgtgactgagtttggggcctggtcccgtgctactccacccagccccagaagctgagaagccatccctgagaggggggaaaagggccccaaatgcatcttctccgactcagcgggcagcgaggactcaccctgcagccgaacagtcccagctccctcccgtcctccccattcccgctcgccaaggggaataacttcatcaacctgagctttctccgcctcttccgagctgcccggctcatcaaacttctccgtcagggttacaccatccgcattcttctctggacctttgtgcagtccttcaaggccctgccttatgtctgtctgctgatcgccatgctcttcttcatctatgccatcattgggatgcaggtgtttggtaacattggcatcgacgtggaggacgaggacagtgatgaagatgagttccaaatcactgagcacaataacttccggaccttcttccaggccctcatgcttctcttccggagtgccaccggggaagcttggcacaacatcatgctttcctgcctcagcgggaaaccgtgtgataagaactctggcatcctgactcgagagtgtggcaatgaatttgcttatttttactttgtttccttcatcttcctctgctcgtttctgatgctgaatctctttgtcgccgtcatcatggacaactttgagtacctcacccgagactcctccatcctgggccccca

SEQ ID NO: 2667 - DNA, 656 bp, Homo sapiens
  source 1..656: mol_type = unassigned DNA; mol_type = unassigned DNA
ttctgaattatttccgcgatgcctggaacatcttcgactttgtgactgttctgggcagcatcaccgatatcctcgtgactgagtttgggaatccggcctggtcccgtgctactccacccagccccagaagctgagaagccatccctgagaggggggaaaagggccccaaatgcatcttctccgactcagcgggcagcgaggactcaccctgcagccgaacagtcccagctccctcccgtcctccccattcccgctcgccaaggggaataacttcatcaacctgagctttctccgcctcttccgagctgcccggctcatcaaacttctccgtcagggttacaccatccgcattcttctctggacctttgtgcagtccttcaaggccctgccttatgtctgtctgctgatcgccatgctcttcttcatctatgccatcattgggatgcaggtgtttggtaacattggcatcgacgtggaggacgaggacagtgatgaagatgagttccaaatcactgagcacaataacttccggaccttcttccaggccctcatgcttctcttccggagtgccaccggggaagcttggcacaacatcatgctttcctgcctcagcgggaaaccgtgtgataagaactctggcatcctgactcgagagt

SEQ ID NO: 2668 - DNA, 637 bp, Homo sapiens
  source 1..637: mol_type = unassigned DNA; mol_type = unassigned DNA
ctgctgaccctcttcaccgtgtccacgggagaaggctggccacaggtcctcaagcattcggtggacgccacctttgagaaccagggccccagccccgggtaccgcatggagatgtccattttctacgtcgtctactttgtggtgttccccttcttctttgtcaatatctttgtggccttgatcatcatcaccttccaggagcaaggggacaagatgatggaggaatacagcctggagaaaaatgagaataacttcatcaacctgagctttctccgcctcttccgagctgcccggctcatcaaacttctccgtcagggttacaccatccgcattcttctctggacctttgtgcagtccttcaaggccctgccttatgtctgtctgctgatcgccatgctcttcttcatctatgccatcattgggatgcaggtgtttggtaacattggcatcgacgtggaggacgaggacagtgatgaagatgagttccaaatcactgagcacaataacttccggaccttcttccaggccctcatgcttctcttccggagtgccaccggggaagcttggcacaacatcatgctttcctgcctcagcgggaaaccgtgtgataagaactctggcatcctgactcgagagt

SEQ ID NO: 2669 - DNA, 567 bp, Homo sapiens
  source 1..567: mol_type = unassigned DNA; mol_type = unassigned DNA
attgcattaatagtgctttctctctccctccttatttggggtctggcttgcttttttcctgttggttggcttcatgtaggggcctctgtgagtggtgacagctctgagccttttggggtgggtggatggtcacccctcttcctccatctccccagaataacttcatcaacctgagctttctccgcctcttccgagctgcccggctcatcaaacttctccgtcagggttacaccatccgcattcttctctggacctttgtgcagtccttcaaggccctgccttatgtctgtctgctgatcgccatgctcttcttcatctatgccatcattgggatgcaggtgtttggtaacattggcatcgacgtggaggacgaggacagtgatgaagatgagttccaaatcactgagcacaataacttccggaccttcttccaggccctcatgcttctcttccggtgagaaggggacctgctctgataattctgtttccgtggggtggggtgcctgccttcatccttctgttcccatagaggatgtaccctcctcttccaatgcaagacgtgccctc

SEQ ID NO: 2670 - DNA, 1975 bp, Homo sapiens
  source 1..1975: mol_type = unassigned DNA; mol_type = unassigned DNA
gataacccttccctccaggatcttcatgaggagctcagtgatgtcatttataaagcccctggggtctcgggagccctcaaaaatgctggagagacaggccacagctctgaagagcagccccagccctgtggagctgaagcagggtctggaggccccctctggggccaggccaatcatgggaaggcccccaggagttcccagggagggagactcagcacagatgatgtcgaacagcctttaccgcagcccttcgaacaaccataactgtcccgggcactccgctgatgggcaactgtgcctctaacatgcacccggccagcctagggggccgggaaccaagccctctgttggcatctctgtcttgtgggtccccattctagaattatttccgcgatgcctggaacatcttcgactttgtgactgttctgggcagcatcaccgatatcctcgtgactgagtttggggtaagtctccctccagcttctctctgggtgactctgggctggacgaggcaggcggcagggggcgggggagcggtcccagaggcagtgtgtcccggaagccatagctgcttgagccagcacttggccatgaccagagagggagaactggggccccggggacaagggcagcccctcaggagggcattgtggggagatgggggtaaccaaagcttggctgtagggccagcactgaggggtgggctttcctgcatcctggcctaggaattaataatgcagatgagtacactgagggaactgagacactcaaaagctctgaaagctgagccggctcccaaacaccaccctatgtcaggagcccagaaagaatgggtttcaagtcaattctgtttgaaccaaccctctcctagttagtgggcaggagagagccacagccctcaggccagtgtggggacaccactcccagggccatagaggggtccccagggtgtcttccctcctctagccccgggcctgggagactctcaacatgggagtctctggacctctctgtggtggccccacaggccacattgcccttctccttttctggaagactcagggccccagaggtcctgtcctagaccctctccttggccatctgccaatgagcccaggcttggggtccctcaggagattggggggagggtagaagatccttgcagggggaagcaatggtcaaaaaagggtgtcaaagccaagggtcaagggtgataccaatgtcatcttactaacaataaaaataacaatagctcacgagaatcgcagccttgctgtgtgccagggaactgtgccaagtggtttacgtggattggctcagggtagaggtcttggtctcagctcgtaagagaattccctcggagggttcaactgaaggcacccaaatgcagacctcactggtggaggggaagggaagggtacccacaagggtggcaaggtgtccagcgaccacccaccgtggggagctgtcacctgcccaggtgctgaagtggggagggaacctgagccggaggccaggagaagccaccaagtgggagctgtcctgtcaatgtggagagacagagaccagggcccaagcaggcagagagcaataggggagaaacaccccaacctttctctcccctcatcccttatctcctgccagagcctcccatggcccaaagtaaaccggaagcaagctgaatatgatgctcagagcaggcagggaagtcaggagaatagatctgggtgtggtcgggcctgaggaagagggtgttgcctcatttcacagatgggaaaactgacctcagctgggcacggtggctcatgcctgtaatcccagcactttgggaggccgaagccggcggatcacctgaggccaggagttcaagaccagcctggccaacatggtgaaaccccatctctactgacaatacaaaaaaattagccaggtgtggtggtgcatgcctgtaatcccagctactcgggaggctgag

SEQ ID NO: 2671 - DNA, 2829 bp, Homo sapiens
  source 1..2829: mol_type = unassigned DNA; mol_type = unassigned DNA
aaccacaccgtcgtacaagtgaacaaaaacgccaacccagacccactgccaaaaaaagaggaagagaagaaggaggaggaggaagacgaccgtggggaagacggccctaagccaatgcctccctatagctccatgttcatcctgtccacgaccaacccccttcgccgcctgtgccattacatcctgaacctgcgctactttgagatgtgcatcctcatggtcattgccatgagcagcatcgccctggccgccgaggaccctgtgcagcccaacgcacctcggaacaacgtgctgcgatactttgactacgtttttacaggcgtctttacctttgagatggtgatcaagatgattgacctggggctcgtcctgcatcagggtgcctacttccgtgacctctggaatattctcgacttcatagtggtcagtggggccctggtagcctttgccttcactggcaatagcaaaggaaaagacatcaacacgattaaatccctccgagtcctccgggtgctacgacctcttaaaaccatcaagcggctgccaaagctcaaggctgtgtttgactgtgtggtgaactcacttaaaaacgtcttcaacatcctcatcgtctacatgctattcatgttcatcttcgccgtggtggctgtgcagctcttcaaggggaaattcttccactgcactgacgagtccaaagagtttgagaaagattgtcgaggcaaatacctcctctacgagaagaatgaggtgaaggcgcgagaccgggagtggaagaagtatgaattccattacgacaatgtgctgtgggctctgctgaccctcttcaccgtgtccacgggagaaggctggccacaggtcctcaagcattcggtggacgccacctttgagaaccagggccccagccccgggtaccgcatggagatgtccattttctacgtcgtctactttgtggtgttccccttcttctttgtcaatatctttgtggccttgatcatcatcaccttccaggagcaaggggacaagatgatggaggaatacagcctggagaaaaatgagagggcctgcattgatttcgccatcagcgccaagccgctgacccgacacatgccgcagaacaagcagagcttccagtaccgcatgtggcagttcgtggtgtctccgcctttcgagtacacgatcatggccatgatcgccctcaacaccatcgtgcttatgatgaagttctatggggcttctgttgcttatgaaaatgccctgcgggtgttcaacatcgtcttcacctccctcttctctctggaatgtgtgctgaaagtcatggcttttgggattctgaattatttccgcgatgcctggaacatcttcgactttgtgactgttctgggcagcatcaccgatatcctcgtgactgagtttggggtaagtctccctccagcttctctctgggtgactctgggctggacgaggcaggcggcagggggcgggggagcggtcccagaggcagtgtgtcccggaagccatagctgcttgagccagcacttggccatgaccagagagggagaactggggccccggggacaagggcagcccctcaggagggcattgtggggagatgggggtaaccaaagcttggctgtagggccagcactgaggggtgggctttcctgcatcctggcctaggaattaataatgcagatgagtacactgagggaactgagacactcaaaagctctgaaagctgagccggctcccaaacaccaccctatgtcaggagcccagaaagaatgggtttcaagtcaattctgtttgaaccaaccctctcctagttagtgggcaggagagagccacagccctcaggccagtgtggggacaccactcccagggccatagaggggtccccagggtgtcttccctcctctagccccgggcctgggagactctcaacatgggagtctctggacctctctgtggtggccccacaggccacattgcccttctccttttctggaagactcagggccccagaggtcctgtcctagaccctctccttggccatctgccaatgagcccaggcttggggtccctcaggagattggggggagggtagaagatccttgcagggggaagcaatggtcaaaaaagggtgtcaaagccaagggtcaagggtgataccaatgtcatcttactaacaataaaaataacaatagctcacgagaatcgcagccttgctgtgtgccagggaactgtgccaagtggtttacgtggattggctcagggtagaggtcttggtctcagctcgtaagagaattccctcggagggttcaactgaaggcacccaaatgcagacctcactggtggaggggaagggaagggtacccacaagggtggcaaggtgtccagcgaccacccaccgtggggagctgtcacctgcccaggtgctgaagtggggagggaacctgagccggaggccaggagaagccaccaagtgggagctgtcctgtcaatgtggagagacagagaccagggcccaagcaggcagagagcaataggggagaaacaccccaacctttctctcccctcatcccttatctcctgccagagcctcccatggcccaaagtaaaccggaagcaagctgaatatgatgctcagagcaggcagggaagtcaggagaatagatctgggtgtggtcgggcctgaggaagagggtgttgcctcatttcacagatgggaaaactgacctcagctgggcacggtggctcatgcctgtaatcccagcactttgggaggccgaagccggcggatcacctgaggccaggagttcaagaccagcc

SEQ ID NO: 2672 - DNA, 1245 bp, Homo sapiens
  source 1..1245: mol_type = unassigned DNA; mol_type = unassigned DNA
aatcagccaacccccttgtgctgggtctcagggacacccaatacagctgctcaggcccagccagatggcaaagggccctcaaccaaccctgggaccagaaccacaaaaagccacgtacttactggctcccgagcccaagcttaacaggtgaaatggaccactcttcaccaggaagggcagggctgtgccaagctcaccccagacttctaggcctgggagggtagggtcccatggagctgtgggctgccccctacccaacctgacctctgcttcctctcttcccttcttcccacctaaacattcctccacagtggcaatagcaaaggaaaagacatcaacacgattaaatccctccgagtcctccgggtgctacgacctcttaaaaccatcaagcggctgccaaagctcaaggctgtgtttgactgtgtggtgaactcacttaaaaacgtcttcaacatcctcatcgtctacatgctattcatgttcatcttcgccgtggtggctgtgcagctcttcaaggggaaattcttccactgcactgacgagtccaaagagtttgagaaagattgtcgaggcaaatacctcctctacgagaagaatgaggtgaaggcgcgagaccgggagtggaagaagtatgaattccattacgacaatgtgctgtgggctctgctgaccctcttcaccgtgtccacgggagaaggctggccacaggtcctcaagcattcggtggacgccacctttgagaaccagggccccagccccgggtaccgcatggagatgtccattttctacgtcgtctactttgtggtgttccccttcttctttgtcaatatctttgtggccttgatcatcatcaccttccaggagcaaggggacaagatgatggaggaatacagcctggagaaaaatgagagggcctgcattgatttcgccatcagcgccaagccgctgacccgacacatgccgcagaacaagcagagcttccagtaccgcatgtggcagttcgtggtgtctccgcctttcgagtacacgatcatggccatgatcgccctcaacaccatcgtgcttatgatgaagttctatggggcttctgttgcttatgaaaatgccctgcgggtgttcaacatcgtcttcacctccctcttctctctggaatgtgtgctgaaagtcatggcttttgggattctgaattatttccgcgatgcctggaacatcttcgactttgtgactgttctgggcagcatc

SEQ ID NO: 2673 - DNA, 1832 bp, Homo sapiens
  source 1..1832: mol_type = unassigned DNA; mol_type = unassigned DNA
tccccccagcctgcccaccccccctcaaccacaccgtcgtacaagtgaacaaaaacgccaacccagacccactgccaaaaaaagaggaagagaagaaggaggaggaggaagacgaccgtggggaagacggccctaagccaatgcctccctatagctccatgttcatcctgtccacgaccaacccccttcgccgcctgtgccattacatcctgaacctgcgctactttgagatgtgcatcctcatggtcattgccatgagcagcatcgccctggccgccgaggaccctgtgcagcccaacgcacctcggaacaacgtgctgcgatactttgactacgtttttacaggcgtctttacctttgagatggtgatcaagatgattgacctggggctcgtcctgcatcagggtgcctacttccgtgacctctggaatattctcgacttcatagtggtcagtggggccctggtagcctttgccttcactggcaatagcaaaggaaaagacatcaacacgattaaatccctccgagtcctccgggtgctacgacctcttaaaaccatcaagcggctgccaaagctcaaggctgtgtttgactgtgtggtgaactcacttaaaaacgtcttcaacatcctcatcgtctacatgctattcatgttcatcttcgccgtggtggctgtgcagctcttcaaggggaaattcttccactgcactgacgagtccaaagagtttgagaaagattgtcgaggcaaatacctcctctacgagaagaatgaggtgaaggcgcgagaccgggagtggaagaagtatgaattccattacgacaatgtgctgtgggctctgctgaccctcttcaccgtgtccacgggagaaggctggccacaggtcctcaagcattcggtggacgccacctttgagaaccagggccccagccccgggtaccgcatggagatgtccattttctacgtcgtctactttgtggtgttccccttcttctttgtcaatatctttgtggccttgatcatcatcaccttccaggagcaaggggacaagatgatggaggaatacagcctggagaaaaatgagagggcctgcattgatttcgccatcagcgccaagccgctgacccgacacatgccgcagaacaagcagagcttccagtaccgcatgtggcagttcgtggtgtctccgcctttcgagtacacgatcatggccatgatcgccctcaacaccatcgtgcttatgatgaagttctatggggcttctgttgcttatgaaaatgccctgcgggtgttcaacatcgtcttcacctccctcttctctctggaatgtgtgctgaaagtcatggcttttgggattctggtaagtaccaccttggggctacagctatgggcttgggagaagcccaagggggaacaatgggtcctggatgatggtctcccaacgtggccccaagaaccccaacctcaagggtggcttcagtatcctgccagtggccacagatcctacttaggcattcttgtgtttgccaaggagtcccagggagacccaacctgtgagtgttaccatatggctgcttatgtatccagttcctcaaaatgatgggagtcatcatggctgggagtctttagcatccattttagagataagaaaactgaaatcaggctgggcgaggtgtctcatggctgtaattccagcactttgggaggccaaggtgggcggatcacctgaggtcgggagttcgagaccagcctgaccaacatggagaaactctgtctctactaaaaatacaaaattagccgggtgtggtggcgcatgcctgtaatcccagctact

SEQ ID NO: 2674 - DNA, 1978 bp, Homo sapiens
  source 1..1978: mol_type = unassigned DNA; mol_type = unassigned DNA
ccactaaactcctagaccaagggcttttttgaaaatagctgtgaccaggtgtagtggctcacacctgtaatcccagcactttgagagggtgaggagggcagattgcttgagctcaggagtttgaaaccagcctgggcaacatggtgaaacctcatctctacaaaaagacaaaacaattagccaggcgcagtggcgtgtgcctgtagtcccagctacttgggaggctgaggtgggaggatggctttagcccaggaggcggaggttgcagtgagccgagatcgtgccactgcactccagccttggtgacagagccagaccctgtctcaaaaaagaaaaaagaaaagctgtgcagaaatgggggtggggaatcagccaacccccttgtgctgggtctcagggacacccaatacagctgctcaggcccagccagatggcaaagggccctcaaccaaccctgggaccagaaccacaaaaagccacgtacttactggctcccgagcccaagcttaacaggtgaaatggaccactcttcaccaggaagggcagggctgtgccaagctcaccccagacttctaggcctgggagggtagggtcccatggagctgtgggctgccccctacccaacctgacctctgcttcctctcttcccttcttcccacctaaacattcctccacagtggcaatagcaaaggaaaagacatcaacacgattaaatccctccgagtcctccgggtgctacgacctcttaaaaccatcaagcggctgccaaagctcaaggctgtgtttgactgtgtggtgaactcacttaaaaacgtcttcaacatcctcatcgtctacatgctattcatgttcatcttcgccgtggtggctgtgcagctcttcaaggggaaattcttccactgcactgacgagtccaaagagtttgagaaagattgtcgaggcaaatacctcctctacgagaagaatgaggtgaaggcgcgagaccgggagtggaagaagtatgaattccattacgacaatgtgctgtgggctctgctgaccctcttcaccgtgtccacgggagaaggctggccacaggtcctcaagcattcggtggacgccacctttgagaaccagggccccagccccgggtaccgcatggagatgtccattttctacgtcgtctactttgtggtgttccccttcttctttgtcaatatctttgtggccttgatcatcatcaccttccaggagcaaggggacaagatgatggaggaatacagcctggagaaaaatgagagggcctgcattgatttcgccatcagcgccaagccgctgacccgacacatgccgcagaacaagcagagcttccagtaccgcatgtggcagttcgtggtgtctccgcctttcgagtacacgatcatggccatgatcgccctcaacaccatcgtgcttatgatgaagttctatggggcttctgttgcttatgaaaatgccctgcgggtgttcaacatcgtcttcacctccctcttctctctggaatgtgtgctgaaagtcatggcttttgggattctggtaagtaccaccttggggctacagctatgggcttgggagaagcccaagggggaacaatgggtcctggatgatggtctcccaacgtggccccaagaaccccaacctcaagggtggcttcagtatcctgccagtggccacagatcctacttaggcattcttgtgtttgccaaggagtcccagggagacccaacctgtgagtgttaccatatggctgcttatgtatccagttcctcaaaatgatgggagtcatcatggctgggagtctttagcatccattttagagataagaaaactgaaatcaggctgggcgaggtgtctcatggctgtaattccagcactttgggaggccaaggtgggcggatcacctgaggtcgggagttcgagaccagcctgaccaacatggagaaactctgtctctactaaa

SEQ ID NO: 2675 - DNA, 2979 bp, Homo sapiens
  source 1..2979: mol_type = unassigned DNA; mol_type = unassigned DNA
cctccccgccttcaaaaaaaaaaaaaagtgaggctgaatcatggacttagtctttatttaaaattttgagccacttgtggtggctcatacctgttatcccagctactcaggaggctgaggtgggaggatcgcttgagcccaagagttcaaggctgcagtgagctgtgattatgccattgtactccagcctagacaacagaaggagacccctatccctgaaaaaaaaaaagaagaagaaattgatatttgttcatcatggactttttgcattaattttgattttttaaaatattggagcaaaagattatcttgattactgagattttcagtacccccttaatttgcacccaaaacaaatgcctccctccctcacctcgtccaagtaatggtctttctctcagaggtcttggaaatgccaggctggaagcttggtagattccagcatgtgccctcagcatcctcacctccctccctctctcagcaaatatgccaacctgaacatgccctactacccactctcagacacatccagtactcacacatgtgggaataatgctaacccacaaggcacctttgagcaaagtttttttaaacacctttctcaacagacttcatttccatctgtctgaaaatcatcgcaatagacttaaatgattttgttcaaacaaggcactgaaggaccacctgccaaaaaattgtcatcatgaatacacaaatctatcatgcctatcatgtgaaggtatcgcttagacacagagcctttgagcagtgtgcaacctgcactactgtacagagctgctgtgcacttacccactctcatatatatccccattgtacctcctgagcacccagcaccacctgtgctcaaatacccactctacatgcatacacccacctctactccctccattgccacaacctgtctttaaatcccaacttggccacttataagtgggtggtcttcagcacgtccctttaaattgctgaacctcaagttcctcatgtgcaaagtggagccagtaataacctccctgggagggttgctgagccggtggggatgaattgttgaatattgtttccagcacacagcaagcccttcatgcacagcagtagaaatgactgacattggccaggcgtggtggctcacacctgtaatctcaacagtttgggagaccgaggcaggtggatcacctgaggtcaggagttcaagaccagcctggccaacatggtgaaaccccgtctctactaaaaatacaaaaaaattagccaggcttggtggcgcatgtctgtaatcccagctacttgggaggctgaggcaggagaatcatttgaacccgggaggcggaggttgtagtgacccaagatcacgccgttgcactccagcctgggcaacgagagcgaaactccatctcaaaaaattaaaattaaaattaagaaataactgacattgttgtcagcctttcaaaaaacagcgactacttaaatttctttttcatttccctctgttcctgttctgccatctcacttccaccctctctccaccttcctcatcaccccttgggtccctgtctctctccttcctgccccttccctctccctgccccattccttgcagggtcctcaagcattcggtggacgccacctttgagaaccagggccccagccccgggtaccgcatggagatgtccattttctacgtcgtctactttgtggtgttccccttcttctttgtcaatatctttgtggccttgatcatcatcaccttccaggagcaaggggacaagatgatggaggaatacagcctggagaaaaatgaggtgccacttccaattccatctgtcctttaaaaactggggacacacacaaactttaaaacacacacaacacccaggaacccctttctaggggtacctgggggagggaacagaagcattgtcccaaccgaatccagtcttcagggcagcccttcatggagtttccagaggaaacacatcatatagtgtatgtatcagtcagtttagactaggttatgccgcagtaacaagcaaccccagatttcattgccaaatatccacaaagggacttattttttgctcacactgcatgtcaacatcagttgtggatcttgccatctttattctggttcccaggctggcagagcagcagagcagcctccctctgagatgctccagatgaaaaagagagtatgtcagactgaggttcagttcttcaggcttgtgctcaaaaattacacatgtcacttctgctcacatttcatcagccaaagcaagtcacacatccattctgacatcagtggagtgggcaaatacaatctcccctagcgaagggtggtgaatatttatgaatgaaaagccaagccaggtgtggtggctcacacctgtaatcccaacattttgggaagctgaggcaggaggatcacttgagctcaggagtttgagaccagcctggccaacatagcaagaccccatctctactacaaatcaaaaaaattagccaggcaggatggtgcacacctttagccccagtaacatgggaggctgaggtgggaggatgcttgagcttgggagttcgaggctgcagtgagctatcattatgccactgcactacagcctgggcaacagagcaagaccctctctcaaaaaaagaaaaggaaagaaaatccagtcccctgtctaccagagagtatagacatgactctttgcctctctggcatcatccaagctaaatagaggacctagaatatatcctctgctcccttgacccttaagacttaataaccactattcctccttctctctccctcaaagagaaggagaagacgcagcaaagtattcagtaagaaagaatgggctgggcgcagtggctcacgcctgtaatcttaacactttaggaggccaaggcaggaggattgcttgagcccggaagttcaagaccagcctgagcaacatagtgagaccc

SEQ ID NO: 2676 - DNA, 1968 bp, Homo sapiens
  source 1..1968: mol_type = unassigned DNA; mol_type = unassigned DNA
attgttaccagtgtaaagtggcattttgcaacacatggtagcctgttgttatcttgatggctatttattgaaattaggaggatgccagatgtctggataggagtctggaactaacccttgtttcctgccttgaaaaggagtagcaacctcccttagcctgatgaacctctaaatgtcccctatgtctctctgcctcctcctaaactccctccaccccacccccagcaagcctgaggctctcaccctgaggactagaagttatcacgttggaagagggtgctggaccctgggtcagctctcccaccaggagtaaggttgtgccatcacccatggatttatctcaaagtagatgcacacgtcatcccctatgaagcacaggaacacatggtggcaggatggggagtcactgcttcccaagcagtctaggctggtggaccactcttcctttccctccccctgtctctgataaccaaagacaagtgcaagacagcccctctttcccatttactaacagtccccactctctgtggcagaggcaaatacctcctctacgagaagaatgaggtgaaggcgcgagaccgggagtggaagaagtatgaattccattacgacaatgtgctgtgggctctgctgaccctcttcaccgtgtccacgggagaaggctggccacaggtcctcaagcattcggtggacgccacctttgagaaccagggccccagccccgggtaccgcatggagatgtccattttctacgtcgtctactttgtggtgttccccttcttctttgtcaatatctttgtggccttgatcatcatcaccttccaggagcaaggggacaagatgatggaggaatacagcctggagaaaaatgaggtgccacttccaattccatctgtcctttaaaaactggggacacacacaaactttaaaacacacacaacacccaggaacccctttctaggggtacctgggggagggaacagaagcattgtcccaaccgaatccagtcttcagggcagcccttcatggagtttccagaggaaacacatcatatagtgtatgtatcagtcagtttagactaggttatgccgcagtaacaagcaaccccagatttcattgccaaatatccacaaagggacttattttttgctcacactgcatgtcaacatcagttgtggatcttgccatctttattctggttcccaggctggcagagcagcagagcagcctccctctgagatgctccagatgaaaaagagagtatgtcagactgaggttcagttcttcaggcttgtgctcaaaaattacacatgtcacttctgctcacatttcatcagccaaagcaagtcacacatccattctgacatcagtggagtgggcaaatacaatctcccctagcgaagggtggtgaatatttatgaatgaaaagccaagccaggtgtggtggctcacacctgtaatcccaacattttgggaagctgaggcaggaggatcacttgagctcaggagtttgagaccagcctggccaacatagcaagaccccatctctactacaaatcaaaaaaattagccaggcaggatggtgcacacctttagccccagtaacatgggaggctgaggtgggaggatgcttgagcttgggagttcgaggctgcagtgagctatcattatgccactgcactacagcctgggcaacagagcaagaccctctctcaaaaaaagaaaaggaaagaaaatccagtcccctgtctaccagagagtatagacatgactctttgcctctctggcatcatccaagctaaatagaggacctagaatatatcctctgctcccttgacccttaagacttaataaccactattcctccttctctctccctcaaagagaaggagaagacgcagcaaagtattcagtaagaaagaatgggctgggcgcagtggctcacgcctgtaatcttaacactttagg

SEQ ID NO: 2677 - DNA, 3340 bp, Homo sapiens
  source 1..3340: mol_type = unassigned DNA; mol_type = unassigned DNA
gggggggactgtcagggttatcatgtacagctgagcaggttgtacactgctcaaggacaacacattaaaggaggtgctgataacatcctagccatcgtgtatggatatttgtattattacaacttcccagcagatggcagtaaagtgagctgacctaaaataatctgtgtattatggcagtttttctttagatgaagtgtcttggggttaagatcctttttcctaattcgcatgaaggcatcatatggatttaaaagggtataaccgtgatctgggaagcaggaactagatttcttgttccataaaattttgacttttcatctacctattctaggctctagtatctcccattccaaaatagcatgaaccagcatttcccaaaagcctgtcattcaaaaacatatatatatattaagggaaataaaatccagtcattagagcacccactttcactctatgcttcacctgggggtccccagtattatctcttatgtaatatgtttctttaaatcaagtcacacccgtaatccctgcattttgaaagaccaaggcaggagtgttgcttgagcccaggagaatgagaccagcctgggcaacatagttagactctgtctctactaaaaattaaagacagaaaacagatactgttatggaaatctaaccaaatatggctgcctgcctaaggctttgtgcattgacaactgctctttcttggttaaagagggaaaatgtcaatggtaggtgttaacatggtagcaactaagtaaaaatttctccttcactcaaaaggattgagagagttggaaaggaagtaactttgttaccttgtttttctgtgttgggctcctgtatcacttaaaagcatctctggtatcccatctgggagttttagatccatagaatgccaggattgagtccaactcctccaacgcttatttctgaaagctggggggaccttaccctagtgacttgacttatgaccttgcctgtaaaatgggaatgatcatggcagtattttggtatgatgggccactggaggcagaaggttgggcaggtccccagcccctcatgctctctgtcaactccaccccacaggctgtgtttgactgtgtggtgaactcacttaaaaacgtcttcaacatcctcatcgtctacatgctattcatgttcatcttcgccgtggtggctgtgcagctcttcaaggggaaattcttccactgcactgacgagtccaaagagtttgagaaagattgtcggtgggtctccactttccagcacattcccattggaaccagcaggtgggcaggggggaagtggctagaggcattggccacttgggctcagagactggagaagtgatgagccttggaagtgactcagttgcaaccagcttggatcttgggtagaaagaaaaccggttttagaatttgagtcaccacccagagccacagaatgagtcataagcaaattgattgacctttcagccaccgcctttgtcatgtgagggatattaatacacatccacagttccttacttgaaatcgttacaggcagatgtgtttcaaagttgagaatattttgagattcccatgtgggacatgacaccctcagctgggtctaaggcagccctataatcaaacacaatatttctgccataaaatgtgtaactatttacatcaaatggggtaaataacaagtataaagagcttcatgtccaatcagatcaggtttcattaccaaataagttaggtaagaggccaggtgcagtggctcacacctgtaattccaacactttgggaggctgaggtgggaggatcacttgaggccaggagttggagaccaggttgggcaacataatgagagcccatcctacaaaataaattttaaaagttagcggggcatggtagcacacacctgtagtcccagctacccgggaggctgaggcgggaggattgtttaaacacaggagttcaaggctgcaatgcactatgatggtaccactgcactccagcctgcgtgacagagtgagaccctgcctctcaaaaatatatacatataggccgggcgcagtggctcatgcttataatctcagcactttaggaggccgaggcgggcggatcatgaggtcaggagatcgagaccatcctggctaacacggtgaaaccctgtctctactaaaaatacaaaaacctagctgggcatggtggcagacgcctgtagtcccagctacttgggaggctgagacaggagaatggcgtgaacccgggaggcggagcttgcagtgagcccagattgggccactgtactccagtctgggcaacagagccagactccatctcaaacaaacaaacaaacaaacaacaacaacaaaaatatatatatatatatatgtatatatatatatgtacacgcacacacacatatgtattatatgtgtgtgtgtatatatatgtatgtgtatatatagtgatattgttaccagtgtaaagtggcattttgcaacacatggtagcctgttgttatcttgatggctatttattgaaattaggaggatgccagatgtctggataggagtctggaactaacccttgtttcctgccttgaaaaggagtagcaacctcccttagcctgatgaacctctaaatgtcccctatgtctctctgcctcctcctaaactccctccaccccacccccagcaagcctgaggctctcaccctgaggactagaagttatcacgttggaagagggtgctggaccctgggtcagctctcccaccaggagtaaggttgtgccatcacccatggatttatctcaaagtagatgcacacgtcatcccctatgaagcacaggaacacatggtggcaggatggggagtcactgcttcccaagcagtctaggctggtggaccactcttcctttccctccccctgtctctgataaccaaagacaagtgcaagacagcccctctttcccatttactaacagtccccactctctgtggcagaggcaaatacctcctctacgagaagaatgaggtgaaggcgcgagaccgggagtggaagaagtatgaattccattacgacaatgtgctgtgggctctgctgaccctcttcaccgtgtccacgggagaaggctggccacagtaagtggcccgactggaaatctatccaggaggagccctggggagcaggaggataaagggcctgagagcttagcaataagaaaggtcttggaggccgggcatggtggctcacgcctgtaatcccaacactttaggaggccaaggcagatgtatcacttgaggccaggagtttgagatcagcctggccatcatggcaaa

SEQ ID NO: 2678 - DNA, 5481 bp, Homo sapiens
  source 1..5481: mol_type = unassigned DNA; mol_type = unassigned DNA
tatatttttagtagacacggggttttgccatttggttaggctggtctcgaactcctgacctcaagtgatctgcctgcctcagcctcccaaagtgctgggattacaggctcgagccaccgtgcccagccggtgtccaccccatgtctagcaccagccagacactgtgccggcgcaccctcatcttcaggcctgggtgacaccagaggtgtgctatggtgtgtcctggacaggggctgggccagaggacattgctcgtccaggcagaaacatcaggcctggggaggggcacaggaaaaatcaacctaccctggcaggggcctggccttgaagcaggaagagatgccgtggcaggaagttggccccagtgtttaaaaaaaccacgtagcaactatttctcgcccaggatgcccaggaaagcaagggtactgggggattagatccatcaccaagaaggatacagtcagccctgaacttctctggggccgcttctaatccactacagggcttggggcaaattttaaaaggtacccttcccgtgggttagcgaactggcctagtacagtgatttttttgttaggatttgctgccatctgctggacaatttcattcacaacatacaaatctgcagtatgaaaagagatgggaggggcccttgtgcagtgcacgccctgcgcaactgtatatagcagctgtgtttcctcttctgggtagaaactctgctccccagtaggcgatcgttagttttaccggggctctgctggaacaggccagtgatccactgctctcttgcttttatcccttacaggtgctgcgatactttgactacgtttttacaggcgtctttacctttgagatggtgatcaagatgattgacctggggctcgtcctgcatcagggtgcctacttccgtgacctctggaatattctcgacttcatagtggtcagtggggccctggtagcctttgccttcacgtaagtctcctcgcaagggttcctcttgcctcttttcccccaacccccagcctgggccacacatcggattacaggacatgttctcagggtctagggatggggtgtgtgggctccggggacgtgggagatatcagcatgccaccaggaagagcttcgatggctttttgcatgatgtccatggaggaagaaggagaagggaccccccctcctgccaaccttctacctcctcacacagcaacgggcctcagccacatcactggccccttgctgtgcagcttcctgtagactagcctcgccggaacatctcatccccctactactccacaagcgccgcccaaaccgctgtctctttggaaagtccctaaagagacaatcaggaaacgaatgtgcatgagaattctgaccccctccctatgcctgaaggccccgtagttgtagacctggtgactccctttgtgtgtctttcacttctcctggcagtcctaggattctctgccctctgaaaggccatgtgtcatcctgcagctccaagatggcgccccagttgtaggcagccatttcaggatggcacccaagctcttagtagtcatcccaagatggcatccaagttctgggtggccattccaagatggcccctgagttctgagctatcattccaagatggcctctgaatttggggtggtcattcttagatggtccctgagttccaaggtgaccttcaagttctgggtagccattccaggatggtccccaagctctgggtggctattccaagatggccccaagttctaggcagccattgcaagatggcccctgagttccagggtggcccccaagttctgggcaaccattccaaggtggcatccaagttctgggtggctattccaagatggcctctgatttctgggctaccatgctaagatggcctctggattcttggtggccattcttacatggtccctgagttccaaggtggccttcaagttctgggtagccattccaagacggtccccaagtcttggatggctactcgaaggtgacccccaagttctgggcagccatctcaaggtggcaccctagttctgggtaaccattccaaaatggcacccaagttctagggcaaccatttcaaaatggcccccaagttctgggtgactatttcaagatggtacccaacaggtgagtggccattagcccttagggccctgatagcagacttagcagtacattcctgaagttgtagacatttggagcgggatgaaaaatatctaatcagtctttaatcaagaaacaaatcttggggaccctggctgtgcccatcatggtgaatgattccctgacaggttttgaaaggatcttgacacattcactcccatcgtgagagaatcaggggcttcctcctgtgcctctgcctctaggctccctcctgagccaatctggaggggcccttgaatggtctccctcaccaaacaatgaggacttggtttgtcaggagggccaaaatagtggcccatttccagtagaagggctgttaagtaggccacacttagattcttctctgggaacacaatgaggtcaagttgtgttagaacaaaaaatctccagagtttttggatgcctcagagctggagatgtatcatgaaggttgggaggctgattatacttctttctctttctctttcactccttcctcctctttctcctctctttttgttcgtttactcttttctttttctcttctcctctccctccccacatccttccctctcctcaaagcttttcagtgtctatttgactactagagcaatgcacggtggcttacacctgcaatcccagcactttgggaggctgagacaggcagattgcttgagcccaggaggccaagaccagcctgggtaacatagggagaccccatctctaaaaaaaaaaaaaaacaattagccaggcatggtagtatgcctgcactagcagctacacgggaggctgaggtgggagaattgcttgagcccaggaggttcaaggctgcagtgagccgaaatcgcaccactgcaccccagtctggggaacacaggaagaacttgtctcaaaaaaataaaaagtttaaaaaattaaaaatcaatgaatttgctatttagaatattatgctttatatggttactgaataattttaatagtgatgagtacaaaaaaaacaggtttagcaagctgttctgtaggttaaaaagtaaataaataaataattaattaaacaaaatacaatgcacatcaaattaggggacaaagattgtgacgaataagacaaggagtccatgtctttaaaatatgaaaagcagttacaaatcaataagaaacactacttctcaatggataaatgggcaaaggacataaacagaaatctgatagaatgctggcaactagtaaaaatggaggtaaatcaacccttggaattcagagaaatgtaaaataaaaacgagatacaattcattccctatcaagttagcactgttcccgccgcacccccacacacacacaaaaaatgatttttttagctaataaacagcatatataagaatgtattataataggctgggcacagtggctcacgcctgtaaccctagcattttgggaggccaagggagggggatcacctgaggtcagcagttcgagaccagcctggccgacatgacaaaaccctgtctctactaaaaaatacaaaaattagccaggcatggtggcggatgcctgtaatcccagctactcaggtgggtaaggcaggagaattgcttggacccaggagatggagactgcagtgagccgagatcatgccactgcactccagcctgggtgagaaagcaagattttgtctcaaaaataaaaaaaggaatgtattataataaaatatacttttctccccctctatcacctatttaagcaggtccttcaagttgtcaggtagacatcatgctatgagaaaatttaaatcctgaaaagccagaatgttttaccaccctcagcctggaatgaatccttctcctatggaaataacctacgggtttctccacccctctctgcctttcagccccttccctccctctcccctccttttctttctccctctttctcttcctcctttcccctctcttccctctctcttcttccctctctctgtctctttctgttcgtctttctccttttaccccctctcagtttctatctttttattttcctctttctctctctctctccctctctttctctctcactccctgcactgttgatgacctatgtccttgggtgatgtgggcctcccctggaccgtgtagcttggagaaagctgaccctctgtcatcggtctggcaacagggacttggcccccctaccctgcattctgatgaggaatggtattcagacaaaggcagatcccaggacacaggaggacatgctcaggcagggacccccgcccctttcctctggggcaaggtctgctcagcagcctccaagattcctagggctcaagaggtggcaggtagctcagggcactagggcaggcagtggggtgaatatgtcactcatatccacctgtccacacacaatgcttaccttggccacctgtgcccaggggaatgggttttatcctgtgaatcctcccagtgaccaccactgagtgtggcacagataaatggtaccaagcccaagctgttcaggtctccaatgtcactttcctctcagacctctgttgtagctgacatactgtaatgctgaggagggccgggcacagtggctcatgcctgtaatcctagctctttcggaggccaaggcagatggatcacctggggtcaggagttcaagaccagcctgggcaacatggtgaaaccccaggcaacatggtaaaaccctgtctctactaaaaatacaaatattagccaagcgtgatagcaggcgcctgtaatctcagctactcgggaggctgaggcagaagaattgcttgaacctgggaagtggaggttgcagtgagccaagattgcaccactgcactccagcctgggcaacagagcaagactctgtctcaaaaaaaaaaaaaaatgctgaggaggtgactgtcccacctccatcctccgagttgaccatcacaatttagggaggggaatgacctacaaaggacccagaagcaagcctttcaattgttgagcttttgccattatgggccatcgtttacaacatgctgtttctaggttctctggaggtaaaattagcctcctcttttaaacaaagctaatctgcaaaagcgaaccaaaaattcttttccaccagagatcaattagcagaatgagctgggtgcgatggctcacacctgtaatcccagcacttggggaggccgaggcaggtggatcacttgaggtcaggggtccaagaccagcatggccaacatggtgaaaccccatctctactaaaaatacaaaaactagctgggtgtggtggggagggcctgtagtcccagctactcgggag

SEQ ID NO: 2679 - DNA, 2840 bp, Homo sapiens
  source 1..2840: mol_type = unassigned DNA; mol_type = unassigned DNA
gtggacatccccccagcctgcccaccccccctcaaccacaccgtcgtacaagtgaacaaaaacgccaacccagacccactgccaaaaaaagaggaagagaagaaggaggaggaggaagacgaccgtggggaagacggccctaagccaatgcctccctatagctccatgttcatcctgtccacgaccaacccccttcgccgcctgtgccattacatcctgaacctgcgctactttgagatgtgcatcctcatggtcattgccatgagcagcatcgccctggccgccgaggaccctgtgcagcccaacgcacctcggaacaacgtgctgcgatactttgactacgtttttacaggcgtctttacctttgagatggtgatcaagatgattgacctggggctcgtcctgcatcagggtgcctacttccgtgacctctggaatattctcgacttcatagtggtcagtggggccctggtagcctttgccttcacgtaagtctcctcgcaagggttcctcttgcctcttttcccccaacccccagcctgggccacacatcggattacaggacatgttctcagggtctagggatggggtgtgtgggctccggggacgtgggagatatcagcatgccaccaggaagagcttcgatggctttttgcatgatgtccatggaggaagaaggagaagggaccccccctcctgccaaccttctacctcctcacacagcaacgggcctcagccacatcactggccccttgctgtgcagcttcctgtagactagcctcgccggaacatctcatccccctactactccacaagcgccgcccaaaccgctgtctctttggaaagtccctaaagagacaatcaggaaacgaatgtgcatgagaattctgaccccctccctatgcctgaaggccccgtagttgtagacctggtgactccctttgtgtgtctttcacttctcctggcagtcctaggattctctgccctctgaaaggccatgtgtcatcctgcagctccaagatggcgccccagttgtaggcagccatttcaggatggcacccaagctcttagtagtcatcccaagatggcatccaagttctgggtggccattccaagatggcccctgagttctgagctatcattccaagatggcctctgaatttggggtggtcattcttagatggtccctgagttccaaggtgaccttcaagttctgggtagccattccaggatggtccccaagctctgggtggctattccaagatggccccaagttctaggcagccattgcaagatggcccctgagttccagggtggcccccaagttctgggcaaccattccaaggtggcatccaagttctgggtggctattccaagatggcctctgatttctgggctaccatgctaagatggcctctggattcttggtggccattcttacatggtccctgagttccaaggtggccttcaagttctgggtagccattccaagacggtccccaagtcttggatggctactcgaaggtgacccccaagttctgggcagccatctcaaggtggcaccctagttctgggtaaccattccaaaatggcacccaagttctagggcaaccatttcaaaatggcccccaagttctgggtgactatttcaagatggtacccaacaggtgagtggccattagcccttagggccctgatagcagacttagcagtacattcctgaagttgtagacatttggagcgggatgaaaaatatctaatcagtctttaatcaagaaacaaatcttggggaccctggctgtgcccatcatggtgaatgattccctgacaggttttgaaaggatcttgacacattcactcccatcgtgagagaatcaggggcttcctcctgtgcctctgcctctaggctccctcctgagccaatctggaggggcccttgaatggtctccctcaccaaacaatgaggacttggtttgtcaggagggccaaaatagtggcccatttccagtagaagggctgttaagtaggccacacttagattcttctctgggaacacaatgaggtcaagttgtgttagaacaaaaaatctccagagtttttggatgcctcagagctggagatgtatcatgaaggttgggaggctgattatacttctttctctttctctttcactccttcctcctctttctcctctctttttgttcgtttactcttttctttttctcttctcctctccctccccacatccttccctctcctcaaagcttttcagtgtctatttgactactagagcaatgcacggtggcttacacctgcaatcccagcactttgggaggctgagacaggcagattgcttgagcccaggaggccaagaccagcctgggtaacatagggagaccccatctctaaaaaaaaaaaaaaacaattagccaggcatggtagtatgcctgcactagcagctacacgggaggctgaggtgggagaattgcttgagcccaggaggttcaaggctgcagtgagccgaaatcgcaccactgcaccccagtctggggaacacaggaagaacttgtctcaaaaaaataaaaagtttaaaaaattaaaaatcaatgaatttgctatttagaatattatgctttatatggttactgaataattttaatagtgatgagtacaaaaaaaacaggtttagcaagctgttctgtaggttaaaaagtaaataaataaataattaattaaacaaaatacaatgcacatcaaattaggggacaaagattgtgacgaataagacaaggagtccatgtctttaaaatatgaaaagcagttacaaatcaataagaaac

SEQ ID NO: 2680 - DNA, 3381 bp, Homo sapiens
  source 1..3381: mol_type = unassigned DNA
tggatagactatttaggggagaaatttatcccatgaatgtcgtagtggctcggaggttgttttagaattgaatgtctcccagggatatttcttgaaagcctgaccgctcaaaatgcttcttgacaatgaaggatcatgtcagataagatgggggagaagctgctttctataatctgcctcttggcaactcaccctgggtagtaataaataaaagtacctttaaagtacttttttatttagttgacttatcgattttactaaggaaacacttatgtggtatctactcagtgccaggcactgttctgagtgccttaaaattttttttaatttctctgaggttgttactatgcttagctccatttgacagatgaaaaaactgaggtccagagacgtgaattcacctgcccaaggtcacacagcaagccagtgggagagctggagtttgagcccagacactggctctagcctccttgttcttaaccactcagctctgctgccattcacacaaccttatgaactatttattattggctccacttattaagaggttaactggcacatcccattggcacattcaaggctctgataaggcctgcaattcataatttcaataactaactttttggagcccctatcatgagccaggcataaattaagtcttgggtctcatgattttgtgaagtaagcactagtattacggctattttacagatgagggcaccaaggcacagaggggacaagtaacttgcccaaggtcacacagctaatttttaaaaagaaagaaagaaatctacttaacccatagattcacaatattgtttggccctgggacatttaatatcgaaaagcctttttatctcctacagaattaaggaccgtatttcttcaacctagcttggggatcaagatacttcaagagggtcgtttgggagtgataggaactttgctaaacagggcatgtgaatgtcttctctcaccgaggtcccctctgccttcttggggttccaggacccagagagggcccccacctggaggagtttaatagtttgttgtgtaggaggccttgggggttggagatctcagtagtggtaggtaacatgagattatggaagaaaagggtttgtgagcctgtggtctgagtggacctctgcacgcccatctgtctccaacagccttcgccgcctgtgccattacatcctgaacctgcgctactttgagatgtgcatcctcatggtcattgccatgagcagcatcgccctggccgccgaggaccctgtgcagcccaacgcacctcggaacaacgtgctgcgatactttgactacgtttttacaggcgtctttacctttgagatggtgatcaagatgattgacctggggctcgtcctgcatcagggtgcctacttccgtgacctctggaatattctcgacttcatagtggtcagtggggccctggtagcctttgccttcacgtaagtctcctcgcaagggttcctcttgcctcttttcccccaacccccagcctgggccacacatcggattacaggacatgttctcagggtctagggatggggtgtgtgggctccggggacgtgggagatatcagcatgccaccaggaagagcttcgatggctttttgcatgatgtccatggaggaagaaggagaagggaccccccctcctgccaaccttctacctcctcacacagcaacgggcctcagccacatcactggccccttgctgtgcagcttcctgtagactagcctcgccggaacatctcatccccctactactccacaagcgccgcccaaaccgctgtctctttggaaagtccctaaagagacaatcaggaaacgaatgtgcatgagaattctgaccccctccctatgcctgaaggccccgtagttgtagacctggtgactccctttgtgtgtctttcacttctcctggcagtcctaggattctctgccctctgaaaggccatgtgtcatcctgcagctccaagatggcgccccagttgtaggcagccatttcaggatggcacccaagctcttagtagtcatcccaagatggcatccaagttctgggtggccattccaagatggcccctgagttctgagctatcattccaagatggcctctgaatttggggtggtcattcttagatggtccctgagttccaaggtgaccttcaagttctgggtagccattccaggatggtccccaagctctgggtggctattccaagatggccccaagttctaggcagccattgcaagatggcccctgagttccagggtggcccccaagttctgggcaaccattccaaggtggcatccaagttctgggtggctattccaagatggcctctgatttctgggctaccatgctaagatggcctctggattcttggtggccattcttacatggtccctgagttccaaggtggccttcaagttctgggtagccattccaagacggtccccaagtcttggatggctactcgaaggtgacccccaagttctgggcagccatctcaaggtggcaccctagttctgggtaaccattccaaaatggcacccaagttctagggcaaccatttcaaaatggcccccaagttctgggtgactatttcaagatggtacccaacaggtgagtggccattagcccttagggccctgatagcagacttagcagtacattcctgaagttgtagacatttggagcgggatgaaaaatatctaatcagtctttaatcaagaaacaaatcttggggaccctggctgtgcccatcatggtgaatgattccctgacaggttttgaaaggatcttgacacattcactcccatcgtgagagaatcaggggcttcctcctgtgcctctgcctctaggctccctcctgagccaatctggaggggcccttgaatggtctccctcaccaaacaatgaggacttggtttgtcaggagggccaaaatagtggcccatttccagtagaagggctgttaagtaggccacacttagattcttctctgggaacacaatgaggtcaagttgtgttagaacaaaaaatctccagagtttttggatgcctcagagctggagatgtatcatgaaggttgggaggctgattatacttctttctctttctctttcactccttcctcctctttctcctctctttttgttcgtttactcttttctttttctcttctcctctccctccccacatccttccctctcctcaaagcttttcagtgtctatttgactactagagcaatgcacggtggcttacacctgcaatcccagcactttgggaggctgagacaggcagattgcttgagcccaggaggccaagaccagcctgggtaacatagggagaccc

SEQ ID NO: 2681 - DNA, 1887 bp, Homo sapiens
  source 1..1887: mol_type = unassigned DNA
cagtcaatggcgcagagagcgcggaccatggcactctacaaccccatccccgtccgacagaactgcctcacggttaaccggtctctcttcctcttcagcgaagacaacgtggtgagaaaatacgccaaaaagatcaccgaatggcctccctttgaatatatgattttagccaccatcatagcgaattgcatcgtcctcgcactggagcagcatctgcctgatgatgacaagaccccgatgtctgaacggctggatgacacagaaccatacttcattggaattttttgtttcgaggctggaattaaaatcattgcccttgggtttgccttccacaaaggctcctacttgaggaatggctggaatgtcatggactttgtggtggtgctaacgggcatcttggcgacagttgggacggagtttgacctacggacgctgagggcagttcgagtgctgcggccgctcaagctggtgtctggaatcccaagtttacaagtcgtcctgaagtcgatcatgaaggcgatgatccctttgctgcagatcggcctcctcctattttttgcaatccttatttttgcaatcatagggttagaattttatatgggaaaatttcataccacctgctttgaagaggggacagatgacattcagggtgagtctccggctccatgtgggacagaagagcccgcccgcacctgccccaatgggaccaaatgtcagccctactgggaagggcccaacaacgggatcactcagttcgacaacatcctgtttgcagtgctgactgttttccagtgcataaccatggaagggtggactgatctcctctacaatagcaacgatgcctcagggaacacttggaactggttgtacttcatccccctcatcatcatcggctccttttttatgctgaaccttgtgctgggtgtgctgtcaggggagtttgccaaagaaagggaacgggtggagaaccggcgggcttttctgaagctgaggcggcaacaacagattgaacgtgagctcaatgggtacatggagtggatctcaaaagcagaagaggtgatcctcgccgaggatgaaactgacggggagcagaggcatccctttgatggagctctgcggagaaccaccataaagaaaagcaagacagatttgctcaaccccgaagaggctgaggatcagctggctgatatagcctctgtgggttctcccttcgcccgagccagcattaaaagtgccaagctggagaactcgaccttttttcacaaaaaggagaggaggatgcgtttctacatccgccgcatggtcaaaactcaggccttctactggactgtactcagtttggtagctctcaacacgctgtgtgttgctattgttcactacaaccagcccgagtggctctccgacttcctttactatgcagaattcattttcttaggactctttatgtccgaaatgtttataaaaatgtacgggcttgggacgcggccttacttccactcttccttcaactgctttgactgtggggttatcattgggagcatcttcgaggtcatctgggctgtcataaaacctggcacatcctttggaatcagcgtgttacgagccctcaggttattgcgtattttcaaagtcacaaagtactgggcatctctcagaaacctggtcgtctctctcctcaactccatgaagtccatcatcagcctgttgtttctccttttcctgttcattgtcgtcttcgcccttttgggaatgcaactcttcggcggccagtttaatttcgatgaagggactcctcccaccaacttcgatacttttccagcagcaataatgacggtgtttcagggactggctagtgctggaccgggcagtccctccagagtcagcaag

SEQ ID NO: 2682 - DNA, 1124 bp, Homo sapiens
  source 1..1124: mol_type = unassigned DNA
ggtggggcacacctgtaatcccagctactcaagaggctgaggtgggaggatcacttaagcccaggaggacagtgctgcagtgagctatgattgcgccactgcactccagcctgggtgacacagtgagacccggtctctatagataaatgaatggatgaatgagggggtcaaggatcctcacccggcttccatttggagggaggagtttggttgagttcttgcaaggttggtacctaggaaatgcttgccagttctggagcccagacactgtccctggacatgagaccaggttctctgccctaggttatcattgggagcatcttcgaggtcatctgggctgtcataaaacctggcacatcctttggaatcagcgtgttacgagccctcaggttattgcgtattttcaaagtcacaaagtactgggcatctctcagaaacctggtcgtctctctcctcaactccatgaagtccatcatcagcctgttgtttctccttttcctgttcattgtcgtcttcgcccttttgggaatgcaactcttcggcggccagtttaatttcgatgaagggactcctcccaccaacttcgatacttttccagcagcaataatgacggtgtttcaggtacagcctccacctggccccacgggccaacacctctcagtgtcacagatgaaagtgcctgctccacatccaaggggcttccctgaactcctccttctctacctggccttttcacaccactttgaaacacagattttatggttatcattattcaattatggtgaggccaacagatcaggagatgaatgtcattggaaagatagtttgtggctgggcacggtggctcacacccataatcccagcactttggccaggtacggtggctcacacctgtaatcccaacgctttgggaagcccaggtgggcggatcacttgagatcaggaattcgagaccagcctggccaacatggtgaaaccccatctctactaaaaatacaaaaattagccgggcgtggtagcacatgcctgtaatcccagctactcgggagatgaggcacaagaattgcttgaacctgggaggcagaggttgcagtgagccaagatcgcgccactgcactccagcc

SEQ ID NO: 2683 - DNA, 1783 bp, Homo sapiens
  source 1..1783: mol_type = unassigned DNA
cgtcctgaagtcgatcatgaaggcgatgatccctttgctgcagatcggcctcctcctattttttgcaatccttatttttgcaatcatagggttagaattttatatgggaaaatttcataccacctgctttgaagaggggacagatgacattcagggtgagtctccggctccatgtgggacagaagagcccgcccgcacctgccccaatgggaccaaatgtcagccctactgggaagggcccaacaacgggatcactcagttcgacaacatcctgtttgcagtgctgactgttttccagtgcataaccatggaagggtggactgatctcctctacaatagcaacgatgcctcagggaacacttggaactggttgtacttcatccccctcatcatcatcggctccttttttatgctgaaccttgtgctgggtgtgctgtcaggggagtttgccaaagaaagggaacgggtggagaaccggcgggcttttctgaagctgaggcggcaacaacagattgaacgtgagctcaatgggtacatggagtggatctcaaaagcagaagaggtgatcctcgccgaggatgaaactgacggggagcagaggcatccctttgatggagctctgcggagaaccaccataaagaaaagcaagacagatttgctcaaccccgaagaggctgaggatcagctggctgatatagcctctgtgggttctcccttcgcccgagccagcattaaaagtgccaagctggagaactcgaccttttttcacaaaaaggagaggaggatgcgtttctacatccgccgcatggtcaaaactcaggccttctactggactgtactcagtttggtagctctcaacacgctgtgtgttgctattgttcactacaaccagcccgagtggctctccgacttcctttactatgcagaattcattttcttaggactctttatgtccgaaatgtttataaaaatgtacgggcttgggacgcggccttacttccactcttccttcaactgctttgactgtggggttatcattgggagcatcttcgaggtcatctgggctgtcataaaacctggcacatcctttggaatcagcgtgttacgagccctcaggttattgcgtattttcaaagtcacaaagtactgggcatctctcagaaacctggtcgtctctctcctcaactccatgaagtccatcatcagcctgttgtttctccttttcctgttcattgtcgtcttcgcccttttgggaatgcaactcttcggcggccagtttaatttcgatgaagggactcctcccaccaacttcgatacttttccagcagcaataatgacggtgtttcaggtacagcctccacctggccccacgggccaacacctctcagtgtcacagatgaaagtgcctgctccacatccaaggggcttccctgaactcctccttctctacctggccttttcacaccactttgaaacacagattttatggttatcattattcaattatggtgaggccaacagatcaggagatgaatgtcattggaaagatagtttgtggctgggcacggtggctcacacccataatcccagcactttggccaggtacggtggctcacacctgtaatcccaacgctttgggaagcccaggtgggcggatcacttgagatcaggaattcgagaccagcctggccaacatggtgaaaccccatctctactaaaaatacaaaaattagccgggcgtggtagcacatgcctgtaatcccagctactcgggagatgaggc

SEQ ID NO: 2684 - DNA, 552 bp, Homo sapiens
  source 1..552: mol_type = unassigned DNA
gcggcaacaacagattgaacgtgagctcaatgggtacatggagtggatctcaaaagcagaagaggtgatcctcgccgaggatgaaactgacggggagcagaggcatccctttgatgttggagctctgcggagaaccaccataaagaaaagcaagacagatttgctcaaccccgaagaggctgaggatcagctggctgatatagcctctgtgggttctcccttcgcccgagccagcattaaaagtgccaagctggagaactcgaccttttttcacaaaaaggagaggaggatgcgtttctacatccgccgcatggtcaaaactcaggccttctactggactgtactcagtttggtagctctcaacacgctgtgtgttgctattgttcactacaaccagcccgagtggctctccgacttcctttactatgcagaattcattttcttaggactctttatgtccgaaatgtttataaaaatgtacgggcttgggacgcggccttacttccactcttccttcaactgctttgactgtggggtaagtgctcttgtttc

SEQ ID NO: 2685 - DNA, 1890 bp, Homo sapiens
  source 1..1890: mol_type = unassigned DNA
ctctccgacttcctttgtgagtatcacccagccccacccctgccaactccctgatccctccctcacaccctttttccacttctctttctctggtagtatgtgtatcttctttggtcctcattgaatctgccctttcctttagccatttctataactgtcactggggccaatgttactgttgctatgacaatggaacccatctcccttagacctgagagctggaagctggaattcagaccaacaaatgctcctgtgattcctttctaagagagagggacagaggggtgctggtgaaggggatgttggaagagagacagagaaagacggagctcataagatagacagatagaaacagaaacatacatgtattaataatttttatgtacatctctggaaatgttcataacttatggttaagagaggatgccttagaaataaggagtggcttatatgttgccctcattttctctacttatttctgactctacttctctcttctttcaaaccttctgcttctttcctgttaggttggtgcaaaattaattgcgttttttgccttttttttttttttttttaaccacagttacttttgcaccaacctaatacttcctcccctgccctttttggcttccttattcattcatagaacatcccctccagtatctgcgagagcgttttgctccctcaaggtacaaggcccactaaggctttgccctctgggcctattcccagattctatgtgagttagcatgagatagtatcaaaattgagggccaagtgagggtgaggaaaagcagcaaaagatggggagatgtctgagcaggatttaaaaagtaaagagctcgaggaatcaacaagagcagcgactggggccaggcatggtggctcacacctgtaatcccagcattttgggaggctgaggtgggtggatcacttgaggccaggagttcaagaccagcctggccaatatggtgaaaccctgtctttacaaaaaatacaaaaattagccagatgtgatggtgcacacctgtaatcccagctactcaggaggctgaggcactagaactgcttgaatccaggaggcagaggttgcagtgagccaagatcatgccactgcactccagcctgagcaacagagagagtgtctgtctcaaaaaataaagtaaaataaaataaaataaaataaagagtagtgattgggcagtgaggggggcaggtggatgccctggctttggctcacaggccccaagtaaggacttctcaaaacgtcttttgcctactggctgtctaatttattcactgaccttctgacctggttcagaattgacttaggacagcaagaagagacagtctagtctttgacctagaaaggcccgtgagcctagtccaggccattgtcttcttataaccctccttgttcccagtcacgttggctgaccccccaggacacccctcaggaaccagttctccttcccagggccctgacctagtttcaaacttagtaattgtttttagtccctctggagtctcttataaatgaggactctacttcgtgttttaacttcctctaatactctatttttaatctcctatattctctctactaatcatcttgtacagtctgtcctggttcaggaacaagggactgagacttcctgcctgggtcctcagtgtctataaaggtcctttactcattcccactttccctttgagaaaactgagacacagagaggttaagtagattgcccaggatcacacattagcttggcatgatggcgggcgcctgtaatcccagctacttgggaggctgaggcaggagaatcgcttgaacctgggaggcagaggttgcagtgagcccagatcatgccactgcactctagcctgggcaac

SEQ ID NO: 2686 - DNA, 1651 bp, Homo sapiens
  source 1..1651: mol_type = unassigned DNA
gaatggcctccctttgaatatatgattttagccaccatcatagcgaattgcatcgtcctcgcactggagcagcatctgcctgatgatgacaagaccccgatgtctgaacggctggatgacacagaaccatacttcattggaattttttgtttcgaggctggaattaaaatcattgcccttgggtttgccttccacaaaggctcctacttgaggaatggctggaatgtcatggactttgtggtggtgctaacgggcatcttggcgacagttgggacggagtttgacctacggacgctgagggcagttcgagtgctgcggccgctcaagctggtgtctggaatcccaagtttacaagtcgtcctgaagtcgatcatgaaggcgatgatccctttgctgcagatcggcctcctcctattttttgcaatccttatttttgcaatcatagggttagaattttatatgggaaaatttcataccacctgctttgaagaggggacagatgacattcagggtgagtctccggctccatgtgggacagaagagcccgcccgcacctgccccaatgggaccaaatgtcagccctactgggaagggcccaacaacgggatcactcagttcgacaacatcctgtttgcagtgctgactgttttccagtgcataaccatggaagggtggactgatctcctctacaatagcaacgatgcctcagggaacacttggaactggttgtacttcatccccctcatcatcatcggctccttttttatgctgaaccttgtgctgggtgtgctgtcaggggagtttgccaaagaaagggaacgggtggagaaccggcgggcttttctgaagctgaggcggcaacaacagattgaacgtgagctcaatgggtacatggagtggatctcaaaagcaggtgaggccctttcatcctggggcccagggatggagatcccaggccacggagtacaaagagagtcatgcagtttggagaaggctaagctgggagggttatgatgggaggagaaagagaacctgaattggtagtcccaaattttatcaacaagaatccagagtctgatatgaagaagtctaagatgaagccaggatctgacatcacgtaacttgaattctgaaatcagacgctggtttacatcccggccctgccactttttacccatgcaccacacatccctgtacctccgtttcctcagctgttacatggaggcgatggtagtgcctaagtcatagtactattggagtatttagtaaaataatctcagctgagtcacttggggagagaagtgcctgatacacggtaggcacatatttatttgttcagccatttaacaaacatttagggagcacctgctgtgtgccaggcactgatctaagcactgaggatatgggagtaaacaatacacaccaaatccctgccctcagagctctgatattctaatgagagagataaagcaaacaaatacatgtcatgttgggaactcccaaattcagagaaggaagataaaacagactaggaagataaaacagagtaggaagttggccgggcgcggtggctcacgcctgtaatcccagcactttgggaggctaaggcgggcagatttcctgaggtcaggcattcgagaccagcctggcc

SEQ ID NO: 2687 - DNA, 3938 bp, Homo sapiens
  source 1..3938: mol_type = unassigned DNA
agggcgggcagcccggggcgcaaaggatgtacaagcagtcaatggcgcagagagcgcggaccatggcactctacaaccccatccccgtccgacagaactgcctcacggttaaccggtctctcttcctcttcagcgaagacaacgtggtgagaaaatacgccaaaaagatcaccgaatggcctccctttgaatatatgattttagccaccatcatagcgaattgcatcgtcctcgcactggagcagcatctgcctgatgatgacaagaccccgatgtctgaacggctggatgacacagaaccatacttcattggaattttttgtttcgaggctggaattaaaatcattgcccttgggtttgccttccacaaaggctcctacttgaggaatggctggaatgtcatggactttgtggtggtgctaacgggcatcttggcgacagttgggacggagtttgacctacggacgctgagggcagttcgagtgctgcggccgctcaagctggtgtctggaatcccaagtttacaagtcgtcctgaagtcgatcatgaaggcgatgatccctttgctgcagatcggcctcctcctattttttgcaatccttatttttgcaatcatagggttagaattttatatgggaaaatttcataccacctgctttgaagaggggacaggtaggtccacggagcatgatgcatctttccagttttctccttcagggacaagctcttgggaggattaggcaggggtgtgcttctttctcctggcagctgggaggaccgtctccttcagagagcactacaggagaggcagtgagtgaaatagcctctgagatcttagctgttgaaaggggtggggttccacagaaggtgacccagcagagaaagagtttatttgggaatgatcccaggaagcaccatcgggggaatgaggaagtgagcagagaaagaagggatcttttaaagagtgtgctatcaagcgggttaccacttaaaactgggactggatccccctgggcacctctgggagacagcaaagaacacacaactcagctggtcacggtggctcacgcctgtaatcccagcactttggggggccaaggcgggtggatcacctgagatcaggagtcagagaccatcctggccaacatggtgaaaccccatctgtactaaaaaatacaaaaattagctgggtgtggtggcaggcacctgtagtcccaattactcaggaggctgaggcaggagaatcacttgaacccgggaggcagaagttgcagtgagccaagatcacaccactgcactccagcctggcgaaagagtgagactccatctcaaataaataaataaataaaaatataaataaaaaaagaacacacacctcagagccgtcccagccaaggggcaagggagctggggtatttatacactggcttctttttgacattggtgaggactgctcctagagtgggaattaatgcctggcacatctggctgagtggaacaggtattctgggtgctttcagacctcgaccagtcctgacttctaaagcaagcaagaagtggggagagttgggccagaaaagggttattgcctcaatgcattgtgagtggtaccttgtggaaggtgagagacagagaagattccaggcacaggtgccatgctaaacgatagttctcatttattataggaacccatggatttattttgttctctgccctgagtgctgggtgagagtactggatgagtcctcctggtctcccccaacccccaggatgtaccagagataccccaattgggagtcctggcaccaaccaatcagaacctagcactcagcagcattctgcccctccctgactatgcccacattaacccttcagtggctgggtctgggggtagggtgagccccggaaaagccaggcagcgcagagacactctcccagggctcagctctgaaccagcagtgtggaagcagtgtgtccaccacgatccacactcaggaaccaaatagcccttggatacgttttcagttaaatctttgccatccaaactctagctgcttgctctctaaagctccagaatgaaatggaatcaagtaggaagggatgccttcagtatttcagtatttggaccactggccatctgggtgcagacagactgaatagcagttctggttctgatgatttgggtcaagggagctgtgaattgaaggagtggatagaaggaatcaagaagcccaaaggggaacccaggtgggcagagaaagaggtttcaggccccttatttgggaaaggcagccacagaagaagattctgtctgggagtggatttccacccaccctctccacccagtgacccccaagtggatccgcagaggcagcccctgagccctccctccccactcctccccacggggagggaaaacccactggggaaggtttatttgcaatggttggaggtttgggtttttttgtgggttttggtttgttggttttttttttcctctttttctcttgctcctcctgtctctttctctcctgggcttgtgaagtttgctcaatatggaatgtcctaattatttctttccccgatgaagaaggtgttaattgaggcagagctatttctgctcctggcctcgtcacccaggcggaaatgcgagagagagagagagagagagagagaatgaatatggggcagggcctcttggaaaaatcagccgtgagcagagaaaccaggactcctggatcctaggtttctgtgaagttttattttatgtttttctaccctagactagctaaaggagaagaggccatggggttggcttgggtccgagtggggttttgaggggacagatgtgggtggtgccaccagaggggaggaagcctcgatttaggagaaagactgaaaagctagctcacgattaaaaatataagacgtgtgagtaagagacagatatatacagacacccaggcagtgggttaattttaaaatgtatttataaccgaattcctcagacactctggacgcttgtttttctagaagcaacgctcagagtgtttcgtgtcggtggttggggggttgagggggattgcaaagctgctaaagatagacccgttttcagtagcattcctcagtgtcgggagcccagttcctgtgtgcccagcaccgtgccaatcgcttagaaggaagcaaagataaagtggaaggcttcctgctttctaagagcttccaaaatagttagaggaaacaagacccctcatttgcagccatttttaacagtgaaggctaatgtgtgattatacccacgcccccctaaatatgaaaattcagtagctattgtatgcctgaaaggggccaggtgcagtggctcacacctgtaatcccagcactttgagaggctgaggtgggagtatcccttgaggccgttagtttgagaccagcctaggcaacatagccagaccctgtctctgctaaaataaaaatttaaaaattggccgggtgcagtggctcacgcctgtaatcccagcactttgggaggccgaggcaggcggatcaaaaggtcaggagttcaagaccagcctggccaacatagtgaaaccccgtctctactaaaaatacaaaaaaaataaattagccgggcatggtggcgtgtgcctgtagtaccacatacttgagaggctgaggcaggagaatcacttgaacctgggacatagaggttacagtgagccgagatcacgctactgcactccagcttgggcaacagagtgagattttgtctcaaaataaaaaaatttaaaaattagccatgagtggtggtacatgcctatagtcctagctactcaggaggctgaggaagaaggatcacttgagcccaggaattggaggctgcaaggctgcagtaagctatgatggtgcccgcactccagcctgggtgacaaagtgag

SEQ ID NO: 2688 - DNA, 3894 bp, Homo sapiens
  source 1..3894: mol_type = unassigned DNA
tactttaaagttaaaagtgctttttaaaaaataataaggccaggcgtggagactcacgtctgtaatcccagaactttggaagaccgaggcgggtggatcacgaggtcaggagatcgagaccatcctggctaacacggtgaaaccctgtctccactaaaaatatgaaaaattagctgggcctactcgggaggctgaggcaggagaatggcgtaaacctgggaggcggagcttgcagtgagccgagatggcaccactgcactccagcctgggcgatataacaagactctgtctcaaaaaaaataaataaaataaataataataataataggggccaggtatggtggctcacacctataatcctagcactttaggaggctgaggagtttgagtccttggagaccaggggtttcaggccagcctgggcaacatagcaagaccccatctctacaaacaagttttaaaacttagccaggcatggtggtgcatgcctgtagtcctagctattgcagggactgaggcaggaggatcacctgagcccaggaggttgaggctgcagtgagctgtgattgtgccactgcactccagcctgggcagcagtgcaaaaccctgtctcaaaggaaaaaaaaaacctaggaagtgttgttcccatgataaggatcagcctccgtgtggtgcttccttcaccattgcccaatccccaggctcctgggtgcttaatgttccctcaggaacacacctgctttgtctgggagagacctgggcgtcttggtggcggggtttgggggtacttgctcatgggcttatggggcctctctctgtgtccccccaggtttacaagtcgtcctgaagtcgatcatgaaggcgatgatccctttgctgcagatcggcctcctcctattttttgcaatccttatttttgcaatcatagggttagaattttatatgggaaaatttcataccacctgctttgaagaggggacaggtaggtccacggagcatgatgcatctttccagttttctccttcagggacaagctcttgggaggattaggcaggggtgtgcttctttctcctggcagctgggaggaccgtctccttcagagagcactacaggagaggcagtgagtgaaatagcctctgagatcttagctgttgaaaggggtggggttccacagaaggtgacccagcagagaaagagtttatttgggaatgatcccaggaagcaccatcgggggaatgaggaagtgagcagagaaagaagggatcttttaaagagtgtgctatcaagcgggttaccacttaaaactgggactggatccccctgggcacctctgggagacagcaaagaacacacaactcagctggtcacggtggctcacgcctgtaatcccagcactttggggggccaaggcgggtggatcacctgagatcaggagtcagagaccatcctggccaacatggtgaaaccccatctgtactaaaaaatacaaaaattagctgggtgtggtggcaggcacctgtagtcccaattactcaggaggctgaggcaggagaatcacttgaacccgggaggcagaagttgcagtgagccaagatcacaccactgcactccagcctggcgaaagagtgagactccatctcaaataaataaataaataaaaatataaataaaaaaagaacacacacctcagagccgtcccagccaaggggcaagggagctggggtatttatacactggcttctttttgacattggtgaggactgctcctagagtgggaattaatgcctggcacatctggctgagtggaacaggtattctgggtgctttcagacctcgaccagtcctgacttctaaagcaagcaagaagtggggagagttgggccagaaaagggttattgcctcaatgcattgtgagtggtaccttgtggaaggtgagagacagagaagattccaggcacaggtgccatgctaaacgatagttctcatttattataggaacccatggatttattttgttctctgccctgagtgctgggtgagagtactggatgagtcctcctggtctcccccaacccccaggatgtaccagagataccccaattgggagtcctggcaccaaccaatcagaacctagcactcagcagcattctgcccctccctgactatgcccacattaacccttcagtggctgggtctgggggtagggtgagccccggaaaagccaggcagcgcagagacactctcccagggctcagctctgaaccagcagtgtggaagcagtgtgtccaccacgatccacactcaggaaccaaatagcccttggatacgttttcagttaaatctttgccatccaaactctagctgcttgctctctaaagctccagaatgaaatggaatcaagtaggaagggatgccttcagtatttcagtatttggaccactggccatctgggtgcagacagactgaatagcagttctggttctgatgatttgggtcaagggagctgtgaattgaaggagtggatagaaggaatcaagaagcccaaaggggaacccaggtgggcagagaaagaggtttcaggccccttatttgggaaaggcagccacagaagaagattctgtctgggagtggatttccacccaccctctccacccagtgacccccaagtggatccgcagaggcagcccctgagccctccctccccactcctccccacggggagggaaaacccactggggaaggtttatttgcaatggttggaggtttgggtttttttgtgggttttggtttgttggttttttttttcctctttttctcttgctcctcctgtctctttctctcctgggcttgtgaagtttgctcaatatggaatgtcctaattatttctttccccgatgaagaaggtgttaattgaggcagagctatttctgctcctggcctcgtcacccaggcggaaatgcgagagagagagagagagagagagagaatgaatatggggcagggcctcttggaaaaatcagccgtgagcagagaaaccaggactcctggatcctaggtttctgtgaagttttattttatgtttttctaccctagactagctaaaggagaagaggccatggggttggcttgggtccgagtggggttttgaggggacagatgtgggtggtgccaccagaggggaggaagcctcgatttaggagaaagactgaaaagctagctcacgattaaaaatataagacgtgtgagtaagagacagatatatacagacacccaggcagtgggttaattttaaaatgtatttataaccgaattcctcagacactctggacgcttgtttttctagaagcaacgctcagagtgtttcgtgtcggtggttggggggttgagggggattgcaaagctgctaaagatagacccgttttcagtagcattcctcagtgtcgggagcccagttcctgtgtgcccagcaccgtgccaatcgcttagaaggaagcaaagataaagtggaaggcttcctgctttctaagagcttccaaaatagttagaggaaacaagacccctcatttgcagccatttttaacagtgaaggctaatgtgtgattatacccacgcccccctaaatatgaaaattcagtagctattgtatgcctgaaaggggccaggtgcagtggctcacacctgtaatcccagcactttgagaggctgaggtgggagtatcccttgaggccgttagtttgagaccagcctaggcaacatagccagaccctgtctctgctaaaataaaaatttaaaaattggccgggtgcagtggctcacgcctgtaatcccagcactttgggaggccgaggcaggcggatcaaaaggtcaggagttcaagaccagcctggccaacat

SEQ ID NO: 2689 - DNA, 1346 bp, Homo sapiens
  source 1..1346: mol_type = unassigned DNA
ctacaaccccatccccgtccgacagaactgcctcacggttaaccggtctctcttcctcttcagcgaagacaacgtggtgagaaaatacgccaaaaagatcaccgaatggcctccctttgaatatatgattttagccaccatcatagcgaattgcatcgtcctcgcactggagcagcatctgcctgatgatgacaagaccccgatgtctgaacggctggatgacacagaaccatacttcattggaattttttgtttcgaggctggaattaaaatcattgcccttgggtttgccttccacaaaggctcctacttgaggaatggctggaatgtcatggactttgtggtggtgctaacgggcatcttggcgacagttgggacggagtttgacctacggacgctgagggcagttcgagtgctgcggccgctcaagctggtgtctggaatcccaagtgcgtgagtttccgaccctgacaaggggtttgctcacgggccccaggagccctcagtttcccctatgcagagcatctcaggaggccacatcctgccaccagcctgtgtgagggcagtctcttctttgggactccctatagggaaccccctaggaatatgactgtagctccccatgagctcctgaaagcaaactaggagccacacccatttattgagcacctactgtctatcgggagccatgctaagcaccacgtgtgatctcattcagtactcacagccctatgaagttgataggactgatgtctctattttatggagggggaaactgaggctcagagtggctgaaacattggagcagggttttgtggctgagaagtggcagaactaggagtgagcaagtgtgactccaagcctgggccgtaccactggtggcaatgaccattcccatttaatgagtgcctgctgcgtgcagggcactacagaaggactttacatgaattaccttatttcatcctcacagtcacccagcgaacacccattttacagatgagacggttgaggcttaaggaggttaaattactcacctgaattcttagagtggacagtaatgagctctaaaattcatactcattccttgctgctttctcattctccacagatacatctagtccccgtttaagggtggctgccatatgcagggtcaagattaagtgtaggttgagccaaaaaaaaatgtaaaaagcaaaaataaaacagggctgtcctttttctatcttcttgtcttggttaataataataatttagccaggcatggtggctcatgcctgtaattccagcactttgggaggatcacttgaggccacaagttcgagaccagcctgggcaacattgtgagg

SEQ ID NO: 2690 - DNA, 903 bp, Homo sapiens
  source 1..903: mol_type = unassigned DNA
gatcagccaagcaggctgctgagaaagatgacctgaattgcagggatgcagaaagtgctgaagatgctttgtcagctgagaactggttaagagaaagtggctgatacagcaaccccgttcagtgtctgcttttgtggggagccctctgctcagaaaactgctcttcttggcacccacttttctccctcctgtctctgggccacccttcttctttccactgggtgggccatggatgcatggacttcagatagctcggacccctgggtgctgacgagatgggaccctcgggacccctggaggactcgcagtgctgaccactagccgcgtcgcctgagccccagcgctgatgcgatacagtttccccctcactgtgctggagggagaagaccctgggatttctgagcgaggcccgtggatgttgaagtcttcctgggtccccgactccatgctctcgcgccccagttactatgacgccctgcacaaccgcagctcggggcacgcccagcgccctgcaggacactcggcctccccggctcagcatctgcttcgagggcccccctctgaggcggcggggcggcgtggtggatcaccgagatgtcatcttggcccaccaggcccacaaaatccacagcaccccccaggccaggaggaaagaatgggaccaccatcatagcgaattgcatcgtcctcgcactggagcagcatctgcctgatgatgacaagaccccgatgtctgaacggctggatgacacagaaccatacttcattggaattttttgtttcgaggctggaattaaaatcattgcccttgggtttgccttccacaaaggctcctacttgaggaatggctggaatgtcatggactttgtggtggtgctaacgggcatcttggcgacagttggg

SEQ ID NO: 2691 - DNA, 3081 bp, Homo sapiens
  source 1..3081: mol_type = unassigned DNA
tttgcagaatggcccgcttcggagacgagatgccggcccgctacgggggaggaggctccggggcagccgccggggtggtcgtgggcagcggaggcgggcgaggagccgggggcagccggcagggcgggcagcccggggcgcaaaggatgtacaagcagtcaatggcgcagagagcgcggaccatggcactctacaaccccatccccgtccgacagaactgcctcacggttaaccggtctctcttcctcttcagcgaagacaacgtggtgagaaaatacgccaaaaagatcaccgaatggcctccctttgaatatatgattttagccaccatcatagcgaattgcatcgtcctcgcactggagcagcatctgcctgatgatgacaagaccccgatgtctgaacggctggatgacacagaaccatacttcattggaattttttgtttcgaggctggaattaaaatcattgcccttgggtttgccttccacaaaggctcctacttgaggaatggctggaatgtcatggactttgtggtggtgctaacggggtaagtggcgcgtgctatacgctttggatttaactagctgaaggattacgaggcttttggttggtgtggtccgggccaggctcaggaaggctgagcccttgtgttctccctccccttgttatgcgcctgcctcctttctgccaacaccccacctccatgtctcagctgtatattacagcagatgctttctgttacaattaaaataatagctcattattgttggctgcttccagagtgctttatgcccattctctaatttaatccttgcaacaacccactgaattaggaaatattaatattcccatctgaccactgaggaatcagaaactcagagtgtaacttgcttaaggccacccagcaagtaagtgatggaactgggagatgaacagaagattatgcattccagaactcaaggttttaagtgttgtacgtgcatgggtctcttgatttgcttgaggatatcttgcttttatttcaacttggtgaatgttttttgagaatgtctgggtgcaagggattgtgattatgacaaaggagaaaagcaagctaaataaggtacagttactgtcttcaaggagttttcagatccatatatgatgaactgtggttgaaatgtgtatatgctttcctctaagcaccctgtatgaggtagcacttgctggtataacaaaagatccaaagctaggaaatgacttaaacacggcagaagtttatttgtcactcatagaaaattcaaaattgagctgggtgtggtggtgcatgcctgtaatctcagcactttgggaggctgaggtgggaggatcacttgagctcaggagttcaagaccagcttgggcaacacagtgagaccacccccccatctgtaaaacataaaataaaataaaaattaaccaggcatggtggtacatgcctgggagaattgcttgagctcaggagttggagggcacagtgagctatgatcatccaaccgtgctccagcctgggcaacagagcaagaccccatctcgaaaaaaaaaagtccaaaataattgttcctagttgacaggctcatctcctccaatgactgacggaccctgacccttgccatattgtggctcttcattgtcagcccacatcatccaataactccatgcttgtctgtatcaaaccaggaaggagaagtgagcatagaaggtgatacttggaaaggtttatgagtttggaaggggtgtgacccatacctgttccattcatatcctattggctagaactcggtcacatgaccacacatcactgcaagggaagctgggaagtatcagattgtgcttagaagaaaagggaaatggatttggagaatgacctactagtctgtcagggaccttaaaaacttttattagattccagtagggacattagtatctggtaccaatggctggttcctcctcttcccactctctactctcctctcagctaagtctgggctcttctattctaagacccttcttcactggacacctttttcatagtaatcatttacaggatcatagctttccatgttttgttgctgctccaggttctgtctctcttggcggatgtgatgggttgcagcacccacactgtgctggccgggctctcacaatgcagatttgtttcagagcaatgttgcctctcacagaaggagctgtggcctattgggctgtttctgtagaggccttcagatgtcagcagtctgttgtaaggactctgggctagctctcatgggcttgggtgttcacagagggatctttgttggctgtgctcacagttcggtggcttgggaccttggtgggttccaagggcatattatggtactgggcacttttctcttagtctactaggaaactcatctagaaacagcctagtggctaacttttttattgtttaaaaaatgtaaagctgggcagggtggctcatgcctgtatcccagcacattgggaggccaaggtgggaggattgcttgggcccaggagtttgagacgagcctgagcaacatagcaagaccacatctccacaaaataaaaattaaaagtgtataaagctgggtacagtggcacatgcctgtaaccccaattactcaggaggctggagagagaggattgcttgagcctaactagtttgagaccagcttgggtaacctagcaagatcccatgcaaaactaagtagagaataatagagcaaacacctgtgtatacattcatttattcaatgactatttattgaacacttctgtgtgccaggtcctgttctaggctctgggacacagcagtaaacaaaatagaaaaatcccctgtcctcatggagctgagagtctactgatggagatggacacaattgatgaatgaatctagtgtgtcagatggcggtgaggggtacagaggaaaaataaagcaggggagggatgggatgtgtggcaggcaggggtgaggggtgctggaagccagggaagacttcactgggcatgtgacatctgaatgaaaacctaagggaggtgagtgagtgagccatgaggagagct

SEQ ID NO: 2692 - DNA, 1623 bp, Homo sapiens
  source 1..1623: mol_type = unassigned DNA
gtggaagagagagaatactcttcttaccaccgttcctctgctctttaagggaagcccgaacggggggaaaaagtctcctttttgagacaacagttttgccctgtgctgggaggtcccagtgcggtgttaaggggcatagagaagagagcaagaaatcgtgaattatttttccccctgaggagcagtggcctggcttgttctcagcttctgccttgcctggattgatctccccaggctgggtccccgtgtagcacttagctaaagatgatcagcagctgagaacgatcggtcctcctttccctcctcccagcatcagggaaacctcctcctcctctttttttttttcccttggcagctgatacagcaaccccgttcagtgtctgcttttgtggggagccctctgctcagaaaactgctcttcttggcacccacttttctccctcctgtctctgggccacccttcttctttccactgggtgggccatggatgcatggacttcagatagctcggacccctgggtgctgacgagatgggaccctcgggacccctggaggactcgcagtgctgaccactagccgcgtcgcctgagccccagcgctgatgcgatacagtttccccctcactgtgctggagggagaagaccctgggatttctgagcgaggcccgtggatgttgaagtcttcctgggtccccgactccatgctctcgcgccccagttactatgacgccctgcacaaccgcagctcggggcacgcccagcgccctgcaggacactcggcctccccggctcagcatctgcttcgagggcccccctctgaggcggcggggcggcgtggtggatcaccgagatgtcatcttggcccaccaggcccacaaaatccacagcaccccccaggccaggaggaaagaatgggagaagctaccagaggatgtgcttcacccaaacaagggagtaaaccaagaagagggaaacagagaacactggacttaagaaatccaacaatgagaagcaaagggaatctcctggatgatgataaagagagagcccaggatgaaagctgtatgccagggaaagtcctgattagaccatgtgacaagtcttcaggaaagactgcttctggatgataaaatgaactgaatacctgttaagagacttggggggtcaaatttgcaataagtaccaaacaaagaagattaaaaaatgataagtcccaagggaaacaatatgttgtaaagaaaaagtagctatagtttgttcatgacataactgtaacttgccttgtacatgataatataaacaccgaatcttcctcactttgtgaaagaacaatattgggcaaatgcgcaggttttggaaagttccatgtgtagggggatggagggagaaattagcaaaatcctccttttctatagctaatacctataaagtgctacaacacccagacaggatacttctttgttgctttcattataatatccttgggtattgctgttggctatttcttaatactacttaaatattcacaagtgtacgacttgttttcccaacctaactataagctctttgatagttaatgcttctctatattatctgtagtggctggcatagtatgctacgcata

SEQ ID NO: 2693 - DNA, 673 bp, Homo sapiens
  source 1..673: mol_type = unassigned DNA
atatacaagaaatcaggagtaagaatgcttcaaacttcccaacagcaatactggaattgagaatacgttggagcaatacttcacatttttgaagtaaaatgatctccaaaccagaattctatacccagccaaactaccaatgaggaagctaccagaggatgtgcttcacccaaacaagggagtaaaccaagaagagggaaacagagaacactggacttaagaaatccaacaatgagaagcaaagggaatctcctggatgatgataaagagagagcccaggatgaaagctgtatgccagggaaagtcctgattagaccatgtgacaagtcttcaggaaagactgcttctggatgataaaatgaactgaatacctgttaagagacttggggggtcaaatttgcaataagtaccaaacaaagaagattaaaaaatgataagtcccaagggaaacaatatgttgtaaagaaaaagtagctatagtttgttcatgacataactgtaacttgccttgtacatgataatataaacaccgaatcttcctcactttgtgaaagaacaatattgggcaaatgcgcaggttttggaaagttccatgtgtagggggatggagggagaaattagcaaaatcctccttttctatagctaatacctataaagtgctacaacacccaga

SEQ ID NO: 2694 - DNA, 8410 bp, Homo sapiens
  source 1..8410: mol_type = unassigned DNA
atggcccgcttcggagacgagatgccggcccgctacgggggaggaggctccggggcagccgccggggtggtcgtgggcagcggaggcgggcgaggagccgggggcagccggcagggcgggcagcccggggcgcaaaggatgtacaagcagtcaatggcgcagagagcgcggaccatggcactctacaaccccatccccgtccgacagaactgcctcacggttaaccggtctctcttcctcttcagcgaagacaacgtggtgagaaaatacgccaaaaagatcaccgaatggccaccctttgaatatatgattttagccaccatcatagcgaattgcatcgtcctcgcactggagcagcatctgcctgatgatgacaagaccccgatgtctgaacggctggatgacacagaaccatacttcattggaattttttgtttcgaggctggaattaaaatcattgcccttgggtttgccttccacaaaggctcctacttgaggaatggctggaatgtcatggactttgtggtggtgctaacgggcatcttggcgacagttgggacggagtttgacctacggacgctgagggcagttcgagtgctgcggccgctcaagctggtgtctggaatcccaagtttacaagtcgtcctgaagtcgatcatgaaggcgatgatccctttgctgcagatcggcctcctcctattttttgcaatccttatttttgcaatcatagggttagaattttatatgggaaaatttcataccacctgctttgaagaggggacagatgacattcagggtgagtctccggctccatgtgggacagaagagcccgcccgcacctgccccaatgggaccaaatgtcagccctactgggaagggcccaacaacgggatcactcagttcgacaacatcctgtttgcagtgctgactgttttccagtgcataaccatggaagggtggactgatctcctctacaatagcaacgatgcctcagggaacacttggaactggttgtacttcatccccctcatcatcatcggctccttttttatgctgaaccttgtgctgggtgtgctgtcaggggagtttgccaaagaaagggaacgggtggagaaccggcgggcttttctgaagctgaggcggcaacaacagattgaacgtgagctcaatgggtacatggagtggatctcaaaagcagaagaggtgatcctcgccgaggatgaaactgacggggagcagaggcatccctttgatggagctctgcggagaaccaccataaagaaaagcaagacagatttgctcaaccccgaagaggctgaggatcagctggctgatatagcctctgtgggttctcccttcgcccgagccagcattaaaagtgccaagctggagaactcgaccttttttcacaaaaaggagaggaggatgcgtttctacatccgccgcatggtcaaaactcaggccttctactggactgtactcagtttggtagctctcaacacgctgtgtgttgctattgttcactacaaccagcccgagtggctctccgacttcctttactatgcagaattcattttcttaggactctttatgtccgaaatgtttataaaaatgtacgggcttgggacgcggccttacttccactcttccttcaactgctttgactgtggggttatcattgggagcatcttcgaggtcatctgggctgtcataaaacctggcacatcctttggaatcagcgtgttacgagccctcaggttattgcgtattttcaaagtcacaaagtactgggcatctctcagaaacctggtcgtctctctcctcaactccatgaagtccatcatcagcctgttgtttctccttttcctgttcattgtcgtcttcgcccttttgggaatgcaactcttcggcggccagtttaatttcgatgaagggactcctcccaccaacttcgatacttttccagcagcaataatgacggtgtttcagatcctgacgggcgaagactggaacgaggtcatgtacgacgggatcaagtctcaggggggcgtgcagggcggcatggtgttctccatctatttcattgtactgacgctctttgggaactacaccctcctgaatgtgttcttggccatcgctgtggacaatctggccaacgcccaggagctcaccaaggtggaggcggacgagcaagaggaagaagaagcagcgaaccagaaacttgccctacagaaagccaaggaggtggcagaagtgagtcctctgtccgcggccaacatgtctatagctgtgaaagagcaacagaagaatcaaaagccagccaagtccgtgtgggagcagcggaccagtgagatgcgaaagcagaacttgctggccagccgggaggccctgtataacgaaatggacccggacgagcgctggaaggctgcctacacgcggcacctgcggccagacatgaagacgcacttggaccggccgctggtggtggacccgcaggagaaccgcaacaacaacaccaacaagagccgggcggccgagcccaccgtggaccagcgcctcggccagcagcgcgccgaggacttcctcaggaaacaggcccgctaccacgatcgggcccgggaccccagcggctcggcgggcctggacgcacggaggccctgggcgggaagccaggaggccgagctgagccgggagggaccctacggccgcgagtcggaccaccacgcccgggagggcagcctggagcaacccgggttctgggagggcgaggccgagcgaggcaaggccggggacccccaccggaggcacgtgcaccggcaggggggcagcagggagagccgcagcgggtccccgcgcacgggcgcggacggggagcatcgacgtcatcgcgcgcaccgcaggcccggggaggagggtccggaggacaaggcggagcggagggcgcggcaccgcgagggcagccggccggcccggggcggcgagggcgagggcgagggccccgacgggggcgagcgcaggagaaggcaccggcatggcgctccagccacgtacgagggggacgcgcggagggaggacaaggagcggaggcatcggaggaggaaagagaaccagggctccggggtccctgtgtcgggccccaacctgtcaaccacccggccaatccagcaggacctgggccgccaagacccacccctggcagaggatattgacaacatgaagaacaacaagctggccaccgcggagtcggccgctccccacggcagccttggccacgccggcctgccccagagcccagccaagatgggaaacagcaccgaccccggccccatgctggccatccctgccatggccaccaacccccagaacgccgccagccgccggacgcccaacaacccggggaacccatccaatcccggcccccccaagacccccgagaatagccttatcgtcaccaaccccagcggcacccagaccaattcagctaagactgccaggaaacccgaccacaccacagtggacatccccccagcctgcccaccccccctcaaccacaccgtcgtacaagtgaacaaaaacgccaacccagacccactgccaaaaaaagaggaagagaagaaggaggaggaggaagacgaccgtggggaagacggccctaagccaatgcctccctatagctccatgttcatcctgtccacgaccaacccccttcgccgcctgtgccattacatcctgaacctgcgctactttgagatgtgcatcctcatggtcattgccatgagcagcatcgccctggccgccgaggaccctgtgcagcccaacgcacctcggaacaacgtgctgcgatactttgactacgtttttacaggcgtctttacctttgagatggtgatcaagatgattgacctggggctcgtcctgcatcagggtgcctacttccgtgacctctggaatattctcgacttcatagtggtcagtggggccctggtagcctttgccttcactggcaatagcaaaggaaaagacatcaacacgattaaatccctccgagtcctccgggtgctacgacctcttaaaaccatcaagcggctgccaaagctcaaggctgtgtttgactgtgtggtgaactcacttaaaaacgtcttcaacatcctcatcgtctacatgctattcatgttcatcttcgccgtggtggctgtgcagctcttcaaggggaaattcttccactgcactgacgagtccaaagagtttgagaaagattgtcgaggcaaatacctcctctacgagaagaatgaggtgaaggcgcgagaccgggagtggaagaagtatgaattccattacgacaatgtgctgtgggctctgctgaccctcttcaccgtgtccacgggagaaggctggccacaggtcctcaagcattcggtggacgccacctttgagaaccagggccccagccccgggtaccgcatggagatgtccattttctacgtcgtctactttgtggtgttccccttcttctttgtcaatatctttgtggccttgatcatcatcaccttccaggagcaaggggacaagatgatggaggaatacagcctggagaaaaatgagagggcctgcattgatttcgccatcagcgccaagccgctgacccgacacatgccgcagaacaagcagagcttccagtaccgcatgtggcagttcgtggtgtctccgcctttcgagtacacgatcatggccatgatcgccctcaacaccatcgtgcttatgatgaagttctatggggcttctgttgcttatgaaaatgccctgcgggtgttcaacatcgtcttcacctccctcttctctctggaatgtgtgctgaaagtcatggcttttgggattctgaattatttccgcgatgcctggaacatcttcgactttgtgactgttctgggcagcatcaccgatatcctcgtgactgagtttgggaatccgaataacttcatcaacctgagctttctccgcctcttccgagctgcccggctcatcaaacttctccgtcagggttacaccatccgcattcttctctggacctttgtgcagtccttcaaggccctgccttatgtctgtctgctgatcgccatgctcttcttcatctatgccatcattgggatgcaggtgtttggtaacattggcatcgacgtggaggacgaggacagtgatgaagatgagttccaaatcactgagcacaataacttccggaccttcttccaggccctcatgcttctcttccggagtgccaccggggaagcttggcacaacatcatgctttcctgcctcagcgggaaaccgtgtgataagaactctggcatcctgactcgagagtgtggcaatgaatttgcttatttttactttgtttccttcatcttcctctgctcgtttctgatgctgaatctctttgtcgccgtcatcatggacaactttgagtacctcacccgagactcctccatcctgggcccccaccacctggatgagtacgtgcgtgtctgggccgagtatgaccccgcagcttggggccgcatgccttacctggacatgtatcagatgctgagacacatgtctccgcccctgggtctggggaagaagtgtccggccagagtggcttacaagcggcttctgcggatggacctgcccgtcgcagatgacaacaccgtccacttcaattccaccctcatggctctgatccgcacagccctggacatcaagattgccaagggaggagccgacaaacagcagatggacgctgagctgcggaaggagatgatggcgatttggcccaatctgtcccagaagacgctagacctgctggtcacacctcacaagtccacggacctcaccgtggggaagatctacgcagccatgatgatcatggagtactaccggcagagcaaggccaagaagctgcaggccatgcgcgaggagcaggaccggacacccctcatgttccagcgcatggagcccccgtccccaacgcaggaagggggacctggccagaacgccctcccctccacccagctggacccaggaggagccctgatggctcacgaaagcggcctcaaggagagcccgtcctgggtgacccagcgtgcccaggagatgttccagaagacgggcacatggagtccggaacaaggcccccctaccgacatgcccaacagccagcctaactctcagtccgtggagatgcgagagatgggcagagatggctactccgacagcgagcactacctccccatggaaggccagggccgggctgcctccatgccccgcctccctgcagagaaccagaggagaaggggccggccacgtgggaataacctcagtaccatctcagacaccagccccatgaagcgttcagcctccgtgctgggccccaaggcccgacgcctggacgattactcgctggagcgggtcccgcccgaggagaaccagcggcaccaccagcggcgccgcgaccgcagccaccgcgcctctgagcgctccctgggccgctacaccgatgtggacacaggcttggggacagacctgagcatgaccacccaatccggggacctgccgtcgaaggagcgggaccaggagcggggccggcccaaggatcggaagcatcgacagcaccaccaccaccaccaccaccaccaccatcccccgccccccgacaaggaccgctatgcccaggaacggccggaccacggccgggcacgggctcgggaccagcgctggtcccgctcgcccagcgagggccgagagcacatggcgcaccggcagggcagtagttccgtaagtggaagcccagccccctcaacatctggtaccagcactccgcggcggggccgccgccagctcccccagaccccctccaccccccggccacacgtgtcctattcccctgtgatccgtaaggccggcggctcggggcccccgcagcagcagcagcagcagcagcagcagcagcagcagcaggcggtggccaggccgggccgggcggccaccagcggccctcggaggtacccaggccccacggccgagcctctggccggagatcggccgcccacggggggccacagcagcggccgctcgcccaggatggagaggcgggtcccaggcccggcccggagcgagtcccccagggcctgtcgacacggcggggcccggtggccggcatctggcccgcacgtgtccgaggggcccccgggtccccggcaccatggctactaccggggctccgactacgacgaggccgatggcccgggcagcgggggcggcgaggaggccatggccggggcctacgacgcgccaccccccgtacgacacgcgtcctcgggcgccaccgggcgctcgcccaggactccccgggcctcgggcccggcctgcgcctcgccttctcggcacggccggcgactccccaacggctactacccggcgcacggactggccaggccccgcgggccgggctccaggaagggcctgcacgaaccctacagcgagagtgacgatgattggtgctaagcccgggcgaggtggcgcccgcccggccccccacgcaccccacgcacacaccccacccgaggagccgcgcagaggccgcgggggcccagcacagagggcccgggagagggccagccgggagaccccagactctggagaggccagggctgggccacaagggtgtcccgcagagaccctcggccaaaagagaccctcctgggcagccacggcgccccccaaccagccccgatccccccacccacgacaggggctctcgggtgggaggcagggagcagacaaaccacacagccaagggatttgaattaactcagccatttttggagaactttggggaacatgaaaaaaaaaaaaaaaaaaaaaaaaaaaaacatttttaaaagaaaaaacggggagaaaaaaatagcttctattgatgagttttatcatctcaattgaatctttcctttccctgatgaagacagctggtggccgagtgcggcaaagaagccagaaggaaccagaatcccagtgccctacacccaccaccagacacactcacacccacacacgttctcagacacacacaagagtgcttgccggttataccaaaccctactattactgcctgcagaaatcaatttaaaaaaataataataacaataaacaattttaaaaaggacaaaaaaattaatgattgagaaaagaggcatttttttctgacatttggtcctgcttgaaacaacaaaagaagaagaaaaacccaccatcaccaccgattcctttgcttcttttttccttttttcctaccttgtttgaaaaccgtgggcttgggactgtgaattattgcatgacattcaaaaagaaaaaaaaaataaaaaaaagttgaatcaaa

SEQ ID NO: 2695 - DNA, 7158 bp, Homo sapiens
  source 1..7158: mol_type = unassigned DNA; mol_type = unassigned DNA
gcggcggcggctgcggcggtggggccgggcgaggtccgctgcggtcccggcggctccgtggctgctccgctctgagcgcctggcgcgccccgcgccctccctgccggggccgctgggccggggatgcacgcggggcccgggagccatggtccgcttcggggacgagctgggcggccgctatgggggccccggcggcggagagcgggcccggggcggcggggccggcggggcggggggcccgggtcccggggggctgcagcccggccagcgggtcctctacaagcaatcgatcgcgcagcgcgcgcggaccatggcgctgtacaaccccatcccggtcaagcagaactgcttcaccgtcaaccgctcgctcttcgtcttcagcgaggacaacgtcgtccgcaaatacgcgaagcgcatcaccgagtggcctccattcgagtatatgatcctggccaccatcatcgccaactgcatcgtgctggccctggagcagcacctccctgatggggacaaaacgcccatgtccgagcggctggacgacacggagccctatttcatcgggatcttttgcttcgaggcagggatcaaaatcatcgctctgggctttgtcttccacaagggctcttacctgcggaacggctggaacgtcatggacttcgtggtcgtcctcacagggatccttgccacggctggaactgacttcgacctgcgaacactgagggctgtgcgtgtgctgaggcccctgaagctggtgtctgggattccaagtttgcaggtggtgctcaagtccatcatgaaggccatggttccactcctgcagattgggctgcttctcttctttgccatcctcatgtttgccatcattggcctggagttctacatgggcaagttccacaaggcctgtttccccaacagcacagatgcggagcccgtgggtgacttcccctgtggcaaggaggccccagcccggctgtgcgagggcgacactgagtgccgggagtactggccaggacccaactttggcatcaccaactttgacaatatcctgtttgccatcttgacggtgttccagtgcatcaccatggagggctggactgacatcctctataatacaaacgatgcggccggcaacacctggaactggctctacttcatccctctcatcatcatcggctccttcttcatgctcaacctggtgctgggcgtgctctcgggggagtttgccaaggagcgagagagggtggagaaccgccgcgccttcctgaagctgcgccggcagcagcagatcgagcgagagctcaacgggtacctggagtggatcttcaaggcggaggaagtcatgctggccgaggaggacaggaatgcagaggagaagtcccctttggacgtgctgaagagagcggccaccaagaagagcagaaatgacctgatccacgcagaggagggagaggaccggtttgcagatctctgtgctgttggatcccccttcgcccgcgccagcctcaagagcgggaagacagagagctcgtcatacttccggaggaaggagaagatgttccggttttttatccggcgcatggtgaaggctcagagcttctactgggtggtgctgtgcgtggtggccctgaacacactgtgtgtggccatggtgcattacaaccagccgcggcggcttaccacgaccctgtattttgcagagtttgttttcctgggtctcttcctcacagagatgtccctgaagatgtatggcctggggcccagaagctacttccggtcctccttcaactgcttcgactttggggtcatcgtggggagcgtctttgaagtggtctgggcggccatcaagccgggaagctcctttgggatcagtgtgctgcgggccctccgcctgctgaggatcttcaaagtcacgaagtactggagctccctgcggaacctggtggtgtccctgctgaactccatgaagtccatcatcagcctgctcttcttgctcttcctgttcattgtggtcttcgccctgctggggatgcagctgtttgggggacagttcaacttccaggatgagactcccacaaccaacttcgacaccttccctgccgccatcctcactgtcttccagatcctgacgggagaggactggaatgcagtgatgtatcacgggatcgaatcgcaaggcggcgtcagcaaaggcatgttctcgtccttttacttcattgtcctgacactgttcggaaactacactctgctgaatgtctttctggccatcgctgtggacaacctggccaacgcccaagagctgaccaaggatgaagaggagatggaagaagcagccaatcagaagcttgctctgcaaaaggccaaagaagtggctgaagtcagccccatgtctgccgcgaacatctccatcgccgccaggcagcagaactcggccaaggcgcgctcggtgtgggagcagcgggccagccagctacggctgcagaacctgcgggccagctgcgaggcgctgtacagcgagatggaccccgaggagcggctgcgcttcgccactacgcgccacctgcggcccgacatgaagacgcacctggaccggccgctggtggtggagctgggccgcgacggcgcgcgggggcccgtgggaggcaaagcccgacctgaggctgcggaggcccccgagggcgtcgaccctccgcgcaggcaccaccggcaccgcgacaaggacaagacccccgcggcgggggaccaggaccgagcagaggccccgaaggcggagagcggggagcccggtgcccgggaggagcggccgcggccgcaccgcagccacagcaaggaggccgcggggcccccggaggcgcggagcgagcgcggccgaggcccaggccccgagggcggccggcggcaccaccggcgcggctccccggaggaggcggccgagcgggagccccgacgccaccgcgcgcaccggcaccaggatccgagcaaggagtgcgccggcgccaagggcgagcggcgcgcgcggcaccgcggcggcccccgagcggggccccgggaggcggagagcggggaggagccggcgcggcggcaccgggcccggcacaaggcgcagcctgctcacgaggctgtggagaaggagaccacggagaaggaggccacggagaaggaggctgagatagtggaagccgacaaggaaaaggagctccggaaccaccagccccgggagccacactgtgacctggagaccagtgggactgtgactgtgggtcccatgcacacactgcccagcacctgtctccagaaggtggaggaacagccagaggatgcagacaatcagcggaacgtcactcgcatgggcagtcagcccccagacccgaacactattgtacatatcccagtgatgctgacgggccctcttggggaagccacggtcgttcccagtggtaacgtggacctggaaagccaagcagaggggaagaaggaggtggaagcggatgacgtgatgaggagcggcccccggcctatcgtcccatacagctccatgttctgtttaagccccaccaacctgctccgccgcttctgccactacatcgtgaccatgaggtacttcgaggtggtcattctcgtggtcatcgccttgagcagcatcgccctggctgctgaggacccagtgcgcacagactcgcccaggaacaacgctctgaaatacctggattacattttcactggtgtctttacctttgagatggtgataaagatgatcgacttgggactgctgcttcaccctggagcctatttccgggacttgtggaacattctggacttcattgtggtcagtggcgccctggtggcgtttgctttctcaggatccaaagggaaagacatcaataccatcaagtctctgagagtccttcgtgtcctgcggcccctcaagaccatcaaacggctgcccaagctcaaggctgtgtttgactgtgtggtgaactccctgaagaatgtcctcaacatcttgattgtctacatgctcttcatgttcatatttgccgtcattgcggtgcagctcttcaaagggaagtttttctactgcacagatgaatccaaggagctggagagggactgcaggggtcagtatttggattatgagaaggaggaagtggaagctcagcccaggcagtggaagaaatacgactttcactacgacaatgtgctctgggctctgctgacgctgttcacagtgtccacgggagaaggctggcccatggtgctgaaacactccgtggatgccacctatgaggagcagggtccaagccctgggtaccgcatggagctgtccatcttctacgtggtctactttgtggtctttcccttcttcttcgtcaacatctttgtggctttgatcatcatcaccttccaggagcagggggacaaggtgatgtctgaatgcagcctggagaagaacgagagggcttgcattgacttcgccatcagcgccaaacccctgacacggtacatgccccaaaaccggcagtcgttccagtataagacgtggacatttgtggtctccccgccctttgaatacttcatcatggccatgatagccctcaacactgtggtgctgatgatgaagttctatgatgcaccctatgagtacgagctgatgctgaaatgcctgaacatcgtgttcacatccatgttctccatggaatgcgtgctgaagatcatcgcctttggggtgctgaactatttcagagatgcctggaatgtctttgactttgtcactgtgttgggaagtattactgatattttagtaacagagattgcggaaacgaacaatttcatcaacctcagcttcctccgcctctttcgagctgcgcggctgatcaagctgctccgccagggctacaccatccgcatcctgctgtggacctttgtccagtccttcaaggccctgccctacgtgtgtctgctcattgccatgctgttcttcatctacgccatcatcggcatgcaggtgtttgggaatattgccctggatgatgacaccagcatcaaccgccacaacaacttccggacgtttttgcaagccctgatgctgctgttcaggagcgccacgggggaggcctggcacgagatcatgctgtcctgcctgagcaaccaggcctgtgatgagcaggccaatgccaccgagtgtggaagtgactttgcctacttctacttcgtctccttcatcttcctgtgctcctttctgatgttgaacctctttgtggctgtgatcatggacaattttgagtacctcacgcgggactcttccatcctaggtcctcaccacttggatgagttcatccgggtctgggctgaatacgacccggctgcgtgtgggcgcatcagttacaatgacatgtttgagatgctgaaacacatgtccccgcctctggggctggggaagaaatgccctgctcgagttgcttacaagcgcctggttcgcatgaacatgcccatctccaacgaggacatgactgttcacttcacgtccacgctgatggccctcatccggacggcactggagatcaagctggccccagctgggacaaagcagcatcagtgtgacgcggagttgaggaaggagatttccgttgtgtgggccaatctgccccagaagactttggacttgctggtaccaccccataagcctgatgagatgacagtggggaaggtttatgcagctctgatgatattcgacttctacaagcagaacaaaaccaccagagaccagatgcagcaggctcctggaggcctctcccagatgggtcctgtgtccctgttccaccctctgaaggccaccctggagcagacacagccggctgtgctccgaggagcccgggttttccttcgacagaagagttccacctccctcagcaatggcggggccatacaaaaccaagagagtggcatcaaagagtctgtctcctggggcactcaaaggacccaggatgcaccccatgaggccaggccacccctggagcgtggccactccacagagatccctgtggggcggtcaggagcactggctgtggacgttcagatgcagagcataacccggaggggccctgatggggagccccagcctgggctggagagccagggtcgagcggcctccatgccccgccttgcggccgagactcagcccgtcacagatgccagccccatgaagcgctccatctccacgctggcccagcggccccgtgggactcatctttgcagcaccaccccggaccgcccaccccctagccaggcgtcgtcgcaccaccaccaccaccgctgccaccgccgcagggacaggaagcagaggtccctggagaaggggcccagcctgtctgccgatatggatggcgcaccaagcagtgctgtggggccggggctgcccccgggagaggggcctacaggctgccggcgggaacgagagcgccggcaggagcggggccggtcccaggagcggaggcagccctcatcctcctcctcggagaagcagcgcttctactcctgcgaccgctttgggggccgtgagcccccgaagcccaagccctccctcagcagccacccaacgtcgccaacagctggccaggagccgggaccccacccacaggccggctcagccgtgggctttccgaacacaacgccctgctgcagagagaccccctcagccagcccctggcccctggctctcgaattggctctgacccttacctggggcagcgtctggacagtgaggcctctgtccacgccctgcctgaggacactctcactttcgaggaggctgtggccaccaactcgggccgctcctccaggacttcctacgtgtcctccctgacctcccagtctcaccctctccgccgcgtgcccaacggttaccactgcaccctgggactcagctcgggtggccgagcacggcacagctaccaccaccctgaccaagaccactggtgctagctgcaccgtgaccgctcagacgcctgcatgcagcaggcgtgtgttccagtggatgagttttatcatccacacggggcagccggccctcgggggaggccttgcccaccttggtgaggctcctgtggcccctccctccccctcctcccctcttttactctagacgacgaataaagccctgtt

SEQ ID NO: 2696 - DNA, 9790 bp, Homo sapiens
  source 1..9790: mol_type = unassigned DNA; mol_type = unassigned DNA
gcggcggcggctgcggcggtggggccgggcgaggtccgctgcggtcccggcggctccgtggctgctccgctctgagcgcctggcgcgccccgcgccctccctgccggggccgctgggccggggatgcacgcggggcccgggagccatggtccgcttcggggacgagctgggcggccgctatgggggccccggcggcggagagcgggcccggggcggcggggccggcggggcggggggcccgggtcccggggggctgcagcccggccagcgggtcctctacaagcaatcgatcgcgcagcgcgcgcggaccatggcgctgtacaaccccatcccggtcaagcagaactgcttcaccgtcaaccgctcgctcttcgtcttcagcgaggacaacgtcgtccgcaaatacgcgaagcgcatcaccgagtggcctccattcgagtatatgatcctggccaccatcatcgccaactgcatcgtgctggccctggagcagcacctccctgatggggacaaaacgcccatgtccgagcggctggacgacacggagccctatttcatcgggatcttttgcttcgaggcagggatcaaaatcatcgctctgggctttgtcttccacaagggctcttacctgcggaacggctggaacgtcatggacttcgtggtcgtcctcacagggatccttgccacggctggaactgacttcgacctgcgaacactgagggctgtgcgtgtgctgaggcccctgaagctggtgtctgggattccaagtttgcaggtggtgctcaagtccatcatgaaggccatggttccactcctgcagattgggctgcttctcttctttgccatcctcatgtttgccatcattggcctggagttctacatgggcaagttccacaaggcctgtttccccaacagcacagatgcggagcccgtgggtgacttcccctgtggcaaggaggccccagcccggctgtgcgagggcgacactgagtgccgggagtactggccaggacccaactttggcatcaccaactttgacaatatcctgtttgccatcttgacggtgttccagtgcatcaccatggagggctggactgacatcctctataatacaaacgatgcggccggcaacacctggaactggctctacttcatccctctcatcatcatcggctccttcttcatgctcaacctggtgctgggcgtgctctcgggggagtttgccaaggagcgagagagggtggagaaccgccgcgccttcctgaagctgcgccggcagcagcagatcgagcgagagctcaacgggtacctggagtggatcttcaaggcggaggaagtcatgctggccgaggaggacaggaatgcagaggagaagtcccctttggacgtgctgaagagagcggccaccaagaagagcagaaatgacctgatccacgcagaggagggagaggaccggtttgcagatctctgtgctgttggatcccccttcgcccgcgccagcctcaagagcgggaagacagagagctcgtcatacttccggaggaaggagaagatgttccggttttttatccggcgcatggtgaaggctcagagcttctactgggtggtgctgtgcgtggtggccctgaacacactgtgtgtggccatggtgcattacaaccagccgcggcggcttaccacgaccctgtattttgcagagtttgttttcctgggtctcttcctcacagagatgtccctgaagatgtatggcctggggcccagaagctacttccggtcctccttcaactgcttcgactttggggtcatcgtggggagcgtctttgaagtggtctgggcggccatcaagccgggaagctcctttgggatcagtgtgctgcgggccctccgcctgctgaggatcttcaaagtcacgaagtactggagctccctgcggaacctggtggtgtccctgctgaactccatgaagtccatcatcagcctgctcttcttgctcttcctgttcattgtggtcttcgccctgctggggatgcagctgtttgggggacagttcaacttccaggatgagactcccacaaccaacttcgacaccttccctgccgccatcctcactgtcttccagatcctgacgggagaggactggaatgcagtgatgtatcacgggatcgaatcgcaaggcggcgtcagcaaaggcatgttctcgtccttttacttcattgtcctgacactgttcggaaactacactctgctgaatgtctttctggccatcgctgtggacaacctggccaacgcccaagagctgaccaaggatgaagaggagatggaagaagcagccaatcagaagcttgctctgcaaaaggccaaagaagtggctgaagtcagccccatgtctgccgcgaacatctccatcgccgccaggcagcagaactcggccaaggcgcgctcggtgtgggagcagcgggccagccagctacggctgcagaacctgcgggccagctgcgaggcgctgtacagcgagatggaccccgaggagcggctgcgcttcgccactacgcgccacctgcggcccgacatgaagacgcacctggaccggccgctggtggtggagctgggccgcgacggcgcgcgggggcccgtgggaggcaaagcccgacctgaggctgcggaggcccccgagggcgtcgaccctccgcgcaggcaccaccggcaccgcgacaaggacaagacccccgcggcgggggaccaggaccgagcagaggccccgaaggcggagagcggggagcccggtgcccgggaggagcggccgcggccgcaccgcagccacagcaaggaggccgcggggcccccggaggcgcggagcgagcgcggccgaggcccaggccccgagggcggccggcggcaccaccggcgcggctccccggaggaggcggccgagcgggagccccgacgccaccgcgcgcaccggcaccaggatccgagcaaggagtgcgccggcgccaagggcgagcggcgcgcgcggcaccgcggcggcccccgagcggggccccgggaggcggagagcggggaggagccggcgcggcggcaccgggcccggcacaaggcgcagcctgctcacgaggctgtggagaaggagaccacggagaaggaggccacggagaaggaggctgagatagtggaagccgacaaggaaaaggagctccggaaccaccagccccgggagccacactgtgacctggagaccagtgggactgtgactgtgggtcccatgcacacactgcccagcacctgtctccagaaggtggaggaacagccagaggatgcagacaatcagcggaacgtcactcgcatgggcagtcagcccccagacccgaacactattgtacatatcccagtgatgctgacgggccctcttggggaagccacggtcgttcccagtggtaacgtggacctggaaagccaagcagaggggaagaaggaggtggaagcggatgacgtgatgaggagcggcccccggcctatcgtcccatacagctccatgttctgtttaagccccaccaacctgctccgccgcttctgccactacatcgtgaccatgaggtacttcgaggtggtcattctcgtggtcatcgccttgagcagcatcgccctggctgctgaggacccagtgcgcacagactcgcccaggaacaacgctctgaaatacctggattacattttcactggtgtctttacctttgagatggtgataaagatgatcgacttgggactgctgcttcaccctggagcctatttccgggacttgtggaacattctggacttcattgtggtcagtggcgccctggtggcgtttgctttctcaggatccaaagggaaagacatcaataccatcaagtctctgagagtccttcgtgtcctgcggcccctcaagaccatcaaacggctgcccaagctcaaggctgtgtttgactgtgtggtgaactccctgaagaatgtcctcaacatcttgattgtctacatgctcttcatgttcatatttgccgtcattgcggtgcagctcttcaaagggaagtttttctactgcacagatgaatccaaggagctggagagggactgcaggggtcagtatttggattatgagaaggaggaagtggaagctcagcccaggcagtggaagaaatacgactttcactacgacaatgtgctctgggctctgctgacgctgttcacagtgtccacgggagaaggctggcccatggtgctgaaacactccgtggatgccacctatgaggagcagggtccaagccctgggtaccgcatggagctgtccatcttctacgtggtctactttgtggtctttcccttcttcttcgtcaacatctttgtggctttgatcatcatcaccttccaggagcagggggacaaggtgatgtctgaatgcagcctggagaagaacgagagggcttgcattgacttcgccatcagcgccaaacccctgacacggtacatgccccaaaaccggcagtcgttccagtataagacgtggacatttgtggtctccccgccctttgaatacttcatcatggccatgatagccctcaacactgtggtgctgatgatgaagttctatgatgcaccctatgagtacgagctgatgctgaaatgcctgaacatcgtgttcacatccatgttctccatggaatgcgtgctgaagatcatcgcctttggggtgctgaactatttcagagatgcctggaatgtctttgactttgtcactgtgttgggaagtattactgatattttagtaacagagattgcggaaacgaacaatttcatcaacctcagcttcctccgcctctttcgagctgcgcggctgatcaagctgctccgccagggctacaccatccgcatcctgctgtggacctttgtccagtccttcaaggccctgccctacgtgtgtctgctcattgccatgctgttcttcatctacgccatcatcggcatgcaggtgtttgggaatattgccctggatgatgacaccagcatcaaccgccacaacaacttccggacgtttttgcaagccctgatgctgctgttcaggagcgccacgggggaggcctggcacgagatcatgctgtcctgcctgagcaaccaggcctgtgatgagcaggccaatgccaccgagtgtggaagtgactttgcctacttctacttcgtctccttcatcttcctgtgctcctttctgatgttgaacctctttgtggctgtgatcatggacaattttgagtacctcacgcgggactcttccatcctaggtcctcaccacttggatgagttcatccgggtctgggctgaatacgacccggctgcgtgtgggcgcatcagttacaatgacatgtttgagatgctgaaacacatgtccccgcctctggggctggggaagaaatgccctgctcgagttgcttacaagcgcctggttcgcatgaacatgcccatctccaacgaggacatgactgttcacttcacgtccacgctgatggccctcatccggacggcactggagatcaagctggccccagctgggacaaagcagcatcagtgtgacgcggagttgaggaaggagatttccgttgtgtgggccaatctgccccagaagactttggacttgctggtaccaccccataagcctgatgagatgacagtggggaaggtttatgcagctctgatgatattcgacttctacaagcagaacaaaaccaccagagaccagatgcagcaggctcctggaggcctctcccagatgggtcctgtgtccctgttccaccctctgaaggccaccctggagcagacacagccggctgtgctccgaggagcccgggttttccttcgacagaagagttccacctccctcagcaatggcggggccatacaaaaccaagagagtggcatcaaagagtctgtctcctggggcactcaaaggacccaggatgcaccccatgaggccaggccacccctggagcgtggccactccacagagatccctgtggggcggtcaggagcactggctgtggacgttcagatgcagagcataacccggaggggccctgatggggagccccagcctgggctggagagccagggtcgagcggcctccatgccccgccttgcggccgagactcagcccgtcacagatgccagccccatgaagcgctccatctccacgctggcccagcggccccgtgggactcatctttgcagcaccaccccggaccgcccaccccctagccaggcgtcgtcgcaccaccaccaccaccgctgccaccgccgcagggacaggaagcagaggtccctggagaaggggcccagcctgtctgccgatatggatggcgcaccaagcagtgctgtggggccggggctgcccccgggagaggggcctacaggctgccggcgggaacgagagcgccggcaggagcggggccggtcccaggagcggaggcagccctcatcctcctcctcggagaagcagcgcttctactcctgcgaccgctttgggggccgtgagcccccgaagcccaagccctccctcagcagccacccaacgtcgccaacagctggccaggagccgggaccccacccacagggcagtggttccgtgaatgggagccccttgctgtcaacatctggtgctagcacccccggccgcggtgggcggaggcagctcccccagacgcccctgactccccgccccagcatcacctacaagacggccaactcctcacccatccacttcgccggggctcagaccagcctccctgccttctccccaggccggctcagccgtgggctttccgaacacaacgccctgctgcagagagaccccctcagccagcccctggcccctggctctcgaattggctctgacccttacctggggcagcgtctggacagtgaggcctctgtccacgccctgcctgaggacactctcactttcgaggaggctgtggccaccaactcgggccgctcctccaggacttcctacgtgtcctccctgacctcccagtctcaccctctccgccgcgtgcccaacggttaccactgcaccctgggactcagctcgggtggccgagcacggcacagctaccaccaccctgaccaagaccactggtgctagctgcaccgtgaccgctcagacgcctgcatgcagcaggcgtgtgttccagtggatgagttttatcatccacacggggcagccggccctcgggggaggccttgcccaccttggtgaggctcctgtggcccctccctccccctcctcccctcttttactctagacgacgaataaagccctgttagaggatgcggctctctctgtccccttcctgtcctgccttcctgggtctcgtaccacacaccagaccctaaaccgcaggctgctgtgtgtggctgagaaggacccaggagtccaaatcccgtgtcctgggactcagcatccagcatgggtgcttggagccgttgtgaggagctctgcgtcctgtggggagcacccttcacgtggccgtgcggcacagagaagcagggcccacctgaaagtgcgccgagacctcgggacggaggggatggggagggggacacagtcgtggcttgtgcagcccgccagtgtcagcgaatgctcactcaggcaagctctgtcctccctggacaccgtcagccccacaggaaccgagctgggaagtgttcttgctgtggttgtgatttttaattgcaacacctctcattcttgtcacttctatatacgtgatgtagaaaaaatggaaaaccagaaaaatggggaaggaaatgttcacataactttaaaaaatcaaacctgtgaaagaaagatgtcagctttttgccacgtgtctttgtggcttatgcgaggagactccctgtgcagccctgtccggtccaggtggacgtagacggcccctggctctgctgctcttgaccaagtgcctgaccgccaggccctcacacccaggctcctgggcactgtggtgtgaggcgaggcctcgggatccatcaccgcaggatgctgtgaaaagtactcgcgatggcagccaggtagcaagcccttgccagtggagagcactggatgtcatggtggcaaacaaggcagccatttgctgtcctcctcccacgagtggaaggggtttccaaggaagccacagggcagctgaccacgtgcttgtgtgaggcattttcagtctgttctgcatatgattctcagggcacactctgtggtatgtgaaataggtttccttccacatacagcagaagagaggcaaaggctggtaggaaggaggaagacattggctgggggcttggatgtggggccgtcagggcaggagggaggaagccccagctggaatgaaactcagagcaagtgaccgagggaggacacggctcctgccactgaggccgggcacctgatgcccagcactgtcctggcgccagacacagggagcaggcagtcaagtgaggtctgacccccatggccacgctcaggagagaaagaccatgctcaggacactgtccaaggtgcacaagatgctgggaggtcccttgtttggtgaagaaagggagcatttagagcagttgatggtggtgtgtcctccgtgttctgaaattccagatgatctgtgttggattcttggcttctaccccatgattctcctcaaagaaattgtgtgtgatgtgtgtgtgtgtgtgtgtgtgtgtgtgtctgtgtcacaggagatgcagtgcctgtacaggtgtgttcagtgtgtggatgtcattaacccatagggctatgcaacaaaagacacatttaatagaagtaaaacacacaagaccgctgcctggtctcggggttcagcatgattgtgaccaaacctttttatagaatttccttacctgaaggcacaacactctgaaactttaaagataacagagtattttattccaatagaataaaccaggaatctcggactgtgcatgtgatcactgtgctcctgttgcaaagtagaaggatgtgtattttgacactgacgttttgtctcttgttccccagcccccagcccatgttatcttgggtgtcgaatgtgtccattccatgcagaaccacagccatttccccaggcagtgttgggtcgagaatccacttttctaaacccacacagcctagctggcttgtctagactcttctaggcattggaattgatgaaaactacagggagcggggaaaggagacattatgtcttgttttcctgactttgggttttgtttctcactgtgtcttctccggctatcatatatgtcccctgaatctcatagtgagctgccaaatttgaagtgcatcacccagttgtctgcatctggaaccagtcaagcagtggctgtagtttgaacaagttatgtgtgcatgtaacatatatacatatatacatatatacaagtatgtgcatgataatgtatatcttcgtactttttgatacaatgtattcatttgttaatttttaattatatttgatataaatcaaaggtttgttgcaaaactttatatttaagaagtgttaaaaaaaaaaaaaagtcccaaccatgcaacacaactgggacctacttaaaaagaaattctgtgattgactagtttgctgcctgagtcatatttatcagccaaactttggattctgctgttgtttctacaatgacattttgtatgaagcaaagtccttgaattaaaataaaaacttagcaaaaaatcaaaaacaaaacccca

SEQ ID NO: 2697 - DNA, 9758 bp, Homo sapiens
  source 1..9758: mol_type = unassigned DNA; mol_type = unassigned DNA
gggcgaggtccgctgcggtcccggcggctccgtggctgctccgctctgagcgcctggcgcgccccgcgccctccctgccggggccgctgggccggggatgcacgcggggcccgggagccatggtccgcttcggggacgagctgggcggccgctatgggggccccggcggcggagagcgggcccggggcggcggggccggcggggcggggggcccgggtcccggggggctgcagcccggccagcgggtcctctacaagcaatcgatcgcgcagcgcgcgcggaccatggcgctgtacaaccccatcccggtcaagcagaactgcttcaccgtcaaccgctcgctcttcgtcttcagcgaggacaacgtcgtccgcaaatacgcgaagcgcatcaccgagtggcctccattcgagtatatgatcctggccaccatcatcgccaactgcatcgtgctggccctggagcagcacctccctgatggggacaaaacgcccatgtccgagcggctggacgacacggagccctatttcatcgggatcttttgcttcgaggcagggatcaaaatcatcgctctgggctttgtcttccacaagggctcttacctgcggaacggctggaacgtcatggacttcgtggtcgtcctcacagggatccttgccacggctggaactgacttcgacctgcgaacactgagggctgtgcgtgtgctgaggcccctgaagctggtgtctgggattccaagtttgcaggtggtgctcaagtccatcatgaaggccatggttccactcctgcagattgggctgcttctcttctttgccatcctcatgtttgccatcattggcctggagttctacatgggcaagttccacaaggcctgtttccccaacagcacagatgcggagcccgtgggtgacttcccctgtggcaaggaggccccagcccggctgtgcgagggcgacactgagtgccgggagtactggccaggacccaactttggcatcaccaactttgacaatatcctgtttgccatcttgacggtgttccagtgcatcaccatggagggctggactgacatcctctataatacaaacgatgcggccggcaacacctggaactggctctacttcatccctctcatcatcatcggctccttcttcatgctcaacctggtgctgggcgtgctctcgggggagtttgccaaggagcgagagagggtggagaaccgccgcgccttcctgaagctgcgccggcagcagcagatcgagcgagagctcaacgggtacctggagtggatcttcaaggcggaggaagtcatgctggccgaggaggacaggaatgcagaggagaagtcccctttggacgtgctgaagagagcggccaccaagaagagcagaaatgacctgatccacgcagaggagggagaggaccggtttgcagatctctgtgctgttggatcccccttcgcccgcgccagcctcaagagcgggaagacagagagctcgtcatacttccggaggaaggagaagatgttccggttttttatccggcgcatggtgaaggctcagagcttctactgggtggtgctgtgcgtggtggccctgaacacactgtgtgtggccatggtgcattacaaccagccgcggcggcttaccacgaccctgtattttgcagagtttgttttcctgggtctcttcctcacagagatgtccctgaagatgtatggcctggggcccagaagctacttccggtcctccttcaactgcttcgactttggggtcatcgtggggagcgtctttgaagtggtctgggcggccatcaagccgggaagctcctttgggatcagtgtgctgcgggccctccgcctgctgaggatcttcaaagtcacgaagtactggagctccctgcggaacctggtggtgtccctgctgaactccatgaagtccatcatcagcctgctcttcttgctcttcctgttcattgtggtcttcgccctgctggggatgcagctgtttgggggacagttcaacttccaggatgagactcccacaaccaacttcgacaccttccctgccgccatcctcactgtcttccagatcctgacgggagaggactggaatgcagtgatgtatcacgggatcgaatcgcaaggcggcgtcagcaaaggcatgttctcgtccttttacttcattgtcctgacactgttcggaaactacactctgctgaatgtctttctggccatcgctgtggacaacctggccaacgcccaagagctgaccaaggatgaagaggagatggaagaagcagccaatcagaagcttgctctgcaaaaggccaaagaagtggctgaagtcagccccatgtctgccgcgaacatctccatcgccgccaggcagcagaactcggccaaggcgcgctcggtgtgggagcagcgggccagccagctacggctgcagaacctgcgggccagctgcgaggcgctgtacagcgagatggaccccgaggagcggctgcgcttcgccactacgcgccacctgcggcccgacatgaagacgcacctggaccggccgctggtggtggagctgggccgcgacggcgcgcgggggcccgtgggaggcaaagcccgacctgaggctgcggaggcccccgagggcgtcgaccctccgcgcaggcaccaccggcaccgcgacaaggacaagacccccgcggcgggggaccaggaccgagcagaggccccgaaggcggagagcggggagcccggtgcccgggaggagcggccgcggccgcaccgcagccacagcaaggaggccgcggggcccccggaggcgcggagcgagcgcggccgaggcccaggccccgagggcggccggcggcaccaccggcgcggctccccggaggaggcggccgagcgggagccccgacgccaccgcgcgcaccggcaccaggatccgagcaaggagtgcgccggcgccaagggcgagcggcgcgcgcggcaccgcggcggcccccgagcggggccccgggaggcggagagcggggaggagccggcgcggcggcaccgggcccggcacaaggcgcagcctgctcacgaggctgtggagaaggagaccacggagaaggaggccacggagaaggaggctgagatagtggaagccgacaaggaaaaggagctccggaaccaccagccccgggagccacactgtgacctggagaccagtgggactgtgactgtgggtcccatgcacacactgcccagcacctgtctccagaaggtggaggaacagccagaggatgcagacaatcagcggaacgtcactcgcatgggcagtcagcccccagacccgaacactattgtacatatcccagtgatgctgacgggccctcttggggaagccacggtcgttcccagtggtaacgtggacctggaaagccaagcagaggggaagaaggaggtggaagcggatgacgtgatgaggagcggcccccggcctatcgtcccatacagctccatgttctgtttaagccccaccaacctgctccgccgcttctgccactacatcgtgaccatgaggtacttcgaggtggtcattctcgtggtcatcgccttgagcagcatcgccctggctgctgaggacccagtgcgcacagactcgcccaggaacaacgctctgaaatacctggattacattttcactggtgtctttacctttgagatggtgataaagatgatcgacttgggactgctgcttcaccctggagcctatttccgggacttgtggaacattctggacttcattgtggtcagtggcgccctggtggcgtttgctttctcaggatccaaagggaaagacatcaataccatcaagtctctgagagtccttcgtgtcctgcggcccctcaagaccatcaaacggctgcccaagctcaaggctgtgtttgactgtgtggtgaactccctgaagaatgtcctcaacatcttgattgtctacatgctcttcatgttcatatttgccgtcattgcggtgcagctcttcaaagggaagtttttctactgcacagatgaatccaaggagctggagagggactgcaggggtcagtatttggattatgagaaggaggaagtggaagctcagcccaggcagtggaagaaatacgactttcactacgacaatgtgctctgggctctgctgacgctgttcacagtgtccacgggagaaggctggcccatggtgctgaaacactccgtggatgccacctatgaggagcagggtccaagccctgggtaccgcatggagctgtccatcttctacgtggtctactttgtggtctttcccttcttcttcgtcaacatctttgtggctttgatcatcatcaccttccaggagcagggggacaaggtgatgtctgaatgcagcctggagaagaacgagagggcttgcattgacttcgccatcagcgccaaacccctgacacggtacatgccccaaaaccggcagtcgttccagtataagacgtggacatttgtggtctccccgccctttgaatacttcatcatggccatgatagccctcaacactgtggtgctgatgatgaagttctatgatgcaccctatgagtacgagctgatgctgaaatgcctgaacatcgtgttcacatccatgttctccatggaatgcgtgctgaagatcatcgcctttggggtgctgaactatttcagagatgcctggaatgtctttgactttgtcactgtgttgggaagtattactgatattttagtaacagagattgcgaacaatttcatcaacctcagcttcctccgcctctttcgagctgcgcggctgatcaagctgctccgccagggctacaccatccgcatcctgctgtggacctttgtccagtccttcaaggccctgccctacgtgtgtctgctcattgccatgctgttcttcatctacgccatcatcggcatgcaggtgtttgggaatattgccctggatgatgacaccagcatcaaccgccacaacaacttccggacgtttttgcaagccctgatgctgctgttcaggagcgccacgggggaggcctggcacgagatcatgctgtcctgcctgagcaaccaggcctgtgatgagcaggccaatgccaccgagtgtggaagtgactttgcctacttctacttcgtctccttcatcttcctgtgctcctttctgatgttgaacctctttgtggctgtgatcatggacaattttgagtacctcacgcgggactcttccatcctaggtcctcaccacttggatgagttcatccgggtctgggctgaatacgacccggctgcgtgtgggcgcatcagttacaatgacatgtttgagatgctgaaacacatgtccccgcctctggggctggggaagaaatgccctgctcgagttgcttacaagcgcctggttcgcatgaacatgcccatctccaacgaggacatgactgttcacttcacgtccacgctgatggccctcatccggacggcactggagatcaagctggccccagctgggacaaagcagcatcagtgtgacgcggagttgaggaaggagatttccgttgtgtgggccaatctgccccagaagactttggacttgctggtaccaccccataagcctgatgagatgacagtggggaaggtttatgcagctctgatgatattcgacttctacaagcagaacaaaaccaccagagaccagatgcagcaggctcctggaggcctctcccagatgggtcctgtgtccctgttccaccctctgaaggccaccctggagcagacacagccggctgtgctccgaggagcccgggttttccttcgacagaagagttccacctccctcagcaatggcggggccatacaaaaccaagagagtggcatcaaagagtctgtctcctggggcactcaaaggacccaggatgcaccccatgaggccaggccacccctggagcgtggccactccacagagatccctgtggggcggtcaggagcactggctgtggacgttcagatgcagagcataacccggaggggccctgatggggagccccagcctgggctggagagccagggtcgagcggcctccatgccccgccttgcggccgagactcagcccgtcacagatgccagccccatgaagcgctccatctccacgctggcccagcggccccgtgggactcatctttgcagcaccaccccggaccgcccaccccctagccaggcgtcgtcgcaccaccaccaccaccgctgccaccgccgcagggacaggaagcagaggtccctggagaaggggcccagcctgtctgccgatatggatggcgcaccaagcagtgctgtggggccggggctgcccccgggagaggggcctacaggctgccggcgggaacgagagcgccggcaggagcggggccggtcccaggagcggaggcagccctcatcctcctcctcggagaagcagcgcttctactcctgcgaccgctttgggggccgtgagcccccgaagcccaagccctccctcagcagccacccaacgtcgccaacagctggccaggagccgggaccccacccacagggcagtggttccgtgaatgggagccccttgctgtcaacatctggtgctagcacccccggccgcggtgggcggaggcagctcccccagacgcccctgactccccgccccagcatcacctacaagacggccaactcctcacccatccacttcgccggggctcagaccagcctccctgccttctccccaggccggctcagccgtgggctttccgaacacaacgccctgctgcagagagaccccctcagccagcccctggcccctggctctcgaattggctctgacccttacctggggcagcgtctggacagtgaggcctctgtccacgccctgcctgaggacactctcactttcgaggaggctgtggccaccaactcgggccgctcctccaggacttcctacgtgtcctccctgacctcccagtctcaccctctccgccgcgtgcccaacggttaccactgcaccctgggactcagctcgggtggccgagcacggcacagctaccaccaccctgaccaagaccactggtgctagctgcaccgtgaccgctcagacgcctgcatgcagcaggcgtgtgttccagtggatgagttttatcatccacacggggcagccggccctcgggggaggccttgcccaccttggtgaggctcctgtggcccctccctccccctcctcccctcttttactctagacgacgaataaagccctgttagaggatgcggctctctctgtccccttcctgtcctgccttcctgggtctcgtaccacacaccagaccctaaaccgcaggctgctgtgtgtggctgagaaggacccaggagtccaaatcccgtgtcctgggactcagcatccagcatgggtgcttggagccgttgtgaggagctctgcgtcctgtggggagcacccttcacgtggccgtgcggcacagagaagcagggcccacctgaaagtgcgccgagacctcgggacggaggggatggggagggggacacagtcgtggcttgtgcagcccgccagtgtcagcgaatgctcactcaggcaagctctgtcctccctggacaccgtcagccccacaggaaccgagctgggaagtgttcttgctgtggttgtgatttttaattgcaacacctctcattcttgtcacttctatatacgtgatgtagaaaaaatggaaaaccagaaaaatggggaaggaaatgttcacataactttaaaaaatcaaacctgtgaaagaaagatgtcagctttttgccacgtgtctttgtggcttatgcgaggagactccctgtgcagccctgtccggtccaggtggacgtagacggcccctggctctgctgctcttgaccaagtgcctgaccgccaggccctcacacccaggctcctgggcactgtggtgtgaggcgaggcctcgggatccatcaccgcaggatgctgtgaaaagtactcgcgatggcagccaggtagcaagcccttgccagtggagagcactggatgtcatggtggcaaacaaggcagccatttgctgtcctcctcccacgagtggaaggggtttccaaggaagccacagggcagctgaccacgtgcttgtgtgaggcattttcagtctgttctgcatatgattctcagggcacactctgtggtatgtgaaataggtttccttccacatacagcagaagagaggcaaaggctggtaggaaggaggaagacattggctgggggcttggatgtggggccgtcagggcaggagggaggaagccccagctggaatgaaactcagagcaagtgaccgagggaggacacggctcctgccactgaggccgggcacctgatgcccagcactgtcctggcgccagacacagggagcaggcagtcaagtgaggtctgacccccatggccacgctcaggagagaaagaccatgctcaggacactgtccaaggtgcacaagatgctgggaggtcccttgtttggtgaagaaagggagcatttagagcagttgatggtggtgtgtcctccgtgttctgaaattccagatgatctgtgttggattcttggcttctaccccatgattctcctcaaagaaattgtgtgtgatgtgtgtgtgtgtgtgtgtgtgtgtgtgtctgtgtcacaggagatgcagtgcctgtacaggtgtgttcagtgtgtggatgtcattaacccatagggctatgcaacaaaagacacatttaatagaagtaaaacacacaagaccgctgcctggtctcggggttcagcatgattgtgaccaaacctttttatagaatttccttacctgaaggcacaacactctgaaactttaaagataacagagtattttattccaatagaataaaccaggaatctcggactgtgcatgtgatcactgtgctcctgttgcaaagtagaaggatgtgtattttgacactgacgttttgtctcttgttccccagcccccagcccatgttatcttgggtgtcgaatgtgtccattccatgcagaaccacagccatttccccaggcagtgttgggtcgagaatccacttttctaaacccacacagcctagctggcttgtctagactcttctaggcattggaattgatgaaaactacagggagcggggaaaggagacattatgtcttgttttcctgactttgggttttgtttctcactgtgtcttctccggctatcatatatgtcccctgaatctcatagtgagctgccaaatttgaagtgcatcacccagttgtctgcatctggaaccagtcaagcagtggctgtagtttgaacaagttatgtgtgcatgtaacatatatacatatatacatatatacaagtatgtgcatgataatgtatatcttcgtactttttgatacaatgtattcatttgttaatttttaattatatttgatataaatcaaaggtttgttgcaaaactttatatttaagaagtgttaaaaaaaaaaaaaagtcccaaccatgcaacacaactgggacctacttaaaaagaaattctgtgattgactagtttgctgcctgagtcatatttatcagccaaactttggattctgctgttgtttctacaatgacattttgtatgaagcaaagtccttgaattaaaataaaaacttagcaaaaaatcaaaaacaaaacccca

SEQ ID NO: 2698 - DNA, 9642 bp, Homo sapiens
  source 1..9642: mol_type = unassigned DNA; mol_type = unassigned DNA
atggtccgcttcggggacgagctgggcggccgctatgggggccccggcggcggagagcgggcccggggcggcggggccggcggggcggggggcccgggtcccggggggctgcagcccggccagcgggtcctctacaagcaatcgatcgcgcagcgcgcgcggaccatggcgctgtacaaccccatcccggtcaagcagaactgcttcaccgtcaaccgctcgctcttcgtcttcagcgaggacaacgtcgtccgcaaatacgcgaagcgcatcaccgagtggcctccattcgagtatatgatcctggccaccatcatcgccaactgcatcgtgctggccctggagcagcacctccctgatggggacaaaacgcccatgtccgagcggctggacgacacggagccctatttcatcgggatcttttgcttcgaggcagggatcaaaatcatcgctctgggctttgtcttccacaagggctcttacctgcggaacggctggaacgtcatggacttcgtggtcgtcctcacagggatccttgccacggctggaactgacttcgacctgcgaacactgagggctgtgcgtgtgctgaggcccctgaagctggtgtctgggattccaagtttgcaggtggtgctcaagtccatcatgaaggccatggttccactcctgcagattgggctgcttctcttctttgccatcctcatgtttgccatcattggcctggagttctacatgggcaagttccacaaggcctgtttccccaacagcacagatgcggagcccgtgggtgacttcccctgtggcaaggaggccccagcccggctgtgcgagggcgacactgagtgccgggagtactggccaggacccaactttggcatcaccaactttgacaatatcctgtttgccatcttgacggtgttccagtgcatcaccatggagggctggactgacatcctctataatacaaacgatgcggccggcaacacctggaactggctctacttcatccctctcatcatcatcggctccttcttcatgctcaacctggtgctgggcgtgctctcgggggagtttgccaaggagcgagagagggtggagaaccgccgcgccttcctgaagctgcgccggcagcagcagatcgagcgagagctcaacgggtacctggagtggatcttcaaggcggaggaagtcatgctggccgaggaggacaggaatgcagaggagaagtcccctttggacgcagtgctgaagagagcggccaccaagaagagcagaaatgacctgatccacgcagaggagggagaggaccggtttgcagatctctgtgctgttggatcccccttcgcccgcgccagcctcaagagcgggaagacagagagctcgtcatacttccggaggaaggagaagatgttccggttttttatccggcgcatggtgaaggctcagagcttctactgggtggtgctgtgcgtggtggccctgaacacactgtgtgtggccatggtgcattacaaccagccgcggcggcttaccacgaccctgtattttgcagagtttgttttcctgggtctcttcctcacagagatgtccctgaagatgtatggcctggggcccagaagctacttccggtcctccttcaactgcttcgactttggggtcatcgtggggagcgtctttgaagtggtctgggcggccatcaagccgggaagctcctttgggatcagtgtgctgcgggccctccgcctgctgaggatcttcaaagtcacgaagtactggagctccctgcggaacctggtggtgtccctgctgaactccatgaagtccatcatcagcctgctcttcttgctcttcctgttcattgtggtcttcgccctgctggggatgcagctgtttgggggacagttcaacttccaggatgagactcccacaaccaacttcgacaccttccctgccgccatcctcactgtcttccagatcctgacgggagaggactggaatgcagtgatgtatcacgggatcgaatcgcaaggcggcgtcagcaaaggcatgttctcgtccttttacttcattgtcctgacactgttcggaaactacactctgctgaatgtctttctggccatcgctgtggacaacctggccaacgcccaagagctgaccaaggatgaagaggagatggaagaagcagccaatcagaagcttgctctgcaaaaggccaaagaagtggctgaagtcagccccatgtctgccgcgaacatctccatcgccgccaggcagcagaactcggccaaggcgcgctcggtgtgggagcagcgggccagccagctacggctgcagaacctgcgggccagctgcgaggcgctgtacagcgagatggaccccgaggagcggctgcgcttcgccactacgcgccacctgcggcccgacatgaagacgcacctggaccggccgctggtggtggagctgggccgcgacggcgcgcgggggcccgtgggaggcaaagcccgacctgaggctgcggaggcccccgagggcgtcgaccctccgcgcaggcaccaccggcaccgcgacaaggacaagacccccgcggcgggggaccaggaccgagcagaggccccgaaggcggagagcggggagcccggtgcccgggaggagcggccgcggccgcaccgcagccacagcaaggaggccgcggggcccccggaggcgcggagcgagcgcggccgaggcccaggccccgagggcggccggcggcaccaccggcgcggctccccggaggaggcggccgagcgggagccccgacgccaccgcgcgcaccggcaccaggatccgagcaaggagtgcgccggcgccaagggcgagcggcgcgcgcggcaccgcggcggcccccgagcggggccccgggaggcggagagcggggaggagccggcgcggcggcaccgggcccggcacaaggcgcagcctgctcacgaggctgtggagaaggagaccacggagaaggaggccacggagaaggaggctgagatagtggaagccgacaaggaaaaggagctccggaaccaccagccccgggagccacactgtgacctggagaccagtgggactgtgactgtgggtcccatgcacacactgcccagcacctgtctccagaaggtggaggaacagccagaggatgcagacaatcagcggaacgtcactcgcatgggcagtcagcccccagacccgaacactattgtacatatcccagtgatgctgacgggccctcttggggaagccacggtcgttcccagtggtaacgtggacctggaaagccaagcagaggggaagaaggaggtggaagcggatgacgtgatgaggagcggcccccggcctatcgtcccatacagctccatgttctgtttaagccccaccaacctgctccgccgcttctgccactacatcgtgaccatgaggtacttcgaggtggtcattctcgtggtcatcgccttgagcagcatcgccctggctgctgaggacccagtgcgcacagactcgcccaggaacaacgctctgaaatacctggattacattttcactggtgtctttacctttgagatggtgataaagatgatcgacttgggactgctgcttcaccctggagcctatttccgggacttgtggaacattctggacttcattgtggtcagtggcgccctggtggcgtttgctttctcaggatccaaagggaaagacatcaataccatcaagtctctgagagtccttcgtgtcctgcggcccctcaagaccatcaaacggctgcccaagctcaaggctgtgtttgactgtgtggtgaactccctgaagaatgtcctcaacatcttgattgtctacatgctcttcatgttcatatttgccgtcattgcggtgcagctcttcaaagggaagtttttctactgcacagatgaatccaaggagctggagagggactgcaggggtcagtatttggattatgagaaggaggaagtggaagctcagcccaggcagtggaagaaatacgactttcactacgacaatgtgctctgggctctgctgacgctgttcacagtgtccacgggagaaggctggcccatggtgctgaaacactccgtggatgccacctatgaggagcagggtccaagccctgggtaccgcatggagctgtccatcttctacgtggtctactttgtggtctttcccttcttcttcgtcaacatctttgtggctttgatcatcatcaccttccaggagcagggggacaaggtgatgtctgaatgcagcctggagaagaacgagagggcttgcattgacttcgccatcagcgccaaacccctgacacggtacatgccccaaaaccggcagtcgttccagtataagacgtggacatttgtggtctccccgccctttgaatacttcatcatggccatgatagccctcaacactgtggtgctgatgatgaagttctatgatgcaccctatgagtacgagctgatgctgaaatgcctgaacatcgtgttcacatccatgttctccatggaatgcgtgctgaagatcatcgcctttggggtgctgaactatttcagagatgcctggaatgtctttgactttgtcactgtgttgggaagtattactgatattttagtaacagagattgcgaacaatttcatcaacctcagcttcctccgcctctttcgagctgcgcggctgatcaagctgctccgccagggctacaccatccgcatcctgctgtggacctttgtccagtccttcaaggccctgccctacgtgtgtctgctcattgccatgctgttcttcatctacgccatcatcggcatgcaggtgtttgggaatattgccctggatgatgacaccagcatcaaccgccacaacaacttccggacgtttttgcaagccctgatgctgctgttcaggagcgccacgggggaggcctggcacgagatcatgctgtcctgcctgagcaaccaggcctgtgatgagcaggccaatgccaccgagtgtggaagtgactttgcctacttctacttcgtctccttcatcttcctgtgctcctttctgatgttgaacctctttgtggctgtgatcatggacaattttgagtacctcacgcgggactcttccatcctaggtcctcaccacttggatgagttcatccgggtctgggctgaatacgacccggctgcgtgtgggcgcatcagttacaatgacatgtttgagatgctgaaacacatgtccccgcctctggggctggggaagaaatgccctgctcgagttgcttacaagcgcctggttcgcatgaacatgcccatctccaacgaggacatgactgttcacttcacgtccacgctgatggccctcatccggacggcactggagatcaagctggccccagctgggacaaagcagcatcagtgtgacgcggagttgaggaaggagatttccgttgtgtgggccaatctgccccagaagactttggacttgctggtaccaccccataagcctgatgagatgacagtggggaaggtttatgcagctctgatgatattcgacttctacaagcagaacaaaaccaccagagaccagatgcagcaggctcctggaggcctctcccagatgggtcctgtgtccctgttccaccctctgaaggccaccctggagcagacacagccggctgtgctccgaggagcccgggttttccttcgacagaagagttccacctccctcagcaatggcggggccatacaaaaccaagagagtggcatcaaagagtctgtctcctggggcactcaaaggacccaggatgcaccccatgaggccaggccacccctggagcgtggccactccacagagatccctgtggggcggtcaggagcactggctgtggacgttcagatgcagagcataacccggaggggccctgatggggagccccagcctgggctggagagccagggtcgagcggcctccatgccccgccttgcggccgagactcagcccgtcacagatgccagccccatgaagcgctccatctccacgctggcccagcggccccgtgggactcatctttgcagcaccaccccggaccgcccaccccctagccaggcgtcgtcgcaccaccaccaccaccgctgccaccgccgcagggacaggaagcagaggtccctggagaaggggcccagcctgtctgccgatatggatggcgcaccaagcagtgctgtggggccggggctgcccccgggagaggggcctacaggctgccggcgggaacgagagcgccggcaggagcggggccggtcccaggagcggaggcagccctcatcctcctcctcggagaagcagcgcttctactcctgcgaccgctttgggggccgtgagcccccgaagcccaagccctccctcagcagccacccaacgtcgccaacagctggccaggagccgggaccccacccacagggcagtggttccgtgaatgggagccccttgctgtcaacatctggtgctagcacccccggccgcggtgggcggaggcagctcccccagacgcccctgactccccgccccagcatcacctacaagacggccaactcctcacccatccacttcgccggggctcagaccagcctccctgccttctccccaggccggctcagccgtgggctttccgaacacaacgccctgctgcagagagaccccctcagccagcccctggcccctggctctcgaattggctctgacccttacctggggcagcgtctggacagtgaggcctctgtccacgccctgcctgaggacactctcactttcgaggaggctgtggccaccaactcgggccgctcctccaggacttcctacgtgtcctccctgacctcccagtctcaccctctccgccgcgtgcccaacggttaccactgcaccctgggactcagctcgggtggccgagcacggcacagctaccaccaccctgaccaagaccactggtgctagctgcaccgtgaccgctcagacgcctgcatgcagcaggcgtgtgttccagtggatgagttttatcatccacacggggcagccggccctcgggggaggccttgcccaccttggtgaggctcctgtggcccctccctccccctcctcccctcttttactctagacgacgaataaagccctgttagaggatgcggctctctctgtccccttcctgtcctgccttcctgggtctcgtaccacacaccagaccctaaaccgcaggctgctgtgtgtggctgagaaggacccaggagtccaaatcccgtgtcctgggactcagcatccagcatgggtgcttggagccgttgtgaggagctctgcgtcctgtggggagcacccttcacgtggccgtgcggcacagagaagcagggcccacctgaaagtgcgccgagacctcgggacggaggggatggggagggggacacagtcgtggcttgtgcagcccgccagtgtcagcgaatgctcactcaggcaagctctgtcctccctggacaccgtcagccccacaggaaccgagctgggaagtgttcttgctgtggttgtgatttttaattgcaacacctctcattcttgtcacttctatatacgtgatgtagaaaaaatggaaaaccagaaaaatggggaaggaaatgttcacataactttaaaaaatcaaacctgtgaaagaaagatgtcagctttttgccacgtgtctttgtggcttatgcgaggagactccctgtgcagccctgtccggtccaggtggacgtagacggcccctggctctgctgctcttgaccaagtgcctgaccgccaggccctcacacccaggctcctgggcactgtggtgtgaggcgaggcctcgggatccatcaccgcaggatgctgtgaaaagtactcgcgatggcagccaggtagcaagcccttgccagtggagagcactggatgtcatggtggcaaacaaggcagccatttgctgtcctcctcccacgagtggaaggggtttccaaggaagccacagggcagctgaccacgtgcttgtgtgaggcattttcagtctgttctgcatatgattctcagggcacactctgtggtatgtgaaataggtttccttccacatacagcagaagagaggcaaaggctggtaggaaggaggaagacattggctgggggcttggatgtggggccgtcagggcaggagggaggaagccccagctggaatgaaactcagagcaagtgaccgagggaggacacggctcctgccactgaggccgggcacctgatgcccagcactgtcctggcgccagacacagggagcaggcagtcaagtgaggtctgacccccatggccacgctcaggagagaaagaccatgctcaggacactgtccaaggtgcacaagatgctgggaggtcccttgtttggtgaagaaagggagcatttagagcagttgatggtggtgtgtcctccgtgttctgaaattccagatgatctgtgttggattcttggcttctaccccatgattctcctcaaagaaattgtgtgtgatgtgtgtgtgtgtgtgtgtgtgtgtgtgtctgtgtcacaggagatgcagtgcctgtacaggtgtgttcagtgtgtggatgtcattaacccatagggctatgcaacaaaagacacatttaatagaagtaaaacacacaagaccgctgcctggtctcggggttcagcatgattgtgaccaaacctttttatagaatttccttacctgaaggcacaacactctgaaactttaaagataacagagtattttattccaatagaataaaccaggaatctcggactgtgcatgtgatcactgtgctcctgttgcaaagtagaaggatgtgtattttgacactgacgttttgtctcttgttccccagcccccagcccatgttatcttgggtgtcgaatgtgtccattccatgcagaaccacagccatttccccaggcagtgttgggtcgagaatccacttttctaaacccacacagcctagctggcttgtctagactcttctaggcattggaattgatgaaaactacagggagcggggaaaggagacattatgtcttgttttcctgactttgggttttgtttctcactgtgtcttctccggctatcatatatgtcccctgaatctcatagtgagctgccaaatttgaagtgcatcacccagttgtctgcatctggaaccagtcaagcagtggctgtagtttgaacaagttatgtgtgcatgtaacatatatacatatatacatatatacaagtatgtgcatgataatgtatatcttcgtactttttgatacaatgtattcatttgttaatttttaattatatttgatataaatcaaaggtttgttgcaaaactttatatttaagaagtgttaaaaaaaaaaaaaagtcccaaccatgcaacacaactgggacctacttaaaaagaaattctgtgattgactagtttgctgcctgagtcatatttatcagccaaactttggattctgctgttgtttctacaatgacattttgtatgaagcaaagtccttgaattaaaataaaaacttagcaaaaaatcaaaaacaaaacccca

SEQ ID NO: 2699 - DNA, 492 bp, Homo sapiens
  source 1..492: mol_type = unassigned DNA
caacttccggacgtttttgcaagccctgatgctgctgttcaggagcgccacgggggaggcctggcacgagatcatgctgtcctgcctgagcaaccaggcctgtgatgagcaggccaatgccaccgagtgtggaagtgactttgcctacttctacttcgtctccttcatcttcctgtgctcctttctgatgttgaacctctttgtggctgtgatcatggacaattttgagtacctcacgcgggactcttccatcctaggtcctcaccacttggatgagttcatccgggtctgggctgaatacgacccggctgcgtgttgccggattcattataaggatatgtacagtttgttgcgttgtattgcgccacccgttggcttagggaagaactgccctcgtaggttggcctacaagcgcctggttcgcatgaacatgcccatctccaacgaggacatgactgttcacttcacgtccacgctgatggccctcatccg

SEQ ID NO: 2700 - DNA, 7158 bp, Homo sapiens
  source 1..7158: mol_type = unassigned DNA
gcggcggcggctgcggcggtggggccgggcgaggtccgctgcggtcccggcggctccgtggctgctccgctctgagcgcctggcgcgccccgcgccctccctgccggggccgctgggccggggatgcacgcggggcccgggagccatggtccgcttcggggacgagctgggcggccgctatgggggccccggcggcggagagcgggcccggggcggcggggccggcggggcggggggcccgggtcccggggggctgcagcccggccagcgggtcctctacaagcaatcgatcgcgcagcgcgcgcggaccatggcgctgtacaaccccatcccggtcaagcagaactgcttcaccgtcaaccgctcgctcttcgtcttcagcgaggacaacgtcgtccgcaaatacgcgaagcgcatcaccgagtggcctccattcgagtatatgatcctggccaccatcatcgccaactgcatcgtgctggccctggagcagcacctccctgatggggacaaaacgcccatgtccgagcggctggacgacacggagccctatttcatcgggatcttttgcttcgaggcagggatcaaaatcatcgctctgggctttgtcttccacaagggctcttacctgcggaacggctggaacgtcatggacttcgtggtcgtcctcacagggatccttgccacggctggaactgacttcgacctgcgaacactgagggctgtgcgtgtgctgaggcccctgaagctggtgtctgggattccaagtttgcaggtggtgctcaagtccatcatgaaggccatggttccactcctgcagattgggctgcttctcttctttgccatcctcatgtttgccatcattggcctggagttctacatgggcaagttccacaaggcctgtttccccaacagcacagatgcggagcccgtgggtgacttcccctgtggcaaggaggccccagcccggctgtgcgagggcgacactgagtgccgggagtactggccaggacccaactttggcatcaccaactttgacaatatcctgtttgccatcttgacggtgttccagtgcatcaccatggagggctggactgacatcctctataatacaaacgatgcggccggcaacacctggaactggctctacttcatccctctcatcatcatcggctccttcttcatgctcaacctggtgctgggcgtgctctcgggggagtttgccaaggagcgagagagggtggagaaccgccgcgccttcctgaagctgcgccggcagcagcagatcgagcgagagctcaacgggtacctggagtggatcttcaaggcggaggaagtcatgctggccgaggaggacaggaatgcagaggagaagtcccctttggacgtgctgaagagagcggccaccaagaagagcagaaatgacctgatccacgcagaggagggagaggaccggtttgcagatctctgtgctgttggatcccccttcgcccgcgccagcctcaagagcgggaagacagagagctcgtcatacttccggaggaaggagaagatgttccggttttttatccggcgcatggtgaaggctcagagcttctactgggtggtgctgtgcgtggtggccctgaacacactgtgtgtggccatggtgcattacaaccagccgcggcggcttaccacgaccctgtattttgcagagtttgttttcctgggtctcttcctcacagagatgtccctgaagatgtatggcctggggcccagaagctacttccggtcctccttcaactgcttcgactttggggtcatcgtggggagcgtctttgaagtggtctgggcggccatcaagccgggaagctcctttgggatcagtgtgctgcgggccctccgcctgctgaggatcttcaaagtcacgaagtactggagctccctgcggaacctggtggtgtccctgctgaactccatgaagtccatcatcagcctgctcttcttgctcttcctgttcattgtggtcttcgccctgctggggatgcagctgtttgggggacagttcaacttccaggatgagactcccacaaccaacttcgacaccttccctgccgccatcctcactgtcttccagatcctgacgggagaggactggaatgcagtgatgtatcacgggatcgaatcgcaaggcggcgtcagcaaaggcatgttctcgtccttttacttcattgtcctgacactgttcggaaactacactctgctgaatgtctttctggccatcgctgtggacaacctggccaacgcccaagagctgaccaaggatgaagaggagatggaagaagcagccaatcagaagcttgctctgcaaaaggccaaagaagtggctgaagtcagccccatgtctgccgcgaacatctccatcgccgccaggcagcagaactcggccaaggcgcgctcggtgtgggagcagcgggccagccagctacggctgcagaacctgcgggccagctgcgaggcgctgtacagcgagatggaccccgaggagcggctgcgcttcgccactacgcgccacctgcggcccgacatgaagacgcacctggaccggccgctggtggtggagctgggccgcgacggcgcgcgggggcccgtgggaggcaaagcccgacctgaggctgcggaggcccccgagggcgtcgaccctccgcgcaggcaccaccggcaccgcgacaaggacaagacccccgcggcgggggaccaggaccgagcagaggccccgaaggcggagagcggggagcccggtgcccgggaggagcggccgcggccgcaccgcagccacagcaaggaggccgcggggcccccggaggcgcggagcgagcgcggccgaggcccaggccccgagggcggccggcggcaccaccggcgcggctccccggaggaggcggccgagcgggagccccgacgccaccgcgcgcaccggcaccaggatccgagcaaggagtgcgccggcgccaagggcgagcggcgcgcgcggcaccgcggcggcccccgagcggggccccgggaggcggagagcggggaggagccggcgcggcggcaccgggcccggcacaaggcgcagcctgctcacgaggctgtggagaaggagaccacggagaaggaggccacggagaaggaggctgagatagtggaagccgacaaggaaaaggagctccggaaccaccagccccgggagccacactgtgacctggagaccagtgggactgtgactgtgggtcccatgcacacactgcccagcacctgtctccagaaggtggaggaacagccagaggatgcagacaatcagcggaacgtcactcgcatgggcagtcagcccccagacccgaacactattgtacatatcccagtgatgctgacgggccctcttggggaagccacggtcgttcccagtggtaacgtggacctggaaagccaagcagaggggaagaaggaggtggaagcggatgacgtgatgaggagcggcccccggcctatcgtcccatacagctccatgttctgtttaagccccaccaacctgctccgccgcttctgccactacatcgtgaccatgaggtacttcgaggtggtcattctcgtggtcatcgccttgagcagcatcgccctggctgctgaggacccagtgcgcacagactcgcccaggaacaacgctctgaaatacctggattacattttcactggtgtctttacctttgagatggtgataaagatgatcgacttgggactgctgcttcaccctggagcctatttccgggacttgtggaacattctggacttcattgtggtcagtggcgccctggtggcgtttgctttctcaggatccaaagggaaagacatcaataccatcaagtctctgagagtccttcgtgtcctgcggcccctcaagaccatcaaacggctgcccaagctcaaggctgtgtttgactgtgtggtgaactccctgaagaatgtcctcaacatcttgattgtctacatgctcttcatgttcatatttgccgtcattgcggtgcagctcttcaaagggaagtttttctactgcacagatgaatccaaggagctggagagggactgcaggggtcagtatttggattatgagaaggaggaagtggaagctcagcccaggcagtggaagaaatacgactttcactacgacaatgtgctctgggctctgctgacgctgttcacagtgtccacgggagaaggctggcccatggtgctgaaacactccgtggatgccacctatgaggagcagggtccaagccctgggtaccgcatggagctgtccatcttctacgtggtctactttgtggtctttcccttcttcttcgtcaacatctttgtggctttgatcatcatcaccttccaggagcagggggacaaggtgatgtctgaatgcagcctggagaagaacgagagggcttgcattgacttcgccatcagcgccaaacccctgacacggtacatgccccaaaaccggcagtcgttccagtataagacgtggacatttgtggtctccccgccctttgaatacttcatcatggccatgatagccctcaacactgtggtgctgatgatgaagttctatgatgcaccctatgagtacgagctgatgctgaaatgcctgaacatcgtgttcacatccatgttctccatggaatgcgtgctgaagatcatcgcctttggggtgctgaactatttcagagatgcctggaatgtctttgactttgtcactgtgttgggaagtattactgatattttagtaacagagattgcggtaaagaacaatttcatcaacctcagcttcctccgcctctttcgagctgcgcggctgatcaagctgctccgccagggctacaccatccgcatcctgctgtggacctttgtccagtccttcaaggccctgccctacgtgtgtctgctcattgccatgctgttcttcatctacgccatcatcggcatgcaggtgtttgggaatattgccctggatgatgacaccagcatcaaccgccacaacaacttccggacgtttttgcaagccctgatgctgctgttcaggagcgccacgggggaggcctggcacgagatcatgctgtcctgcctgagcaaccaggcctgtgatgagcaggccaatgccaccgagtgtggaagtgactttgcctacttctacttcgtctccttcatcttcctgtgctcctttctgatgttgaacctctttgtggctgtgatcatggacaattttgagtacctcacgcgggactcttccatcctaggtcctcaccacttggatgagttcatccgggtctgggctgaatacgacccggctgcgtgtgggcgcatcagttacaatgacatgtttgagatgctgaaacacatgtccccgcctctggggctggggaagaaatgccctgctcgagttgcttacaagcgcctggttcgcatgaacatgcccatctccaacgaggacatgactgttcacttcacgtccacgctgatggccctcatccggacggcactggagatcaagctggccccagctgggacaaagcagcatcagtgtgacgcggagttgaggaaggagatttccgttgtgtgggccaatctgccccagaagactttggacttgctggtaccaccccataagcctgatgagatgacagtggggaaggtttatgcagctctgatgatattcgacttctacaagcagaacaaaaccaccagagaccagatgcagcaggctcctggaggcctctcccagatgggtcctgtgtccctgttccaccctctgaaggccaccctggagcagacacagccggctgtgctccgaggagcccgggttttccttcgacagaagagttccacctccctcagcaatggcggggccatacaaaaccaagagagtggcatcaaagagtctgtctcctggggcactcaaaggacccaggatgcaccccatgaggccaggccacccctggagcgtggccactccacagagatccctgtggggcggtcaggagcactggctgtggacgttcagatgcagagcataacccggaggggccctgatggggagccccagcctgggctggagagccagggtcgagcggcctccatgccccgccttgcggccgagactcagcccgtcacagatgccagccccatgaagcgctccatctccacgctggcccagcggccccgtgggactcatctttgcagcaccaccccggaccgcccaccccctagccaggcgtcgtcgcaccaccaccaccaccgctgccaccgccgcagggacaggaagcagaggtccctggagaaggggcccagcctgtctgccgatatggatggcgcaccaagcagtgctgtggggccggggctgcccccgggagaggggcctacaggctgccggcgggaacgagagcgccggcaggagcggggccggtcccaggagcggaggcagccctcatcctcctcctcggagaagcagcgcttctactcctgcgaccgctttgggggccgtgagcccccgaagcccaagccctccctcagcagccacccaacgtcgccaacagctggccaggagccgggaccccacccacaggccggctcagccgtgggctttccgaacacaacgccctgctgcagagagaccccctcagccagcccctggcccctggctctcgaattggctctgacccttacctggggcagcgtctggacagtgaggcctctgtccacgccctgcctgaggacactctcactttcgaggaggctgtggccaccaactcgggccgctcctccaggacttcctacgtgtcctccctgacctcccagtctcaccctctccgccgcgtgcccaacggttaccactgcaccctgggactcagctcgggtggccgagcacggcacagctaccaccaccctgaccaagaccactggtgctagctgcaccgtgaccgctcagacgcctgcatgcagcaggcgtgtgttccagtggatgagttttatcatccacacggggcagccggccctcgggggaggccttgcccaccttggtgaggctcctgtggcccctccctccccctcctcccctcttttactctagacgacgaataaagccctgtt

SEQ ID NO: 2701 - DNA, 9647 bp, Homo sapiens
  source 1..9647: mol_type = unassigned DNA
atggtccgcttcggggacgagctgggcggccgctatgggggccccggcggcggagagcgggcccggggcggcggggccggcggggcggggggcccgggtcccggggggctgcagcccggccagcgggtcctctacaagcaatcgatcgcgcagcgcgcgcggaccatggcgctgtacaaccccatcccggtcaagcagaactgcttcaccgtcaaccgctcgctcttcgtcttcagcgaggacaacgtcgtccgcaaatacgcgaagcgcatcaccgagtggccaccattcgagtatatgatcctggccaccatcatcgccaactgcatcgtgctggccctggagcagcacctccctgatggggacaaaacgcccatgtccgagcggctggacgacacggagccctatttcatcgggatcttttgcttcgaggcagggatcaaaatcatcgctctgggctttgtcttccacaagggctcttacctgcggaacggctggaacgtcatggacttcgtggtcgtcctcacagggatccttgccacggctggaactgacttcgacctgcgaacactgagggctgtgcgtgtgctgaggcccctgaagctggtgtctgggattccaagtttgcaggtggtgctcaagtccatcatgaaggccatggttccactcctgcagattgggctgcttctcttctttgccatcctcatgtttgccatcattggcctggagttctacatgggcaagttccacaaggcctgtttccccaacagcacagatgcggagcccgtgggtgacttcccctgtggcaaggaggccccagcccggctgtgcgagggcgacactgagtgccgggagtactggccaggacccaactttggcatcaccaactttgacaatatcctgtttgccatcttgacggtgttccagtgcatcaccatggagggctggactgacatcctctataatacaaacgatgcggccggcaacacctggaactggctctacttcatccctctcatcatcatcggctccttcttcatgctcaacctggtgctgggcgtgctctcgggggagtttgccaaggagcgagagagggtggagaaccgccgcgccttcctgaagctgcgccggcagcagcagatcgagcgagagctcaacgggtacctggagtggatcttcaaggcggaggaagtcatgctggccgaggaggacaggaatgcagaggagaagtcccctttggacgcagtgctgaagagagcggccaccaagaagagcagaaatgacctgatccacgcagaggagggagaggaccggtttgcagatctctgtgctgttggatcccccttcgcccgcgccagcctcaagagcgggaagacagagagctcgtcatacttccggaggaaggagaagatgttccggttttttatccggcgcatggtgaaggctcagagcttctactgggtggtgctgtgcgtggtggccctgaacacactgtgtgtggccatggtgcattacaaccagccgcggcggcttaccacgaccctgtattttgcagagtttgttttcctgggtctcttcctcacagagatgtccctgaagatgtatggcctggggcccagaagctacttccggtcctccttcaactgcttcgactttggggtcatcgtggggagcgtctttgaagtggtctgggcggccatcaagccgggaagctcctttgggatcagtgtgctgcgggccctccgcctgctgaggatcttcaaagtcacgaagtactggagctccctgcggaacctggtggtgtccctgctgaactccatgaagtccatcatcagcctgctcttcttgctcttcctgttcattgtggtcttcgccctgctggggatgcagctgtttgggggacagttcaacttccaggatgagactcccacaaccaacttcgacaccttccctgccgccatcctcactgtcttccagatcctgacgggagaggactggaatgcagtgatgtatcacgggatcgaatcgcaaggcggcgtcagcaaaggcatgttctcgtccttttacttcattgtcctgacactgttcggaaactacactctgctgaatgtctttctggccatcgctgtggacaacctggccaacgcccaagagctgaccaaggatgaagaggagatggaagaagcagccaatcagaagcttgctctgcaaaaggccaaagaagtggctgaagtcagccccatgtctgccgcgaacatctccatcgccgccaggcagcagaactcggccaaggcgcgctcggtgtgggagcagcgggccagccagctacggctgcagaacctgcgggccagctgcgaggcgctgtacagcgagatggaccccgaggagcggctgcgcttcgccactacgcgccacctgcggcccgacatgaagacgcacctggaccggccgctggtggtggagctgggccgcgacggcgcgcgggggcccgtgggaggcaaagcccgacctgaggctgcggaggcccccgagggcgtcgaccctccgcgcaggcaccaccggcaccgcgacaaggacaagacccccgcggcgggggaccaggaccgagcagaggccccgaaggcggagagcggggagcccggtgcccgggaggagcggccgcggccgcaccgcagccacagcaaggaggccgcggggcccccggaggcgcggagcgagcgcggccgaggcccaggccccgagggcggccggcggcaccaccggcgcggctccccggaggaggcggccgagcgggagccccgacgccaccgcgcgcaccggcaccaggatccgagcaaggagtgcgccggcgccaagggcgagcggcgcgcgcggcaccgcggcggcccccgagcggggccccgggaggcggagagcggggaggagccggcgcggcggcaccgggcccggcacaaggcgcagcctgctcacgaggctgtggagaaggagaccacggagaaggaggccacggagaaggaggctgagatagtggaagccgacaaggaaaaggagctccggaaccaccagccccgggagccacactgtgacctggagaccagtgggactgtgactgtgggtcccatgcacacactgcccagcacctgtctccagaaggtggaggaacagccagaggatgcagacaatcagcggaacgtcactcgcatgggcagtcagcccccagacccgaacactattgtacatatcccagtgatgctgacgggccctcttggggaagccacggtcgttcccagtggtaacgtggacctggaaagccaagcagaggggaagaaggaggtggaagcggatgacgtgatgaggagcggcccccggcctatcgtcccatacagctccatgttctgtttaagccccaccaacctgctccgccgcttctgccactacatcgtgaccatgaggtacttcgaggtggtcattctcgtggtcatcgccttgagcagcatcgccctggctgctgaggacccagtgcgcacagactcgcccaggaacaacgctctgaaatacctggattacattttcactggtgtctttacctttgagatggtgataaagatgatcgacttgggactgctgcttcaccctggagcctatttccgggacttgtggaacattctggacttcattgtggtcagtggcgccctggtggcgtttgctttctcaggatccaaagggaaagacatcaataccatcaagtctctgagagtccttcgtgtcctgcggcccctcaagaccatcaaacggctgcccaagctcaaggctgtgtttgactgtgtggtgaactccctgaagaatgtcctcaacatcttgattgtctacatgctcttcatgttcatatttgccgtcattgcggtgcagctcttcaaagggaagtttttctactgcacagatgaatccaaggagctggagagggactgcaggggtcagtatttggattatgagaaggaggaagtggaagctcagcccaggcagtggaagaaatacgactttcactacgacaatgtgctctgggctctgctgacgctgttcacagtgtccacgggagaaggctggcccatggtgctgaaacactccgtggatgccacctatgaggagcagggtccaagccctgggtaccgcatggagctgtccatcttctacgtggtctactttgtggtctttcccttcttcttcgtcaacatctttgtggctttgatcatcatcaccttccaggagcagggggacaaggtgatgtctgaatgcagcctggagaagaacgagagggcttgcattgacttcgccatcagcgccaaacccctgacacggtacatgccccaaaaccggcagtcgttccagtataagacgtggacatttgtggtctccccgccctttgaatacttcatcatggccatgatagccctcaacactgtggtgctgatgatgaagttctatgatgcaccctatgagtacgagctgatgctgaaatgcctgaacatcgtgttcacatccatgttctccatggaatgcgtgctgaagatcatcgcctttggggtgctgaactatttcagagatgcctggaatgtctttgactttgtcactgtgttgggaagtattactgatattttagtaacagagattgcggaaacgaacaatttcatcaacctcagcttcctccgcctctttcgagctgcgcggctgatcaagctgctccgccagggctacaccatccgcatcctgctgtggacctttgtccagtccttcaaggccctgccctacgtgtgtctgctcattgccatgctgttcttcatctacgccatcatcggcatgcaggtgtttgggaatattgccctggatgatgacaccagcatcaaccgccacaacaacttccggacgtttttgcaagccctgatgctgctgttcaggagcgccacgggggaggcctggcacgagatcatgctgtcctgcctgagcaaccaggcctgtgatgagcaggccaatgccaccgagtgtggaagtgactttgcctacttctacttcgtctccttcatcttcctgtgctcctttctgatgttgaacctctttgtggctgtgatcatggacaattttgagtacctcacgcgggactcttccatcctaggtcctcaccacttggatgagttcatccgggtctgggctgaatacgacccggctgcgtgtgggcgcatcagttacaatgacatgtttgagatgctgaaacacatgtccccgcctctggggctggggaagaaatgccctgctcgagttgcttacaagcgcctggttcgcatgaacatgcccatctccaacgaggacatgactgttcacttcacgtccacgctgatggccctcatccggacggcactggagatcaagctggccccagctgggacaaagcagcatcagtgtgacgcggagttgaggaaggagatttccgttgtgtgggccaatctgccccagaagactttggacttgctggtaccaccccataagcctgatgagatgacagtggggaaggtttatgcagctctgatgatattcgacttctacaagcagaacaaaaccaccagagaccagatgcagcaggctcctggaggcctctcccagatgggtcctgtgtccctgttccaccctctgaaggccaccctggagcagacacagccggctgtgctccgaggagcccgggttttccttcgacagaagagttccacctccctcagcaatggcggggccatacaaaaccaagagagtggcatcaaagagtctgtctcctggggcactcaaaggacccaggatgcaccccatgaggccaggccacccctggagcgtggccactccacagagatccctgtggggcggtcaggagcactggctgtggacgttcagatgcagagcataacccggaggggccctgatggggagccccagcctgggctggagagccagggtcgagcggcctccatgccccgccttgcggccgagactcagcccgtcacagatgccagccccatgaagcgctccatctccacgctggcccagcggccccgtgggactcatctttgcagcaccaccccggaccgcccaccccctagccaggcgtcgtcgcaccaccaccaccaccgctgccaccgccgcagggacaggaagcagaggtccctggagaaggggcccagcctgtctgccgatatggatggcgcaccaagcagtgctgtggggccggggctgcccccgggagaggggcctacaggctgccggcgggaacgagagcgccggcaggagcggggccggtcccaggagcggaggcagccctcatcctcctcctcggagaagcagcgcttctactcctgcgaccgctttgggggccgtgagcccccgaagcccaagccctccctcagcagccacccaacgtcgccaacagctggccaggagccgggaccccacccacagggcagtggttccgtgaatgggagccccttgctgtcaacatctggtgctagcacccccggccgcggtgggcggaggcagctcccccagacgcccctgactccccgccccagcatcacctacaagacggccaactcctcacccatccacttcgccggggctcagaccagcctccctgccttctccccaggccggctcagccgtgggctttccgaacacaacgccctgctgcagagagaccccctcagccagcccctggcccctggctctcgaattggctctgacccttacctggggcagcgtctggacagtgaggcctctgtccacgccctgcctgaggacactctcactttcgaggaggctgtggccaccaactcgggccgctcctccaggacttcctacgtgtcctccctgacctcccagtctcaccctctccgccgcgtgcccaacggttaccactgcaccctgggactcagctcgggtggccgagcacggcacagctaccaccaccctgaccaagaccactggtgctagctgcaccgtgaccgctcagacgcctgcatgcagcaggcgtgtgttccagtggatgagttttatcatccacacggggcagccggccctcgggggaggccttgcccaccttggtgaggctcctgtggcccctccctccccctcctcccctcttttactctagacgacgaataaagccctgttagaggatgcggctctctctgtccccttcctgtcctgccttcctgggtctcgtaccacacaccagaccctaaaccgcaggctgctgtgtgtggctgagaaggacccaggagtccaaatcccgtgtcctgggactcagcatccagcatgggtgcttggagccgttgtgaggagctctgcgtcctgtggggagcacccttcacgtggccgtgcggcacagagaagcagggcccacctgaaagtgcgccgagacctcgggacggaggggatggggagggggacacagtcgtggcttgtgcagcccgccagtgtcagcgaatgctcactcaggcaagctctgtcctccctggacaccgtcagccccacaggaaccgagctgggaagtgttcttgctgtggttgtgatttttaattgcaacacctctcattcttgtcacttctatatacgtgatgtagaaaaaatggaaaaccagaaaaatggggaaggaaatgttcacataactttaaaaaatcaaacctgtgaaagaaagatgtcagctttttgccacgtgtctttgtggcttatgcgaggagactccctgtgcagccctgtccggtccaggtggacgtagacggcccctggctctgctgctcttgaccaagtgcctgaccgccaggccctcacacccaggctcctgggcactgtggtgtgaggcgaggcctcgggatccatcaccgcaggatgctgtgaaaagtactcgcgatggcagccaggtagcaagcccttgccagtggagagcactggatgtcatggtggcaaacaaggcagccatttgctgtcctcctcccacgagtggaaggggtttccaaggaagccacagggcagctgaccacgtgcttgtgtgaggcattttcagtctgttctgcatatgattctcagggcacactctgtggtatgtgaaataggtttccttccacatacagcagaagagaggcaaaggctggtaggaaggaggaagacattggctgggggcttggatgtggggccgtcagggcaggagggaggaagccccagctggaatgaaactcagagcaagtgaccgagggaggacacggctcctgccactgaggccgggcacctgatgcccagcactgtcctggcgccagacacagggagcaggcagtcaagtgaggtctgacccccatggccacgctcaggagagaaagaccatgctcaggacactgtccaaggtgcacaagatgctgggaggtcccttgtttggtgaagaaagggagcatttagagcagttgatggtggtgtgtcctccgtgttctgaaattccagatgatctgtgttggattcttggcttctaccccatgattctcctcaaagaaattgtgtgtgatgtgtgtgtgtgtgtgtgtgtgtgtgtgtctgtgtcacaggagatgcagtgcctgtacaggtgtgttcagtgtgtggatgtcattaacccatagggctatgcaacaaaagacacatttaatagaagtaaaacacacaagaccgctgcctggtctcggggttcagcatgattgtgaccaaacctttttatagaatttccttacctgaaggcacaacactctgaaactttaaagataacagagtattttattccaatagaataaaccaggaatctcggactgtgcatgtgatcactgtgctcctgttgcaaagtagaaggatgtgtattttgacactgacgttttgtctcttgttccccagcccccagcccatgttatcttgggtgtcgaatgtgtccattccatgcagaaccacagccatttccccaggcagtgttgggtcgagaatccacttttctaaacccacacagcctagctggcttgtctagactcttctaggcattggaattgatgaaaactacagggagcggggaaaggagacattatgtcttgttttcctgactttgggttttgtttctcactgtgtcttctccggctatcatatatgtcccctgaatctcatagtgagctgccaaatttgaagtgcatcacccagttgtctgcatctggaaccagtcaagcagtggctgtagtttgaacaagttatgtgtgcatgtaacatatatacatatatacatatatacaagtatgtgcatgataatgtatatcttcgtactttttgatacaatgtattcatttgttaatttttaattatatttgatataaatcaaaggtttgttgcaaaactttatatttaagaagtgttaaaaaaaaaaaaaagtcccaaccatgcaacacaactgggacctacttaaaaagaaattctgtgattgactagtttgctgcctgagtcatatttatcagccaaactttggattctgctgttgtttctacaatgacattttgtatgaagcaaagtccttgaattaaaataaaaacttagcaaaaaatcaaaaacaaaacccc

SEQ ID NO: 2702 - DNA, 6856 bp, Homo sapiens
  source 1..6856: mol_type = unassigned DNA; mol_type = unassigned DNA
ctgcctttcttcaggctaagaaagaagtactgcactgaattcaaagatatcaaagaatgaatcacggaaattttcttgttgtttatgaattcctctttcagtgtggagggagaactcacatttttggattggacaaattgtaaacttatcttgtaaggaaatttcttgcgctgtgctttaaaagtctgaagatttgctccaaatgccaacagccacctaccatctctactgttctgagacttgcccttgaactgagaaaggacaagcagagagacaaaaaaagcacacactacagcatttcttctactaaaactttccatttggcagtggcattttcaacactatggaaatgaacctccctactttttctagtgatctaattttcattaaaagcactatgtatcaagagatcgatgcccgatataaaggaaaagtgataagtgaagcagaaacgaaggggtacttctctctggcttttggagaggcaaactatgcaagaggcaccagacttcctctttctggtgaaggaccaacttctcagccgaatagctccaagcaaactgtcctgtcttggcaagctgcaatcgatgctgctagacaggccaaggctgcccaaactatgagcacctctgcacccccacctgtaggatctctctcccaaagaaaacgtcagcaatacgccaagagcaaaaaacagggtaactcgtccaacagccgacctgcccgcgcccttttctgtttatcactcaataaccccatccgaagagcctgcattagtatagtggaatggaaaccatttgacatatttatattattggctatttttgccaattgtgtggccttagctatttacatcccattccctgaagatgattctaattcaacaaatcataacttggaaaaagtagaatatgccttcctgattatttttacagtcgagacatttttgaagattatagcgtatggattattgctacatcctaatgcttatgttaggaatggatggaatttactggattttgttatagtaatagtaggattgtttagtgtaattttggaacaattaaccaaagaaacagaaggcgggaaccactcaagcggcaaatctggaggctttgatgtcaaagccctccgtgcctttcgagtgttgcgaccacttcgactagtgtcaggagtgcccagtttacaagttgtcctgaactccattataaaagccatggttcccctccttcacatagcccttttggtattatttgtaatcataatctatgctattataggattggaactttttattggaaaaatgcacaaaacatgtttttttgctgactcagatatcgtagctgaagaggacccagctccatgtgcgttctcagggaatggacgccagtgtactgccaatggcacggaatgtaggagtggctgggttggcccgaacggaggcatcaccaactttgataactttgcctttgccatgcttactgtgtttcagtgcatcaccatggagggctggacagatgtgctctactgggtaaatgatgcgataggatgggaatggccatgggtgtattttgttagtctgatcatccttggctcatttttcgtccttaacctggttcttggtgtccttagtggagaattctcaaaggaaagagagaaggcaaaagcacggggagatttccagaagctccgggagaagcagcagctggaggaggatctaaagggctacttggattggatcacccaagctgaggacatcgatccggagaatgaggaagaaggaggagaggaaggcaaacgaaatactagcatgcccaccagcgagactgagtctgtgaacacagagaacgtcagcggtgaaggcgagaaccgaggctgctgtggaagtctctgtcaagccatctcaaaatccaaactcagccgacgctggcgtcgctggaaccgattcaatcgcagaagatgtagggccgccgtgaagtctgtcacgttttactggctggttatcgtcctggtgtttctgaacaccttaaccatttcctctgagcactacaatcagccagattggttgacacagattcaagatattgccaacaaagtcctcttggctctgttcacctgcgagatgctggtaaaaatgtacagcttgggcctccaagcatatttcgtctctcttttcaaccggtttgattgcttcgtggtgtgtggtggaatcactgagacgatcttggtggaactggaaatcatgtctcccctggggatctctgtgtttcggtgtgtgcgcctcttaagaatcttcaaagtgaccaggcactggacttccctgagcaacttagtggcatccttattaaactccatgaagtccatcgcttcgctgttgcttctgctttttctcttcattatcatcttttccttgcttgggatgcagctgtttggcggcaagtttaattttgatgaaacgcaaaccaagcggagcacctttgacaatttccctcaagcacttctcacagtgttccagatcctgacaggcgaagactggaatgctgtgatgtacgatggcatcatggcttacgggggcccatcctcttcaggaatgatcgtctgcatctacttcatcatcctcttcatttgtggtaactatattctactgaatgtcttcttggccatcgctgtagacaatttggctgatgctgaaagtctgaacactgctcagaaagaagaagcggaagaaaaggagaggaaaaagattgccagaaaagagagcctagaaaataaaaagaacaacaaaccagaagtcaaccagatagccaacagtgacaacaaggttacaattgatgactatagagaagaggatgaagacaaggacccctatccgccttgcgatgtgccagtaggggaagaggaagaggaagaggaggaggatgaacctgaggttcctgccggaccccgtcctcgaaggatctcggagttgaacatgaaggaaaaaattgcccccatccctgaagggagcgctttcttcattcttagcaagaccaacccgatccgcgtaggctgccacaagctcatcaaccaccacatcttcaccaacctcatccttgtcttcatcatgctgagcagcgctgccctggccgcagaggaccccatccgcagccactccttccggaacacgatactgggttactttgactatgccttcacagccatctttactgttgagatcctgttgaagatgacaacttttggagctttcctccacaaaggggccttctgcaggaactacttcaatttgctggatatgctggtggttggggtgtctctggtgtcatttgggattcaatccagtgccatctccgttgtgaagattctgagggtcttaagggtcctgcgtcccctcagggccatcaacagagcaaaaggacttaagcacgtggtccagtgcgtcttcgtggccatccggaccatcggcaacatcatgatcgtcaccaccctcctgcagttcatgtttgcctgtatcggggtccagttgttcaaggggaagttctatcgctgtacggatgaagccaaaagtaaccctgaagaatgcaggggacttttcatcctctacaaggatggggatgttgacagtcctgtggtccgtgaacggatctggcaaaacagtgatttcaacttcgacaacgtcctctctgctatgatggcgctcttcacagtctccacgtttgagggctggcctgcgttgctgtataaagccatcgactcgaatggagagaacatcggcccaatctacaaccaccgcgtggagatctccatcttcttcatcatctacatcatcattgtagctttcttcatgatgaacatctttgtgggctttgtcatcgttacatttcaggaacaaggagaaaaagagtataagaactgtgagctggacaaaaatcagcgtcagtgtgttgaatacgccttgaaagcacgtcccttgcggagatacatccccaaaaacccctaccagtacaagttctggtacgtggtgaactcttcgcctttcgaatacatgatgtttgtcctcatcatgctcaacacactctgcttggccatgcagcactacgagcagtccaagatgttcaatgatgccatggacattctgaacatggtcttcaccggggtgttcaccgtcgagatggttttgaaagtcatcgcatttaagcctaaggggtattttagtgacgcctggaacacgtttgactccctcatcgtaatcggcagcattatagacgtggccctcagcgaagcagacaactctgaagagagcaatagaatctccatcacctttttccgtcttttccgagtgatgcgattggtgaagcttctcagcaggggggaaggcatccggacattgctgtggacttttattaagtcctttcaggcgctcccgtatgtggccctcctcatagccatgctgttcttcatctatgcggtcattggcatgcagatgtttgggaaagttgccatgagagataacaaccagatcaataggaacaataacttccagacgtttccccaggcggtgctgctgctcttcaggtgtgcaacaggtgaggcctggcaggagatcatgctggcctgtctcccagggaagctctgtgaccctgagtcagattacaaccccggggaggagtatacatgtgggagcaactttgccattgtctatttcatcagtttttacatgctctgtgcatttctgatcatcaatctgtttgtggctgtcatcatggataatttcgactatctgacccgggactggtctattttggggcctcaccatttagatgaattcaaaagaatatggtcagaatatgaccctgaggcaaagggaaggataaaacaccttgatgtggtcactctgcttcgacgcatccagcctcccctggggtttgggaagttatgtccacacagggtagcgtgcaagagattagttgccatgaacatgcctctcaacagtgacgggacagtcatgtttaatgcaaccctgtttgctttggttcgaacggctcttaagatcaagaccgaagggaacctggagcaagctaatgaagaacttcgggctgtgataaagaaaatttggaagaaaaccagcatgaaattacttgaccaagttgtccctccagctggtgatgatgaggtaaccgtggggaagttctatgccactttcctgatacaggactactttaggaaattcaagaaacggaaagaacaaggactggtgggaaagtaccctgcgaagaacaccacaattgccctacaggcgggattaaggacactgcatgacattgggccagaaatccggcgtgctatatcgtgtgatttgcaagatgacgagcctgaggaaacaaaacgagaagaagaagatgatgtgttcaaaagaaatggtgccctgcttggaaaccatgtcaatcatgttaatagtgataggagagattcccttcagcagaccaataccacccaccgtcccctgcatgtccaaaggccttcaattccacctgcaagtgatactgagaaaccgctgtttcctccagcaggaaattcggtgtgtcataaccatcataaccataattccataggaaagcaagttcccacctcaacaaatgccaatctcaataatgccaatatgtccaaagctgcccatggaaagcggcccagcattgggaaccttgagcatgtgtctgaaaatgggcatcattcttcccacaagcatgaccgggagcctcagagaaggtccagtgtgaaaagaacccgctattatgaaacttacattaggtccgactcaggagatgaacagctcccaactatttgccgggaagacccagagatacatggctatttcagggacccccactgcttgggggagcaggagtatttcagtagtgaggaatgctacgaggatgacagctcgcccacctggagcaggcaaaactatggctactacagcagatacccaggcagaaacatcgactctgagaggccccgaggctaccatcatccccaaggattcttggaggacgatgactcgcccgtttgctatgattcacggagatctccaaggagacgcctactacctcccaccccagcatcccaccggagatcctccttcaactttgagtgcctgcgccggcagagcagccaggaagaggtcccgtcgtctcccatcttcccccatcgcacggccctgcctctgcatctaatgcagcaacagatcatggcagttgccggcctagattcaagtaaagcccagaagtactcaccgagtcactcgacccggtcgtgggccacccctccagcaacccctccctaccgggactggacaccgtgctacacccccctgatccaagtggagcagtcagaggccctggaccaggtgaacggcagcctgccgtccctgcaccgcagctcctggtacacagacgagcccgacatctcctaccggactttcacaccagccagcctgactgtccccagcagcttccggaacaaaaacagcgacaagcagaggagtgcggacagcttggtggaggcagtcctgatatccgaaggcttgggacgctatgcaagggacccaaaatttgtgtcagcaacaaaacacgaaatcgctgatgcctgtgacctcaccatcgacgagatggagagtgcagccagcaccctgcttaatgggaacgtgcgtccccgagccaacggggatgtgggccccctctcacaccggcaggactatgagctacaggactttggtcctggctacagcgacgaagagccagaccctgggagggatgaggaggacctggcggatgaaatgatatgcatcaccaccttgtag

SEQ ID NO: 2703 - DNA, 7636 bp, Homo sapiens
  source 1..7636: mol_type = unassigned DNA; mol_type = unassigned DNA
gggcgagcgcctccgtccccggatgtgagctccggctgcccgcggtcccgagccagcggcggcgcgggcggcggcggcgggcaccgggcaccgcggcgggcgggcagacgggcgggcatggggggagcgccgagcggccccggcggccgggccggcatcaccgcggcgtctctccgctagaggaggggacaagccagttctcctttgcagcaaaaaattacatgtatatattattaagataatatatacattggattttatttttttaaaaagtttattttgctccatttttgaaaaagagagagcttgggtggcgagcggttttttttttaaatcaattatccttattttctgttatttgtccccgtccctccccacccccctgctgaagcgagaataagggcagggaccgcggctcctacctcttggtgatccccttccccattccgcccccgcctcaacgcccagcacagtgccctgcacacagtagtcgctcaataaatgttcgtggatgatgatgatgatgatgatgaaaaaaatgcagcatcaacggcagcagcaagcggaccacgcgaacgaggcaaactatgcaagaggcaccagacttcctctttctggtgaaggaccaacttctcagccgaatagctccaagcaaactgtcctgtcttggcaagctgcaatcgatgctgctagacaggccaaggctgcccaaactatgagcacctctgcacccccacctgtaggatctctctcccaaagaaaacgtcagcaatacgccaagagcaaaaaacagggtaactcgtccaacagccgacctgcccgcgcccttttctgtttatcactcaataaccccatccgaagagcctgcattagtatagtggaatggaaaccatttgacatatttatattattggctatttttgccaattgtgtggccttagctatttacatcccattccctgaagatgattctaattcaacaaatcataacttggaaaaagtagaatatgccttcctgattatttttacagtcgagacatttttgaagattatagcgtatggattattgctacatcctaatgcttatgttaggaatggatggaatttactggattttgttatagtaatagtaggattgtttagtgtaattttggaacaattaaccaaagaaacagaaggcgggaaccactcaagcggcaaatctggaggctttgatgtcaaagccctccgtgcctttcgagtgttgcgaccacttcgactagtgtcaggagtgcccagtttacaagttgtcctgaactccattataaaagccatggttcccctccttcacatagcccttttggtattatttgtaatcataatctatgctattataggattggaactttttattggaaaaatgcacaaaacatgtttttttgctgactcagatatcgtagctgaagaggacccagctccatgtgcgttctcagggaatggacgccagtgtactgccaatggcacggaatgtaggagtggctgggttggcccgaacggaggcatcaccaactttgataactttgcctttgccatgcttactgtgtttcagtgcatcaccatggagggctggacagatgtgctctactggatgaatgatgctatgggatttgaattgccctgggtgtattttgtcagtctcgtcatctttgggtcatttttcgtactaaatcttgtacttggtgtattgagcggagaattctcaaaggaaagagagaaggcaaaagcacggggagatttccagaagctccgggagaagcagcagctggaggaggatctaaagggctacttggattggatcacccaagctgaggacatcgatccggagaatgaggaagaaggaggagaggaaggcaaacgaaatactagcatgcccaccagcgagactgagtctgtgaacacagagaacgtcagcggtgaaggcgagaaccgaggctgctgtggaagtctctgtcaagccatctcaaaatccaaactcagccgacgctggcgtcgctggaaccgattcaatcgcagaagatgtagggccgccgtgaagtctgtcacgttttactggctggttatcgtcctggtgtttctgaacaccttaaccatttcctctgagcactacaatcagccagattggttgacacagattcaagatattgccaacaaagtcctcttggctctgttcacctgcgagatgctggtaaaaatgtacagcttgggcctccaagcatatttcgtctctcttttcaaccggtttgattgcttcgtggtgtgtggtggaatcactgagacgatcttggtggaactggaaatcatgtctcccctggggatctctgtgtttcggtgtgtgcgcctcttaagaatcttcaaagtgaccaggcactggacttccctgagcaacttagtggcatccttattaaactccatgaagtccatcgcttcgctgttgcttctgctttttctcttcattatcatcttttccttgcttgggatgcagctgtttggcggcaagtttaattttgatgaaacgcaaaccaagcggagcacctttgacaatttccctcaagcacttctcacagtgttccagatcctgacaggcgaagactggaatgctgtgatgtacgatggcatcatggcttacgggggcccatcctcttcaggaatgatcgtctgcatctacttcatcatcctcttcatttgtggtaactatattctactgaatgtcttcttggccatcgctgtagacaatttggctgatgctgaaagtctgaacactgctcagaaagaagaagcggaagaaaaggagaggaaaaagattgccagaaaagagagcctagaaaataaaaagaacaacaaaccagaagtcaaccagatagccaacagtgacaacaaggttacaattgatgactatagagaagaggatgaagacaaggacccctatccgccttgcgatgtgccagtaggggaagaggaagaggaagaggaggaggatgaacctgaggttcctgccggaccccgtcctcgaaggatctcggagttgaacatgaaggaaaaaattgcccccatccctgaagggagcgctttcttcattcttagcaagaccaacccgatccgcgtaggctgccacaagctcatcaaccaccacatcttcaccaacctcatccttgtcttcatcatgctgagcagcgctgccctggccgcagaggaccccatccgcagccactccttccggaacacgatactgggttactttgactatgccttcacagccatctttactgttgagatcctgttgaagatgacaacttttggagctttcctccacaaaggggccttctgcaggaactacttcaatttgctggatatgctggtggttggggtgtctctggtgtcatttgggattcaatccagtgccatctccgttgtgaagattctgagggtcttaagggtcctgcgtcccctcagggccatcaacagagcaaaaggacttaagcacgtggtccagtgcgtcttcgtggccatccggaccatcggcaacatcatgatcgtcaccaccctcctgcagttcatgtttgcctgtatcggggtccagttgttcaaggggaagttctatcgctgtacggatgaagccaaaagtaaccctgaagaatgcaggggacttttcatcctctacaaggatggggatgttgacagtcctgtggtccgtgaacggatctggcaaaacagtgatttcaacttcgacaacgtcctctctgctatgatggcgctcttcacagtctccacgtttgagggctggcctgcgttgctgtataaagccatcgactcgaatggagagaacatcggcccaatctacaaccaccgcgtggagatctccatcttcttcatcatctacatcatcattgtagctttcttcatgatgaacatctttgtgggctttgtcatcgttacatttcaggaacaaggagaaaaagagtataagaactgtgagctggacaaaaatcagcgtcagtgtgttgaatacgccttgaaagcacgtcccttgcggagatacatccccaaaaacccctaccagtacaagttctggtacgtggtgaactcttcgcctttcgaatacatgatgtttgtcctcatcatgctcaacacactctgcttggccatgcagcactacgagcagtccaagatgttcaatgatgccatggacattctgaacatggtcttcaccggggtgttcaccgtcgagatggttttgaaagtcatcgcatttaagcctaaggggtattttagtgacgcctggaacacgtttgactccctcatcgtaatcggcagcattatagacgtggccctcagcgaagcagacccaactgaaagtgaaaatgtccctgtcccaactgctacacctgggaactctgaagagagcaatagaatctccatcacctttttccgtcttttccgagtgatgcgattggtgaagcttctcagcaggggggaaggcatccggacattgctgtggacttttattaagtcctttcaggcgctcccgtatgtggccctcctcatagccatgctgttcttcatctatgcggtcattggcatgcagatgtttgggaaagttgccatgagagataacaaccagatcaataggaacaataacttccagacgtttccccaggcggtgctgctgctcttcaggtgtgcaacaggtgaggcctggcaggagatcatgctggcctgtctcccagggaagctctgtgaccctgagtcagattacaaccccggggaggagtatacatgtgggagcaactttgccattgtctatttcatcagtttttacatgctctgtgcatttctgatcatcaatctgtttgtggctgtcatcatggataatttcgactatctgacccgggactggtctattttggggcctcaccatttagatgaattcaaaagaatatggtcagaatatgaccctgaggcaaagggaaggataaaacaccttgatgtggtcactctgcttcgacgcatccagcctcccctggggtttgggaagttatgtccacacagggtagcgtgcaagagattagttgccatgaacatgcctctcaacagtgacgggacagtcatgtttaatgcaaccctgtttgctttggttcgaacggctcttaagatcaagaccgaagggaacctggagcaagctaatgaagaacttcgggctgtgataaagaaaatttggaagaaaaccagcatgaaattacttgaccaagttgtccctccagctggtgatgatgaggtaaccgtggggaagttctatgccactttcctgatacaggactactttaggaaattcaagaaacggaaagaacaaggactggtgggaaagtaccctgcgaagaacaccacaattgccctacaggcgggattaaggacactgcatgacattgggccagaaatccggcgtgctatatcgtgtgatttgcaagatgacgagcctgaggaaacaaaacgagaagaagaagatgatgtgttcaaaagaaatggtgccctgcttggaaaccatgtcaatcatgttaatagtgataggagagattcccttcagcagaccaataccacccaccgtcccctgcatgtccaaaggccttcaattccacctgcaagtgatactgagaaaccgctgtttcctccagcaggaaattcggtgtgtcataaccatcataaccataattccataggaaagcaagttcccacctcaacaaatgccaatctcaataatgccaatatgtccaaagctgcccatggaaagcggcccagcattgggaaccttgagcatgtgtctgaaaatgggcatcattcttcccacaagcatgaccgggagcctcagagaaggtccagtgtgaaaagaacccgctattatgaaacttacattaggtccgactcaggagatgaacagctcccaactatttgccgggaagacccagagatacatggctatttcagggacccccactgcttgggggagcaggagtatttcagtagtgaggaatgctacgaggatgacagctcgcccacctggagcaggcaaaactatggctactacagcagatacccaggcagaaacatcgactctgagaggccccgaggctaccatcatccccaaggattcttggaggacgatgactcgcccgtttgctatgattcacggagatctccaaggagacgcctactacctcccaccccagcatcccaccggagatcctccttcaactttgagtgcctgcgccggcagagcagccaggaagaggtcccgtcgtctcccatcttcccccatcgcacggccctgcctctgcatctaatgcagcaacagatcatggcagttgccggcctagattcaagtaaagcccagaagtactcaccgagtcactcgacccggtcgtgggccacccctccagcaacccctccctaccgggactggacaccgtgctacacccccctgatccaagtggagcagtcagaggccctggaccaggtgaacggcagcctgccgtccctgcaccgcagctcctggtacacagacgagcccgacatctcctaccggactttcacaccagccagcctgactgtccccagcagcttccggaacaaaaacagcgacaagcagaggagtgcggacagcttggtggaggcagtcctgatatccgaaggcttgggacgctatgcaagggacccaaaatttgtgtcagcaacaaaacacgaaatcgctgatgcctgtgacctcaccatcgacgagatggagagtgcagccagcaccctgcttaatgggaacgtgcgtccccgagccaacggggatgtgggccccctctcacaccggcaggactatgagctacaggactttggtcctggctacagcgacgaagagccagaccctgggagggatgaggaggacctggcggatgaaatgatatgcatcaccaccttgtagcccccagcgaggggcagactggctctggcctcaggtggggcgcaggagagccaggggaaaagtgcctcatagttaggaaagtttaggcactagttgggagtaatattcaattaattagacttttgtataagagatgtcatgcctcaagaaagccataaacctggtaggaacaggtcccaagcggttgagcctggcagagtaccatgcgctcggccccagctgcaggaaacagcaggccccgccctctcacagaggatgggtgaggaggccagacctgccctgccccattgtccagatgggcactgctgtggagtctgcttctcccatgtaccagggcaccaggcccacccaactgaaggcatggcggcggggtgcaggggaaagttaaaggtgatgacgatcatcacacctgtgtcgttacctcagccatcggtctagcatatcagtcactgggcccaacatatccatttttaaaccctttcccccaaatacactgcgtcctggttcctgtttagctgttctgaaatacggtgtgtaagtaagtcagaacccagctaccagtgattattgcgagggcaatgggacctcataaataaggttttctgtgatgtgacgccagtttacataagagaatatcac

SEQ ID NO: 2704 - DNA, 6868 bp, Homo sapiens
  source 1..6868: mol_type = unassigned DNA; mol_type = unassigned DNA
ccggatgtgagctccggctgcccgcggtcccgagccagcggcggcgcgggcggcggcggcgggcaccgggcaccgcggcgggcgggcagacgggcgggcatggggggagcgccgagcggccccggcggccgggccggcatcaccgcggcgtctctccgctagaggaggggacaagccagttctcctttgcagcaaaaaattacatgtatatattattaagataatatatacattggattttatttttttaaaaagtttattttgctccatttttgaaaaagagagagcttgggtggcgagcggttttttttttaaatcaattatccttattttctgttatttgtccccgtccctccccacccccctgctgaagcgagaataagggcagggaccgcggctcctacctcttggtgatccccttccccattccgcccccgcctcaacgcccagcacagtgccctgcacacagtagtcgctcaataaatgttcgtggatgatgatgatgatgatgatgaaaaaaatgcagcatcaacggcagcagcaagcggaccacgcgaacgaggcaaactatgcaagaggcaccagacttcctctttctggtgaaggaccaacttctcagccgaatagctccaagcaaactgtcctgtcttggcaagctgcaatcgatgctgctagacaggccaaggctgcccaaactatgagcacctctgcacccccacctgtaggatctctctcccaaagaaaacgtcagcaatacgccaagagcaaaaaacagggtaactcgtccaacagccgacctgcccgcgcccttttctgtttatcactcaataaccccatccgaagagcctgcattagtatagtggaatggaaaccatttgacatatttatattattggctatttttgccaattgtgtggccttagctatttacatcccattccctgaagatgattctaattcaacaaatcataacttggaaaaagtagaatatgccttcctgattatttttacagtcgagacatttttgaagattatagcgtatggattattgctacatcctaatgcttatgttaggaatggatggaatttactggattttgttatagtaatagtaggattgtttagtgtaattttggaacaattaaccaaagaaacagaaggcgggaaccactcaagcggcaaatctggaggctttgatgtcaaagccctccgtgcctttcgagtgttgcgaccacttcgactagtgtcaggagtgcccagtttacaagttgtcctgaactccattataaaagccatggttcccctccttcacatagcccttttggtattatttgtaatcataatctatgctattataggattggaactttttattggaaaaatgcacaaaacatgtttttttgctgactcagatatcgtagctgaagaggacccagctccatgtgcgttctcagggaatggacgccagtgtactgccaatggcacggaatgtaggagtggctgggttggcccgaacggaggcatcaccaactttgataactttgcctttgccatgcttactgtgtttcagtgcatcaccatggagggctggacagatgtgctctactgggtaaatgatgcgataggatgggaatggccatgggtgtattttgttagtctgatcatccttggctcatttttcgtccttaacctggttcttggtgtccttagtggagaattctcaaaggaaagagagaaggcaaaagcacggggagatttccagaagctccgggagaagcagcagctggaggaggatctaaagggctacttggattggatcacccaagctgaggacatcgatccggagaatgaggaagaaggaggagaggaaggcaaacgaaatactagcatgcccaccagcgagactgagtctgtgaacacagagaacgtcagcggtgaaggcgagaaccgaggctgctgtggaagtctctgtcaagccatctcaaaatccaaactcagccgacgctggcgtcgctggaaccgattcaatcgcagaagatgtagggccgccgtgaagtctgtcacgttttactggctggttatcgtcctggtgtttctgaacaccttaaccatttcctctgagcactacaatcagccagattggttgacacagattcaagatattgccaacaaagtcctcttggctctgttcacctgcgagatgctggtaaaaatgtacagcttgggcctccaagcatatttcgtctctcttttcaaccggtttgattgcttcgtggtgtgtggtggaatcactgagacgatcttggtggaactggaaatcatgtctcccctggggatctctgtgtttcggtgtgtgcgcctcttaagaatcttcaaagtgaccaggcactggacttccctgagcaacttagtggcatccttattaaactccatgaagtccatcgcttcgctgttgcttctgctttttctcttcattatcatcttttccttgcttgggatgcagctgtttggcggcaagtttaattttgatgaaacgcaaaccaagcggagcacctttgacaatttccctcaagcacttctcacagtgttccagatcctgacaggcgaagactggaatgctgtgatgtacgatggcatcatggcttacgggggcccatcctcttcaggaatgatcgtctgcatctacttcatcatcctcttcatttgtggtaactatattctactgaatgtcttcttggccatcgctgtagacaatttggctgatgctgaaagtctgaacactgctcagaaagaagaagcggaagaaaaggagaggaaaaagattgccagaaaagagagcctagaaaataaaaagaacaacaaaccagaagtcaaccagatagccaacagtgacaacaaggttacaattgatgactatagagaagaggatgaagacaaggacccctatccgccttgcgatgtgccagtaggggaagaggaagaggaagaggaggaggatgaacctgaggttcctgccggaccccgtcctcgaaggatctcggagttgaacatgaaggaaaaaattgcccccatccctgaagggagcgctttcttcattcttagcaagaccaacccgatccgcgtaggctgccacaagctcatcaaccaccacatcttcaccaacctcatccttgtcttcatcatgctgagcagcgctgccctggccgcagaggaccccatccgcagccactccttccggaacacgatactgggttactttgactatgccttcacagccatctttactgttgagatcctgttgaagatgacaacttttggagctttcctccacaaaggggccttctgcaggaactacttcaatttgctggatatgctggtggttggggtgtctctggtgtcatttgggattcaatccagtgccatctccgttgtgaagattctgagggtcttaagggtcctgcgtcccctcagggccatcaacagagcaaaaggacttaagcacgtggtccagtgcgtcttcgtggccatccggaccatcggcaacatcatgatcgtcaccaccctcctgcagttcatgtttgcctgtatcggggtccagttgttcaaggggaagttctatcgctgtacggatgaagccaaaagtaaccctgaagaatgcaggggacttttcatcctctacaaggatggggatgttgacagtcctgtggtccgtgaacggatctggcaaaacagtgatttcaacttcgacaacgtcctctctgctatgatggcgctcttcacagtctccacgtttgagggctggcctgcgttgctgtataaagccatcgactcgaatggagagaacatcggcccaatctacaaccaccgcgtggagatctccatcttcttcatcatctacatcatcattgtagctttcttcatgatgaacatctttgtgggctttgtcatcgttacatttcaggaacaaggagaaaaagagtataagaactgtgagctggacaaaaatcagcgtcagtgtgttgaatacgccttgaaagcacgtcccttgcggagatacatccccaaaaacccctaccagtacaagttctggtacgtggtgaactcttcgcctttcgaatacatgatgtttgtcctcatcatgctcaacacactctgcttggccatgcagcactacgagcagtccaagatgttcaatgatgccatggacattctgaacatggtcttcaccggggtgttcaccgtcgagatggttttgaaagtcatcgcatttaagcctaaggggtattttagtgacgcctggaacacgtttgactccctcatcgtaatcggcagcattatagacgtggccctcagcgaagcagacccaactgaaagtgaaaatgtccctgtcccaactgctacacctgggaactctgaagagagcaatagaatctccatcacctttttccgtcttttccgagtgatgcgattggtgaagcttctcagcaggggggaaggcatccggacattgctgtggacttttattaagtcctttcaggcgctcccgtatgtggccctcctcatagccatgctgttcttcatctatgcggtcattggcatgcagatgtttgggaaagttgccatgagagataacaaccagatcaataggaacaataacttccagacgtttccccaggcggtgctgctgctcttcaggtgtgcaacaggtgaggcctggcaggagatcatgctggcctgtctcccagggaagctctgtgaccctgagtcagattacaaccccggggaggagtatacatgtgggagcaactttgccattgtctatttcatcagtttttacatgctctgtgcatttctgatcatcaatctgtttgtggctgtcatcatggataatttcgactatctgacccgggactggtctattttggggcctcaccatttagatgaattcaaaagaatatggtcagaatatgaccctgaggcaaagggaaggataaaacaccttgatgtggtcactctgcttcgacgcatccagcctcccctggggtttgggaagttatgtccacacagggtagcgtgcaagagattagttgccatgaacatgcctctcaacagtgacgggacagtcatgtttaatgcaaccctgtttgctttggttcgaacggctcttaagatcaagaccgaagggaacctggagcaagctaatgaagaacttcgggctgtgataaagaaaatttggaagaaaaccagcatgaaattacttgaccaagttgtccctccagctggtgatgatgaggtaaccgtggggaagttctatgccactttcctgatacaggactactttaggaaattcaagaaacggaaagaacaaggactggtgggaaagtaccctgcgaagaacaccacaattgccctacagatgcttgaacggatgctttagaattttctgcctgagctacggcaccaagctggttagtcggaaggcgtttgtggctaaggccttgaaagggaaaagtctcaagtgggcttatttctactgaaacagcatttcagaagaaatgcaggaaaaagcagacccaaggccccagggagaccccttccaagcaaagcactcctccggaaggtggaagcggggccgtggctcatctgcggagccagggctgcctgtcgcggacgttgctcacggtggttctttttcgtgaaagggaacgtacaaagcttaacagttttcccttccaagcagagactcagagaaagggaaagagtgagagagagcaaaggaggggggcagctgccccacagagaaatgaaatgaacacaacttcctgatgctggccagtaaaacaaaaaattaaaaataaaaataaaaagattaagcagacctgcctaaggtgggtatctgactccattccaaagtcctgcatccctagtttgcccgaactcccaaagactgacaggcccctcggcgctgagctgacagagttccttttgtatgccagtccgccatgacctcctgagcgtccggccctgctctctgcagagacccagtccagaatacagtgagaagtggacaggccaggaagctcagatacacccattgaaactaacacatacacccgcatgccaaaaccaatccaggcaacacctcaggttccatcttaacgtgtccacaggaaacaccaccacacccaaacctcatctaacattgtccgtctttaattcgtgctcagagccagtctggggatgcctctttggaagcagtgtggtctagtttcaaggacactgggagtcagggaacctgggttctagtcccagtttcagcattcacttgctgcgtgaccttgggcaagacacttaacctctctgtgcctcagtttcccccatctgtaaaatggggttaataatgtcgacctacctcacagggctgttgtgaggaatagctaagtgattgtaaagcactttgaacgtataattgcttattaagactacaacaataataatatcatatgcctgtttactaccagaactttaagaaattcttgttttcctttgatctcttttctgttctgtaccatacttacccattgagaaggaaaattccccccttttaaagaaatctaggcaatgcacaaagatgtcaacagaggtaaccctgcaggttgcattttcacatcttaagaatagcagatttttgcccaagatgttggtcgataagggtgtctgatcttgaattctcagctgattccaagtggtggttggagtctgtacatctgatgctgagcccaagacacccaaagtggccagtttgggttttaagatcaacattcaaagtagccatagtgcagaggtaatgcagaagaatctaaaaaaa

SEQ ID NO: 2705 - DNA, 9341 bp, Homo sapiens
  source 1..9341: mol_type = unassigned DNA; mol_type = unassigned DNA
ggtcccgagccagcggcggcgcgggcggcggcggcgggcaccgggcaccgcggcgggcgggcagacgggcgggcatggggggagcgccgagcggccccggcggccgggccggcatcaccgcggcgtctctccgctagaggaggggacaagccagttctcctttgcagcaaaaaattacatgtatatattattaagataatatatacattggattttatttttttaaaaagtttattttgctccatttttgaaaaagagagagcttgggtggcgagcggttttttttttaaatcaattatccttattttctgttatttgtccccgtccctccccacccccctgctgaagcgagaataagggcagggaccgcggctcctacctcttggtgatccccttccccattccgcccccgcctcaacgcccagcacagtgccctgcacacagtagtcgctcaataaatgttcgtggatgatgatgatgatgatgatgaaaaaaatgcagcatcaacggcagcagcaagcggaccacgcgaacgaggcaaactatgcaagaggcaccagacttcctctttctggtgaaggaccaacttctcagccgaatagctccaagcaaactgtcctgtcttggcaagctgcaatcgatgctgctagacaggccaaggctgcccaaactatgagcacctctgcacccccacctgtaggatctctctcccaaagaaaacgtcagcaatacgccaagagcaaaaaacagggtaactcgtccaacagccgacctgcccgcgcccttttctgtttatcactcaataaccccatccgaagagcctgcattagtatagtggaatggaaaccatttgacatatttatattattggctatttttgccaattgtgtggccttagctatttacatcccattccctgaagatgattctaattcaacaaatcataacttggaaaaagtagaatatgccttcctgattatttttacagtcgagacatttttgaagattatagcgtatggattattgctacatcctaatgcttatgttaggaatggatggaatttactggattttgttatagtaatagtaggattgtttagtgtaattttggaacaattaaccaaagaaacagaaggcgggaaccactcaagcggcaaatctggaggctttgatgtcaaagccctccgtgcctttcgagtgttgcgaccacttcgactagtgtcaggagtgcccagtttacaagttgtcctgaactccattataaaagccatggttcccctccttcacatagcccttttggtattatttgtaatcataatctatgctattataggattggaactttttattggaaaaatgcacaaaacatgtttttttgctgactcagatatcgtagctgaagaggacccagctccatgtgcgttctcagggaatggacgccagtgtactgccaatggcacggaatgtaggagtggctgggttggcccgaacggaggcatcaccaactttgataactttgcctttgccatgcttactgtgtttcagtgcatcaccatggagggctggacagatgtgctctactgggtaaatgatgcgataggatgggaatggccatgggtgtattttgttagtctgatcatccttggctcatttttcgtccttaacctggttcttggtgtccttagtggagaattctcaaaggaaagagagaaggcaaaagcacggggagatttccagaagctccgggagaagcagcagctggaggaggatctaaagggctacttggattggatcacccaagctgaggacatcgatccggagaatgaggaagaaggaggagaggaaggcaaacgaaatactagcatgcccaccagcgagactgagtctgtgaacacagagaacgtcagcggtgaaggcgagaaccgaggctgctgtggaagtctctggtgctggtggagacggagaggcgcggccaaggcggggccctctgggtgtcggcggtggggtcaagccatctcaaaatccaaactcagccgacgctggcgtcgctggaaccgattcaatcgcagaagatgtagggccgccgtgaagtctgtcacgttttactggctggttatcgtcctggtgtttctgaacaccttaaccatttcctctgagcactacaatcagccagattggttgacacagattcaagatattgccaacaaagtcctcttggctctgttcacctgcgagatgctggtaaaaatgtacagcttgggcctccaagcatatttcgtctctcttttcaaccggtttgattgcttcgtggtgtgtggtggaatcactgagacgatcttggtggaactggaaatcatgtctcccctggggatctctgtgtttcggtgtgtgcgcctcttaagaatcttcaaagtgaccaggcactggacttccctgagcaacttagtggcatccttattaaactccatgaagtccatcgcttcgctgttgcttctgctttttctcttcattatcatcttttccttgcttgggatgcagctgtttggcggcaagtttaattttgatgaaacgcaaaccaagcggagcacctttgacaatttccctcaagcacttctcacagtgttccagatcctgacaggcgaagactggaatgctgtgatgtacgatggcatcatggcttacgggggcccatcctcttcaggaatgatcgtctgcatctacttcatcatcctcttcatttgtggtaactatattctactgaatgtcttcttggccatcgctgtagacaatttggctgatgctgaaagtctgaacactgctcagaaagaagaagcggaagaaaaggagaggaaaaagattgccagaaaagagagcctagaaaataaaaagaacaacaaaccagaagtcaaccagatagccaacagtgacaacaaggttacaattgatgactatagagaagaggatgaagacaaggacccctatccgccttgcgatgtgccagtaggggaagaggaagaggaagaggaggaggatgaacctgaggttcctgccggaccccgtcctcgaaggatctcggagttgaacatgaaggaaaaaattgcccccatccctgaagggagcgctttcttcattcttagcaagaccaacccgatccgcgtaggctgccacaagctcatcaaccaccacatcttcaccaacctcatccttgtcttcatcatgctgagcagcgctgccctggccgcagaggaccccatccgcagccactccttccggaacacgatactgggttactttgactatgccttcacagccatctttactgttgagatcctgttgaagatgacaacttttggagctttcctccacaaaggggccttctgcaggaactacttcaatttgctggatatgctggtggttggggtgtctctggtgtcatttgggattcaatccagtgccatctccgttgtgaagattctgagggtcttaagggtcctgcgtcccctcagggccatcaacagagcaaaaggacttaagcacgtggtccagtgcgtcttcgtggccatccggaccatcggcaacatcatgatcgtcaccaccctcctgcagttcatgtttgcctgtatcggggtccagttgttcaaggggaagttctatcgctgtacggatgaagccaaaagtaaccctgaagaatgcaggggacttttcatcctctacaaggatggggatgttgacagtcctgtggtccgtgaacggatctggcaaaacagtgatttcaacttcgacaacgtcctctctgctatgatggcgctcttcacagtctccacgtttgagggctggcctgcgttgctgtataaagccatcgactcgaatggagagaacatcggcccaatctacaaccaccgcgtggagatctccatcttcttcatcatctacatcatcattgtagctttcttcatgatgaacatctttgtgggctttgtcatcgttacatttcaggaacaaggagaaaaagagtataagaactgtgagctggacaaaaatcagcgtcagtgtgttgaatacgccttgaaagcacgtcccttgcggagatacatccccaaaaacccctaccagtacaagttctggtacgtggtgaactcttcgcctttcgaatacatgatgtttgtcctcatcatgctcaacacactctgcttggccatgcagcactacgagcagtccaagatgttcaatgatgccatggacattctgaacatggtcttcaccggggtgttcaccgtcgagatggttttgaaagtcatcgcatttaagcctaaggggtattttagtgacgcctggaacacgtttgactccctcatcgtaatcggcagcattatagacgtggccctcagcgaagcagacccaactgaaagtgaaaatgtccctgtcccaactgctacacctgggaactctgaagagagcaatagaatctccatcacctttttccgtcttttccgagtgatgcgattggtgaagcttctcagcaggggggaaggcatccggacattgctgtggacttttattaagtcctttcaggcgctcccgtatgtggccctcctcatagccatgctgttcttcatctatgcggtcattggcatgcagatgtttgggaaagttgccatgagagataacaaccagatcaataggaacaataacttccagacgtttccccaggcggtgctgctgctcttcaggtgtgcaacaggtgaggcctggcaggagatcatgctggcctgtctcccagggaagctctgtgaccctgagtcagattacaaccccggggaggagtatacatgtgggagcaactttgccattgtctatttcatcagtttttacatgctctgtgcatttctgatcatcaatctgtttgtggctgtcatcatggataatttcgactatctgacccgggactggtctattttggggcctcaccatttagatgaattcaaaagaatatggtcagaatatgaccctgaggcaaagggaaggataaaacaccttgatgtggtcactctgcttcgacgcatccagcctcccctggggtttgggaagttatgtccacacagggtagcgtgcaagagattagttgccatgaacatgcctctcaacagtgacgggacagtcatgtttaatgcaaccctgtttgctttggttcgaacggctcttaagatcaagaccgaagggaacctggagcaagctaatgaagaacttcgggctgtgataaagaaaatttggaagaaaaccagcatgaaattacttgaccaagttgtccctccagctggtgatgatgaggtaaccgtggggaagttctatgccactttcctgatacaggactactttaggaaattcaagaaacggaaagaacaaggactggtgggaaagtaccctgcgaagaacaccacaattgccctacaggcgggattaaggacactgcatgacattgggccagaaatccggcgtgctatatcgtgtgatttgcaagatgacgagcctgaggaaacaaaacgagaagaagaagatgatgtgttcaaaagaaatggtgccctgcttggaaaccatgtcaatcatgttaatagtgataggagagattcccttcagcagaccaataccacccaccgtcccctgcatgtccaaaggccttcaattccacctgcaagtgatactgagaaaccgctgtttcctccagcaggaaattcggtgtgtcataaccatcataaccataattccataggaaagcaagttcccacctcaacaaatgccaatctcaataatgccaatatgtccaaagctgcccatggaaagcggcccagcattgggaaccttgagcatgtgtctgaaaatgggcatcattcttcccacaagcatgaccgggagcctcagagaaggtccagtgtgaaaagaacccgctattatgaaacttacattaggtccgactcaggagatgaacagctcccaactatttgccgggaagacccagagatacatggctatttcagggacccccactgcttgggggagcaggagtatttcagtagtgaggaatgctacgaggatgacagctcgcccacctggagcaggcaaaactatggctactacagcagatacccaggcagaaacatcgactctgagaggccccgaggctaccatcatccccaaggattcttggaggacgatgactcgcccgtttgctatgattcacggagatctccaaggagacgcctactacctcccaccccagcatcccaccggagatcctccttcaactttgagtgcctgcgccggcagagcagccaggaagaggtcccgtcgtctcccatcttcccccatcgcacggccctgcctctgcatctaatgcagcaacagatcatggcagttgccggcctagattcaagtaaagcccagaagtactcaccgagtcactcgacccggtcgtgggccacccctccagcaacccctccctaccgggactggacaccgtgctacacccccctgatccaagtggagcagtcagaggccctggaccaggtgaacggcagcctgccgtccctgcaccgcagctcctggtacacagacgagcccgacatctcctaccggactttcacaccagccagcctgactgtccccagcagcttccggaacaaaaacagcgacaagcagaggagtgcggacagcttggtggaggcagtcctgatatccgaaggcttgggacgctatgcaagggacccaaaatttgtgtcagcaacaaaacacgaaatcgctgatgcctgtgacctcaccatcgacgagatggagagtgcagccagcaccctgcttaatgggaacgtgcgtccccgagccaacggggatgtgggccccctctcacaccggcaggactatgagctacaggactttggtcctggctacagcgacgaagagccagaccctgggagggatgaggaggacctggcggatgaaatgatatgcatcaccaccttgtagcccccagcgaggggcagactggctctggcctcaggtggggcgcaggagagccaggggaaaagtgcctcatagttaggaaagtttaggcactagttgggagtaatattcaattaattagacttttgtataagagatgtcatgcctcaagaaagccataaacctggtaggaacaggtcccaagcggttgagcctggcagagtaccatgcgctcggccccagctgcaggaaacagcaggccccgccctctcacagaggatgggtgaggaggccagacctgccctgccccattgtccagatgggcactgctgtggagtctgcttctcccatgtaccagggcaccaggcccacccaactgaaggcatggcggcggggtgcaggggaaagttaaaggtgatgacgatcatcacacctgtgtcgttacctcagccatcggtctagcatatcagtcactgggcccaacatatccatttttaaaccctttcccccaaatacactgcgtcctggttcctgtttagctgttctgaaatacggtgtgtaagtaagtcagaacccagctaccagtgattattgcgagggcaatgggacctcataaataaggttttctgtgatgtgacgccagtttacataagagaatatcactccgatggtcggtttctgactgtcacgctaagggcaactgtaaactggaataataatgcactcgcaaccaggtaaacttagatacactagtttgtttaaaattatagatttactgtacatgacttgtaatatactataatttgtatttgtaaagagatggtctatattttgtaattactgtattgtatttgaactgcagcaatatccatgggtcctaataattgtagttccccactaaaatctagaaattattagtatttttactcgggctatccagaagtagaagaaatagagccaattctcatttattcagcgaaaatcctctggggttaaaattttaagtttgaaagaacttgacactacagaaatttttctaaaatattttgagtcactataaacctatcatctttccacaagatataccagatgactatttgcagtcttttctttgggcaagagttccatgattttgatactgtacctttggatccaccatgggttgcaactgtctttggttttgtttgtttgacttgaaccaccctctggtaagtaagtaagtgaattacagagcaggtccagctggctgctctgccccttgggtatccatagttacggttttctctgtggcccacccagggtgttttttgcatcgctggtgcagaaatgcataggtggatgagatatagctgctcttgtcctctggggactggtggtgctgcttaagaaataaggggtgctggggacagaggagcaacgtggtgatctataggattggagtgtcggggtctgtacaaatcgtattgttgccttttacaaaactgctgtactgtatgttctctttgagggcttttatatgcaattgaatgagggctgaagttttcattagaatgcactcacactctgactgtacgtcctgatgaaaacccacttttggataattagaaccgtcaaggcttcattttctgtcaacagaattaggccgactgtcaggttaccttggcagggattccctgcaatcaaaaagatagatgataggtagcaattttggtccaaaatttttaatagtatacagacaacctgttaatttttttttttttttttttttttgtaaataacaaacaccactttgttatgaagaccttacaaacctcttcttaagacattcttactctgatccaggcaaaaacacttcaaggtttgtaaatgactctttcctgacataaatccttttttattaaaatgcaaaatgttcttcagaataaaactgtgtaataatttttatacttgggagtgctccttgcacagagctgtcatttgccagtgagagcctccgacagggcaggtactgtgccagggcagctctgaaattatggatattcttatcctcctggttccttcggtgccaatggtaacctaataccagccgcagggagcgccatttctcctaaagggctacaccactgtcaacattatcctggactctgtgtctctctctgttgggtcttgtggcatcacatcaggccaaaattgccagaccaggaccctaagtgtctgatagaggcgatgatcttttccaaagtcagtacttacaaactggcattcttacaggctgcaccatttcctagtatgtctgctttaagcctggttcaacctctcatcgaatattaaatttttctttgtaagaaaaa

SEQ ID NO: 2706 - DNA, 670 bp, Homo sapiens
  source 1..670: mol_type = unassigned DNA; mol_type = unassigned DNA
gttcgtggatgatgatgatgatgatgatgaaaaaaatgcagcatcaacggcagcagcaagcggaccacgcgaacgaggcaaactatgcaagaggcaccagacttcctctttctggtgaaggaccaacttctcagccgaatagctccaagcaaactgtcctgtcttggcaagctgcaatcgatgctgctagacaggccaaggctgcccaaactatgagcacctctgcacccccacctgtaggatctctctcccaaagaaaacgtcagcaatacgccaagagcaaaaaacagggtaactcgtccaacagccgacctgcccgcgcccttttctgtttatcactcaataaccccatccgaagagcctgcattagtatagtggaatggaaaccatttgacatatttatattattggctatttttgccaattgtgtggccttagctatttacatcccattccctgaagatgattctaattcaacaaatcataacttggaaaaagtagaatatgccttcctgattatttttacagtcgagacatttttgaagattatagcgtatggattattgctacatcctaatgcttatgttaggaatggatggaatttactggattttgttatagtaatagtagggtaagtctcttttactttggggaaatgttgatttggaaa

SEQ ID NO: 2707 - DNA, 6414 bp, Homo sapiens
  source 1..6414: mol_type = unassigned DNA; mol_type = unassigned DNA
atgatgatgatgatgatgatgaaaaaaatgcagcatcaacggcagcagcaagcggaccacgcgaacgaggcaaactatgcaagaggcaccagacttcctctttctggtgaaggaccaacttctcagccgaatagctccaagcaaactgtcctgtcttggcaagctgcaatcgatgctgctagacaggccaaggctgcccaaactatgagcacctctgcacccccacctgtaggatctctctcccaaagaaaacgtcagcaatacgccaagagcaaaaaacagggtaactcgtccaacagccgacctgcccgcgcccttttctgtttatcactcaataaccccatccgaagagcctgcattagtatagtggaatggaaaccatttgacatatttatattattggctatttttgccaattgtgtggccttagctatttacatcccattccctgaagatgattctaattcaacaaatcataacttggaaaaagtagaatatgccttcctgattatttttacagtcgagacatttttgaagattatagcgtatggattattgctacatcctaatgcttatgttaggaatggatggaatttactggattttgttatagtaatagtaggattgtttagtgtaattttggaacaattaaccaaagaaacagaaggcgggaaccactcaagcggcaaatctggaggctttgatgtcaaagccctccgtgcctttcgagtgttgcgaccacttcgactagtgtcaggagtgcccagtttacaagttgtcctgaactccattataaaagccatggttcccctccttcacatagcccttttggtattatttgtaatcataatctatgctattataggattggaactttttattggaaaaatgcacaaaacatgtttttttgctgactcagatatcgtagctgaagaggacccagctccatgtgcgttctcagggaatggacgccagtgtactgccaatggcacggaatgtaggagtggctgggttggcccgaacggaggcatcaccaactttgataactttgcctttgccatgcttactgtgtttcagtgcatcaccatggagggctggacagatgtgctctactggatgaatgatgctatgggatttgaattgccctgggtgtattttgtcagtctcgtcatctttgggtcatttttcgtactaaatcttgtacttggtgtattgagcggagaattctcaaaggaaagagagaaggcaaaagcacggggagatttccagaagctccgggagaagcagcagctggaggaggatctaaagggctacttggattggatcacccaagctgaggacatcgatccggagaatgaggaagaaggaggagaggaaggcaaacgaaatactagcatgcccaccagcgagactgagtctgtgaacacagagaacgtcagcggtgaaggcgagaaccgaggctgctgtggaagtctctgtcaagccatctcaaaatccaaactcagccgacgctggcgtcgctggaaccgattcaatcgcagaagatgtagggccgccgtgaagtctgtcacgttttactggctggttatcgtcctggtgtttctgaacaccttaaccatttcctctgagcactacaatcagccagattggttgacacagattcaagatattgccaacaaagtcctcttggctctgttcacctgcgagatgctggtaaaaatgtacagcttgggcctccaagcatatttcgtctctcttttcaaccggtttgattgcttcgtggtgtgtggtggaatcactgagacgatcttggtggaactggaaatcatgtctcccctggggatctctgtgtttcggtgtgtgcgcctcttaagaatcttcaaagtgaccaggcactggacttccctgagcaacttagtggcatccttattaaactccatgaagtccatcgcttcgctgttgcttctgctttttctcttcattatcatcttttccttgcttgggatgcagctgtttggcggcaagtttaattttgatgaaacgcaaaccaagcggagcacctttgacaatttccctcaagcacttctcacagtgttccagatcctgacaggcgaagactggaatgctgtgatgtacgatggcatcatggcttacgggggcccatcctcttcaggaatgatcgtctgcatctacttcatcatcctcttcatttgtggtaactatattctactgaatgtcttcttggccatcgctgtagacaatttggctgatgctgaaagtctgaacactgctcagaaagaagaagcggaagaaaaggagaggaaaaagattgccagaaaagagagcctagaaaataaaaagaacaacaaaccagaagtcaaccagatagccaacagtgacaacaaggttacaattgatgactatagagaagaggatgaagacaaggacccctatccgccttgcgatgtgccagtaggggaagaggaagaggaagaggaggaggatgaacctgaggttcctgccggaccccgtcctcgaaggatctcggagttgaacatgaaggaaaaaattgcccccatccctgaagggagcgctttcttcattcttagcaagaccaacccgatccgcgtaggctgccacaagctcatcaaccaccacatcttcaccaacctcatccttgtcttcatcatgctgagcagcgctgccctggccgcagaggaccccatccgcagccactccttccggaacacgatactgggttactttgactatgccttcacagccatctttactgttgagatcctgttgaagatgacaacttttggagctttcctccacaaaggggccttctgcaggaactacttcaatttgctggatatgctggtggttggggtgtctctggtgtcatttgggattcaatccagtgccatctccgttgtgaagattctgagggtcttaagggtcctgcgtcccctcagggccatcaacagagcaaaaggacttaagcacgtggtccagtgcgtcttcgtggccatccggaccatcggcaacatcatgatcgtcaccaccctcctgcagttcatgtttgcctgtatcggggtccagttgttcaaggggaagttctatcgctgtacggatgaagccaaaagtaaccctgaagaatgcaggggacttttcatcctctacaaggatggggatgttgacagtcctgtggtccgtgaacggatctggcaaaacagtgatttcaacttcgacaacgtcctctctgctatgatggcgctcttcacagtctccacgtttgagggctggcctgcgttgctgtataaagccatcgactcgaatggagagaacatcggcccaatctacaaccaccgcgtggagatctccatcttcttcatcatctacatcatcattgtagctttcttcatgatgaacatctttgtgggctttgtcatcgttacatttcaggaacaaggagaaaaagagtataagaactgtgagctggacaaaaatcagcgtcagtgtgttgaatacgccttgaaagcacgtcccttgcggagatacatccccaaaaacccctaccagtacaagttctggtacgtggtgaactcttcgcctttcgaatacatgatgtttgtcctcatcatgctcaacacactctgcttggccatgcagcactacgagcagtccaagatgttcaatgatgccatggacattctgaacatggtcttcaccggggtgttcaccgtcgagatggttttgaaagtcatcgcatttaagcctaaggggtattttagtgacgcctggaacacgtttgactccctcatcgtaatcggcagcattatagacgtggccctcagcgaagcagacaactctgaagagagcaatagaatctccatcacctttttccgtcttttccgagtgatgcgattggtgaagcttctcagcaggggggaaggcatccggacattgctgtggacttttattaagtcctttcaggcgctcccgtatgtggccctcctcatagccatgctgttcttcatctatgcggtcattggcatgcagatgtttgggaaagttgccatgagagataacaaccagatcaataggaacaataacttccagacgtttccccaggcggtgctgctgctcttcaggtgtgcaacaggtgaggcctggcaggagatcatgctggcctgtctcccagggaagctctgtgaccctgagtcagattacaaccccggggaggagtatacatgtgggagcaactttgccattgtctatttcatcagtttttacatgctctgtgcatttctgatcatcaatctgtttgtggctgtcatcatggataatttcgactatctgacccgggactggtctattttggggcctcaccatttagatgaattcaaaagaatatggtcagaatatgaccctgaggcaaagggaaggataaaacaccttgatgtggtcactctgcttcgacgcatccagcctcccctggggtttgggaagttatgtccacacagggtagcgtgcaagagattagttgccatgaacatgcctctcaacagtgacgggacagtcatgtttaatgcaaccctgtttgctttggttcgaacggctcttaagatcaagaccgaagggaacctggagcaagctaatgaagaacttcgggctgtgataaagaaaatttggaagaaaaccagcatgaaattacttgaccaagttgtccctccagctggtgatgatgaggtaaccgtggggaagttctatgccactttcctgatacaggactactttaggaaattcaagaaacggaaagaacaaggactggtgggaaagtaccctgcgaagaacaccacaattgccctacaggcgggattaaggacactgcatgacattgggccagaaatccggcgtgctatatcgtgtgatttgcaagatgacgagcctgaggaaacaaaacgagaagaagaagatgatgtgttcaaaagaaatggtgccctgcttggaaaccatgtcaatcatgttaatagtgataggagagattcccttcagcagaccaataccacccaccgtcccctgcatgtccaaaggccttcaattccacctgcaagtgatactgagaaaccgctgtttcctccagcaggaaattcggtgtgtcataaccatcataaccataattccataggaaagcaagttcccacctcaacaaatgccaatctcaataatgccaatatgtccaaagctgcccatggaaagcggcccagcattgggaaccttgagcatgtgtctgaaaatgggcatcattcttcccacaagcatgaccgggagcctcagagaaggtccagtgtgaaaaggtccgactcaggagatgaacagctcccaactatttgccgggaagacccagagatacatggctatttcagggacccccactgcttgggggagcaggagtatttcagtagtgaggaatgctacgaggatgacagctcgcccacctggagcaggcaaaactatggctactacagcagatacccaggcagaaacatcgactctgagaggccccgaggctaccatcatccccaaggattcttggaggacgatgactcgcccgtttgctatgattcacggagatctccaaggagacgcctactacctcccaccccagcatcccaccggagatcctccttcaactttgagtgcctgcgccggcagagcagccaggaagaggtcccgtcgtctcccatcttcccccatcgcacggccctgcctctgcatctaatgcagcaacagatcatggcagttgccggcctagattcaagtaaagcccagaagtactcaccgagtcactcgacccggtcgtgggccacccctccagcaacccctccctaccgggactggacaccgtgctacacccccctgatccaagtggagcagtcagaggccctggaccaggtgaacggcagcctgccgtccctgcaccgcagctcctggtacacagacgagcccgacatctcctaccggactttcacaccagccagcctgactgtccccagcagcttccggaacaaaaacagcgacaagcagaggagtgcggacagcttggtggaggcagtcctgatatccgaaggcttgggacgctatgcaagggacccaaaatttgtgtcagcaacaaaacacgaaatcgctgatgcctgtgacctcaccatcgacgagatggagagtgcagccagcaccctgcttaatgggaacgtgcgtccccgagccaacggggatgtgggccccctctcacaccggcaggactatgagctacaggactttggtcctggctacagcgacgaagagccagaccctgggagggatgaggaggacctggcggatgaaatgatatgcatcaccaccttgtag

SEQ ID NO: 2708 - DNA, 6441 bp, Homo sapiens
  source 1..6441: mol_type = unassigned DNA; mol_type = unassigned DNA
atgatgatgatgatgatgatgaaaaaaatgcagcatcaacggcagcagcaagcggaccacgcgaacgaggcaaactatgcaagaggcaccagacttcctctttctggtgaaggaccaacttctcagccgaatagctccaagcaaactgtcctgtcttggcaagctgcaatcgatgctgctagacaggccaaggctgcccaaactatgagcacctctgcacccccacctgtaggatctctctcccaaagaaaacgtcagcaatacgccaagagcaaaaaacagggtaactcgtccaacagccgacctgcccgcgcccttttctgtttatcactcaataaccccatccgaagagcctgcattagtatagtggaatggaaaccatttgacatatttatattattggctatttttgccaattgtgtggccttagctatttacatcccattccctgaagatgattctaattcaacaaatcataacttggaaaaagtagaatatgccttcctgattatttttacagtcgagacatttttgaagattatagcgtatggattattgctacatcctaatgcttatgttaggaatggatggaatttactggattttgttatagtaatagtaggattgtttagtgtaattttggaacaattaaccaaagaaacagaaggcgggaaccactcaagcggcaaatctggaggctttgatgtcaaagccctccgtgcctttcgagtgttgcgaccacttcgactagtgtcaggagtgcccagtttacaagttgtcctgaactccattataaaagccatggttcccctccttcacatagcccttttggtattatttgtaatcataatctatgctattataggattggaactttttattggaaaaatgcacaaaacatgtttttttgctgactcagatatcgtagctgaagaggacccagctccatgtgcgttctcagggaatggacgccagtgtactgccaatggcacggaatgtaggagtggctgggttggcccgaacggaggcatcaccaactttgataactttgcctttgccatgcttactgtgtttcagtgcatcaccatggagggctggacagatgtgctctactgggtaaatgatgcgataggatgggaatggccatgggtgtattttgttagtctgatcatccttggctcatttttcgtccttaacctggttcttggtgtccttagtggagaattctcaaaggaaagagagaaggcaaaagcacggggagatttccagaagctccgggagaagcagcagctggaggaggatctaaagggctacttggattggatcacccaagctgaggacatcgatccggagaatgaggaagaaggaggagaggaaggcaaacgaaatactagcatgcccaccagcgagactgagtctgtgaacacagagaacgtcagcggtgaaggcgagaaccgaggctgctgtggaagtctctgtcaagccatctcaaaatccaaactcagccgacgctggcgtcgctggaaccgattcaatcgcagaagatgtagggccgccgtgaagtctgtcacgttttactggctggttatcgtcctggtgtttctgaacaccttaaccatttcctctgagcactacaatcagccagattggttgacacagattcaagatattgccaacaaagtcctcttggctctgttcacctgcgagatgctggtaaaaatgtacagcttgggcctccaagcatatttcgtctctcttttcaaccggtttgattgcttcgtggtgtgtggtggaatcactgagacgatcttggtggaactggaaatcatgtctcccctggggatctctgtgtttcggtgtgtgcgcctcttaagaatcttcaaagtgaccaggcactggacttccctgagcaacttagtggcatccttattaaactccatgaagtccatcgcttcgctgttgcttctgctttttctcttcattatcatcttttccttgcttgggatgcagctgtttggcggcaagtttaattttgatgaaacgcaaaccaagcggagcacctttgacaatttccctcaagcacttctcacagtgttccagatcctgacaggcgaagactggaatgctgtgatgtacgatggcatcatggcttacgggggcccatcctcttcaggaatgatcgtctgcatctacttcatcatcctcttcatttgtggtaactatattctactgaatgtcttcttggccatcgctgtagacaatttggctgatgctgaaagtctgaacactgctcagaaagaagaagcggaagaaaaggagaggaaaaagattgccagaaaagagagcctagaaaataaaaagaacaacaaaccagaagtcaaccagatagccaacagtgacaacaaggttacaattgatgactatagagaagaggatgaagacaaggacccctatccgccttgcgatgtgccagtaggggaagaggaagaggaagaggaggaggatgaacctgaggttcctgccggaccccgtcctcgaaggatctcggagttgaacatgaaggaaaaaattgcccccatccctgaagggagcgctttcttcattcttagcaagaccaacccgatccgcgtaggctgccacaagctcatcaaccaccacatcttcaccaacctcatccttgtcttcatcatgctgagcagcgctgccctggccgcagaggaccccatccgcagccactccttccggaacacgatactgggttactttgactatgccttcacagccatctttactgttgagatcctgttgaagatgacaacttttggagctttcctccacaaaggggccttctgcaggaactacttcaatttgctggatatgctggtggttggggtgtctctggtgtcatttgggattcaatccagtgccatctccgttgtgaagattctgagggtcttaagggtcctgcgtcccctcagggccatcaacagagcaaaaggacttaagcacgtggtccagtgcgtcttcgtggccatccggaccatcggcaacatcatgatcgtcaccaccctcctgcagttcatgtttgcctgtatcggggtccagttgttcaaggggaagttctatcgctgtacggatgaagccaaaagtaaccctgaagaatgcaggggacttttcatcctctacaaggatggggatgttgacagtcctgtggtccgtgaacggatctggcaaaacagtgatttcaacttcgacaacgtcctctctgctatgatggcgctcttcacagtctccacgtttgagggctggcctgcgttgctgtataaagccatcgactcgaatggagagaacatcggcccaatctacaaccaccgcgtggagatctccatcttcttcatcatctacatcatcattgtagctttcttcatgatgaacatctttgtgggctttgtcatcgttacatttcaggaacaaggagaaaaagagtataagaactgtgagctggacaaaaatcagcgtcagtgtgttgaatacgccttgaaagcacgtcccttgcggagatacatccccaaaaacccctaccagtacaagttctggtacgtggtgaactcttcgcctttcgaatacatgatgtttgtcctcatcatgctcaacacactctgcttggccatgcagcactacgagcagtccaagatgttcaatgatgccatggacattctgaacatggtcttcaccggggtgttcaccgtcgagatggttttgaaagtcatcgcatttaagcctaaggggtattttagtgacgcctggaacacgtttgactccctcatcgtaatcggcagcattatagacgtggccctcagcgaagcagacaactctgaagagagcaatagaatctccatcacctttttccgtcttttccgagtgatgcgattggtgaagcttctcagcaggggggaaggcatccggacattgctgtggacttttattaagtcctttcaggcgctcccgtatgtggccctcctcatagccatgctgttcttcatctatgcggtcattggcatgcagatgtttgggaaagttgccatgagagataacaaccagatcaataggaacaataacttccagacgtttccccaggcggtgctgctgctcttcaggtgtgcaacaggtgaggcctggcaggagatcatgctggcctgtctcccagggaagctctgtgaccctgagtcagattacaaccccggggaggagtatacatgtgggagcaactttgccattgtctatttcatcagtttttacatgctctgtgcatttctgatcatcaatctgtttgtggctgtcatcatggataatttcgactatctgacccgggactggtctattttggggcctcaccatttagatgaattcaaaagaatatggtcagaatatgaccctgaggcaaagggaaggataaaacaccttgatgtggtcactctgcttcgacgcatccagcctcccctggggtttgggaagttatgtccacacagggtagcgtgcaagagattagttgccatgaacatgcctctcaacagtgacgggacagtcatgtttaatgcaaccctgtttgctttggttcgaacggctcttaagatcaagaccgaagggaacctggagcaagctaatgaagaacttcgggctgtgataaagaaaatttggaagaaaaccagcatgaaattacttgaccaagttgtccctccagctggtgatgatgaggtaaccgtggggaagttctatgccactttcctgatacaggactactttaggaaattcaagaaacggaaagaacaaggactggtgggaaagtaccctgcgaagaacaccacaattgccctacaggcgggattaaggacactgcatgacattgggccagaaatccggcgtgctatatcgtgtgatttgcaagatgacgagcctgaggaaacaaaacgagaagaagaagatgatgtgttcaaaagaaatggtgccctgcttggaaaccatgtcaatcatgttaatagtgataggagagattcccttcagcagaccaataccacccaccgtcccctgcatgtccaaaggccttcaattccacctgcaagtgatactgagaaaccgctgtttcctccagcaggaaattcggtgtgtcataaccatcataaccataattccataggaaagcaagttcccacctcaacaaatgccaatctcaataatgccaatatgtccaaagctgcccatggaaagcggcccagcattgggaaccttgagcatgtgtctgaaaatgggcatcattcttcccacaagcatgaccgggagcctcagagaaggtccagtgtgaaaagaacccgctattatgaaacttacattaggtccgactcaggagatgaacagctcccaactatttgccgggaagacccagagatacatggctatttcagggacccccactgcttgggggagcaggagtatttcagtagtgaggaatgctacgaggatgacagctcgcccacctggagcaggcaaaactatggctactacagcagatacccaggcagaaacatcgactctgagaggccccgaggctaccatcatccccaaggattcttggaggacgatgactcgcccgtttgctatgattcacggagatctccaaggagacgcctactacctcccaccccagcatcccaccggagatcctccttcaactttgagtgcctgcgccggcagagcagccaggaagaggtcccgtcgtctcccatcttcccccatcgcacggccctgcctctgcatctaatgcagcaacagatcatggcagttgccggcctagattcaagtaaagcccagaagtactcaccgagtcactcgacccggtcgtgggccacccctccagcaacccctccctaccgggactggacaccgtgctacacccccctgatccaagtggagcagtcagaggccctggaccaggtgaacggcagcctgccgtccctgcaccgcagctcctggtacacagacgagcccgacatctcctaccggactttcacaccagccagcctgactgtccccagcagcttccggaacaaaaacagcgacaagcagaggagtgcggacagcttggtggaggcagtcctgatatccgaaggcttgggacgctatgcaagggacccaaaatttgtgtcagcaacaaaacacgaaatcgctgatgcctgtgacctcaccatcgacgagatggagagtgcagccagcaccctgcttaatgggaacgtgcgtccccgagccaacggggatgtgggccccctctcacaccggcaggactatgagctacaggactttggtcctggctacagcgacgaagagccagaccctgggagggatgaggaggacctggcggatgaaatgatatgcatcaccaccttgtag

SEQ ID NO: 2709 - DNA, 5673 bp, Homo sapiens
  source 1..5673: mol_type = unassigned DNA; mol_type = unassigned DNA
atgcagcatcaacggcagcagcaagcggaccacgcgaacgaggcaaactatgcaagaggcaccagacttcctctttctggtgaaggaccaacttctcagccgaatagctccaagcaaactgtcctgtcttggcaagctgcaatcgatgctgctagacaggccaaggctgcccaaactatgagcacctctgcacccccacctgtaggatctctctcccaaagaaaacgtcagcaatacgccaagagcaaaaaacagggtaactcgtccaacagccgacctgcccgcgcccttttctgtttatcactcaataaccccatccgaagagcctgcattagtatagtggaatggaaaccatttgacatatttatattattggctatttttgccaattgtgtggccttagctatttacatcccattccctgaagatgattctaattcaacaaatcataacttggaaaaagtagaatatgccttcctgattatttttacagtcgagacatttttgaagattatagcgtatggattattgctacatcctaatgcttatgttaggaatggatggaatttactggattttgttatagtaatagtaggattgtttagtgtaattttggaacaattaaccaaagaaacagaaggcgggaaccactcaagcggcaaatctggaggctttgatgtcaaagccctccgtgcctttcgagtgttgcgaccacttcgactagtgtcaggagtgcccagtttacaagttgtcctgaactccattataaaagccatggttcccctccttcacatagcccttttggtattatttgtaatcataatctatgctattataggattggaactttttattggaaaaatgcacaaaacatgtttttttgctgactcagatatcgtagctgaagaggacccagctccatgtgcgttctcagggaatggacgccagtgtactgccaatggcacggaatgtaggagtggctgggttggcccgaacggaggcatcaccaactttgataactttgcctttgccatgcttactgtgtttcagtgcatcaccatggagggctggacagatgtgctctactgggtaaatgatgcgataggatgggaatggccatgggtgtattttgttagtctgatcatccttggctcatttttcgtccttaacctggttcttggtgtccttagtggagaattctcaaaggaaagagagaaggcaaaagcacggggagatttccagaagctccgggagaagcagcagctggaggaggatctaaagggctacttggattggatcacccaagctgaggacatcgatccggagaatgaggaagaaggaggagaggaaggcaaacgaaatactagcatgcccaccagcgagactgagtctgtgaacacagagaacgtcagcggtgaaggcgagaaccgaggctgctgtggaagtctctggtgctggtggagacggagaggcgcggccaaggcggggccctctgggtgtcggcggtggggtcaagccatctcaaaatccaaactcagccgacgctggcgtcgctggaaccgattcaatcgcagaagatgtagggccgccgtgaagtctgtcacgttttactggctggttatcgtcctggtgtttctgaacaccttaaccatttcctctgagcactacaatcagccagattggttgacacagattcaagatattgccaacaaagtcctcttggctctgttcacctgcgagatgctggtaaaaatgtacagcttgggcctccaagcatatttcgtctctcttttcaaccggtttgattgcttcgtggtgtgtggtggaatcactgagacgatcttggtggaactggaaatcatgtctcccctggggatctctgtgtttcggtgtgtgcgcctcttaagaatcttcaaagtgaccaggcactggacttccctgagcaacttagtggcatccttattaaactccatgaagtccatcgcttcgctgttgcttctgctttttctcttcattatcatcttttccttgcttgggatgcagctgtttggcggcaagtttaattttgatgaaacgcaaaccaagcggagcacctttgacaatttccctcaagcacttctcacagtgttccagatcctgacaggcgaagactggaatgctgtgatgtacgatggcatcatggcttacgggggcccatcctcttcaggaatgatcgtctgcatctacttcatcatcctcttcatttgtggtaactatattctactgaatgtcttcttggccatcgctgtagacaatttggctgatgctgaaagtctgaacactgctcagaaagaagaagcggaagaaaaggagaggaaaaagattgccagaaaagagagcctagaaaataaaaagaacaacaaaccagaagtcaaccagatagccaacagtgacaacaaggttacaattgatgactatagagaagaggatgaagacaaggacccctatccgccttgcgatgtgccagtaggggaagaggaagaggaagaggaggaggatgaacctgaggttcctgccggaccccgtcctcgaaggatctcggagttgaacatgaaggaaaaaattgcccccatccctgaagggagcgctttcttcattcttagcaagaccaacccgatccgcgtaggctgccacaagctcatcaaccaccacatcttcaccaacctcatccttgtcttcatcatgctgagcagcgctgccctggccgcagaggaccccatccgcagccactccttccggaacacgatactgggttactttgactatgccttcacagccatctttactgttgagatcctgttgaagatgacaacttttggagctttcctccacaaaggggccttctgcaggaactacttcaatttgctggatatgctggtggttggggtgtctctggtgtcatttgggattcaatccagtgccatctccgttgtgaagattctgagggtcttaagggtcctgcgtcccctcagggccatcaacagagcaaaaggacttaagcacgtggtccagtgcgtcttcgtggccatccggaccatcggcaacatcatgatcgtcaccaccctcctgcagttcatgtttgcctgtatcggggtccagttgttcaaggggaagttctatcgctgtacggatgaagccaaaagtaaccctgaagaatgcaggggacttttcatcctctacaaggatggggatgttgacagtcctgtggtccgtgaacggatctggcaaaacagtgatttcaacttcgacaacgtcctctctgctatgatggcgctcttcacagtctccacgtttgagggctggcctgcgttgctgtataaagccatcgactcgaatggagagaacatcggcccaatctacaaccaccgcgtggagatctccatcttcttcatcatctacatcatcattgtagctttcttcatgatgaacatctttgtgggctttgtcatcgttacatttcaggaacaaggagaaaaagagtataagaactgtgagctggacaaaaatcagcgtcagtgtgttgaatacgccttgaaagcacgtcccttgcggagatacatccccaaaaacccctaccagtacaagttctggtacgtggtgaactcttcgcctttcgaatacatgatgtttgtcctcatcatgctcaacacactctgcttggccatgcagcactacgagcagtccaagatgttcaatgatgccatggacattctgaacatggtcttcaccggggtgttcaccgtcgagatggttttgaaagtcatcgcatttaagcctaagcactatttcactgatgcatggaacacttttgatgccttaattgttgttggtagcgtcgttgatattgctataactgaagtgaataactctgaagagagcaatagaatctccatcacctttttccgtcttttccgagtgatgcgattggtgaagcttctcagcaggggggaaggcatccggacattgctgtggacttttattaagtcctttcaggcgctcccgtatgtggccctcctcatagccatgctgttcttcatctatgcggtcattggcatgcagatgtttgggaaagttgccatgagagataacaaccagatcaataggaacaataacttccagacgtttccccaggcggtgctgctgctcttcaggtgtgcaacaggtgaggcctggcaggagatcatgctggcctgtctcccagggaagctctgtgaccctgagtcagattacaaccccggggaggagtatacatgtgggagcaactttgccattgtctatttcatcagtttttacatgctctgtgcatttctgatcatcaatctgtttgtggctgtcatcatggataatttcgactatctgacccgggactggtctattttggggcctcaccatttagatgaattcaaaagaatatggtcagaatatgaccctgaggcaaagggaaggataaaacaccttgatgtggtcactctgcttcgacgcatccagcctcccctggggtttgggaagttatgtccacacagggtagcgtgcaagagattagttgccatgaacatgcctctcaacagtgacgggacagtcatgtttaatgcaaccctgtttgctttggttcgaacggctcttaagatcaagaccgaagggaacctggagcaagctaatgaagaacttcgggctgtgataaagaaaatttggaagaaaaccagcatgaaattacttgaccaagttgtccctccagctggtgatgatgaggtaaccgtggggaagttctatgccactttcctgatacaggactactttaggaaattcaagaaacggaaagaacaaggactggtgggaaagtaccctgcgaagaacaccacaattgccctacagatgcttgaacggatgctttagaattttctgcctgagctacggcaccaagctggttagtcggaaggcgtttgtggctaaggccttgaaagggaaaagtctcaagtgggcttatttctactgaaacagcatttcagaagaaatgcaggaaaaagcagacccaaggccccagggagaccccttccaagcaaagcactcctccggaaggtggaagcggggccgtggctcatctgcggagccagggctgcctgtcgcggacgttgctcacggtggttctttttcgtgaaagggaacgtacaaagcttaacagttttcccttccaagcagagactcagagaaagggaaagagtgagagagagcaaaggaggggggcagctgccccacagagaaatgaaatgaacacaacttcctgatgctggccagtaaaacaaaaaattaaaaataaaaataaaaagattaagcagacctgcctaaggtgggtatctgactccattccaaagtcctgcatccctagtttgcccgaactcccaaagactgacaggcccctcggcgctgagctgacagagttccttttgtatgccagtccgccatgacctcctgagcgtccggccctgctctctgcagagacccagtccagaatacagtgagaagtggacaggccaggaagctcagatacacccattgaaactaacacatacacccgcatgccaaaaccaatccaggcaacacctcaggttccatcttaacgtgtccacaggaaacacc

SEQ ID NO: 2710 - DNA, 4349 bp, Homo sapiens
  source 1..4349: mol_type = unassigned DNA; mol_type = unassigned DNA
tgcccagtttacaagttgtcctgaactccattataaaagccatggttcccctccttcacatagcccttttggtattatttgtaatcataatctatgctattataggattggaactttttattggaaaaatgcacaaaacatgtttttttgctgactcagatatcgtagctgaagaggacccagctccatgtgcgttctcagggaatggacgccagtgtactgccaatggcacggaatgtaggagtggctgggttggcccgaacggaggcatcaccaactttgataactttgcctttgccatgcttactgtgtttcagtgcatcaccatggagggctggacagatgtgctctactgggtaaatgatgcgataggatgggaatggccatgggtgtattttgttagtctgatcatccttggctcatttttcgtccttaacctggttcttggtgtccttagtggagaattctcaaaggaaagagagaaggcaaaagcacggggagatttccagaagctccgggagaagcagcagctggaggaggatctaaagggctacttggattggatcacccaagctgaggacatcgatccggagaatgaggaagaaggaggagaggaaggcaaacgaaatactagcatgcccaccagcgagactgagtctgtgaacacagagaacgtcagcggtgaaggcgagaaccgaggctgctgtggaagtctctggtgctggtggagacggagaggcgcggccaaggcggggccctctgggtgtcggcggtggggtcaagccatctcaaaatccaaactcagccgacgctggcgtcgctggaaccgattcaatcgcagaagatgtagggccgccgtgaagtctgtcacgttttactggctggttatcgtcctggtgtttctgaacaccttaaccatttcctctgagcactacaatcagccagattggttgacacagattcaagatattgccaacaaagtcctcttggctctgttcacctgcgagatgctggtaaaaatgtacagcttgggcctccaagcatatttcgtctctcttttcaaccggtttgattgcttcgtggtgtgtggtggaatcactgagacgatcttggtggaactggaaatcatgtctcccctggggatctctgtgtttcggtgtgtgcgcctcttaagaatcttcaaagtgaccaggcactggacttccctgagcaacttagtggcatccttattaaactccatgaagtccatcgcttcgctgttgcttctgctttttctcttcattatcatcttttccttgcttgggatgcagctgtttggcggcaagtttaattttgatgaaacgcaaaccaagcggagcacctttgacaatttccctcaagcacttctcacagtgttccagatcctgacaggcgaagactggaatgctgtgatgtacgatggcatcatggcttacgggggcccatcctcttcaggaatgatcgtctgcatctacttcatcatcctcttcatttgtggtaactatattctactgaatgtcttcttggccatcgctgtagacaatttggctgatgctgaaagtctgaacactgctcagaaagaagaagcggaagaaaaggagaggaaaaagattgccagaaaagagagcctagaaaataaaaagaacaacaaaccagaagtcaaccagatagccaacagtgacaacaaggttacaattgatgactatagagaagaggatgaagacaaggacccctatccgccttgcgatgtgccagtaggggaagaggaagaggaagaggaggaggatgaacctgaggttcctgccggaccccgtcctcgaaggatctcggagttgaacatgaaggaaaaaattgcccccatccctgaagggagcgctttcttcattcttagcaagaccaacccgatccgcgtaggctgccacaagctcatcaaccaccacatcttcaccaacctcatccttgtcttcatcatgctgagcagcgctgccctggccgcagaggaccccatccgcagccactccttccggaacacgatactgggttactttgactatgccttcacagccatctttactgttgagatcctgttgaagatgacaacttttggagctttcctccacaaaggggccttctgcaggaactacttcaatttgctggatatgctggtggttggggtgtctctggtgtcatttgggattcaatccagtgccatctccgttgtgaagattctgagggtcttaagggtcctgcgtcccctcagggccatcaacagagcaaaaggacttaagcacgtggtccagtgcgtcttcgtggccatccggaccatcggcaacatcatgatcgtcaccaccctcctgcagttcatgtttgcctgtatcggggtccagttgttcaaggggaagttctatcgctgtacggatgaagccaaaagtaaccctgaagaatgcaggggacttttcatcctctacaaggatggggatgttgacagtcctgtggtccgtgaacggatctggcaaaacagtgatttcaacttcgacaacgtcctctctgctatgatggcgctcttcacagtctccacgtttgagggctggcctgcgttgctgtataaagccatcgactcgaatggagagaacatcggcccaatctacaaccaccgcgtggagatctccatcttcttcatcatctacatcatcattgtagctttcttcatgatgaacatctttgtgggctttgtcatcgttacatttcaggaacaaggagaaaaagagtataagaactgtgagctggacaaaaatcagcgtcagtgtgttgaatacgccttgaaagcacgtcccttgcggagatacatccccaaaaacccctaccagtacaagttctggtacgtggtgaactcttcgcctttcgaatacatgatgtttgtcctcatcatgctcaacacactctgcttggccatgcagcactacgagcagtccaagatgttcaatgatgccatggacattctgaacatggtcttcaccggggtgttcaccgtcgagatggttttgaaagtcatcgcatttaagcctaagcactatttcactgatgcatggaacacttttgatgccttaattgttgttggtagcgtcgttgatattgctataactgaagtgaatccaactgaaagtgaaaatgtccctgtcccaactgctacacctgggaactctgaagagagcaatagaatctccatcacctttttccgtcttttccgagtgatgcgattggtgaagcttctcagcaggggggaaggcatccggacattgctgtggacttttattaagtcctttcaggcgctcccgtatgtggccctcctcatagccatgctgttcttcatctatgcggtcattggcatgcagatgtttgggaaagttgccatgagagataacaaccagatcaataggaacaataacttccagacgtttccccaggcggtgctgctgctcttcaggtgtgcaacaggtgaggcctggcaggagatcatgctggcctgtctcccagggaagctctgtgaccctgagtcagattacaaccccggggaggagtatacatgtgggagcaactttgccattgtctatttcatcagtttttacatgctctgtgcatttctgatcatcaatctgtttgtggctgtcatcatggataatttcgactatctgacccgggactggtctattttggggcctcaccatttagatgaattcaaaagaatatggtcagaatatgaccctgaggcaaagggaaggataaaacaccttgatgtggtcactctgcttcgacgcatccagcctcccctggggtttgggaagttatgtccacacagggtagcgtgcaagagattagttgccatgaacatgcctctcaacagtgacgggacagtcatgtttaatgcaaccctgtttgctttggttcgaacggctcttaagatcaagaccgaagggaacctggagcaagctaatgaagaacttcgggctgtgataaagaaaatttggaagaaaaccagcatgaaattacttgaccaagttgtccctccagctggtggtcagtgcagtctatttcctaagtagtccttggccagtgctttggttttaatgctagtgtctccagaaagtccagagagtgtttgcaaaatgctttatgtatcatttagagcattaaggccaactgataaagaaagccctttggccatttggtgtgattattttgggggtgatatgaagaacattccagacaaaggagaggcttcagtgaaaaaccaaaactcacatggctggagcagggattttctttttggtgga

SEQ ID NO: 2711 - DNA, 791 bp, Homo sapiens
  source 1..791: mol_type = unassigned DNA; mol_type = unassigned DNA
ctccatgtgcgttctcagggaatggacgccagtgtactgccaatggcacggaatgtaggagtggctgggttggcccgaacggaggcatcaccaactttgataactttgcctttgccatgcttactgtgtttcagtgcatcaccatggagggctggacagatgtgctctactgggtaaatgatgcgataggatgggaatggccatgggtgtattttgttagtctgatcatccttggctcatttttcgtccttaacctggttcttggtgtccttagtggagaattctcaaaggaaagagagaaggcaaaagcacggggagatttccagaagctccgggagaagcagcagctggaggaggatctaaagggctacttggattggatcacccaagctgaggacatcgatccggagaatgaggaagaaggaggagaggaaggcaaacgaaatagggtcacagtggccgacttgcttaaagaggataagaagaaaaagaagttttgctgctttcggcaacgcagggctaaagatcatgctagcatgcccaccagcgagactgagtctgtgaacacagagaacgtcagcggtgaaggcgagaaccgaggctgctgtggaagtctctgtcaagccatctcaaaatccaaactcagccgacgctggcgtcgctggaaccgattcaatcgcagaagatgtagggccgccgtgaagtctgtcacgttttactggctggttatcgtcctggtgtttctgaacaccttaaccatttcctctgagcactacaatcagccagattgg

SEQ ID NO: 2712 - DNA, 493 bp, Homo sapiens
  source 1..493: mol_type = unassigned DNA; mol_type = unassigned DNA
cagggaatggacgccagtgtactgccaatggcacggaatgtaggagtggctgggttggcccgaacggaggcatcaccaactttgataactttgcctttgccatgcttactgtgtttcagtgcatcaccatggagggctggacagatgtgctctactgggtaaatgatgcgataggatgggaatggccatgggtgtattttgttagtctgatcatccttggctcatttttcgtccttaacctggttcttggtgtccttagtgggtaagcagtcggatccgtgttgcaccttctcctgctgccacgtgtgaggcaactctgcgtgtctcctagctgctccctgacagcttctctgcatgtgtttggactctgatgtcctctcagtgtgttgcttttggattgaactgtgattctttctgcctgtatctgtctgtgagattccgtgtttccaatgcttgccaaacactgttaatttaatgaaaacgttcccccaaa

SEQ ID NO: 2713 - DNA, 5667 bp, Homo sapiens
  source 1..5667: mol_type = unassigned DNA; mol_type = unassigned DNA
gccaatggcacggaatgtaggagtggctgggttggcccgaacggaggcatcaccaactttgataactttgcctttgccatgcttactgtgtttcagtgcatcaccatggagggctggacagatgtgctctactggatgaatgatgctatgggatttgaattgccctgggtgtattttgtcagtctcgtcatctttgggtcatttttcgtactaaatcttgtacttggtgtattgagcggagaattctcaaaggaaagagagaaggcaaaagcacggggagatttccagaagctccgggagaagcagcagctggaggaggatctaaagggctacttggattggatcacccaagctgaggacatcgatccggagaatgaggaagaaggaggagaggaaggcaaacgaaatactagcatgcccaccagcgagactgagtctgtgaacacagagaacgtcagcggtgaaggcgagaaccgaggctgctgtggaagtctctggtgctggtggagacggagaggcgcggccaaggcggggccctctgggtgtcggcggtggggtcaagccatctcaaaatccaaactcagccgacgctggcgtcgctggaaccgattcaatcgcagaagatgtagggccgccgtgaagtctgtcacgttttactggctggttatcgtcctggtgtttctgaacaccttaaccatttcctctgagcactacaatcagccagattggttgacacagattcaagatattgccaacaaagtcctcttggctctgttcacctgcgagatgctggtaaaaatgtacagcttgggcctccaagcatatttcgtctctcttttcaaccggtttgattgcttcgtggtgtgtggtggaatcactgagacgatcttggtggaactggaaatcatgtctcccctggggatctctgtgtttcggtgtgtgcgcctcttaagaatcttcaaagtgaccaggcactggacttccctgagcaacttagtggcatccttattaaactccatgaagtccatcgcttcgctgttgcttctgctttttctcttcattatcatcttttccttgcttgggatgcagctgtttggcggcaagtttaattttgatgaaacgcaaaccaagcggagcacctttgacaatttccctcaagcacttctcacagtgttccagatcctgacaggcgaagactggaatgctgtgatgtacgatggcatcatggcttacgggggcccatcctcttcaggaatgatcgtctgcatctacttcatcatcctcttcatttgtggtaactatattctactgaatgtcttcttggccatcgctgtagacaatttggctgatgctgaaagtctgaacactgctcagaaagaagaagcggaagaaaaggagaggaaaaagattgccagaaaagagagcctagaaaataaaaagaacaacaaaccagaagtcaaccagatagccaacagtgacaacaaggttacaattgatgactatagagaagaggatgaagacaaggacccctatccgccttgcgatgtgccagtaggggaagaggaagaggaagaggaggaggatgaacctgaggttcctgccggaccccgtcctcgaaggatctcggagttgaacatgaaggaaaaaattgcccccatccctgaagggagcgctttcttcattcttagcaagaccaacccgatccgcgtaggctgccacaagctcatcaaccaccacatcttcaccaacctcatccttgtcttcatcatgctgagcagcgctgccctggccgcagaggaccccatccgcagccactccttccggaacacgatactgggttactttgactatgccttcacagccatctttactgttgagatcctgttgaagatgacaacttttggagctttcctccacaaaggggccttctgcaggaactacttcaatttgctggatatgctggtggttggggtgtctctggtgtcatttgggattcaatccagtgccatctccgttgtgaagattctgagggtcttaagggtcctgcgtcccctcagggccatcaacagagcaaaaggacttaagcacgtggtccagtgcgtcttcgtggccatccggaccatcggcaacatcatgatcgtcaccaccctcctgcagttcatgtttgcctgtatcggggtccagttgttcaaggggaagttctatcgctgtacggatgaagccaaaagtaaccctgaagaatgcaggggacttttcatcctctacaaggatggggatgttgacagtcctgtggtccgtgaacggatctggcaaaacagtgatttcaacttcgacaacgtcctctctgctatgatggcgctcttcacagtctccacgtttgagggctggcctgcgttgctgtataaagccatcgactcgaatggagagaacatcggcccaatctacaaccaccgcgtggagatctccatcttcttcatcatctacatcatcattgtagctttcttcatgatgaacatctttgtgggctttgtcatcgttacatttcaggaacaaggagaaaaagagtataagaactgtgagctggacaaaaatcagcgtcagtgtgttgaatacgccttgaaagcacgtcccttgcggagatacatccccaaaaacccctaccagtacaagttctggtacgtggtgaactcttcgcctttcgaatacatgatgtttgtcctcatcatgctcaacacactctgcttggccatgcagcactacgagcagtccaagatgttcaatgatgccatggacattctgaacatggtcttcaccggggtgttcaccgtcgagatggttttgaaagtcatcgcatttaagcctaagcactatttcactgatgcatggaacacttttgatgccttaattgttgttggtagcgtcgttgatattgctataactgaagtgaatccaactgaaagtgaaaatgtccctgtcccaactgctacacctgggaactctgaagagagcaatagaatctccatcacctttttccgtcttttccgagtgatgcgattggtgaagcttctcagcaggggggaaggcatccggacattgctgtggacttttattaagtcctttcaggcgctcccgtatgtggccctcctcatagccatgctgttcttcatctatgcggtcattggcatgcagatgtttgggaaagttgccatgagagataacaaccagatcaataggaacaataacttccagacgtttccccaggcggtgctgctgctcttcaggtgtgcaacaggtgaggcctggcaggagatcatgctggcctgtctcccagggaagctctgtgaccctgagtcagattacaaccccggggaggagtatacatgtgggagcaactttgccattgtctatttcatcagtttttacatgctctgtgcatttctgatcatcaatctgtttgtggctgtcatcatggataatttcgactatctgacccgggactggtctattttggggcctcaccatttagatgaattcaaaagaatatggtcagaatatgaccctgaggcaaagggaaggataaaacaccttgatgtggtcactctgcttcgacgcatccagcctcccctggggtttgggaagttatgtccacacagggtagcgtgcaagagattagttgccatgaacatgcctctcaacagtgacgggacagtcatgtttaatgcaaccctgtttgctttggttcgaacggctcttaagatcaagaccgaagggaacctggagcaagctaatgaagaacttcgggctgtgataaagaaaatttggaagaaaaccagcatgaaattacttgaccaagttgtccctccagctggtgatgatgaggtaaccgtggggaagttctatgccactttcctgatacaggactactttaggaaattcaagaaacggaaagaacaaggactggtgggaaagtaccctgcgaagaacaccacaattgccctacaggcgggattaaggacactgcatgacattgggccagaaatccggcgtgctatatcgtgtgatttgcaagatgacgagcctgaggaaacaaaacgagaagaagaagatgatgtgttcaaaagaaatggtgccctgcttggaaaccatgtcaatcatgttaatagtgataggagagattcccttcagcagaccaataccacccaccgtcccctgcatgtccaaaggccttcaattccacctgcaagtgatactgagaaaccgctgtttcctccagcaggaaattcggtgtgtcataaccatcataaccataattccataggaaagcaagttcccacctcaacaaatgccaatctcaataatgccaatatgtccaaagctgcccatggaaagcggcccagcattgggaaccttgagcatgtgtctgaaaatgggcatcattcttcccacaagcatgaccgggagcctcagagaaggtccagtgtgaaaagaacccgctattatgaaacttacattaggtccgactcaggagatgaacagctcccaactatttgccgggaagacccagagatacatggctatttcagggacccccactgcttgggggagcaggagtatttcagtagtgaggaatgctacgaggatgacagctcgcccacctggagcaggcaaaactatggctactacagcagatacccaggcagaaacatcgactctgagaggccccgaggctaccatcatccccaaggattcttggaggacgatgactcgcccgtttgctatgattcacggagatctccaaggagacgcctactacctcccaccccagcatcccaccggagatcctccttcaactttgagtgcctgcgccggcagagcagccaggaagaggtcccgtcgtctcccatcttcccccatcgcacggccctgcctctgcatctaatgcagcaacagatcatggcagttgccggcctagattcaagtaaagcccagaagtactcaccgagtcactcgacccggtcgtgggccacccctccagcaacccctccctaccgggactggacaccgtgctacacccccctgatccaagtggagcagtcagaggccctggaccaggtgaacggcagcctgccgtccctgcaccgcagctcctggtacacagacgagcccgacatctcctaccggactttcacaccagccagcctgactgtccccagcagcttccggaacaaaaacagcgacaagcagaggagtgcggacagcttggtggaggcagtcctgatatccgaaggcttgggacgctatgcaagggacccaaaatttgtgtcagcaacaaaacacgaaatcgctgatgcctgtgacctcaccatcgacgagatggagagtgcagccagcaccctgcttaatgggaacgtgcgtccccgagccaacggggatgtgggccccctctcacaccggcaggactatgagctacaggactttggtcctggctacagcgacgaagagccagaccctgggagggatgaggaggacctggcggatgaaatgatatgcatcaccaccttgtagcccccagcgaggggcagactggctctggcctcaggtggggcgcaggagagccaggggaaaagtgcctcatagttaggaaagtttaggcactagttgggagta

SEQ ID NO: 2714 - DNA, 838 bp, Homo sapiens
  source 1..838: mol_type = unassigned DNA; mol_type = unassigned DNA
ttttgtcagtctcgtcatctttgggtcatttttcgtactaaatcttgtacttggtgtattgagcgggcacagtggctcacgcctataatcccagcactttcggaggccgaggcagctggaccacccgagatcaggagtttgagaccagcctgactaaggcagtgaaaccctgtctctactaaaaatacaaaaattagccaggcatggtggcgcatgcctgtaatcccagctacttgggaggctgaggcaggagaatcacttgaaccagggaggtggagattgcagtgagccaagactgcaccattgcattccagcctgggtgacaagagcaaaactccatctcaaaaaaaaaaaaaaaaaaaaaaaaaaaaaaaaaaaaagacttttctctcattcaacactttaccagcatctactgacagaaaatggacaattgaatttcctccaatatatatacctctgatatgtctgctttgtaaaagagtagtgtaattgcttacaacattgaaaaggttgttattggggtcctggggtagccaggatatcggcatgatttgtcaccatattcagaataaaactgtactgcaatagtgagttaattccatatcttggccaacagagaatttttggccagtggctactaaggcacacggaagtccagtctaaaagggacaggggaggactctttgtagatagttcttatgattaaaaaataacttcctatgtgttgtagtgatgattaagctgacagaatgctaaagacacccttaatgattacttgtagcaaagtacttccccacatttagctggatttgtctttggtttgaagaggctaata

SEQ ID NO: 2715 - DNA, 216 bp, Homo sapiens
  source 1..216: mol_type = unassigned DNA; mol_type = unassigned DNA
gaggaagaaggaggagaggaaggcaaacgaaatagggtcacagtggccgacttgcttaaagaggataagaagaaaaagaagttttgctgctttcggcaacgcagggctaaagatcatgctagcatgcccaccagcgagactgagtctgtgaacacagagaacgtcagcggtgaaggcgagaaccgaggctgctgtggaagtctctggtgctggtgg

SEQ ID NO: 2716 - DNA, 890 bp, Homo sapiens
  source 1..890: mol_type = unassigned DNA; mol_type = unassigned DNA
ggctgatgctgaaagtctgaacactgctcagaaagaagaagcggaagaaaaggagaggaaaaagattgccagaaaagagagcctagaaaataaaaagaacaacaaaccagaagtcaaccagatagccaacagtgacaacaaggttacaattgatgactatagagaagaggatgaagacaaggacccctatccgccttgcgatgtgccaggggaagaggaagaggaagaggaggaggatgaacctgaggttcctgccggaccccgtcctcgaaggatctcggagttgaacatgaaggaaaaaattgcccccatccctgaagggagcgctttcttcattcttagcaagaccaacccgatccgcgtaggctgccacaagctcatcaaccaccacatcttcaccaacctcatccttgtcttcatcatgctgagcagcgctgccctggccgcagaggaccccatccgcagccactccttccggaacacgatgctaggttacgcagactatgtcttcactggtacttttgcatttgagatcattttaaagatgacaacttttggagctttcctccacaaaggggccttctgcaggaactacttcaatttgctggatatgctggtggttggggtgtctctggtgtcatttgggattcaatccagtgccatctccgttgtgaagattctgagggtcttaagggtcctgcgtcccctcagggccatcaacagagcaaaaggacttaagcacgtggtccagtgcgtcttcgtggccatccggaccatcggcaacatcatgatcgtcaccaccctcctgcagttcatgtttgcctgtatcggggtccagttgttcaaggggaagttctatcgctgtacggatgaagccaaaagtaaccctg

SEQ ID NO: 2717 - DNA, 710 bp, Homo sapiens
  source 1..710: mol_type = unassigned DNA; mol_type = unassigned DNA
atacagagtaacatggttatttggtttcttgtgctcttttctcttctctttagaaaagagagcctagaaaataaaaagaacaacaaaccagaagtcaaccagatagccaacagtgacaacaaggttacaattgatgactatagagaagaggatgaagacaaggacccctatccgccttgcgatgtgccaggatccgcgtaggctgccacaagctcatcaaccaccacatcttcaccaacctcatccttgtcttcatcatgctgagcagcgctgccctggccgcagaggaccccatccgcagccactccttccggaacacgatactgggttactttgactatgccttcacagccatctttactgttgagatcctgttgaagatgacaacttttggagctttcctccacaaaggggccttctgcaggaactacttcaatttgctggatatgctggtggttggggtgtctctggtgtcatttgggattcaatccagtgccatctccgttgtgaagattctgagggtcttaagggtcctgcgtcccctcagggccatcaacagagcaaaaggacttaagcacgtggtccagtgcgtcttcgtggccatccggaccatcggcaacatcatgatcgtcaccaccctcctgcagttcatgtttgcctgtatcggggtccagttgttcaaggggaagttctatcgctgtacggatgaa

SEQ ID NO: 2718 - DNA, 575 bp, Homo sapiens
  source 1..575: mol_type = unassigned DNA; mol_type = unassigned DNA
gagtaacatggttatttggtttcttgtgctcttttctcttctctttagaaaagagagcctagaaaataaaaagaacaacaaaccagaagtcaaccagatagccaacagtgacaacaaggttacaattgatgactatagagaagaggatgaagacaaggacccctatccgccttgcgatgtgccagtaggggaagaggaagaggaagaggaggaggatgaacctgaggttcctgccggaccccgtcctcgaaggatctcggagttgaacatgaaggaaaaaattgcccccatccctgaagggagcgctttcttcattcttagcaagaccaacccgatccgcgtaggctgccacaagctcatcaaccaccacatcttcaccaacctcatccttgtcttcatcatgctgagcagcgctgccctggccgcagaggaccccatccgcagccactccttccggaacacgatactgggttactttgactatgccttcacagccatctttactgttgagatcctgttgaagatgacaacttttggagctttcctccacaaaggggccttctgcaggaactact

SEQ ID NO: 2719 - DNA, 850 bp, Homo sapiens
  source 1..850: mol_type = unassigned DNA; mol_type = unassigned DNA
gttctatcgctgtacggatgaagccaaaagtaaccctgaagaatgcaggggacttttcatcctctacaaggatggggatgttgacagtcctgtggtccgtgaacggatctggcaaaacagtgatttcaacttcgacaacgtcctctctgctatgatggcgctcttcacagtctccacgtttgagggctggcctgcgttgctgtataaagccatcgactcgaatggagagaacatcggcccaatctacaaccaccgcgtggagatctccatcttcttcatcatctacatcatcattgtagctttcttcatgatgaacatctttgtgggctttgtcatcgttacatttcaggaacaaggagaaaaagagtataagaactgtgagctggacaaaaatcagcgtcagtgtgttgaatacgccttgaaagcacgtcccttgcggagatacatccccaaaaacccctaccagtacaagttctggtacgtggtgaactcttcgcctttcgaatacatgatgtttgtcctcatcatgctcaacacactctgcttggccatgcagcactacgagcagtccaagatgttcaatgatgccatggacattctgaacatggtcttcaccggggtgttcaccgtcgagatggttttgaaagtcatcgcatttaagcctaagaactctgaagagagcaatagaatctccatcacctttttccgtcttttccgagtgatgcgattggtgaagcttctcagcaggggggaaggcatccggacattgctgtggacttttattaagtcctttcaggcgctcccgtatgtggccctcctcatagccatgctgttcttcatctatgcggtc

SEQ ID NO: 2720 - DNA, 1830 bp, Homo sapiens
  source 1..1830: mol_type = unassigned DNA; mol_type = unassigned DNA
ctcttagtgctggctgtttgggcctgaggctgatgggagagacctggttgtgtccagcagccttggggttgctgtataaagccatcgactcgaatggagagaacatcggcccaatctacaaccaccgcgtggagatctccatcttcttcatcatctacatcatcattgtagctttcttcatgatgaacatctttgtgggctttgtcatcgttacatttcaggaacaaggagaaaaagagtataagaactgtgagctggacaaaaatcagcgtcagtgtgttgaatacgccttgaaagcacgtcccttgcggagatacatccccaaaaacccctaccagtacaagttctggtacgtggtgaactcttcgcctttcgaatacatgatgtttgtcctcatcatgctcaacacactctgcttggccatgcagcactacgagcagtccaagatgttcaatgatgccatggacattctgaacatggtcttcaccggggtgttcaccgtcgagatggttttgaaagtcatcgcatttaagcctaaggggtattttagtgacgcctggaacacgtttgactccctcatcgtaatcggcagcattatagacgtggccctcagcgaagcagacaactctgaagagagcaatagaatctccatcacctttttccgtcttttccgagtgatgcgattggtgaagcttctcagcaggggggaaggcatccggacattgctgtggacttttattaagtcctttcaggcgctcccgtatgtggccctcctcatagccatgctgttcttcatctatgcggtcattggcatgcagatgtttgggaaagttgccatgagagataacaaccagatcaataggaacaataacttccagacgtttccccaggcggtgctgctgctcttcaggtgtgcaacaggtgaggcctggcaggagatcatgctggcctgtctcccagggaagctctgtgaccctgagtcagattacaaccccggggaggagtatacatgtgggagcaactttgccattgtctatttcatcagtttttacatgctctgtgcatttctgatcatcaatctgtttgtggctgtcatcatggataatttcgactatctgacccgggactggtctattttggggcctcaccatttagatgaattcaaaagaatatggtcagaatatgaccctgaggcaaagggaaggataaaacaccttgatgtggtcactctgcttcgacgcatccagcctcccctggggtttgggaagttatgtccacacagggtagcgtgcaagagattagttgccatgaacatgcctctcaacagtgacgggacagtcatgtttaatgcaaccctgtttgctttggttcgaacggctcttaagatcaagaccgaagggaacctggagcaagctaatgaagaacttcgggctgtgataaagaaaatttggaagaaaaccagcatgaaattacttgaccaagttgtccctccagctggtgatgatgaggtaaccgtggggaagttctatgccactttcctgatacaggactactttaggaaattcaagaaacggaaagaacaaggactggtgggaaagtaccctgcgaagaacaccacaattgccctacagatgcttgaacggatgctttagaattttctgcctgagctacggcaccaagctggttagtcggaaggcgtttgtggctaaggccttgaaagggaaaagtctcaagtgggcttatttctactgaaacagcatttcagaagaaatgcaggaaaaagcagacccaaggccccagggagaccccttccaagcaaagcactcctcc

SEQ ID NO: 2721 - DNA, 669 bp, Homo sapiens
  source 1..669: mol_type = unassigned DNA; mol_type = unassigned DNA
ttcttcatgatgaacatctttgtgggctttgtcatcgttacatttcaggaacaaggagaaaaagagtataagaactgtgagctggacaaaaatcagcgtcagtgtgttgaatacgccttgaaagcacgtcccttgcggagatacatccccaaaaacccctaccagtacaagttctggtacgtggtgaactcttcgcctttcgaatacatgatgtttgtcctcatcatgctcaacacactctgcttggccatgcagcactacgagcagtccaagatgttcaatgatgccatggacattctgaacatggtcttcaccggggtgttcaccgtcgagatggttttgaaagtcatcgcatttaagcctaaggcgctcccgtatgtggccctcctcatagccatgctgttcttcatctatgcggtcattggcatgcagatgtttgggaaagttgccatgagagataacaaccagatcaataggaacaataacttccagacgtttccccaggcggtgctgctgctcttcaggtgtgcaacaggtgaggcctggcaggagatcatgctggcctgtctcccagggaagctctgtgaccctgagtcagattacaaccccggggaggagtatacatgtgggagcaactttgccattgtctatttcatcagtttttacatg

SEQ ID NO: 2722 - DNA, 3978 bp, Homo sapiens
  source 1..3978: mol_type = unassigned DNA; mol_type = unassigned DNA
ggtcttcaccggggtgttcaccgtcgagatggttttgaaagtcatcgcatttaagcctaagcactatttcactgatgcatggaacacttttgatgccttaattgttgttggtagcgtcgttgatattgctataactgaagtgaatccaactgaaagtgaaaatgtccctgtcccaactgctacacctgggaactctgaagagagcaatagaatctccatcacctttttccgtcttttccgagtgatgcgattggtgaagcttctcagcaggggggaaggcatccggacattgctgtggacttttattaagtcctttcaggcgctcccgtatgtggccctcctcatagccatgctgttcttcatctatgcggtcattggcatgcagatgtttgggaaagttgccatgagagataacaaccagatcaataggaacaataacttccagacgtttccccaggcggtgctgctgctcttcaggtgtgcaacaggtgaggcctggcaggagatcatgctggcctgtctcccagggaagctctgtgaccctgagtcagattacaaccccggggaggagtatacatgtgggagcaactttgccattgtctatttcatcagtttttacatgctctgtgcatttctgatcatcaatctgtttgtggctgtcatcatggataatttcgactatctgacccgggactggtctattttggggcctcaccatttagatgaattcaaaagaatatggtcagaatatgaccctgaggcaaagggaaggataaaacaccttgatgtggtcactctgcttcgacgcatccagcctcccctggggtttgggaagttatgtccacacagggtagcgtgcaagagattagttgccatgaacatgcctctcaacagtgacgggacagtcatgtttaatgcaaccctgtttgctttggttcgaacggctcttaagatcaagaccgaagggaacctggagcaagctaatgaagaacttcgggctgtgataaagaaaatttggaagaaaaccagcatgaaattacttgaccaagttgtccctccagctggtgatgatgaggtaaccgtggggaagttctatgccactttcctgatacaggactactttaggaaattcaagaaacggaaagaacaaggactggtgggaaagtaccctgcgaagaacaccacaattgccctacaggcgggattaaggacactgcatgacattgggccagaaatccggcgtgctatatcgtgtgatttgcaagatgacgagcctgaggaaacaaaacgagaagaagaagatgatgtgttcaaacaggaaattcggtgtgtcataaccatcataaccataattccataggaaagcaagttcccacctcaacaaatgccaatctcaataatgccaatatgtccaaagctgcccatggaaagcggcccagcattgggaaccttgagcatgtgtctgaaaatgggcatcattcttcccacaagcatgaccgggagcctcagagaaggtccagtgtgaaaagaacccgctattatgaaacttacattaggtccgactcaggagatgaacagctcccaactatttgccgggaagacccagagatacatggctatttcagggacccccactgcttgggggagcaggagtatttcagtagtgaggaatgctacgaggatgacagctcgcccacctggagcaggcaaaactatggctactacagcagatacccaggcagaaacatcgactctgagaggccccgaggctaccatcatccccaaggattcttggaggacgatgactcgcccgtttgctatgattcacggagatctccaaggagacgcctactacctcccaccccagcatcccaccggagatcctccttcaactttgagtgcctgcgccggcagagcagccaggaagaggtcccgtcgtctcccatcttcccccatcgcacggccctgcctctgcatctaatgcagcaacagatcatggcagttgccggcctagattcaagtaaagcccagaagtactcaccgagtcactcgacccggtcgtgggccacccctccagcaacccctccctaccgggactggacaccgtgctacacccccctgatccaagtggagcagtcagaggccctggaccaggtgaacggcagcctgccgtccctgcaccgcagctcctggtacacagacgagcccgacatctcctaccggactttcacaccagccagcctgactgtccccagcagcttccggaacaaaaacagcgacaagcagaggagtgcggacagcttggtggaggcagtcctgatatccgaaggcttgggacgctatgcaagggacccaaaatttgtgtcagcaacaaaacacgaaatcgctgatgcctgtgacctcaccatcgacgagatggagagtgcagccagcaccctgcttaatgggaacgtgcgtccccgagccaacggggatgtgggccccctctcacaccggcaggactatgagctacaggactttggtcctggctacagcgacgaagagccagaccctgggagggatgaggaggacctggcggatgaaatgatatgcatcaccaccttgtagcccccagcgaggggcagactggctctggcctcaggtggggcgcaggagagccaggggaaaagtgcctcatagttaggaaagtttaggcactagttgggagtaatattcaattaattagacttttgtataagagatgtcatgcctcaagaaagccataaacctggtaggaacaggtcccaagcggttgagcctggcagagtaccatgcgctcggccccagctgcaggaaacagcaggccccgccctctcacagaggatgggtgaggaggccagacctgccctgccccattgtccagatgggcactgctgtggagtctgcttctcccatgtaccagggcaccaggcccacccaactgaaggcatggcggcggggtgcaggggaaagttaaaggtgatgacgatcatcacacctgtgtcgttacctcagccatcggtctagcatatcagtcactgggcccaacatatccatttttaaaccctttcccccaaatacactgcgtcctggttcctgtttagctgttctgaaatacggtgtgtaagtaagtcagaacccagctaccagtgattattgcgagggcaatgggacctcataaataaggttttctgtgatgtgacgccagtttacataagagaatatcactccgatggtcggtttctgactgtcacgctaagggcaactgtaaactggaataataatgcactcgcaaccaggtaaacttagatacactagtttgtttaaaattatagatttactgtacatgacttgtaatatactataatttgtatttgtaaagagatggtctatattttgtaattactgtattgtatttgaactgcagcaatatccatgggtcctaataattgtagttccccactaaaatctagaaattattagtatttttactcgggctatccagaagtagaagaaatagagccaattctcatttattcagcgaaaatcctctggggttaaaattttaagtttgaaagaacttgacactacagaaatttttctaaaatattttgagtcactataaacctatcatctttccacaagatataccagatgactatttgcagtcttttctttgggcaagagttccatgattttgatactgtacctttggatccaccatgggttgcaactgtctttggttttgtttgtttgacttgaaccaccctctggtaagtaagtaagtgaattacagagcaggtccagctggctgctctgccccttgggtatccatagttacggttttctctgtggcccacccagggtgttttttgcatcgctggtgcagaaatgcataggtggatgagatatagctgctcttgtcctctggggactggtggtgctgcttaagaaataagg

SEQ ID NO: 2723 - DNA, 850 bp, Homo sapiens
  source 1..850: mol_type = unassigned DNA; mol_type = unassigned DNA
ggttttgaaagtcatcgcatttaagcctaaggggtattttagtgacgcctggaacacgtttgactccctcatcgtaatcggcagcattatagacgtggccctcagcgaagcagacaaaattgtagcggcaagtatatataagcatatatacggtgaagtccttaaagcaaagcacttctaaagaatgtgtgcttgtttttggcctctccacctttggttttcactgcgctccacaggacgtgctaaggattggttgcaatcatctaaattgttccccatcccatagattgtcatctccagcctggggccatcttggtcagtcacacttggctctgtgacttgccaacatagtcttccagaatgaatgatctggctgagaaatgattgaattcagcctgcgtttgtattctttgcaaaaacgttttgggtagtcctttgcatggtcctgcctgcgcacgcaccagcctgcttcatcctactgtccccctcccatgtccccacaccccgctcagttcctggtttggcagcactcatggacttatctccatcacatttggtcctaacctcaccaggctgctaaaatgacacactgtgactgctgggctccctcttgctccgtccctctttgatgcctgtttgttccttgaatgatgaaatgacccagcaacatactgtccctaacccatggatggctgtcactgacatttgtctcttctcattatcattagtgtctgggaggcaaaacacttgtttagaagctgtatctgccttattattacttactttgaaggagcaggtaaaaagtcattagggagctcactctcagagatccaggaatggtccctgcctt

SEQ ID NO: 2724 - DNA, 1600 bp, Homo sapiens
  source 1..1600: mol_type = unassigned DNA; mol_type = unassigned DNA
ggcatgggaaagggactgggcctgcctaacagaggagccctaacatcaagtgggcagtgggatgggttgtgggtggagggaggcagcctagtctaagaatggaggcagtcgaagagcccaggtggctgtagatctctgctggcaggctccttgcagattctccacgtgtgcaggtgctgtctttcagatgtttgggaaagttgccatgagagataacaaccagatcaataggaacaataacttccagacgtttccccaggcggtgctgctgctcttcaggtgtgcaacaggtgaggcctggcaggagatcatgctggcctgtctcccagggaagctctgtgaccctgagtcagattacaaccccggggaggagtatacatgtgggagcaactttgccattgtctatttcatcagtttttacatgctctgtgcatttctgatcatcaatctgtttgtggctgtcatcatggataatttcgactatctgacccgggactggtctattttggggcctcaccatttagatgaattcaaaagaatatggtcagaatatgaccctgaggcaaagggaaggataaaacaccttgatgtggtcactctgcttcgacgcatccagcctcccctggggtttgggaagttatgtccacacagggtagcgtgcaagagattagttgccatgaacatgcctctcaacagtgacgggacagtcatgtttaatgcaaccctgtttgctttggttcgaacggctcttaagatcaagaccgaagggaacctggagcaagctaatgaagaacttcgggctgtgataaagaaaatttggaagaaaaccagcatgaaattacttgaccaagttgtccctccagctggtgttttaaaggtgcaggatctgttcacccagtgccaccacaccagcattctagcatccttgggccgggcacgtgatgagcctttggtgtgtttcgtgaccagcgaacttttatagcgtcgctgccgccacggctttcgagactggtctggctcaggtctggtagctgacttcaggacccaggccaggacggtgaccgaggccctgcccctgagaaggtgatgagctctggctcttggggcgcagacagagcagcatgccagccagctctgctccttagcatgaagcgagaagcaacgtgagcttttgttgctgaaggggttacccgtagctggcacagccacaggctcaaagctggggaagatggcccagaaagaaatgataaaaggaagacaaaccaacaacaacaacaaaacaaaacaaaagtcctcccacctggagggccctggcttcccacaggagaaccgatactgcacatttaaaacaactccttggttttcattcttttctttttagctgcacacctaagagcttgcatggcttacatgaaatgctttggaaaaattgtaacaatgtgcttgagcttttcctgcagcctccattcctttcacctctcagtctttcagaatattctgaagcaattctgttttagggtggtggcatggaatcagagttatctcttgccaactgtattcccctacgttgtttctttaaatacagatgcatgcttcagaa

SEQ ID NO: 2725 - DNA, 4394 bp, Homo sapiens
  source 1..4394: mol_type = unassigned DNA; mol_type = unassigned DNA
cacatatgttctcataaaaaaaagccatctcagaactgcaagctgcatggcacacacaaccccagattcacccagcaggcgtttgtaagcatctgcaggtttctctagaatgtcagtctgctccctaaatctcacaagtaaaactctttagtaccttcccattgccctgaagataaagcccactcttctgcccggggctcacagcccctgcctgttgcctcctgcccttgtctccagcctggtcttttatctgtctgctcatcacacgttattttcattccctcggtatctatgctgtcaccctgctcctatgcacatggtgctccctccacccgaaacactcttcgcctttcctatcacctgatgtatctttcagttctgagtttacatgtcacttccccctagaggccttccctgacccagccccccagccttcagtagatgagcctgtctcacgcttccctgtgtgtctggaccaccccagcatcatcactggggtttgatgttgcctggctacctttgtgtctcccccaggggagatccgcgaatgtgagaccgtgcccctctggagcaccacgttcccagtgtgtaacctgctgcctggcacatggttgtgcctggcagatcttttttgaatgagtgaagtgccaggtaccatgagaaaaccctagctggtaaagatcaaacctgagttagttctaaattcacatacggattttttttgcatgacgaaatctattctctttttcctgacaacttctccacctagatgtttgggaaagttgccatgagagataacaaccagatcaataggaacaataacttccagacgtttccccaggcggtgctgctgctcttcaggtgtgcaacaggtgaggcctggcaggagatcatgctggcctgtctcccagggaagctctgtgaccctgagtcagattacaaccccggggaggagtatacatgtgggagcaactttgccattgtctatttcatcagtttttacatgctctgtgcatttctgatcatcaatctgtttgtggctgtcatcatggataatttcgactatctgacccgggactggtctattttggggcctcaccatttagatgaattcaaaagaatatggtcagaatatgaccctgaggcaaagggaaggataaaacaccttgatgtggtcactctgcttcgacgcatccagcctcccctggggtttgggaagttatgtccacacagggtagcgtgcaagagattagttgccatgaacatgcctctcaacagtgacgggacagtcatgtttaatgcaaccctgtttgctttggttcgaacggctcttaagatcaagaccgaagggaacctggagcaagctaatgaagaacttcgggctgtgataaagaaaatttggaagaaaaccagcatgaaattacttgaccaagttgtccctccagctggtgatgatgaggtaaccgtggggaagttctatgccactttcctgatacaggactactttaggaaattcaagaaacggaaagaacaaggactggtgggaaagtaccctgcgaagaacaccacaattgccctacaggcgggattaaggacactgcatgacattgggccagaaatccggcgtgctatatcgtgtgatttgcaagatgacgagcctgaggaaacaaaacgagaagaagaagatgatgtgttcaaagtaattattccacgcctagctacacactggccatctggaaatagcagggcaggactccagtttgggcagttaatcatccacagaagagtctggagaatgcagcccatccccagggcctagaggggctttcagaccacaccctccccctcttacagaccctccccaggcatcagcacctcttctagggccaggccagctctttccctgagcttacccagcttcccctcactgcctgcttctgaggagctcggccacagccgctggccctgtggatgagcatcctgagtccttccggcagctgcctttgctaccctcctccttcccgggccagctctttgatctgccagctggctgtcagtcccccagcccagagagcatgcccaaccttggggccaccagccagcccagctgggtataagtcaccccaacttggagcaactggaagagcacactcgagtgacagccgacagcttgctccccagctcaggaaatcgcaggaaattcggtgtgtcataaccatcataaccataattccataggaaagcaagttcccacctcaacaaatgccaatctcaataatgccaatatgtccaaagctgcccatggaaagcggcccagcattgggaaccttgagcatgtgtctgaaaatgggcatcattcttcccacaagcatgaccgggagcctcagagaaggtccagtgtgaaaagaacccgctattatgaaacttacattaggtccgactcaggagatgaacagctcccaactatttgccgggaagacccagagatacatggctatttcagggacccccactgcttgggggagcaggagtatttcagtagtgaggaatgctacgaggatgacagctcgcccacctggagcaggcaaaactatggctactacagcagatacccaggcagaaacatcgactctgagaggccccgaggctaccatcatccccaaggattcttggaggacgatgactcgcccgtttgctatgattcacggagatctccaaggagacgcctactacctcccaccccagcatcccaccggagatcctccttcaactttgagtgcctgcgccggcagagcagccaggaagaggtcccgtcgtctcccatcttcccccatcgcacggccctgcctctgcatctaatgcagcaacagatcatggcagttgccggcctagattcaagtaaagcccagaagtactcaccgagtcactcgacccggtcgtgggccacccctccagcaacccctccctaccgggactggacaccgtgctacacccccctgatccaagtggagcagtcagaggccctggaccaggtgaacggcagcctgccgtccctgcaccgcagctcctggtacacagacgagcccgacatctcctaccggactttcacaccagccagcctgactgtccccagcagcttccggaacaaaaacagcgacaagcagaggagtgcggacagcttggtggaggcagtcctgatatccgaaggcttgggacgctatgcaagggacccaaaatttgtgtcagcaacaaaacacgaaatcgctgatgcctgtgacctcaccatcgacgagatggagagtgcagccagcaccctgcttaatgggaacgtgcgtccccgagccaacggggatgtgggccccctctcacaccggcaggactatgagctacaggactttggtcctggctacagcgacgaagagccagaccctgggagggatgaggaggacctggcggatgaaatgatatgcatcaccaccttgtagcccccagcgaggggcagactggctctggcctcaggtggggcgcaggagagccaggggaaaagtgcctcatagttaggaaagtttaggcactagttgggagtaatattcaattaattagacttttgtataagagatgtcatgcctcaagaaagccataaacctggtaggaacaggtcccaagcggttgagcctggcagagtaccatgcgctcggccccagctgcaggaaacagcaggccccgccctctcacagaggatgggtgaggaggccagacctgccctgccccattgtccagatgggcactgctgtggagtctgcttctcccatgtaccagggcaccaggcccacccaactgaaggcatggcggcggggtgcaggggaaagttaaaggtgatgacgatcatcacacctgtgtcgttacctcagccatcggtctagcatatcagtcactgggcccaacatatccatttttaaaccctttcccccaaatacactgcgtcctggttcctgtttagctgttctgaaatacggtgtgtaagtaagtcagaacccagctaccagtgattattgcgagggcaatgggacctcataaataaggttttctgtgatgtgacgccagtttacataagagaatatcactccgatggtcggtttctgactgtcacgctaagggcaactgtaaactggaataataatgcactcgcaaccaggtaaacttagatacactagtttgtttaaaattatagatttactgtacatgacttgtaatatactataatttgtatttgtaaagagatggtctatattttgtaattactgtattgtatttgaactgcagcaatatccatgggtcctaataattgtagttccccactaaaatctagaaattattagtatttttactcgggc

SEQ ID NO: 2726 - DNA, 1526 bp, Homo sapiens
  source 1..1526: mol_type = unassigned DNA; mol_type = unassigned DNA
gtacattagtgaaggatgatggttctccatgtcccccagcccatcaagcttcaggatccatgtcaatggatgccaccgtcagcacattttaaaataagggtgactctgagggctcatgatcaacatcaagtgcccagcacttaagacagcctgagccaggtggctgagtgctttacctgcttcctcccacatcatcctcacggctcctctgagaggcttatccccactttacagatgagaatacaagctcagagaggttgagccccttgcccccacatcagcatgtagatcttgcaagggtggcctggcctaaaagccagctgctctgtagcctttggaccagcaaccattcctccttccagcctctgcaagttgtggtcagtggcccccagggccccacatggccccacacacatgggacggagtactaaagtggtcacaagctttacccccaagagacacagcacactgaagatttggtagcaagcagccgtgggagagccatggggcacatttacacgtccaaagtggtttaccatgagacagccagagcctctattctgcctcatgcatcacctttaaagtcatcagcagagttctgattccccaaccatacacgttggaggttgtttctgaacaaagcaaaaataagcccagctcaactatgaggttggttggagctgtcactacagtgcagaaaatgagctgttcagaattacaaaccaagaaatggtatatggagcttattggtggagaatagggggcggggagctcatgaaaatctgaatttgcagtcacttttctaaaccttcctctccttctgagcatgtatgtcacctttctaggtctctatcttgagacatcgggatttggacggttaattgcccttgataagtttatggtagttatacatgcaaatccctatgcacaggggtgaaatgtggcccgtgaagcctctttttgttttgtaatttttattttaagtaaataaccaagacagcatttcatagtgttactaatatgctgctctattaaactcataacaaatatattattttctgcaacctagagtatcagttcatttaactgacactaattttgagccttagttgctttgcaaaaccttgctttttgctggtttgagacccctgtgttatatgctgagacctcggtgccttctgcgccggaccgcccacccgccccactctgcccctgcccctgccccagccagaagcaagtgtttaggctcttggtctaatgtgctgattcgggagagctctgtctggtctctccgtttagatgatgaggtaaccgtggggaagttctatgccactttcctgatacaggactactttaggaaattcaagaaacggaaagaacaaggactggtgggaaagtaccctgcgaagaacaccacaattgccctacaggcgggattaaggacactgcatgacattgggccagaaatccggcgtgctatatcgtgtgatttgcaagatgacgagcctgaggaaacaaaacgagaa

SEQ ID NO: 2727 - DNA, 1749 bp, Homo sapiens
  source 1..1749: mol_type = unassigned DNA; mol_type = unassigned DNA
aatctcattctgttttctaatggaactagtctaaaaaggtcccctctcattgggtatagactgaatcctgctaaagggttaaccagaacttgtcaccagcgagacgactgtgtgcagggccagcctaggctgagtgcagcctgcctgtgatggggaacaggctctgccaggcagggttctttggctggagtctcaaagcctggcgcttgtatcctgaagatgaatggcctggcccagtcccgactagagacatgcatctcttatctccactgctacagcgcgggattaaggacactgcatgacattgggccagaaatccggcgtgctatatcgtgtgatttgcaagatgacgagcctgaggaaacaaaacgagaagaagaagatgatgtgttcaaaagaaatggtgccctgcttggaaaccatgtcaatcatgttaatagtgataggagagattcccttcagcagaccaataccacccaccgtcccctgcatgtccaaaggccttcaattccacctgcaagtgatactgagaaaccgctgtttcctccagcaggaaattcggtgtgtcataaccatcataaccataattccataggaaagcaagttcccacctcaacaaatgccaatctcaataatgccaatatgtccaaagctgcccatggaaagcggcccagcattgggaaccttgagcatgtgtctgaaaatgggcatcattcttcccacaagcatgaccgggagcctcagagaaggtccagtgtgaaaagaacccgctattatgaaacttacattaggtccgactcaggagatgaacagctcccaactatttgccgggaagacccagagatacatggctatttcagggacccccactgcttgggggagcaggagtatttcagtagtgaggaatgctacgaggatgacagctcgcccacctggagcaggcaaaactatggctactacagcagatacccaggcagaaacatcgactctgagaggccccgaggctaccatcatccccaaggattcttggaggacgatgactcgcccgtttgctatgattcacggagatctccaaggagacgcctactacctcccaccccagcatcccaccggagatcctccttcaactttgagtgcctgcgccggcagagcagccaggaagaggtcccgtcgtctcccatcttcccccatcgcacggccctgcctctgcatctaatgcagcaacagtcccctctttcctcagatcatggcagttgccggcctagattcaagtaaagcccagaagtactcaccgagtcactcgacccggtcgtgggccacccctccagcaacccctccctaccgggactggacaccgtgctacacccccctgatccaagtggagcagtcagaggccctggaccaggtgaacggcagcctgccgtccctgcaccgcagctcctggtacacagacgagcccgacatctcctaccggactttcacaccagccagcctgactgtccccagcagcttccggaacaaaaacagcgacaagcagaggagtgcggacagcttggtggaggcagtcctgatatccgaaggcttgggacgctatgcaagggacccaaaatttgtgtcagcaacaaaacacgaaatcgctgatgcctgtgacctcaccatcgacgagatggagagtgcagccagcaccctgcttaatgggaacgtgcgtccccgagccaacggggatgtgggccccctctcacaccggca

SEQ ID NO: 2728 - DNA, 4212 bp, Homo sapiens
  source 1..4212: mol_type = unassigned DNA; mol_type = unassigned DNA
ttgtaggcgagcctactgaagactgtcactgagacaggggcataagctcttggcctggcagatcctagcactagtaaccaggcagtgttccttggaagtgggggttttgcaaaggaggttacggggttgcaggcctcaggcatcctacctaggaccttcttgaccctctggatgcctgaccataccaacaacccttagactgccttcagtgacatcagtcagtgccctggattggcttttggggaagccttcctccccaccgctgaatcaggaaggagcaaagccaggacccaggctggccccagggcccatgtgtggtctaacctgttctgccattttcattgatctaggcgggattaaggacactgcatgacattgggccagaaatccggcgtgctatatcgtgtgatttgcaagatgacgagcctgaggaaacaaaacgagaagaagaagatgatgtgttcaaaagaaatggtgccctgcttggaaaccatgtcaatcatgttaatagtgataggagagattcccttcagcagaccaataccacccaccgtcccctgcatgtccaaaggccttcaattccacctgcaagtgatactgagaaaccgctgtttcctccagcaggaaattcggtgtgtcataaccatcataaccataattccataggaaagcaagttcccacctcaacaaatgccaatctcaataatgccaatatgtccaaagctgcccatggaaagcggcccagcattgggaaccttgagcatgtgtctgaaaatgggcatcattcttcccacaagcatgaccgggagcctcagagaaggtccagtgtgaaaagaacccgctattatgaaacttacattaggtccgactcaggagatgaacagctcccaactatttgccgggaagacccagagatacatggctatttcagggacccccactgcttgggggagcaggagtatttcagtagtgaggaatgctacgaggatgacagctcgcccacctggagcaggcaaaactatggctactacagcagatacccaggcagaaacatcgactctgagaggccccgaggctaccatcatccccaaggattcttggaggacgatgactcgcccgtttgctatgattcacggagatctccaaggagacgcctactacctcccaccccagcatcccaccggagatcctccttcaactttgagtgcctgcgccggcagagcagccaggaagaggtcccgtcgtctcccatcttcccccatcgcacggccctgcctctgcatctaatgcagcaacagatcatggcagttgccggcctagattcaagtaaagcccagaagtactcaccgagtcactcgacccggtcgtgggccacccctccagcaacccctccctaccgggactggacaccgtgctacacccccctgatccaagtggagcagtcagaggccctggaccaggtgaacggcagcctgccgtccctgcaccgcagctcctggtacacagacgagcccgacatctcctaccggactttcacaccagccagcctgactgtccccagcagcttccggaacaaaaacagcgacaagcagaggagtgcggacagcttggtggaggcagtcctgatatccgaaggcttgggacgctatgcaagggacccaaaatttgtgtcagcaacaaaacacgaaatcgctgatgcctgtgacctcaccatcgacgagatggagagtgcagccagcaccctgcttaatgggaacgtgcgtccccgagccaacggggatgtgggccccctctcacaccggcaggactatgagctacaggactttggtcctggctacagcgacgaagagccagaccctgggagggatgaggaggacctggcggatgaaatgatatgcatcaccaccttgtagcccccagcgaggggcagactggctctggcctcaggtggggcgcaggagagccaggggaaaagtgcctcatagttaggaaagtttaggcactagttgggagtaatattcaattaattagacttttgtataagagatgtcatgcctcaagaaagccataaacctggtaggaacaggtcccaagcggttgagcctggcagagtaccatgcgctcggccccagctgcaggaaacagcaggccccgccctctcacagaggatgggtgaggaggccagacctgccctgccccattgtccagatgggcactgctgtggagtctgcttctcccatgtaccagggcaccaggcccacccaactgaaggcatggcggcggggtgcaggggaaagttaaaggtgatgacgatcatcacacctgtgtcgttacctcagccatcggtctagcatatcagtcactgggcccaacatatccatttttaaaccctttcccccaaatacactgcgtcctggttcctgtttagctgttctgaaatacggtgtgtaagtaagtcagaacccagctaccagtgattattgcgagggcaatgggacctcataaataaggttttctgtgatgtgacgccagtttacataagagaatatcactccgatggtcggtttctgactgtcacgctaagggcaactgtaaactggaataataatgcactcgcaaccaggtaaacttagatacactagtttgtttaaaattatagatttactgtacatgacttgtaatatactataatttgtatttgtaaagagatggtctatattttgtaattactgtattgtatttgaactgcagcaatatccatgggtcctaataattgtagttccccactaaaatctagaaattattagtatttttactcgggctatccagaagtagaagaaatagagccaattctcatttattcagcgaaaatcctctggggttaaaattttaagtttgaaagaacttgacactacagaaatttttctaaaatattttgagtcactataaacctatcatctttccacaagatataccagatgactatttgcagtcttttctttgggcaagagttccatgattttgatactgtacctttggatccaccatgggttgcaactgtctttggttttgtttgtttgacttgaaccaccctctggtaagtaagtaagtgaattacagagcaggtccagctggctgctctgccccttgggtatccatagttacggttttctctgtggcccacccagggtgttttttgcatcgctggtgcagaaatgcataggtggatgagatatagctgctcttgtcctctggggactggtggtgctgcttaagaaataaggggtgctggggacagaggagcaacgtggtgatctataggattggagtgtcggggtctgtacaaatcgtattgttgccttttacaaaactgctgtactgtatgttctctttgagggcttttatatgcaattgaatgagggctgaagttttcattagaatgcactcacactctgactgtacgtcctgatgaaaacccacttttggataattagaaccgtcaaggcttcattttctgtcaacagaattaggccgactgtcaggttaccttggcagggattccctgcaatcaaaaagatagatgataggtagcaattttggtccaaaatttttaatagtatacagacaacctgttaatttttttttttttttttttttttgtaaataacaaacaccactttgttatgaagaccttacaaacctcttcttaagacattcttactctgatccaggcaaaaacacttcaaggtttgtaaatgactctttcctgacataaatccttttttattaaaatgcaaaatgttcttcagaataaaactgtgtaataatttttatacttgggagtgctccttgcacagagctgtcatttgccagtgagagcctccgacagggcaggtactgtgccagggcagctctgaaattatggatattcttatcctcctggttccttcggtgccaatggtaacctaataccagccgcagggagcgccatttctcctaaagggctacaccactgtcaacattatcctggactctgtgtctctctctgttgggtcttgtggcatcacatcaggccaaaattgccagaccaggaccctaagtgtctgatagaggcgatgatcttttccaaagtcagtacttacaaactggcattcttacaggctgcaccatttcctagtatgtctgctttaagcctggttcaacctctcatcg

SEQ ID NO: 2729 - DNA, 548 bp, Homo sapiens
  source 1..548: mol_type = unassigned DNA; mol_type = unassigned DNA
agttcccacctcaacaaatgccaatctcaataatgccaatatgtccaaagctgcccatggaaagcggcccagcattgggaaccttgagcatgtgtctgaaaatgggcatcattcttcccacaagcatgaccgggagcctcagagaaggtccagtgtgaaaaggtccgactcaggagatgaacagctcccaactatttgccgggaagacccagagatacatggctatttcagggacccccactgcttgggggagcaggagtatttcagtagtgaggaatgctacgaggatgacagctcgcccacctggagcaggcaaaactatggctactacagcagatacccaggcagaaacatcgactctgagaggccccgaggctaccatcatccccaaggattcttggaggacgatgactcgcccgtttgctatgattcacggagatctccaaggagacgcctactacctcccaccccagcatgtgaggccagattttttgttttgggtggaacctcccggggaacagtgtacctctcccccaacccccgctctg

SEQ ID NO: 2730 - DNA, 2854 bp, Homo sapiens
  source 1..2854: mol_type = unassigned DNA; mol_type = unassigned DNA
aatgaggggcatgtggagttttgccagggctgagaaaggaggccctgtgatccgagaaaagcagcggtcaagataggagccatagaaatgccttgtaaacgataggtgtgctctcgacagaggcccctgcaaggggtaggaggtttctgggaggaggctgctggctgtgtcttagggccccagaattcagactgatctcccgggcctggtgccctgtgaagctgggagctgtggattgtcttgttaacctctgtgtgagcctctgttggaagagctgttagcaggacaagcattttcttaaaattagaggtgtcctttgtttgtattcagtgctagagaagctgaatctttcccaacaaaaataatttgcttattacctggtcaagctgatcagtgcaggtaaagtccctccctttaaaacaggtgtaaacacaggagccccagcaagatatgtcagctgctggggacacttagggtatctggaaggtgacagtgggaagtgtcgtggggttctggcaggacttgtgttcttgcactgaagtgctgtgcgctccccacagtatgcagcgccagggcttctgactcggatcagttgccctatgggctgccttcactcctcctcctgagaacaggcgaacgtttaaaagtagtaagttctctttgggaggctgaggcgggtggatcacgaggtcaggagatcgagaccatcctggctaacacggtgaaaccctgtctctactgaaaatacaaaatagtagccgggcgtggtggcgggcgcctgtagtcccagctactcgggaggctgaggcaggagaatggcgtgaacccgggaggtggagcttgcagtgagctgagattgcgccactgcactccagcctgggcgacagagccagactccatctcaaaaaaaaaaaaaaagtagtaagtttgtactttaaaaaacatccctcactggggcttctgccttcatcctctcctactaaagtttggagacctcactacctaatctttctcttggacaaaccgcatgcttcttcctgggctcgttgctgagcatccggggccaccctgactctgaaagacggtgtcccggcagagaacttgcttcacagctgtgtgatgccctttgctttcccagcccaccggagatcctccttcaactttgagtgcctgcgccggcagagcagccaggaagaggtcccgtcgtctcccatcttcccccatcgcacggccctgcctctgcatctaatgcagcaacagatcatggcagttgccggcctagattcaagtaaagcccagaagtactcaccgagtcactcgacccggtcgtgggccacccctccagcaacccctccctaccgggactggacaccgtgctacacccccctgatccaagtggagcagtcagaggccctggaccaggtgaacggcagcctgccgtccctgcaccgcagctcctggtacacagacgagcccgacatctcctaccggactttcacaccagccagcctgactgtccccagcagcttccggaacaaaaacagcgacaagcagaggagtgcggacagcttggtggaggcagtcctgatatccgaaggcttgggacgctatgcaagggacccaaaatttgtgtcagcaacaaaacacgaaatcgctgatgcctgtgacctcaccatcgacgagatggagagtgcagccagcaccctgcttaatgggaacgtgcgtccccgagccaacggggatgtgggccccctctcacaccggcaggactatgagctacaggactttggtcctggctacagcgacgaagagccagaccctgggagggatgaggaggacctggcggatgaaatgatatgcatcaccaccttgtagcccccagcgaggggcagactggctctggcctcaggtggggcgcaggagagccaggggaaaagtgcctcatagttaggaaagtttaggcactagttgggagtaatattcaattaattagacttttgtataagagatgtcatgcctcaagaaagccataaacctggtaggaacaggtcccaagcggttgagcctggcagagtaccatgcgctcggccccagctgcaggaaacagcaggccccgccctctcacagaggatgggtgaggaggccagacctgccctgccccattgtccagatgggcactgctgtggagtctgcttctcccatgtaccagggcaccaggcccacccaactgaaggcatggcggcggggtgcaggggaaagttaaaggtgatgacgatcatcacacctgtgtcgttacctcagccatcggtctagcatatcagtcactgggcccaacatatccatttttaaaccctttcccccaaatacactgcgtcctggttcctgtttagctgttctgaaatacggtgtgtaagtaagtcagaacccagctaccagtgattattgcgagggcaatgggacctcataaataaggttttctgtgatgtgacgccagtttacataagagaatatcactccgatggtcggtttctgactgtcacgctaagggcaactgtaaactggaataataatgcactcgcaaccaggtaaacttagatacactagtttgtttaaaattatagatttactgtacatgacttgtaatatactataatttgtatttgtaaagagatggtctatattttgtaattactgtattgtatttgaactgcagcaatatccatgggtcctaataattgtagttccccactaaaatctagaaattattagtatttttactcgggctatccagaagtagaagaaatagagccaattctcatttattcagcgaaaatcctctggggttaaaatttta

SEQ ID NO: 2731 - DNA, 1987 bp, Homo sapiens
  source 1..1987: mol_type = unassigned DNA; mol_type = unassigned DNA
ggggccaccctgactctgaaagacggtgtcccggcagagaacttgcttcacagctgtgtgatgccctttgctttcccagcccaccggagatcctccttcaactttgagtgcctgcgccggcagagcagccaggaagaggtcccgtcgtctcccatcttcccccatcgcacggccctgcctctgcatctaatgcagcaacaggtgagcggcccacctggccttgcccccacacctaggggcaccccacataggacccccatcaggtcactcccttctccttggccttaagcaccaggagggaaggagagaatcttcacctacagtctagttaatctttgtaacaatcctgtcaaatagctatggccatgagtcccatgctgcccaagctcacacaagtgactgctggcatttgaatccagggagccagctgccaaagctggcctcactgcccaggtgcctccctgcgatccccaccacctcttcctggcattgaatacagagcctgatgtgatctgagctcagggagtgggggccacttggctgattctgaacaagcggtgcagcccttcattttctctaagaagtggttccttcattaagtttatgggtccctccatgggcagggccctgtgggtactatgcagggttaacctcccctgcctacaaagggagcagtctggggagaacagtttgcccacgttgagggcggctgcacaggcaagagggtggggccggagcccactcactagggctttccctcaaggataacaatatggcgctttttctttctgaaaatatcacatcagagatgccattcattcgtgcacgacagggtggtgggcatggacctgtgctgtttacagacagcgttccccgtccctctctgcagagtgtgaaccccaaggtgcatctgccgtggtgggattgtaagaccggggcttgtacccagtgctttagcacatgccaaatgccggctctaggatgcattactccagagcaaagagaaccagctgttttcctataagtgctgggaagtggtagtttcccctgaatgtacttcggtatttaaacccagcatgaactgggtggtgtgttcacacccacagcttgttgggcttccctgattcttcattctgaagcaatttcatgaattagcaactgatacctccttgggaaaagccaaaggaaatgcattatggattcggggtaaaagaaagcacagtctgctagaaaacaaagtcatcaccgcccattcattcagcgtacttcagtgtgcccatgtcctttccaagtccttgcctggactgcccctggcgagcgcagcgccggtgcttggtctgtgcgcagaaggtttgaggcccggacctctgagaacctctggtctcccaacagtcccctctttcctcagatcatggcagttgccggcctagattcaagtaaagcccagaagtactcaccgagtcactcgacccggtcgtgggccacccctccagcaacccctccctaccgggactggacaccgtgctacacccccctgatccaagtggagcagtcagaggccctggaccaggtgaacggcagcctgccgtccctgcaccgcagctcctggtacacagacgagcccgacatctcctaccggactttcacaccagccagcctgactgtccccagcagcttccggaacaaaaacagcgacaagcagaggagtgcggacagcttggtggaggcagtgagtacggttcttggccgtggtgggcaggaagcaccaggagcagcagaggtgcaactgtaacagcaggaagggcagtggtgggagggcggccaggctgtgagctaggctgcctcaatcagacacttctgagcagcaggaatgtacctgaagcatgagtaaaaactggtcaccaccactggctgcagtggcttacgtctgtaatctcagcactttgggaggccgaggcgggtggatcacctgaggtcagcggctcaa

SEQ ID NO: 2732 - DNA, 1795 bp, Homo sapiens
  source 1..1795: mol_type = unassigned DNA; mol_type = unassigned DNA
actccttgtctctgccctctccctcccacagagcaatgttctgtgatggtgcccgagatgcgtggactgagcccagaccgcaggctgcccgagcccgccccctgcccggctgcggggagccctgagcccaggtccgcgggccgccgccaacgccacgtcctggccctgccggaagaagaggcatggcggccccagcagtgcgctctgctcgaggccgacgcctcggacgaggtgggcatgctgccggcttccccgcgcgccgcctctggcttcgacaacttcttccaggtgcaggagggcgagggccagggctgggagggcgccatggcactggaggcgggctccagccctttcctgccggtgagccccgaggtcatgaagcggcggcgcgggggcctcatcgagcagcgcgacatcatcaaggcccacgaggcgcacaagatgcagagcaccccgcaggcccggcgcaaggaatgggagatggctcgcttcggggaggcggtggtcgccaggccagggtccggcgatggagactcggaccagagcaggaaccggcaaggaacccccgtgccggcctcggggcaggcggccgcctacaagcagacgaaagcacagagggcgcggactatggctttgtacaaccccattcccgtccggcagaactgtttcaccgtcaacagatccctgttcatcttcggagaagataacattgtcaggaaatatgccaagaagctcatcgattggccgccatttgagtacatgatcctggccaccatcattgccaactgcatcgtcctggccctggagcagcatcttcctgaggatgacaagacccccatgtcccgaagactggagaagacagaaccttatttcattgggatcttttgctttgaagctgggatcaaaattgtggccctggggttcatcttccataagggctcttacctccgcaatggctggaatgtcatggacttcatcgtggtcctcagtggcatcctggccactgcaggaacccacttcaatactcacgtggacctgaggaccctccgggctgtgcgtgtcctgcggcctttgaagctcgtgtcagggatacctagcctgcagattgtgttgaagtccatcatgaaggccatggtacctcttctgcagattggccttctgctcttctttgccatcctgatgtttgctatcattggtttggagttctacagtggcaagttacatcgagcatgcttcatgaacaattcaggtattctagaaggatttgacccccctcacccatgtggtgtgcagggctgcccagctggttatgaatgcaaggactggatcggccccaatgatgggatcacccagtttgataacatcctttttgctgtgctgactgtcttccagtgcatcaccatggaagggtggaccactgtgctgtacaataccaatgatgccttaggagccacctggaattggctgtacttcatccccctcatcatcattggatccttctttgttctcaacctagtcctgggagtgctttccggggaatttgccaaagagagagagagagtggagaaccgaagggctttcatgaagctgcggcgccagcagcagattgagcgtgagctgaatggctaccgtgcctggatagacaaagcagaggaagtcatgctcgctgaagaaaataaaaatgctggaacatccgccttagaagtgcttcgaagggcaaccatcaagaggagccggacagaggccatgactcgagactccagtgatgagcactgtgttgatatctcctctgtgg

SEQ ID NO: 2733 - DNA, 2142 bp, Homo sapiens
  source 1..2142: mol_type = unassigned DNA; mol_type = unassigned DNA
ggtgcctgcctctctccctgaactaggtggtgcgtctgccagaagaggagctatgtttgaagagcagcctactccacccctctcctctctggtccctgaacaccaccacacactggcattttgaaaaaaatattttcctccagaaactgggcacccccaagccctaccacccgctttttttttcttttttcttttttttttttttccttcttgaggaatggagcttcgcagaggttgcatttagattcaacagttcacagcggcgggctgctgctgctgcctctccgaagagctcgcggagctccccagaggcggtggtccccgtgcttgtctggatgcggctctgagtctccgtgtgtctttctgcttgttgctgtgtgcgggtgttcggccgcgatcacctttgtgtgtcttctgtctgtttaaacctcaggatggctcgcttcggggaggcggtggtcgccaggccagggtccggcgatggagactcggaccagagcaggaaccggcaaggaacccccgtgccggcctcggggcaggcggccgcctacaagcagacgaaagcacagagggcgcggactatggctttgtacaaccccattcccgtccggcagaactgtttcaccgtcaacagatccctgttcatcttcggagaagataacattgtcaggaaatatgccaagaagctcatcgattggccgccatttgagtacatgatcctggccaccatcattgccaactgcatcgtcctggccctggagcagcatcttcctgaggatgacaagacccccatgtcccgaagactggagaagacagaaccttatttcattgggatcttttgctttgaagctgggatcaaaattgtggccctggggttcatcttccataagggctcttacctccgcaatggctggaatgtcatggacttcatcgtggtcctcagtggcatcctggccactgcaggaacccacttcaatactcacgtggacctgaggaccctccgggctgtgcgtgtcctgcggcctttgaagctcgtgtcagggatacctagcctgcagattgtgttgaagtccatcatgaaggccatggtacctcttctgcagattggccttctgctcttctttgccatcctgatgtttgctatcattggtttggagttctacagtggcaagttacatcgagcatgcttcatgaacaattcaggtattctagaaggatttgacccccctcacccatgtggtgtgcagggctgcccagctggttatgaatgcaaggactggatcggccccaatgatgggatcacccagtttgataacatcctttttgctgtgctgactgtcttccagtgcatcaccatggaagggtggaccactgtgctgtacaataccaatgatgccttaggagccacctggaattggctgtacttcatccccctcatcatcattggatccttctttgttctcaacctagtcctgggagtgctttccgggtgagccagatgtttctctcttcttaactcatttgctgactgctaactgtaaactaatgcctcctgactcatggcagattcattcatttaaccttcatttagaagacacttacctagcagttcctctgtgccaaatgctttctagatgctgggaatgcagtagtgaaccatcattctaataatcttgattattctcaggaattaaaaagtcttgatgtcaggcacaacactgaacacagtatgtagtgagagttcatttattcatccatgctttcattcagtaactcagcagtcagagacctatgtcaaacacggtgctggttgttagggaaataaaattgaactagacacaggctgtgcctcaaaagtttcttactctgtagtgttttggggatcaagtctcatatttgtggcttgaattagtttatacaaatctgcaactatttggggtccaataccatggtaagcatcgccaggagcacacaaagtataaggtgtggttcctctccttaggaaacatgttttgccaagaagatgatacacatgaaacagagaataggagttcttttactgacttatacaaggtataatcatttgttttggggaaaggacaaatctatgtaatctgaagtcatcagggatagtttcatcaa

SEQ ID NO: 2734 - DNA, 9724 bp, Homo sapiens
  source 1..9724: mol_type = unassigned DNA; mol_type = unassigned DNA
gctgctgctgcctctccgaagagctcgcggagctccccagaggcggtggtccccgtgcttgtctggatgcggctctgagtctccgtgtgtctttctgcttgttgctgtgtgcgggtgttcggccgcgatcacctttgtgtgtcttctgtctgtttaaacctcaggatggctcgcttcggggaggcggtggtcgccaggccagggtccggcgatggagactcggaccagagcaggaaccggcaaggaacccccgtgccggcctcggggcaggcggccgcctacaagcagacgaaagcacagagggcgcggactatggctttgtacaaccccattcccgtccggcagaactgtttcaccgtcaacagatccctgttcatcttcggagaagataacattgtcaggaaatatgccaagaagctcatcgattggccgccatttgagtacatgatcctggccaccatcattgccaactgcatcgtcctggccctggagcagcatcttcctgaggatgacaagacccccatgtcccgaagactggagaagacagaaccttatttcattgggatcttttgctttgaagctgggatcaaaattgtggccctggggttcatcttccataagggctcttacctccgcaatggctggaatgtcatggacttcatcgtggtcctcagtggcatcctggccactgcaggaacccacttcaatactcacgtggacctgaggaccctccgggctgtgcgtgtcctgcggcctttgaagctcgtgtcagggatacctagcctgcagattgtgttgaagtccatcatgaaggccatggtacctcttctgcagattggccttctgctcttctttgccatcctgatgtttgctatcattggtttggagttctacagtggcaagttacatcgagcatgcttcatgaacaattcaggtattctagaaggatttgacccccctcacccatgtggtgtgcagggctgcccagctggttatgaatgcaaggactggatcggccccaatgatgggatcacccagtttgataacatcctttttgctgtgctgactgtcttccagtgcatcaccatggaagggtggaccactgtgctgtacaataccaatgatgccttaggagccacctggaattggctgtacttcatccccctcatcatcattggatccttctttgttctcaacctagtcctgggagtgctttccggggaatttgccaaagagagagagagagtggagaaccgaagggctttcatgaagctgcggcgccagcagcagattgagcgtgagctgaatggctaccgtgcctggatagacaaagcagaggaagtcatgctcgctgaagaaaataaaaatgctggaacatccgccttagaagtgcttcgaagggcaaccatcaagaggagccggacagaggccatgactcgagactccagtgatgagcactgtgttgatatctcctctgtgggcacacctctggcccgagccagtatcaaaagtgcaaaggtagacggggtctcttatttccggcacaaggaaaggcttctgcgcatctccattcgccacatggttaaatcccaggtgttttactggattgtgctgagccttgtggcactcaacactgcctgtgtggccattgtccatcacaaccagccccagtggctcacccacctcctctactatgcagaatttctgtttctgggactcttcctcttggagatgtccctgaagatgtatggcatggggcctcgcctttattttcactcttcattcaactgctttgattttggggtcacagtgggcagtatctttgaagtggtctgggcaatcttcagacctggtacgtcttttggaatcagtgtcttgcgagccctccggcttctaagaatatttaaaataaccaagtattgggcttccctacggaatttggtggtctccttgatgagctcaatgaagtctatcatcagtttgcttttcctcctcttcctcttcatcgttgtctttgctctcctaggaatgcagttatttggaggcaggtttaactttaatgatgggactccttcggcaaattttgataccttccctgcagccatcatgactgtgttccagatcctgacgggtgaggactggaatgaggtgatgtacaatgggatccgctcccagggtggggtcagctcaggcatgtggtctgccatctacttcattgtgctcaccttgtttggcaactacacgctactgaatgtgttcttggctatcgctgtggataatctcgccaacgcccaggaactgaccaaggatgaacaggaggaagaagaggccttcaaccagaaacatgcactgcagaaggccaaggaggtcagcccgatgtctgcacccaacatgccttcgatcgaaagagacagaaggagaagacaccacatgtcgatgtgggagccacgcagcagccacctgagggagcggaggcgccggcaccacatgtccgtgtgggagcagcgtaccagccagctgaggaagcacatgcagatgtccagccaggaggccctcaacagagaggaggcgccgaccatgaacccgctcaaccccctcaacccgctcagctccctcaacccgctcaatgcccaccccagcctttatcggcgacccagggccattgagggcctggccctgggcctggccctggagaagttcgaggaggagcgcatcagccgtggggggtccctcaagggggatggaggggaccgatccagtgccctggacaaccagaggacccctttgtccctgggccagcgggagccaccatggctggccaggccctgtcatggaaactgtgacccgactcagcaggaggcagggggaggagaggctgtggtgacctttgaggaccgggccaggcacaggcagagccaacggcgcagccggcatcgccgcgtcaggacagaaggcaaggagtcctcttcagcctcccggagcaggtctgccagccaggaacgcagtctggatgaagccatgcccactgaaggggagaaggaccatgagctcaggggcaaccatggtgccaaggagccaacgatccaagaagagagagcccaggatttaaggaggaccaacagtctgatggtgtccagaggctccgggctggcaggaggccttgatgaggctgacacccccctagtcctgccccatcctgagctggaagtggggaagcacgtggtgctgacggagcaggagccagaaggcagcagtgagcaggccctgctggggaatgtgcagctagacatgggccgggtcatcagccagagcgagcctgacctctcctgcatcacggccaacacggacaaggccaccaccgagagcaccagcgtcaccgtcgccatccccgacgtggaccccttggtggactcaaccgtggtgcacattagcaacaagacggatggggaagccagtcccttgaaggaggcagagatcagagaggatgaggaggaggtggagaagaagaagcagaagaaggagaagcgtgagacaggcaaagccatggtgccccacagctcaatgttcatcttcagcaccaccaacccgatccggagggcctgccactacatcgtgaacctgcgctactttgagatgtgcatcctcctggtgattgcagccagcagcatcgccctggcggcagaggaccccgtcctgaccaactcggagcgcaacaaagtcctgaggtattttgactatgtgttcacgggcgtgttcacctttgagatggttataaagatgatagaccaaggcttgatcctgcaggatgggtcctacttccgagacttgtggaacatcctggactttgtggtggtcgttggcgcattggtggcctttgctctggcgaacgctttgggaaccaacaaaggacgggacatcaagaccatcaagtctctgcgggtgctccgagttctaaggccactgaaaaccatcaagcgcttgcccaagctcaaggccgtcttcgactgcgtagtgacctccttgaagaatgtcttcaacatactcattgtgtacaagctcttcatgttcatctttgctgtcatcgcagttcagctcttcaagggaaagttcttttattgcacggacagttccaaggacacagagaaggagtgcataggcaactatgtagatcatgagaaaaacaagatggaggtgaagggccgggaatggaagcgccatgaattccactacgacaacattatctgggccctgctgaccctcttcaccgtctccacaggggaaggatggcctcaagttctgcagcactctgtagatgtgacagaggaagaccgaggcccaagccgcagcaaccgcatggagatgtctatcttttatgtagtctactttgtggtcttccccttcttctttgtcaatatctttgtggctctcatcatcatcaccttccaggagcaaggggataagatgatggaggagtgcagcctggagaagaatgagagggcgtgcatcgacttcgccatcagcgccaaacctctcacccgctacatgccgcagaacagacacaccttccagtaccgcgtgtggcactttgtggtgtctccgtcctttgagtacaccattatggccatgatcgccttgaatactgttgtgctgatgatgaagtattattctgctccctgtacctatgagctggccctgaagtacctgaatatcgccttcaccatggtgttttccctggaatgtgtcctgaaggtcatcgcttttggctttttgaactatttccgagacacctggaatatctttgacttcatcaccgtgattggcagtatcacagaaattatcctgacagacagcaagctggtgaacaccagtggcttcaatatgagctttctgaagctcttccgagctgcccgcctcataaagctcctgcgtcagggctataccatacgcattttgctgtggacctttgtgcagtcctttaaggccctcccttatgtctgccttttaattgccatgcttttcttcatttatgccatcattgggatgcaggtatttggaaacataaaattagacgaggagagtcacatcaaccggcacaacaacttccggagtttctttgggtccctaatgctactcttcaggagtgccacaggtgaggcctggcaggagattatgctgtcatgccttggggagaagggctgtgagcctgacaccaccgcaccatcagggcagaacgagaacgaacgctgcggcaccgatctggcctacgtgtactttgtctccttcatcttcttctgctccttcttgatgctcaacctgtttgtggccgtcatcatggacaactttgagtacctgactcgggactcctccatcctggggcctcaccacttggacgagtttgtccgcgtctgggcagaatatgaccgagcagcatgtggccgcatccattacactgagatgtatgaaatgctgactctcatgtcacctccgctaggcctcggcaagagatgtccctccaaagtggcatataagaggttggtcctgatgaacatgccagtagctgaggacatgacggtccacttcacctccacacttatggctctgatccggacagctctggacattaaaattgccaaaggtggtgcagacaggcagcagctagactcagagctacaaaaggagaccctagccatctggcctcacctatcccagaagatgctggatctgcttgtgcccatgcccaaagcctctgacctgactgtgggcaaaatctatgcagcaatgatgatcatggactactataagcagagtaaggtgaagaagcagaggcagcagctggaggaacagaaaaatgcccccatgttccagcgcatggagccttcatctctgcctcaggagatcattgctaatgccaaagccctgccttacctccagcaggaccccgtttcaggcctgagtggccggagtggatacccttcgatgagtccactctctccccaggatatattccagttggcttgtatggaccccgccgatgacggacagttccaagaacggcagtctctggtggtgacagaccctagctccatgagacgttcattttccactattcgggataagcgttcaaattcctcgtggttggaggaattctccatggagcgaagcagtgaaaatacctacaagtcccgtcgccggagttaccactcctccttgcggctgtcagcccaccgcctgaactctgattcaggccacaagtctgacactcaccgctcagggggcagggagcggggacgatcaaaagagcgaaagcatcttctctctcctgatgtctcccgctgcaattcagaagagcgagggacccaggctgactgggagtccccagagcgccgtcaatccaggtcacccagtgagggcaggtcacagacgcccaacagacagggcacaggttccctaagtgagagctccatcccctctgtctctgacaccagcaccccaagaagaagtcgtcggcagctcccacccgtcccgccaaagccccggcccctcctttcctacagctccctgattcgacacgcgggcagcatctctccacctgctgatggaagcgaggagggctccccgctgacctcccaagctctggagagcaacaatgcttgcctgaccgagtcttccaactctccgcacccccagcagagccaacatgcctccccacagcgctacatctccgagccctacttggccctgcacgaagactcccacgcctcagactgtggtgaggaggagacgctcactttcgaagcagccgtggctactagcctgggccgttccaacaccatcggctcagccccacccctgcggcatagctggcagatgcccaacgggcactatcggcggcggaggcgcggggggcctgggccaggcatgatgtgtggggctgtcaacaacctgctaagtgacacggaagaagatgacaaatgctagaggctgctcccccctccgatgcatgctcttctctcacatggagaaaaccaagacagaattgggaagccagtgcggcccgggggggaggaagagggaaaaggaagatggaaggacaccatgcattatcagagaagaggaagtaaaggacaatcagaacaccagtcaaacccaccaaattgctttattcccctttgcaagatgggcactgccatagttctgcctctttgctggggaaagaaaccaggaacgtggagggttattactgcgggagaagggacacgaggatggctttgcttccccttgccccttcccacttttctaaaagctgtggagggatctagctggcctatgtctacactcagtgccctgagaagcctggaagactttctggctcttaactggggagtagtggagaccataggagaggactctcctccctcaccagctcttacgcctcagccagcaccactgccaccagggcaactgcagcagcatctcatgcataaccctgtggcttgcttcccccagggcagcacaggctaagtcaggaacatcggatgccagggagggaggagaaagccgaagcgaaaggggtcagggtgctgaggcaacagcagcaagggctggtctggacaagaaaagccatagcccggcagcccctaccatgagggagacagagaaacagaactggtggtgctggggggtatagccccccatccttgaggcctgtcacccacacagtaggtgctgagagttaggacaggtcaggaagtcccccagggtccacaaaggtgcctgaggctctggtaagggtgaagataaaagtatttaacaaccgctatggcatcaatgtaagtggagtttggtcctagtgccggagcccatgctattccaggcattggctctttagatgccagtcatgggggaaccctgagggtgtgggtagagtagcaggggccacctaagagattaaaaacagtctgttttccaaccagtgtggaagcaattaaatatgcgtaacagtgctacggccacaccagcacctcctggctgaaggtcagcccacactctggtccatgaggcagcaaggccagtgctgtgccaagcccggtaaggccaagtgccgaggcccagccttccctgccactcctctgagagggcagaacacacatatccaagtaggctacccaccactgggtagggatttctgtaaagatgggaaaggctgatagattgaaataagcttctgtgaaagtctggatttactgaggacctcccctgaggagggaccgttgggaccgcagattctgcagctggtgtggggttcaggtcagtttgtcaggatgctttaaggtgattagtaaatatacctcagcttagacttgggctgctccttctagcaaagcaggctccagtggggcctcatcatacaggatgacaagactggggccctgttcaccttgaacatgcccctgggccaagatggggcttcacccctccccagagtaagagctggggctgacagtcccaccctgtcattcctaatagcccaaacgcagaagcactgagcaagagagccctttcttgccaagccagtgctcttttggtatatggcatacagctccattggaggggacacatcactggctttatctggtggaaatgtacctttcccttaagttcctccttagtgccatcacagcaggtgaatgggtgccctacggggccctccttcccccaccaggaacagatggaacctgccacccaggatcctgatctgccctgcactgagcactcagtggataaacactcctccagcccagacacactcctcctcttgggcaggagcaatccagagttgttatttttcttagaaggagcctcttttccctctattttttaaattgaaatataatagctgcatcagccctgaaaagccaaattcaaccacatggctggagaatcatttgtcatggccccgccttctcttctgatactaatggagcttcatgacccacggtcagcccccaaaccaaagttgtcccaacagaggaggccagtgaggcagagacagagctctcccactctcagaccctcttttgtcttcattttcctctcccacttagcacatgtgtgcttgagggtggctgggaatgtgatatacagcaccctgatcctaacaggtgtgattgttacgtaagacgctgatactgggccttgtattgcttttaaagtttcctctgctcagcatcatttcatgccaaagtgctgctatgggctgctttgtgtgcacaaaattgctttttccacctcggaaatgcagctttccctagggggaggcctacaacaggacgaccattctgagccagtgagtctattgcatggtgttttgagaaagggaattttagtgacaccttatgccatttcaagaggagaaatgcaggctggcagagcaatttccagaaatggaatttgcctgcaaatagtataaacaacactaaatttactgtgccaggaaatcttcctgaactccttgaactcatacacacaggtatttgagtcctgaataaagtgttggaaagcactgcagatgcggtcacctgactgaccacctgggttttctattaccagtgaatttcttttattcaccttcccttgaccaagaaattgggtttcttttccctcagcctgcacttactcttctattaagaccagaaaataaaataattttccgttgagtcacaaa

SEQ ID NO: 2735 - DNA, 16171 bp, Homo sapiens
  source 1..16171: mol_type = unassigned DNA; mol_type = unassigned DNA
gctgctgctgcctctccgaagagctcgcggagctccccagaggcggtggtccccgtgcttgtctggatgcggctctgagtctccgtgtgtctttctgcttgttgctgtgtgcgggtgttcggccgcgatcacctttgtgtgtcttctgtctgtttaaacctcaggatggctcgcttcggggaggcggtggtcgccaggccagggtccggcgatggagactcggaccagagcaggaaccggcaaggaacccccgtgccggcctcggggcaggcggccgcctacaagcagacgaaagcacagagggcgcggactatggctttgtacaaccccattcccgtccggcagaactgtttcaccgtcaacagatccctgttcatcttcggagaagataacattgtcaggaaatatgccaagaagctcatcgattggccgccatttgagtacatgatcctggccaccatcattgccaactgcatcgtcctggccctggagcagcatcttcctgaggatgacaagacccccatgtcccgaagactggagaagacagaaccttatttcattgggatcttttgctttgaagctgggatcaaaattgtggccctggggttcatcttccataagggctcttacctccgcaatggctggaatgtcatggacttcatcgtggtcctcagtggcatcctggccactgcaggaacccacttcaatactcacgtggacctgaggaccctccgggctgtgcgtgtcctgcggcctttgaagctcgtgtcagggatacctagcctgcagattgtgttgaagtccatcatgaaggccatggtacctcttctgcagattggccttctgctcttctttgccatcctgatgtttgctatcattggtttggagttctacagtggcaagttacatcgagcatgcttcatgaacaattcaggtattctagaaggatttgacccccctcacccatgtggtgtgcagggctgcccagctggttatgaatgcaaggactggatcggccccaatgatgggatcacccagtttgataacatcctttttgctgtgctgactgtcttccagtgcatcaccatggaagggtggaccactgtgctgtacaataccaatgatgccttaggagccacctggaattggctgtacttcatccccctcatcatcattggatccttctttgttctcaacctagtcctgggagtgctttccggggaatttgccaaagagagagagagagtggagaaccgaagggctttcatgaagctgcggcgccagcagcagattgagcgtgagctgaatggctaccgtgcctggatagacaaagcagaggaagtcatgctcgctgaagaaaataaaaatgctggaacatccgccttagaagtgcttcgaagggcaaccatcaagaggagccggacagaggccatgactcgagactccagtgatgagcactgtgttgatatctcctctgtgggcacacctctggcccgagccagtatcaaaagtgcaaaggtagacggggtctcttatttccggcacaaggaaaggcttctgcgcatctccattcgccacatggttaaatcccaggtgttttactggattgtgctgagccttgtggcactcaacactgcctgtgtggccattgtccatcacaaccagccccagtggctcacccacctcctctactatgcagaatttctgtttctgggactcttcctcttggagatgtccctgaagatgtatggcatggggcctcgcctttattttcactcttcattcaactgctttgattttggggtcacagtgggcagtatctttgaagtggtctgggcaatcttcagacctggtacgtcttttggaatcagtgtcttgcgagccctccggcttctaagaatatttaaaataaccaagtattgggcttccctacggaatttggtggtctccttgatgagctcaatgaagtctatcatcagtttgcttttcctcctcttcctcttcatcgttgtctttgctctcctaggaatgcagttatttggaggcaggtttaactttaatgatgggactccttcggcaaattttgataccttccctgcagccatcatgactgtgttccagatcctgacgggtgaggactggaatgaggtgatgtacaatgggatccgctcccagggtggggtcagctcaggcatgtggtctgccatctacttcattgtgctcaccttgtttggcaactacacgctactgaatgtgttcttggctatcgctgtggataatctcgccaacgcccaggaactgaccaaggatgaacaggaggaagaagaggccttcaaccagaaacatgcactgcagaaggccaaggaggtcagcccgatgtctgcacccaacatgccttcgatcgagagggagcggaggcgccggcaccacatgtccgtgtgggagcagcgtaccagccagctgaggaagcacatgcagatgtccagccaggaggccctcaacagagaggaggcgccgaccatgaacccgctcaaccccctcaacccgctcagctccctcaacccgctcaatgcccaccccagcctttatcggcgacccagggccattgagggcctggccctgggcctggccctggagaagttcgaggaggagcgcatcagccgtggggggtccctcaagggggatggaggggaccgatccagtgccctggacaaccagaggacccctttgtccctgggccagcgggagccaccatggctggccaggccctgtcatggaaactgtgacccgactcagcaggaggcagggggaggagaggctgtggtgacctttgaggaccgggccaggcacaggcagagccaacggcgcagccggcatcgccgcgtcaggacagaaggcaaggagtcctcttcagcctcccggagcaggtctgccagccaggaacgcagtctggatgaagccatgcccactgaaggggagaaggaccatgagctcaggggcaaccatggtgccaaggagccaacgatccaagaagagagagcccaggatttaaggaggaccaacagtctgatggtgtccagaggctccgggctggcaggaggccttgatgaggctgacacccccctagtcctgccccatcctgagctggaagtggggaagcacgtggtgctgacggagcaggagccagaaggcagcagtgagcaggccctgctggggaatgtgcagctagacatgggccgggtcatcagccagagcgagcctgacctctcctgcatcacggccaacacggacaaggccaccaccgagagcaccagcgtcaccgtcgccatccccgacgtggaccccttggtggactcaaccgtggtgcacattagcaacaagacggatggggaagccagtcccttgaaggaggcagagatcagagaggatgaggaggaggtggagaagaagaagcagaagaaggagaagcgtgagacaggcaaagccatggtgccccacagctcaatgttcatcttcagcaccaccaacccgatccggagggcctgccactacatcgtgaacctgcgctactttgagatgtgcatcctcctggtgattgcagccagcagcatcgccctggcggcagaggaccccgtcctgaccaactcggagcgcaacaaagtcctgaggtattttgactatgtgttcacgggcgtgttcacctttgagatggttataaagatgatagaccaaggcttgatcctgcaggatgggtcctacttccgagacttgtggaacatcctggactttgtggtggtcgttggcgcattggtggcctttgctctggcgaacgctttgggaaccaacaaaggacgggacatcaagaccatcaagtctctgcgggtgctccgagttctaaggccactgaaaaccatcaagcgcttgcccaagctcaaggccgtcttcgactgcgtagtgacctccttgaagaatgtcttcaacatactcattgtgtacaagctcttcatgttcatctttgctgtcatcgcagttcagctcttcaagggaaagttcttttattgcacggacagttccaaggacacagagaaggagtgcataggcaactatgtagatcatgagaaaaacaagatggaggtgaagggccgggaatggaagcgccatgaattccactacgacaacattatctgggccctgctgaccctcttcaccgtctccacaggggaaggatggcctcaagttctgcagcactctgtagatgtgacagaggaagaccgaggcccaagccgcagcaaccgcatggagatgtctatcttttatgtagtctactttgtggtcttccccttcttctttgtcaatatctttgtggctctcatcatcatcaccttccaggagcaaggggataagatgatggaggagtgcagcctggagaagaatgagagggcgtgcatcgacttcgccatcagcgccaaacctctcacccgctacatgccgcagaacagacacaccttccagtaccgcgtgtggcactttgtggtgtctccgtcctttgagtacaccattatggccatgatcgccttgaatactgttgtgctgatgatgaagtattattctgctccctgtacctatgagctggccctgaagtacctgaatatcgccttcaccatggtgttttccctggaatgtgtcctgaaggtcatcgcttttggctttttgaactatttccgagacacctggaatatctttgacttcatcaccgtgattggcagtatcacagaaattatcctgacagacagcaagctggtgaacaccagtggcttcaatatgagctttctgaagctcttccgagctgcccgcctcataaagctcctgcgtcagggctataccatacgcattttgctgtggacctttgtgcagtcctttaaggccctcccttatgtctgccttttaattgccatgcttttcttcatttatgccatcattgggatgcaggtatttggaaacataaaattagacgaggagagtcacatcaaccggcacaacaacttccggagtttctttgggtccctaatgctactcttcaggagtgccacaggtgaggcctggcaggagattatgctgtcatgccttggggagaagggctgtgagcctgacaccaccgcaccatcagggcagaacgagaacgaacgctgcggcaccgatctggcctacgtgtactttgtctccttcatcttcttctgctccttcttgatgctcaacctgtttgtggccgtcatcatggacaactttgagtacctgactcgggactcctccatcctggggcctcaccacttggacgagtttgtccgcgtctgggcagaatatgaccgagcagcatgtggccgcatccattacactgagatgtatgaaatgctgactctcatgtcacctccgctaggcctcggcaagagatgtccctccaaagtggcatataagaggttggtcctgatgaacatgccagtagctgaggacatgacggtccacttcacctccacacttatggctctgatccggacagctctggacattaaaattgccaaaggtggtgcagacaggcagcagctagactcagagctacaaaaggagaccctagccatctggcctcacctatcccagaagatgctggatctgcttgtgcccatgcccaaagcctctgacctgactgtgggcaaaatctatgcagcaatgatgatcatggactactataagcagagtaaggtgaagaagcagaggcagcagctggaggaacagaaaaatgcccccatgttccagcgcatggagccttcatctctgcctcaggagatcattgctaatgccaaagccctgccttacctccagcaggaccccgtttcaggcctgagtggccggagtggatacccttcgatgagtccactctctccccaggatatattccagttggcttgtatggaccccgccgatgacggacagttccaagaacggcagtctctggtggtgacagaccctagctccatgagacgttcattttccactattcgggataagcgttcaaattcctcgtggttggaggaattctccatggagcgaagcagtgaaaatacctacaagtcccgtcgccggagttaccactcctccttgcggctgtcagcccaccgcctgaactctgattcaggccacaagtctgacactcaccgctcagggggcagggagcggggacgatcaaaagagcgaaagcatcttctctctcctgatgtctcccgctgcaattcagaagagcgagggacccaggctgactgggagtccccagagcgccgtcaatccaggtcacccagtgagggcaggtcacagacgcccaacagacagggcacaggttccctaagtgagagctccatcccctctgtctctgacaccagcaccccaagaagaagtcgtcggcagctcccacccgtcccgccaaagccccggcccctcctttcctacagctccctgattcgacacgcgggcagcatctctccacctgctgatggaagcgaggagggctccccgctgacctcccaagctctggagagcaacaatgcttgcctgaccgagtcttccaactctccgcacccccagcagagccaacatgcctccccacagcgctacatctccgagccctacttggccctgcacgaagactcccacgcctcagactgtggtgaggaggagacgctcactttcgaagcagccgtggctactagcctgggccgttccaacaccatcggctcagccccacccctgcggcatagctggcagatgcccaacgggcactatcggcggcggaggcgcggggggcctgggccaggcatgatgtgtggggctgtcaacaacctgctaagtgacacggaagaagatgacaaatgctagaggctgctcccccctccgatgcatgctcttctctcacatggagaaaaccaagacagaattgggaagccagtgcggcccgggggggaggaagagggaaaaggaagatggaaggacaccatgcattatcagagaagaggaagtaaaggacaatcagaacaccagtcaaacccaccaaattgctttattcccctttgcaagatgggcactgccatagttctgcctctttgctggggaaagaaaccaggaacgtggagggttattactgcgggagaagggacacgaggatggctttgcttccccttgccccttcccacttttctaaaagctgtggagggatctagctggcctatgtctacactcagtgccctgagaagcctggaagactttctggctcttaactggggagtagtggagaccataggagaggactctcctccctcaccagctcttacgcctcagccagcaccactgccaccagggcaactgcagcagcatctcatgcataaccctgtggcttgcttcccccagggcagcacaggctaagtcaggaacatcggatgccagggagggaggagaaagccgaagcgaaaggggtcagggtgctgaggcaacagcagcaagggctggtctggacaagaaaagccatagcccggcagcccctaccatgagggagacagagaaacagaactggtggtgctggggggtatagccccccatccttgaggcctgtcacccacacagtaggtgctgagagttaggacaggtcaggaagtcccccagggtccacaaaggtgcctgaggctctggtaagggtgaagataaaagtatttaacaaccgctatggcatcaatgtaagtggagtttggtcctagtgccggagcccatgctattccaggcattggctctttagatgccagtcatgggggaaccctgagggtgtgggtagagtagcaggggccacctaagagattaaaaacagtctgttttccaaccagtgtggaagcaattaaatatgcgtaacagtgctacggccacaccagcacctcctggctgaaggtcagcccacactctggtccatgaggcagcaaggccagtgctgtgccaagcccggtaaggccaagtgccgaggcccagccttccctgccactcctctgagagggcagaacacacatatccaagtaggctacccaccactgggtagggatttctgtaaagatgggaaaggctgatagattgaaataagcttctgtgaaagtctggatttactgaggacctcccctgaggagggaccgttgggaccgcagattctgcagctggtgtggggttcaggtcagtttgtcaggatgctttaaggtgattagtaaatatacctcagcttagacttgggctgctccttctagcaaagcaggctccagtggggcctcatcatacaggatgacaagactggggccctgttcaccttgaacatgcccctgggccaagatggggcttcacccctccccagagtaagagctggggctgacagtcccaccctgtcattcctaatagcccaaacgcagaagcactgagcaagagagccctttcttgccaagccagtgctcttttggtatatggcatacagctccattggaggggacacatcactggctttatctggtggaaatgtacctttcccttaagttcctccttagtgccatcacagcaggtgaatgggtgccctacggggccctccttcccccaccaggaacagatggaacctgccacccaggatcctgatctgccctgcactgagcactcagtggataaacactcctccagcccagacacactcctcctcttgggcaggagcaatccagagttgttatttttcttagaaggagcctcttttccctctattttttaaattgaaatataatagctgcatcagccctgaaaagccaaattcaaccacatggctggagaatcatttgtcatggccccgccttctcttctgatactaatggagcttcatgacccacggtcagcccccaaaccaaagttgtcccaacagaggaggccagtgaggcagagacagagctctcccactctcagaccctcttttgtcttcattttcctctcccacttagcacatgtgtgcttgagggtggctgggaatgtgatatacagcaccctgatcctaacaggtgtgattgttacgtaagacgctgatactgggccttgtattgcttttaaagtttcctctgctcagcatcatttcatgccaaagtgctgctatgggctgctttgtgtgcacaaaattgctttttccacctcggaaatgcagctttccctagggggaggcctacaacaggacgaccattctgagccagtgagtctattgcatggtgttttgagaaagggaattttagtgacaccttatgccatttcaagaggagaaatgcaggctggcagagcaatttccagaaatggaatttgcctgcaaatagtataaacaacactaaatttactgtgccaggaaatcttcctgaactccttgaactcatacacacaggtatttgagtcctgaataaagtgttggaaagcactgcagatgcggtcacctgactgaccacctgggttttctattaccagtgaatttcttttattcaccttcccttgaccaagaaattgggtttcttttccctcagcctgcacttactcttctattaagaccagaaaataaaataattttccgttgagtcacaaactcatcatcttgtttggtgttctgctgcctctgaacaaaagtgaatgccagccttcccttgctgggtgtcagagtctgcctcccttgaaaagaggcccctgtagaccccaacacctattcttttctctggttaattacagcagcatctgagaaattccatgcaaaagaagactacaaccagtgtttcagatataccacaagatcaaatttgggcactggtggtccacctcagaagactcttgagtcatatattcagtttctcttgctaatatatgactcgtcttcaccatctcctcaaaacaagagcaaagccaagatagaggaaggtaaaaggaggaggaaaggaaaccaaggcagggagatgttctaagtaggtttgcatttagttacccctcatttcacttaaggctccagacagactccaggtagggaatgcatgctgtctctttctctgtgtctgtctccccatctcctagaggacagagtgccagcgacctctggacaggggcagggctccagccaaggtgcccctgagccagggtcaacatagaatttcctgccccgtgaagggctggcaccagctagcatccccttggctccacatgagtcatgaacacaattgtcagtgggggtctctgctgctcttctggctgaagaatctgtttttcttctgggcttcacttgtagttcctattcaatgtctccatagggcactgagatcaccaagaacattacccagaagctgaagtccaaatgttctagattttgacctctcttgactctggggccacaaagagaaggccccataatccacctctcagccagtatctcccttctttgcacagattcctcccaaccccatagagcctatgtggtgagcatgagggtcgtcttccctctgttctcccatcccagcctctgttttgctgcatgttagcgctgatccagctcctgagatggttaattccacccaatccaagcttatttgcttgcctgactgactccaccactctctcagctatgggggaatattgcattctaatgaaatagggtttggaactcacctggtgctcctcgcaagacaactgacacaaggtgtagggtgtgggggtggacaaaatgcccacctactggataaaagctcactgcaggaaaatgaggtctcctggcataatgcaacaaaaatctcatataattttgatttttaaaaagttgttctcaatttttcattacatcctacttctcagccctctggatgtttcatttttttggacaaagtgtttctttagtggttggggccagggacaggttgagggatatttctcggctcatttataagatataaatattatgaggttgtatgtaaagaaagggcaaacgtacagcagaaggggagcaaatagctacctttcaaggattttgagatttgaaggttaaggaatttttactgctatttttgttcatcagtttcatgtctgttatgttttgagatcctcagaggcctagggttagcgtataccaagaatcctggtgagaggcgttgccatgccttggggtgaattcttccccactagctctctcacccagcctacaagtccttctctcatagatcccagagcaatgggcaccgtccaggaggtacaggagaggactttatgatgcaggaaagaaggaagaagtgggtcccttgcaagtggccagacagggaatgatggtttgactccagaaatcaggaatcaggttcaggtttggataacttctctttaaaatatctccacattgagactcttattttaacaaaatccaaacaaaattaactcagggcttgtgacctaacctttgtaagaaggtgatcaaagagatcctacattaataagcactgcctgtagcaccagctttgtctttttgtcttttgttgtttctttcctgaaccaccctgtacatcatagccaggtctaccccaaatagagcagcagctgatggcttctctgctgtctgtggagggagggctcggctgcagacctatggtgttttgtcagctgttaggtgctacagcccacccagtcagagtacatagacatagcgctttaagggacaaaggacaaacagaactatctttgctttccggaggccatctttttctttccttgaatcctttctgctttaaacttctgaggtttatgcatcccagagaggtcacaccaagccaaagagaaaaaattcatagattgtcccagcctacccaaagggcctgaaaagcctctctaaacaaaactcaagatagctgagaagtatgaatggggttcacagcaaagtccaattgatggcttttgaggctgggacacccccaaactgcccttctgtttttgtagttttgctttcttccacccaccctctctccgcatgctgtaagttaggggagttagtatcttgaacttctaaatgcaaaaggagattttataataagccatgctacctgtaaatacattattgaggtttgcatttttatttttggaggtatgaaagagttgagtagaccaagtcaaaagaggtgtggggatttatgtttatttttatttgtttggggttgtttggttggtggctgggtttcttgtaacagacctattctggaatagcaaagaaggataccttggtgatctgcaatgtttctgaatctgtttctctttaggaagtgattgccatcaaatttagtgatatgatatttgagtcaaaaatctgaggttatagtaccagctgtcttttctctctggtctcctttttgtcgtctttctctttctgtctaaattggcctctgtcttttcctaaggacttaaaatataacccaaattaatgaagaactgccccaaaacttcagtgaaagccaaggaggtacagaattttttcaggacatctttaaccaatacaaaatttatgtcttaagaagataatttttacaatagtgtagtaatctgataaatgaaaactattggaagtcaatagttttttatattccagctttctgtattcaaacttgtgccttcagcaagcatctcttcactttctttcccttgtcaattgaaacatgaatgtttggctaactcatgatgtaaagtgtctgttaagttaataatacataatttaaagcacttagtctccacaaagcaatttagaaaaatcttcacttgttagatcccatgaagtacctatgaaattctcagcattgctataagcatttgattttttttaaggaaacttcctgtttaatggaatctgaatccaagatttgctttaatttcactctattcttcccattttcccttattcttcttgttgtctctctaattaaaaaaaaaaaaaacctaggcttttttttttctatccagaaagttgggttttcatgatctgagcttccttatgtctccttctctttgtgcaaacttaaaccagtcatagattgtcacccagacatattctccaacccagcattggaaatctgaacgaatcttttctctttttgtcctacaagtttgtcagagatgagaatggattgctgtctacattctacaaccagaccctagactttataccaggctgtgccacttcctcttcacttcactcagaggatggccccaaaactgaaaaggaaatgaaataatcaaatataccaaatccgaatttgactttatttgatgactcaatattttccttccagtactctaatttttttttatggcaatggcctatatggcacaagaaccaccacttaaagcaaatctgttgaacatttttataagggatgagcaagaaaaacacactccaaaattttaaagtgccattaatcaatttttaagaataaaggtaatatgaaatgagggctaaacaatgtaatataactgccagttaaggtagacagtagttgtggtcttagttacatttgatatggagttgtgtaatattaagcagatcccagtggagttagtaaaaacataggtattgagttttaatggctaccaattgggatatatacttagcctgcaggctgaactttagtcagtgtttttctatcatgttgttttgtgaacaagtcaaaatttatacaaagctaccctaagtgctgcaattgcagaggaacttgcctcttcgtgatattagagggcagtccaactccgctcaaactgagtccaagatttgaattcatccagaaaaacaaatggaggagaaaagcctaatgcaccacatgtgtttggcatttcatggctgggacaatggagtagagggtaggaagacaagctgtagaacaaaagcaaagtgaggtagaaagtaacaggtcccagacgaggacagacttagagatgtgtaaccttggatcctctttttcacttagaatatgggtaaacttcttagcacaagactggattaagagaagttctttctgttaaactcacctagggtagtggctttgaaggcctcagaggattaatagattcccaaaattttcttccagacctgggagatggagagaaagaggttcttgctttaaagcggctcgaagacaatctttatgacttcagcaactcttcaacatagtagcaccaataaaggagagattatgttaacttcctagtggtgagaataccatgggatgggagaagggccagtgagtgggatgggaatgagcttcatcaggaacagatttcagactctgcagggtgcaccggttctagcctcaaataacaacattgcaaggaggtggactacagggtccacaccctctgtccttcggggcccatggtcaggccattccctctttgttttgctcctagaggatgagcatgtaagatgagatcaggagggaaattgggtgctctgcctcaggctgttaaaatgctgctacctgcattctaaaacgtgcaagtcatgccccacaagacacctccttagggcagcatccactgtggtgtgccagcctgacacccctgcagtcacggtgtttgaatggcagctgatgctggcccacccagagtatcggtgcatctctcctaaagccacagttcagcactgcatgttgaccaggcggatatcctataatatagatgctcgtttggatccaaaaggaaaaccattaaaaataaaagaaagatgaaaaactttaatgttttgggggggataaaagaaaagaataaataaaaccttgttgtaaagaatgcatcggcctgatttccctcacttgatgtgtttctttgctgctaccagaaagggaaatcatgggagtgaagcctgccaggaccctcagggtaagctggcagcaggctctgcagctgcacttagttggggtctgctcagaccagtcaggaggaattcaggaggctttcaaagtcccaaggacatcctggctctgaaaggttttcttttgttaaaaaatgcactttgtgctgtgtgtggtagctcgtatgtgttaccccagctattcaggaagctagggcagaaggattgcttgaggctaggaattcaagactggcctggatgacagagtgaaaccctcatctcttaaaaaaaaaaaaaaggaataaaaatgttctctgccttggataacatttttttttaaagattccatacaaactcattccctgaaagagaaaaacagattttctaatcaggacattgtcctgatctgcaagcgaggagtttaacaaggtaggcagagaacttccttatggaacaacagggctctgtgaccagaaaaactatgaccagcctcctctgaaaaaaggtggggggattatagggcaccagctcagccgccaagttcaggaagcagctgattcccaagactcttaggagatactgtccattcttcctcctgtccacatcactccccatttaactgcaattgctcccttgccacagggaaagcagcaagccccaggcccaggcctccatttgatttgccactccgagaactgtctgcttcattctgcttgaggagatatcttcacctaatcctagtgttaattattttaatctgagcaacgcttttatcaattagatagaaaccagcattccaaaataagtcccctaagtttgtagtttgagccaagatattttcttgagccctaagatatatgactttattagctaggatttttcttatgattaaaaacatccaaaaatgtgatatgtggtcatctctcagggaggtctaggtccttgcaggctggattttagaaatttctaagattctctacaacttttaaattttatgttatttttcaatcataatttctttcctgtggcttctatcaccattggagttagaatctgacaacctttaacttcacacttttatgagataataagttggtttcttgggcaaaggttggtttgtaagccatttacatggattgatgatttctgttcttgttttcttctaacctagaactcaggtccacagttttccacaggctaatggcactatgaaacagatataaagaaaaatagacactg

SEQ ID NO: 2736 - DNA, 6970 bp, Homo sapiens
  source 1..6970: mol_type = unassigned DNA; mol_type = unassigned DNA
cctcaggatggctcgcttcggggaggcggtggtcgccaggccagggtccggcgatggagactcggaccagagcaggaaccggcaaggaacccccgtgccggcctcggggcaggcggccgcctacaagcagacgaaagcacagagggcgcggactatggctttgtacaaccccattcccgtccggcagaactgtttcaccgtcaacagatccctgttcatcttcggagaagataacattgtcaggaaatatgccaagaagctcatcgattggccgccatttgagtacatgatcctggccaccatcattgccaactgcatcgtcctggccctggagcagcatcttcctgaggatgacaagacccccatgtcccgaagactggagaagacagaaccttatttcattgggatcttttgctttgaagctgggatcaaaattgtggccctggggttcatcttccataagggctcttacctccgcaatggctggaatgtcatggacttcatcgtggtcctcagtggcatcctggccactgcaggaacccacttcaatactcacgtggacctgaggaccctccgggctgtgcgtgtcctgcggcctttgaagctcgtgtcagggatacctagcctgcagattgtgttgaagtccatcatgaaggccatggtacctcttctgcagattggccttctgctcttctttgccatcctgatgtttgctatcattggtttggagttctacagtggcaagttacatcgagcatgcttcatgaacaattcaggtattctagaaggatttgacccccctcacccatgtggtgtgcagggctgcccagctggttatgaatgcaaggactggatcggccccaatgatgggatcacccagtttgataacatcctttttgctgtgctgactgtcttccagtgcatcaccatggaagggtggaccactgtgctgtacaataccaatgatgccttaggagccacctggaattggctgtacttcatccccctcatcatcattggatccttctttgttctcaacctagtcctgggagtgctttccggggaatttgccaaagagagagagagagtggagaaccgaagggctttcatgaagctgcggcgccagcagcagattgagcgtgagctgaatggctaccgtgcctggatagacaaagcagaggaagtcatgctcgctgaagaaaataaaaatgctggaacatccgccttagaagtgcttcgaagggcaaccatcaagaggagccggacagaggccatgactcgagactccagtgatgagcactgtgttgatatctcctctgtgggcacacctctggcccgagccagtatcaaaagtgcaaaggtagacggggtctcttatttccggcacaaggaaaggcttctgcgcatctccattcgccacatggttaaatcccaggtgttttactggattgtgctgagccttgtggcactcaacactgcctgtgtggccattgtccatcacaaccagccccagtggctcacccacctcctctactatgcagaatttctgtttctgggactcttcctcttggagatgtccctgaagatgtatggcatggggcctcgcctttattttcactcttcattcaactgctttgattttggggtcacagtgggcagtatctttgaagtggtctgggcaatcttcagacctggtacgtcttttggaatcagtgtcttgcgagccctccggcttctaagaatatttaaaataaccaagtattgggcttccctacggaatttggtggtctccttgatgagctcaatgaagtctatcatcagtttgcttttcctcctcttcctcttcatcgttgtctttgctctcctaggaatgcagttatttggaggcaggtttaactttaatgatgggactccttcggcaaattttgataccttccctgcagccatcatgactgtgttccagatcctgacgggtgaggactggaatgaggtgatgtacaatgggatccgctcccagggtggggtcagctcaggcatgtggtctgccatctacttcattgtgctcaccttgtttggcaactacacgctactgaatgtgttcttggctatcgctgtggataatctcgccaacgcccaggaactgaccaaggatgaacaggaggaagaagaggccttcaaccagaaacatgcactgcagaaggccaaggaggtcagcccgatgtctgcacccaacatgccttcgatcgagagggagcggaggcgccggcaccacatgtccgtgtgggagcagcgtaccagccagctgaggaagcacatgcagatgtccagccaggaggccctcaacagagaggaggcgccgaccatgaacccgctcaaccccctcaacccgctcagctccctcaacccgctcaatgcccaccccagcctttatcggcgacccagggccattgagggcctggccctgggcctggccctggagaagttcgaggaggagcgcatcagccgtggggggtccctcaagggggatggaggggaccgatccagtgccctggacaaccagaggacccctttgtccctgggccagcgggagccaccatggctggccaggccctgtcatggaaactgtgacccgactcagcaggaggcagggggaggagaggctgtggtgacctttgaggaccgggccaggcacaggcagagccaacggcgcagccggcatcgccgcgtcaggacagaaggcaaggagtcctcttcagcctcccggagcaggtctgccagccaggaacgcagtctggatgaagccatgcccactgaaggggagaaggaccatgagctcaggggcaaccatggtgccaaggagccaacgatccaagaagagagagcccaggatttaaggaggaccaacagtctgatggtgtccagaggctccgggctggcaggaggccttgatgaggctgacacccccctagtcctgccccatcctgagctggaagtggggaagcacgtggtgctgacggagcaggagccagaaggcagcagtgagcaggccctgctggggaatgtgcagctagacatgggccgggtcatcagccagagcgagcctgacctctcctgcatcacggccaacacggacaaggccaccaccgagagcaccagcgtcaccgtcgccatccccgacgtggaccccttggtggactcaaccgtggtgcacattagcaacaagacggatggggaagccagtcccttgaaggaggcagagatcagagaggatgaggaggaggtggagaagaagaagcagaagaaggagaagcgtgagacaggcaaagccatggtgccccacagctcaatgttcatcttcagcaccaccaacccgatccggagggcctgccactacatcgtgaacctgcgctactttgagatgtgcatcctcctggtgattgcagccagcagcatcgccctggcggcagaggaccccgtcctgaccaactcggagcgcaacaaagtcctgaggtattttgactatgtgttcacgggcgtgttcacctttgagatggttataaagatgatagaccaaggcttgatcctgcaggatgggtcctacttccgagacttgtggaacatcctggactttgtggtggtcgttggcgcattggtggcctttgctctggcgaacgctttgggaaccaacaaaggacgggacatcaagaccatcaagtctctgcgggtgctccgagttctaaggccactgaaaaccatcaagcgcttgcccaagctcaaggccgtcttcgactgcgtagtgacctccttgaagaatgtcttcaacatactcattgtgtacaagctcttcatgttcatctttgctgtcatcgcagttcagctcttcaagggaaagttcttttattgcacggacagttccaaggacacagagaaggagtgcataggcaactatgtagatcatgagaaaaacaagatggaggtgaagggccgggaatggaagcgccatgaattccactacgacaacattatctgggccctgctgaccctcttcaccgtctccacaggggaaggatggcctcaagttctgcagcactctgtagatgtgacagaggaagaccgaggcccaagccgcagcaaccgcatggagatgtctatcttttatgtagtctactttgtggtcttccccttcttctttgtcaatatctttgtggctctcatcatcatcaccttccaggagcaaggggataagatgatggaggagtgcagcctggagaagaatgagagggcgtgcatcgacttcgccatcagcgccaaacctctcacccgctacatgccgcagaacagacacaccttccagtaccgcgtgtggcactttgtggtgtctccgtcctttgagtacaccattatggccatgatcgccttgaatactgttgtgctgatgatgaagtattattctgctccctgtacctatgagctggccctgaagtacctgaatatcgccttcaccatggtgttttccctggaatgtgtcctgaaggtcatcgcttttggctttttgaactatttccgagacacctggaatatctttgacttcatcaccgtgattggcagtatcacagaaattatcctgacagacagcaagctggtgaacaccagtggcttcaatatgagctttctgaagctcttccgagctgcccgcctcataaagctcctgcgtcagggctataccatacgcattttgctgtggacctttgtgcagtcctttaaggccctcccttatgtctgccttttaattgccatgcttttcttcatttatgccatcattgggatgcaggtatttggaaacataaaattagacgaggagagtcacatcaaccggcacaacaacttccggagtttctttgggtccctaatgctactcttcaggagtgccacaggtgaggcctggcaggagattatgctgtcatgccttggggagaagggctgtgagcctgacaccaccgcaccatcagggcagaacgagaacgaacgctgcggcaccgatctggcctacgtgtactttgtctccttcatcttcttctgctccttcttgatgctcaacctgtttgtggccgtcatcatggacaactttgagtacctgactcgggactcctccatcctggggcctcaccacttggacgagtttgtccgcgtctgggcagaatatgaccgagcagcatgtggccgcatccattacactgagatgtatgaaatgctgactctcatgtcacctccgctaggcctcggcaagagatgtccctccaaagtggcatataagaggttggtcctgatgaacatgccagtagctgaggacatgacggtccacttcacctccacacttatggctctgatccggacagctctggacattaaaattgccaaaggtggtgcagacaggcagcagctagactcagagctacaaaaggagaccctagccatctggcctcacctatcccagaagatgctggatctgcttgtgcccatgcccaaagcctctgacctgactgtgggcaaaatctatgcagcaatgatgatcatggactactataagcagagtaaggtgaagaagcagaggcagcagctggaggaacagaaaaatgcccccatgttccagcgcatggagccttcatctctgcctcaggagatcattgctaatgccaaagccctgccttacctccagcaggaccccgtttcaggcctgagtggccggagtggatacccttcgatgagtccactctctccccaggatatattccagttggcttgtatggaccccgccgatgacggacagttccaagaacggcagtctctggagccagaggttagtgaattaaaaagcgtgcagccctctaaccatggcatctaccttccttcggacacccaggagcatgcgggatctgggagggcatcttctatgccacgtctgactgtggatccccaggtggtgacagaccctagctccatgagacgttcattttccactattcgggataagcgttcaaattcctcgtggttggaggaattctccatggagcgaagcagtgaaaatacctacaagtcccgtcgccggagttaccactcctccttgcggctgtcagcccaccgcctgaactctgattcaggccacaagtctgacactcaccgctcagggggcagggagcggggacgatcaaaagagcgaaagcatcttctctctcctgatgtctcccgctgcaattcagaagagcgagggacccaggctgactgggagtccccagagcgccgtcaatccaggtcacccagtgagggcaggtcacagacgcccaacagacagggcacaggttccctaagtgagagctccatcccctctgtctctgacaccagcaccccaagaagaagtcgtcggcagctcccacccgtcccgccaaagccccggcccctcctttcctacagctccctgattcgacacgcgggcagcatctctccacctgctgatggaagcgaggagggctccccgctgacctcccaagctctggagagcaacaatgcttgcctgaccgagtcttccaactctccgcacccccagcagagccaacatgcctccccacagcgctacatctccgagccctacttggccctgcacgaagactcccacgcctcagactgtggtgaggaggagacgctcactttcgaagcagccgtggctactagcctgggccgttccaacaccatcggctcagccccacccctgcggcatagctggcagatgcccaacgggcactatcggcggcggaggcgcggggggcctgggccaggcatgatgtgtggggctgtcaacaacctgctaagtgacacggaagaagatgacaaatgctagaggctgctcccccctccgatgcatgctcttctctcacatggagaaaaccaagacagaattgggaagccagtgcggccc

SEQ ID NO: 2737 - DNA, 7067 bp, Homo sapiens
  source 1..7067: mol_type = unassigned DNA; mol_type = unassigned DNA
atggctcgcttcggggaggcggtggtcgccaggccagggtccggcgatggagactcggaccagagcaggaaccggcaaggaacccccgtgccggcctcggggcaggcggccgcctacaagcagacgaaagcacagagggcgcggactatggctttgtacaaccccattcccgtccggcagaactgtttcaccgtcaacagatccctgttcatcttcggagaagataacattgtcaggaaatatgccaagaagctcatcgattggccgccatttgagtacatgatcctggccaccatcattgccaactgcatcgtcctggccctggagcagcatcttcctgaggatgacaagacccccatgtcccgaagactggagaagacagaaccttatttcattgggatcttttgctttgaagctgggatcaaaattgtggccctggggttcatcttccataagggctcttacctccgcaatggctggaatgtcatggacttcatcgtggtcctcagtggcatcctggccactgcaggaacccacttcaatactcacgtggacctgaggaccctccgggctgtgcgtgtcctgcggcctttgaagctcgtgtcagggatacctagcctgcagattgtgttgaagtccatcatgaaggccatggtacctcttctgcagattggccttctgctcttctttgccatcctgatgtttgctatcattggtttggagttctacagtggcaagttacatcgagcatgcttcatgaacaattcaggtattctagaaggatttgacccccctcacccatgtggtgtgcagggctgcccagctggttatgaatgcaaggactggatcggccccaatgatgggatcacccagtttgataacatcctttttgctgtgctgactgtcttccagtgcatcaccatggaagggtggaccactgtgctgtacaataccaatgatgccttaggagccacctggaattggctgtacttcatccccctcatcatcattggatccttctttgttctcaacctagtcctgggagtgctttccggggaatttgccaaagagagagagagagtggagaaccgaagggctttcatgaagctgcggcgccagcagcagattgagcgtgagctgaatggctaccgtgcctggatagacaaagcagaggaagtcatgctcgctgaagaaaataaaaatgctggaacatccgccttagaagtgcttcgaagggcaaccatcaagaggagccggacagaggccatgactcgagactccagtgatgagcactgtgttgatatctcctctgtgggcacacctctggcccgagccagtatcaaaagtgcaaaggtagacggggtctcttatttccggcacaaggaaaggcttctgcgcatctccattcgccacatggttaaatcccaggtgttttactggattgtgctgagccttgtggcactcaacactgcctgtgtggccattgtccatcacaaccagccccagtggctcacccacctcctctactatgcagaatttctgtttctgggactcttcctcttggagatgtccctgaagatgtatggcatggggcctcgcctttattttcactcttcattcaactgctttgattttggggtcacagtgggcagtatctttgaagtggtctgggcaatcttcagacctggtacgtcttttggaatcagtgtcttgcgagccctccggcttctaagaatatttaaaataaccaagtattgggcttccctacggaatttggtggtctccttgatgagctcaatgaagtctatcatcagtttgcttttcctcctcttcctcttcatcgttgtctttgctctcctaggaatgcagttatttggaggcaggtttaactttaatgatgggactccttcggcaaattttgataccttccctgcagccatcatgactgtgttccagatcctgacgggtgaggactggaatgaggtgatgtacaatgggatccgctcccagggtggggtcagctcaggcatgtggtctgccatctacttcattgtgctcaccttgtttggcaactacacgctactgaatgtgttcttggctatcgctgtggataatctcgccaacgcccaggaactgaccaaggatgaacaggaggaagaagaggccttcaaccagaaacatgcactgcagaaggccaaggaggtcagcccgatgtctgcacccaacatgccttcgatcgaaagagacagaaggagaagacaccacatgtcgatgtgggagccacgcagcagccacctgagggagcggaggcgccggcaccacatgtccgtgtgggagcagcgtaccagccagctgaggaagcacatgcagatgtccagccaggaggccctcaacagagaggaggcgccgaccatgaacccgctcaaccccctcaacccgctcagctccctcaacccgctcaatgcccaccccagcctttatcggcgacccagggccattgagggcctggccctgggcctggccctggagaagttcgaggaggagcgcatcagccgtggggggtccctcaagggggatggaggggaccgatccagtgccctggacaaccagaggacccctttgtccctgggccagcgggagccaccatggctggccaggccctgtcatggaaactgtgacccgactcagcaggaggcagggggaggagaggctgtggtgacctttgaggaccgggccaggcacaggcagagccaacggcgcagccggcatcgccgcgtcaggacagaaggcaaggagtcctcttcagcctcccggagcaggtctgccagccaggaacgcagtctggatgaagccatgcccactgaaggggagaaggaccatgagctcaggggcaaccatggtgccaaggagccaacgatccaagaagagagagcccaggatttaaggaggaccaacagtctgatggtgtccagaggctccgggctggcaggaggccttgatgaggctgacacccccctagtcctgccccatcctgagctggaagtggggaagcacgtggtgctgacggagcaggagccagaaggcagcagtgagcaggccctgctggggaatgtgcagctagacatgggccgggtcatcagccagagcgagcctgacctctcctgcatcacggccaacacggacaaggccaccaccgagagcaccagcgtcaccgtcgccatccccgacgtggaccccttggtggactcaaccgtggtgcacattagcaacaagacggatggggaagccagtcccttgaaggaggcagagatcagagaggatgaggaggaggtggagaagaagaagcagaagaaggagaagcgtgagacaggcaaagccatggtgccccacagctcaatgttcatcttcagcaccaccaacccgatccggagggcctgccactacatcgtgaacctgcgctactttgagatgtgcatcctcctggtgattgcagccagcagcatcgccctggcggcagaggaccccgtcctgaccaactcggagcgcaacaaagtcctgaggtattttgactatgtgttcacgggcgtgttcacctttgagatggttataaagatgatagaccaaggcttgatcctgcaggatgggtcctacttccgagacttgtggaacatcctggactttgtggtggtcgttggcgcattggtggcctttgctctggcgaacgctttgggaaccaacaaaggacgggacatcaagaccatcaagtctctgcgggtgctccgagttctaaggccactgaaaaccatcaagcgcttgcccaagctcaaggccgtcttcgactgcgtagtgacctccttgaagaatgtcttcaacatactcattgtgtacaagctcttcatgttcatctttgctgtcatcgcagttcagctcttcaagggaaagttcttttattgcacggacagttccaaggacacagagaaggagtgcataggcaactatgtagatcatgagaaaaacaagatggaggtgaagggccgggaatggaagcgccatgaattccactacgacaacattatctgggccctgctgaccctcttcaccgtctccacaggggaaggatggcctcaagttctgcagcactctgtagatgtgacagaggaagaccgaggcccaagccgcagcaaccgcatggagatgtctatcttttatgtagtctactttgtggtcttccccttcttctttgtcaatatctttgtggctctcatcatcatcaccttccaggagcaaggggataagatgatggaggagtgcagcctggagaagaatgagagggcgtgcatcgacttcgccatcagcgccaaacctctcacccgctacatgccgcagaacagacacaccttccagtaccgcgtgtggcactttgtggtgtctccgtcctttgagtacaccattatggccatgatcgccttgaatactgttgtgctgatgatgaagtattattctgctccctgtacctatgagctggccctgaagtacctgaatatcgccttcaccatggtgttttccctggaatgtgtcctgaaggtcatcgcttttggctttttgaactatttccgagacacctggaatatctttgacttcatcaccgtgattggcagtatcacagaaattatcctgacagacagcaagctggtgaacaccagtggcttcaatatgagctttctgaagctcttccgagctgcccgcctcataaagctcctgcgtcagggctataccatacgcattttgctgtggacctttgtgcagtcctttaaggccctcccttatgtctgccttttaattgccatgcttttcttcatttatgccatcattgggatgcaggtatttggaaacataaaattagacgaggagagtcacatcaaccggcacaacaacttccggagtttctttgggtccctaatgctactcttcaggagtgccacaggtgaggcctggcaggagattatgctgtcatgccttggggagaagggctgtgagcctgacaccaccgcaccatcagggcagaacgagaacgaacgctgcggcaccgatctggcctacgtgtactttgtctccttcatcttcttctgctccttcttgatgctcaacctgtttgtggccgtcatcatggacaactttgagtacctgactcgggactcctccatcctggggcctcaccacttggacgagtttgtccgcgtctgggcagaatatgaccgagcagcatgtggccgcatccattacactgagatgtatgaaatgctgactctcatgtcacctccgctaggcctcggcaagagatgtccctccaaagtggcatataagaggttggtcctgatgaacatgccagtagctgaggacatgacggtccacttcacctccacacttatggctctgatccggacagctctggacattaaaattgccaaaggtggtgcagacaggcagcagctagactcagagctacaaaaggagaccctagccatctggcctcacctatcccagaagatgctggatctgcttgtgcccatgcccaaagcctctgacctgactgtgggcaaaatctatgcagcaatgatgatcatggactactataagcagagtaaggtgaagaagcagaggcagcagctggaggaacagaaaaatgcccccatgttccagcgcatggagccttcatctctgcctcaggagatcattgctaatgccaaagccctgccttacctccagcaggaccccgtttcaggcctgagtggccggagtggatacccttcgatgagtccactctctccccaggatatattccagttggcttgtatggaccccgccgatgacggacagttccaagaacggcagtctctggagccagaggttagtgaattaaaaagcgtgcagccctctaaccatggcatctaccttccttcggacacccaggagcatgcgggatctgggagggcatcttctatgccacgtctgactgtggatccccaggtggtgacagaccctagctccatgagacgttcattttccactattcgggataagcgttcaaattcctcgtggttggaggaattctccatggagcgaagcagtgaaaatacctacaagtcccgtcgccggagttaccactcctccttgcggctgtcagcccaccgcctgaactctgattcaggccacaagtctgacactcaccgctcagggggcagggagcggggacgatcaaaagagcgaaagcatcttctctctcctgatgtctcccgctgcaattcagaagagcgagggacccaggctgactgggagtccccagagcgccgtcaatccaggtcacccagtgagggcaggtcacagacgcccaacagacagggcacaggttccctaagtgagagctccatcccctctgtctctgacaccagcaccccaagaagaagtcgtcggcagctcccacccgtcccgccaaagccccggcccctcctttcctacagctccctgattcgacacgcgggcagcatctctccacctgctgatggaagcgaggagggctccccgctgacctcccaagctctggagagcaacaatgcttgcctgaccgagtcttccaactctccgcacccccagcagagccaacatgcctccccacagcgctacatctccgagccctacttggccctgcacgaagactcccacgcctcagactgtggtgaggaggagacgctcactttcgaagcagccgtggctactagcctgggccgttccaacaccatcggctcagccccacccctgcggcatagctggcagatgcccaacgggcactatcggcggcggaggcgcggggggcctgggccaggcatgatgtgtggggctgtcaacaacctgctaagtgacacggaagaagatgacaaatgctagaggctgctcccccctccgatgcatgctcttctctcacatggagaaaaccaagacagaattgggaagccagtgcggcccgggggggaggaagagggaaaaggaagatggaaggacaccatgcatta

SEQ ID NO: 2738 - DNA, 7064 bp, Homo sapiens
  source 1..7064: mol_type = unassigned DNA; mol_type = unassigned DNA
atggctcgcttcggggaggcggtggtcgccaggccagggtccggcgatggagactcggaccagagcaggaaccggcaaggaacccccgtgccggcctcggggcaggcggccgcctacaagcagacgaaagcacagagggcgcggactatggctttgtacaaccccattcccgtccggcagaactgtttcaccgtcaacagatccctgttcatcttcggagaagataacattgtcaggaaatatgccaagaagctcatcgattggccgccatttgagtacatgatcctggccaccatcattgccaactgcatcgtcctggccctggagcagcatcttcctgaggatgacaagacccccatgtcccgaagactggagaagacagaaccttatttcattgggatcttttgctttgaagctgggatcaaaattgtggccctggggttcatcttccataagggctcttacctccgcaatggctggaatgtcatggacttcatcgtggtcctcagtggcatcctggccactgcaggaacccacttcaatactcacgtggacctgaggaccctccgggctgtgcgtgtcctgcggcctttgaagctcgtgtcagggatacctagcctgcagattgtgttgaagtccatcatgaaggccatggtacctcttctgcagattggccttctgctcttctttgccatcctgatgtttgctatcattggtttggagttctacagtggcaagttacatcgagcatgcttcatgaacaattcaggtattctagaaggatttgacccccctcacccatgtggtgtgcagggctgcccagctggttatgaatgcaaggactggatcggccccaatgatgggatcacccagtttgataacatcctttttgctgtgctgactgtcttccagtgcatcaccatggaagggtggaccactgtgctgtacaataccaatgatgccttaggagccacctggaattggctgtacttcatccccctcatcatcattggatccttctttgttctcaacctagtcctgggagtgctttccggggaatttgccaaagagagagagagagtggagaaccgaagggctttcatgaagctgcggcgccagcagcagattgagcgtgagctgaatggctaccgtgcctggatagacaaagcagaggaagtcatgctcgctgaagaaaataaaaatgctggaacatccgccttagaagtgcttcgaagggcaaccatcaagaggagccggacagaggccatgactcgagactccagtgatgagcactgtgttgatatctcctctgtgggcacacctctggcccgagccagtatcaaaagtgcaaaggtagacggggtctcttatttccggcacaaggaaaggcttctgcgcatctccattcgccacatggttaaatcccaggtgttttactggattgtgctgagccttgtggcactcaacactgcctgtgtggccattgtccatcacaaccagccccagtggctcacccacctcctctactatgcagaatttctgtttctgggactcttcctcttggagatgtccctgaagatgtatggcatggggcctcgcctttattttcactcttcattcaactgctttgattttggggtcacagtgggcagtatctttgaagtggtctgggcaatcttcagacctggtacgtcttttggaatcagtgtcttgcgagccctccggcttctaagaatatttaaaataaccaagtattgggcttccctacggaatttggtggtctccttgatgagctcaatgaagtctatcatcagtttgcttttcctcctcttcctcttcatcgttgtctttgctctcctaggaatgcagttatttggaggcaggtttaactttaatgatgggactccttcggcaaattttgataccttccctgcagccatcatgactgtgttccagatcctgacgggtgaggactggaatgaggtgatgtacaatgggatccgctcccagggtggggtcagctcaggcatgtggtctgccatctacttcattgtgctcaccttgtttggcaactacacgctactgaatgtgttcttggctatcgctgtggataatctcgccaacgcccaggaactgaccaaggatgaacaggaggaagaagaggccttcaaccagaaacatgcactgcagaaggccaaggaggtcagcccgatgtctgcacccaacatgccttcgatcgaaagagacagaaggagaagacaccacatgtcgatgtgggagccacgcagcagccacctgagggagcggaggcgccggcaccacatgtccgtgtgggagcagcgtaccagccagctgaggaagcacatgcagatgtccagccaggaggccctcaacagagaggaggcgccgaccatgaacccgctcaaccccctcaacccgctcagctccctcaacccgctcaatgcccaccccagcctttatcggcgacccagggccattgagggctggcccggcctggccctggagaagttcgaggaggagcgcatcagccgtggggggtccctcaagggggatggaggggaccgatccagtgccctggacaaccagaggacccctttgtccctgggccagcgggagccaccatggctggccaggccctgtcatggaaactgtgacccgactcagcaggaggcagggggaggagaggctgtggtgacctttgaggaccgggccaggcacaggcagagccaacggcgcagccggcatcgccgcgtcaggacagaaggcaaggagtcctcttcagcctcccggagcaggtctgccagccaggaacgcagtctggatgaagccatgcccactgaaggggagaaggaccatgagctcaggggcaaccatggtgccaaggagccaacgatccaagaagagagagcccaggatttaaggaggaccaacagtctgatggtgtccagaggctccgggctggcaggaggccttgatgaggctgacacccccctagtcctgccccatcctgagctggaagtggggaagcacgtggtgctgacggagcaggagccagaaggcagcagtgagcaggccctgctggggaatgtgcagctagacatgggccgggtcatcagccagagcgagcctgacctctcctgcatcacggccaacacggacaaggccaccaccgagagcaccagcgtcaccgtcgccatccccgacgtggaccccttggtggactcaaccgtggtgcacattagcaacaagacggatggggaagccagtcccttgaaggaggcagagatcagagaggatgaggaggaggtggagaagaagaagcagaagaaggagaagcgtgagacaggcaaagccatggtgccccacagctcaatgttcatcttcagcaccaccaacccgatccggagggcctgccactacatcgtgaacctgcgctactttgagatgtgcatcctcctggtgattgcagccagcagcatcgccctggcggcagaggaccccgtcctgaccaactcggagcgcaacaaagtcctgaggtattttgactatgtgttcacgggcgtgttcacctttgagatggttataaagatgatagaccaaggcttgatcctgcaggatgggtcctacttccgagacttgtggaacatcctggactttgtggtggtcgttggcgcattggtggcctttgctctggcggactcttttcgaaccaacaaaggacgggacatcaagaccatcaagtctctgcgggtgctccgagttctaaggccactgaaaaccatcaagcgcttgcccaagctcaaggccgtcttcgactgcgtagtgacctccttgaagaatgtcttcaacatactcattgtgtacaagctcttcatgttcatctttgctgtcatcgcagttcagctcttcaagggaaagttcttttattgcacggacagttccaaggacacagagaaggagtgcataggcaactatgtagatcatgagaaaaacaagatggaggtgaagggccgggaatggaagcgccatgaattccactacgacaacattatctgggccctgctgaccctcttcaccgtctccacaggggaaggatggcctcaagttctgcagcactctgtagatgtgacagaggaagaccgaggcccaagccgcagcaaccgcatggagatgtctatcttttatgtagtctactttgtggtcttccccttcttctttgtcaatatctttgtggctctcatcatcatcaccttccaggagcaaggggataagatgatggaggagtgcagcctggagaagaatgagagggcgtgcatcgacttcgccatcagcgccaaacctctcacccgctacatgccgcagaacagacacaccttccagtaccgcgtgtggcactttgtggtgtctccgtcctttgagtacaccattatggccatgatcgccttgaatactgttgtgctgatgatgaagtattattctgctccctgtacctatgagctggccctgaagtacctgaatatcgccttcaccatggtgttttccctggaatgtgtcctgaaggtcatcgcttttggctttttgaactatttccgagacacctggaatatctttgacttcatcaccgtgattggcagtatcacagaaattatcctgacagacagcaagctggtgaacaccagtggcttcaatatgagctttctgaagctcttccgagctgcccgcctcataaagctcctgcgtcagggctataccatacgcattttgctgtggacctttgtgcagtcctttaaggccctcccttatgtctgccttttaattgccatgcttttcttcatttatgccatcattgggatgcaggtatttggaaacataaaattagacgaggagagtcacatcaaccggcacaacaacttccggagtttctttgggtccctaatgctactcttcaggagtgccacaggtgaggcctggcaggagattatgctgtcatgccttggggagaagggctgtgagcctgacaccaccgcaccatcagggcagaacgagaacgaacgctgcggcaccgatctggcctacgtgtactttgtctccttcatcttcttctgctccttcttgatgctcaacctgtttgtggccgtcatcatggacaactttgagtacctgactcgggactcctccatcctggggcctcaccacttggacgagtttgtccgcgtctgggcagaatatgaccgagcagcatgtggccgcatccattacactgagatgtatgaaatgctgactctcatgtcacctccgctaggcctcggcaagagatgtccctccaaagtggcatataagaggttggtcctgatgaacatgccagtagctgaggacatgacggtccacttcacctccacacttatggctctgatccggacagctctggacattaaaattgccaaaggtggtgcagacaggcagcagctagactcagagctacaaaaggagaccctagccatctggcctcacctatcccagaagatgctggatctgcttgtgcccatgcccaaagcctctgacctgactgtgggcaaaatctatgcagcaatgatgatcatggactactataagcagagtaaggtgaagaagcagaggcagcagctggaggaacagaaaaatgcccccatgttccagcgcatggagccttcatctctgcctcaggagatcattgctaatgccaaagccctgccttacctccagcaggaccccgtttcaggcctgagtggccggagtggatacccttcgatgagtccactctctccccaggatatattccagttggcttgtatggaccccgccgatgacggacagttccaagaacggcagtctctggagccagaggttagtgaattaaaaagcgtgcagccctctaaccatggcatctaccttccttcggacacccaggagcatgcgggatctgggagggcatcttctatgccacgtctgactgtggatccccaggtggtgacagaccctagctccatgagacgttcattttccactattcgggataagcgttcaaattcctcgtggttggaggaattctccatggagcgaagcagtgaaaatacctacaagtcccgtcgccggagttaccactcctccttgcggctgtcagcccaccgcctgaactctgattcaggccacaagtctgacactcaccgctcagggggcagggagcggggacgatcaaaagagcgaaagcatcttctctctcctgatgtctcccgctgcaattcagaagagcgagggacccaggctgactgggagtccccagagcgccgtcaatccaggtcacccagtgagggcaggtcacagacgcccaacagacagggcacaggttccctaagtgagagctccatcccctctgtctctgacaccagcaccccaagaagaagtcgtcggcagctcccacccgtcccgccaaagccccggcccctcctttcctacagctccctgattcgacacgcgggcagcatctctccacctgctgatggaagcgaggagggctccccgctgacctcccaagctctggagagcaacaatgcttgcctgaccgagtcttccaactctccgcacccccagcagagccaacatgcctccccacagcgctacatctccgagccctacttggccctgcacgaagactcccacgcctcagactgtggtgaggaggagacgctcactttcgaagcagccgtggctactagcctgggccgttccaacaccatcggctcagccccacccctgcggcatagctggcagatgcccaacgggcactatcggcggcggaggcgcggggggcctgggccaggcatgatgtgtggggctgtcaacaacctgctaagtgacacggaagaagatgacaaatgctagaggctgctcccccctccgatgcatgctcttctctcacatggagaaaaccaagacagaattgggaagccagtgcggcccgggggggaggaagagggaaaaggaagatggaaggacaccatgcatta

SEQ ID NO: 2739 - DNA, 14757 bp, Homo sapiens
  source 1..14757: mol_type = unassigned DNA; mol_type = unassigned DNA
atggctcgcttcggggaggcggtggtcgccaggccagggtccggcgatggagactcggaccagagcaggaaccggcaaggaacccccgtgccggcctcggggcaggcggccgcctacaagcagacgaaagcacagagggcgcggactatggctttgtacaaccccattcccgtccggcagaactgtttcaccgtcaacagatccctgttcatcttcggagaagataacattgtcaggaaatatgccaagaagctcatcgattggccaccatttgagtacatgatcctggccaccatcattgccaactgcatcgtcctggccctggagcagcatcttcctgaggatgacaagacccccatgtcccgaagactggagaagacagaaccttatttcattgggatcttttgctttgaagctgggatcaaaattgtggccctggggttcatcttccataagggctcttacctccgcaatggctggaatgtcatggacttcatcgtggtcctcagtggcatcctggccactgcaggaacccacttcaatactcacgtggacctgaggaccctccgggctgtgcgtgtcctgcggcctttgaagctcgtgtcagggatacctagcctgcagattgtgttgaagtccatcatgaaggccatggtacctcttctgcagattggccttctgctcttctttgccatcctgatgtttgctatcattggtttggagttctacagtggcaagttacatcgagcatgcttcatgaacaattcaggtattctagaaggatttgacccccctcacccatgtggtgtgcagggctgcccagctggttatgaatgcaaggactggatcggccccaatgatgggatcacccagtttgataacatcctttttgctgtgctgactgtcttccagtgcatcaccatggaagggtggaccactgtgctgtacaataccaatgatgccttaggagccacctggaattggctgtacttcatccccctcatcatcattggatccttctttgttctcaacctagtcctgggagtgctttccggggaatttgccaaagagagagagagagtggagaaccgaagggctttcatgaagctgcggcgccagcagcagattgagcgtgagctgaatggctaccgtgcctggatagacaaagcagaggaagtcatgctcgctgaagaaaataaaaatgctggaacatccgccttagaagtgcttcgaagggcaaccatcaagaggagccggacagaggccatgactcgagactccagtgatgagcactgtgttgatatctcctctgtgggcacacctctggcccgagccagtatcaaaagtgcaaaggtagacggggtctcttatttccggcacaaggaaaggcttctgcgcatctccattcgccacatggttaaatcccaggtgttttactggattgtgctgagccttgtggcactcaacactgcctgtgtggccattgtccatcacaaccagccccagtggctcacccacctcctctactatgcagaatttctgtttctgggactcttcctcttggagatgtccctgaagatgtatggcatggggcctcgcctttattttcactcttcattcaactgctttgattttggggtcacagtgggcagtatctttgaagtggtctgggcaatcttcagacctggtacgtcttttggaatcagtgtcttgcgagccctccggcttctaagaatatttaaaataaccaagtattgggcttccctacggaatttggtggtctccttgatgagctcaatgaagtctatcatcagtttgcttttcctcctcttcctcttcatcgttgtctttgctctcctaggaatgcagttatttggaggcaggtttaactttaatgatgggactccttcggcaaattttgataccttccctgcagccatcatgactgtgttccagatcctgacgggtgaggactggaatgaggtgatgtacaatgggatccgctcccagggtggggtcagctcaggcatgtggtctgccatctacttcattgtgctcaccttgtttggcaactacacgctactgaatgtgttcttggctatcgctgtggataatctcgccaacgcccaggaactgaccaaggatgaacaggaggaagaagaggccttcaaccagaaacatgcactgcagaaggccaaggaggtcagcccgatgtctgcacccaacatgccttcgatcgaaagagacagaaggagaagacaccacatgtcgatgtgggagccacgcagcagccacctgagggagcggaggcgccggcaccacatgtccgtgtgggagcagcgtaccagccagctgaggaagcacatgcagatgtccagccaggaggccctcaacagagaggaggcgccgaccatgaacccgctcaaccccctcaacccgctcagctccctcaacccgctcaatgcccaccccagcctttatcggcgacccagggccattgagggcctggccctgggcctggccctggagaagttcgaggaggagcgcatcagccgtggggggtccctcaagggggatggaggggaccgatccagtgccctggacaaccagaggacccctttgtccctgggccagcgggagccaccatggctggccaggccctgtcatggaaactgtgacccgactcagcaggaggcagggggaggagaggctgtggtgacctttgaggaccgggccaggcacaggcagagccaacggcgcagccggcatcgccgcgtcaggacagaaggcaaggagtcctcttcagcctcccggagcaggtctgccagccaggaacgcagtctggatgaagccatgcccactgaaggggagaaggaccatgagctcaggggcaaccatggtgccaaggagccaacgatccaagaagagagagcccaggatttaaggaggaccaacagtctgatggtgtccagaggctccgggctggcaggaggccttgatgaggctgacacccccctagtcctgccccatcctgagctggaagtggggaagcacgtggtgctgacggagcaggagccagaaggcagcagtgagcaggccctgctggggaatgtgcagctagacatgggccgggtcatcagccagagcgagcctgacctctcctgcatcacggccaacacggacaaggccaccaccgagagcaccagcgtcaccgtcgccatccccgacgtggaccccttggtggactcaaccgtggtgcacattagcaacaagacggatggggaagccagtcccttgaaggaggcagagatcagagaggatgaggaggaggtggagaagaagaagcagaagaaggagaagcgtgagacaggcaaagccatggtgccccacagctcaatgttcatcttcagcaccaccaacccgatccggagggcctgccactacatcgtgaacctgcgctactttgagatgtgcatcctcctggtgattgcagccagcagcatcgccctggcggcagaggaccccgtcctgaccaactcggagcgcaacaaagtcctgaggtattttgactatgtgttcacgggcgtgttcacctttgagatggttataaagatgatagaccaaggcttgatcctgcaggatgggtcctacttccgagacttgtggaacatcctggactttgtggtggtcgttggcgcattggtggcctttgctctggcgaacgctttgggaaccaacaaaggacgggacatcaagaccatcaagtctctgcgggtgctccgagttctaaggccactgaaaaccatcaagcgcttgcccaagctcaaggccgtcttcgactgcgtagtgacctccttgaagaatgtcttcaacatactcattgtgtacaagctcttcatgttcatctttgctgtcatcgcagttcagctcttcaagggaaagttcttttattgcacggacagttccaaggacacagagaaggagtgcataggcaactatgtagatcatgagaaaaacaagatggaggtgaagggccgggaatggaagcgccatgaattccactacgacaacattatctgggccctgctgaccctcttcaccgtctccacaggggaaggatggcctcaagttctgcagcactctgtagatgtgacagaggaagaccgaggcccaagccgcagcaaccgcatggagatgtctatcttttatgtagtctactttgtggtcttccccttcttctttgtcaatatctttgtggctctcatcatcatcaccttccaggagcaaggggataagatgatggaggagtgcagcctggagaagaatgagagggcgtgcatcgacttcgccatcagcgccaaacctctcacccgctacatgccgcagaacagacacaccttccagtaccgcgtgtggcactttgtggtgtctccgtcctttgagtacaccattatggccatgatcgccttgaatactgttgtgctgatgatgaagtattattctgctccctgtacctatgagctggccctgaagtacctgaatatcgccttcaccatggtgttttccctggaatgtgtcctgaaggtcatcgcttttggctttttgaactatttccgagacacctggaatatctttgacttcatcaccgtgattggcagtatcacagaaattatcctgacagacagcaagctggtgaacaccagtggcttcaatatgagctttctgaagctcttccgagctgcccgcctcataaagctcctgcgtcagggctataccatacgcattttgctgtggacctttgtgcagtcctttaaggccctcccttatgtctgccttttaattgccatgcttttcttcatttatgccatcattgggatgcaggtatttggaaacataaaattagacgaggagagtcacatcaaccggcacaacaacttccggagtttctttgggtccctaatgctactcttcaggagtgccacaggtgaggcctggcaggagattatgctgtcatgccttggggagaagggctgtgagcctgacaccaccgcaccatcagggcagaacgagaacgaacgctgcggcaccgatctggcctacgtgtactttgtctccttcatcttcttctgctccttcttgatgctcaacctgtttgtggccgtcatcatggacaactttgagtacctgactcgggactcctccatcctggggcctcaccacttggacgagtttgtccgcgtctgggcagaatatgaccgagcagcatgtggccgcatccattacactgagatgtatgaaatgctgactctcatgtcacctccgctaggcctcggcaagagatgtccctccaaagtggcatataagaggttggtcctgatgaacatgccagtagctgaggacatgacggtccacttcacctccacacttatggctctgatccggacagctctggacattaaaattgccaaaggtggtgcagacaggcagcagctagactcagagctacaaaaggagaccctagccatctggcctcacctatcccagaagatgctggatctgcttgtgcccatgcccaaagcctctgacctgactgtgggcaaaatctatgcagcaatgatgatcatggactactataagcagagtaaggtgaagaagcagaggcagcagctggaggaacagaaaaatgcccccatgttccagcgcatggagccttcatctctgcctcaggagatcattgctaatgccaaagccctgccttacctccagcaggaccccgtttcaggcctgagtggccggagtggatacccttcgatgagtccactctctccccaggatatattccagttggcttgtatggaccccgccgatgacggacagttccaagaacggcagtctctggtggtgacagaccctagctccatgagacgttcattttccactattcgggataagcgttcaaattcctcgtggttggaggaattctccatggagcgaagcagtgaaaatacctacaagtcccgtcgccggagttaccactcctccttgcggctgtcagcccaccgcctgaactctgattcaggccacaagtctgacactcaccgctcagggggcagggagcggggacgatcaaaagagcgaaagcatcttctctctcctgatgtctcccgctgcaattcagaagagcgagggacccaggctgactgggagtccccagagcgccgtcaatccaggtcacccagtgagggcaggtcacagacgcccaacagacagggcacaggttccctaagtgagagctccatcccctctgtctctgacaccagcaccccaagaagaagtcgtcggcagctcccacccgtcccgccaaagccccggcccctcctttcctacagctccctgattcgacacgcgggcagcatctctccacctgctgatggaagcgaggagggctccccgctgacctcccaagctctggagagcaacaatgcttgcctgaccgagtcttccaactctccgcacccccagcagagccaacatgcctccccacagcgctacatctccgagccctacttggccctgcacgaagactcccacgcctcagactgtggtgaggaggagacgctcactttcgaagcagccgtggctactagcctgggccgttccaacaccatcggctcagccccacccctgcggcatagctggcagatgcccaacgggcactatcggcggcggaggcgcggggggcctgggccaggcatgatgtgtggggctgtcaacaacctgctaagtgacacggaagaagatgacaaatgctagaggctgctcccccctccgatgcatgctcttctctcacatggagaaaaccaagacagaattgggaagccagtgcggcccgggggggaggaagagggaaaaggaagatggaaggacaccatgcattatcagagaagaggaagtaaaggacaatcagaacaccagtcaaacccaccaaattgctttattcccctttgcaagatgggcactgccatagttctgcctctttgctggggaaagaaaccaggaacgtggagggttattactgcgggagaagggacacgaggatggctttgcttccccttgccccttcccacttttctaaaagctgtggagggatctagctggcctatgtctacactcagtgccctgagaagcctggaagactttctggctcttaactggggagtagtggagaccataggagaggactctcctccctcaccagctcttacgcctcagccagcaccactgccaccagggcaactgcagcagcatctcatgcataaccctgtggcttgcttcccccagggcagcacaggctaagtcaggaacatcggatgccagggagggaggagaaagccgaagcgaaaggggtcagggtgctgaggcaacagcagcaagggctggtctggacaagaaaagccatagcccggcagcccctaccatgagggagacagagaaacagaactggtggtgctggggggtatagccccccatccttgaggcctgtcacccacacagtaggtgctgagagttaggacaggtcaggaagtcccccagggtccacaaaggtgcctgaggctctggtaagggtgaagataaaagtatttaacaaccgctatggcatcaatgtaagtggagtttggtcctagtgccggagcccatgctattccaggcattggctctttagatgccagtcatgggggaaccctgagggtgtgggtagagtagcaggggccacctaagagattaaaaacagtctgttttccaaccagtgtggaagcaattaaatatgcgtaacagtgctacggccacaccagcacctcctggctgaaggtcagcccacactctggtccatgaggcagcaaggccagtgctgtgccaagcccggtaaggccaagtgccgaggcccagccttccctgccactcctctgagagggcagaacacacatatccaagtaggctacccaccactgggtagggatttctgtaaagatgggaaaggctgatagattgaaataagcttctgtgaaagtctggatttactgaggacctcccctgaggagggaccgttgggaccgcagattctgcagctggtgtggggttcaggtcagtttgtcaggatgctttaaggtgattagtaaatatacctcagcttagacttgggctgctccttctagcaaagcaggctccagtggggcctcatcatacaggatgacaagactggggccctgttcaccttgaacatgcccctgggccaagatggggcttcacccctccccagagtaagagctggggctgacagtcccaccctgtcattcctaatagcccaaacgcagaagcactgagcaagagagccctttcttgccaagccagtgctcttttggtatatggcatacagctccattggaggggacacatcactggctttatctggtggaaatgtacctttcccttaagttcctccttagtgccatcacagcaggtgaatgggtgccctacggggccctccttcccccaccaggaacagatggaacctgccacccaggatcctgatctgccctgcactgagcactcagtggataaacactcctccagcccagacacactcctcctcttgggcaggagcaatccagagttgttatttttcttagaaggagcctcttttccctctattttttaaattgaaatataatagctgcatcagccctgaaaagccaaattcaaccacatggctggagaatcatttgtcatggccccgccttctcttctgatactaatggagcttcatgacccacggtcagcccccaaaccaaagttgtcccaacagaggaggccagtgaggcagagacagagctctcccactctcagaccctcttttgtcttcattttcctctcccacttagcacatgtgtgcttgagggtggctgggaatgtgatatacagcaccctgatcctaacaggtgtgattgttacgtaagacgctgatactgggccttgtattgcttttaaagtttcctctgctcagcatcatttcatgccaaagtgctgctatgggctgctttgtgtgcacaaaattgctttttccacctcggaaatgcagctttccctagggggaggcctacaacaggacgaccattctgagccagtgagtctattgcatggtgttttgagaaagggaattttagtgacaccttatgccatttcaagaggagaaatgcaggctggcagagcaatttccagaaatggaatttgcctgcaaatagtataaacaacactaaatttactgtgccaggaaatcttcctgaactccttgaactcatacacacaggtatttgagtcctgaataaagtgttggaaagcactgcagatgcggtcacctgactgaccacctgggttttctattaccagtgaatttcttttattcaccttcccttgaccaagaaattgggtttcttttccctcagcctgcacttactcttctattaagaccagaaaataaaataattttccgttgagtcacaaactcatcatcttgtttggtgttctgctgcctctgaacaaaagtgaatgccagccttcccttgctgggtgtcagagtctgcctcccttgaaaagaggcccctgtagaccccaacacctattcttttctctggttaattacagcagcatctgagaaattccatgcaaaagaagactacaaccagtgtttcagatataccacaagatcaaatttgggcactggtggtccacctcagaagactcttgagtcatatattcagtttctcttgctaatatatgactcgtcttcaccatctcctcaaaacaagagcaaagccaagatagaggaaggtaaaaggaggaggaaaggaaaccaaggcagggagatgttctaagtaggtttgcatttagttacccctcatttcacttaaggctccagacagactccaggtagggaatgcatgctgtctctttctctgtgtctgtctccccatctcctagaggacagagtgccagcgacctctggacaggggcagggctccagccaaggtgcccctgagccagggtcaacatagaatttcctgccccgtgaagggctggcaccagctagcatccccttggctccacatgagtcatgaacacaattgtcagtgggggtctctgctgctcttctggctgaagaatctgtttttcttctgggcttcacttgtagttcctattcaatgtctccatagggcactgagatcaccaagaacattacccagaagctgaagtccaaatgttctagattttgacctctcttgactctggggccacaaagagaaggccccataatccacctctcagccagtatctcccttctttgcacagattcctcccaaccccatagagcctatgtggtgagcatgagggtcgtcttccctctgttctcccatcccagcctctgttttgctgcatgttagcgctgatccagctcctgagatggttaattccacccaatccaagcttatttgcttgcctgactgactccaccactctctcagctatgggggaatattgcattctaatgaaatagggtttggaactcacctggtgctcctcgcaagacaactgacacaaggtgtagggtgtgggggtggacaaaatgcccacctactggataaaagctcactgcaggaaaatgaggtctcctggcataatgcaacaaaaatctcatataattttgatttttaaaaagttgttctcaatttttcattacatcctacttctcagccctctggatgtttcatttttttggacaaagtgtttctttagtggttggggccagggacaggttgagggatatttctcggctcatttataagatataaatattatgaggttgtatgtaaagaaagggcaaacgtacagcagaaggggagcaaatagctacctttcaaggattttgagatttgaaggttaaggaatttttactgctatttttgttcatcagtttcatgtctgttatgttttgagatcctcagaggcctagggttagcgtataccaagaatcctggtgagaggcgttgccatgccttggggtgaattcttccccactagctctctcacccagcctacaagtccttctctcatagatcccagagcaatgggcaccgtccaggaggtacaggagaggactttatgatgcaggaaagaaggaagaagtgggtcccttgcaagtggccagacagggaatgatggtttgactccagaaatcaggaatcaggttcaggtttggataacttctctttaaaatatctccacattgagactcttattttaacaaaatccaaacaaaattaactcagggcttgtgacctaacctttgtaagaaggtgatcaaagagatcctacattaataagcactgcctgtagcaccagctttgtctttttgtcttttgttgtttctttcctgaaccaccctgtacatcatagccaggtctaccccaaatagagcagcagctgatggcttctctgctgtctgtggagggagggctcggctgcagacctatggtgttttgtcagctgttaggtgctacagcccacccagtcagagtacatagacatagcgctttaagggacaaaggacaaacagaactatctttgctttccggaggccatctttttctttccttgaatcctttctgctttaaacttctgaggtttatgcatcccagagaggtcacaccaagccaaagagaaaaaattcatagattgtcccagcctacccaaagggcctgaaaagcctctctaaacaaaactcaagatagctgagaagtatgaatggggttcacagcaaagtccaattgatggcttttgaggctgggacacccccaaactgcccttctgtttttgtagttttgctttcttccacccaccctctctccgcatgctgtaagttaggggagttagtatcttgaacttctaaatgcaaaaggagattttataataagccatgctacctgtaaatacattattgaggtttgcatttttatttttggaggtatgaaagagttgagtagaccaagtcaaaagaggtgtggggatttatgtttatttttatttgtttggggttgtttggttggtggctgggtttcttgtaacagacctattctggaatagcaaagaaggataccttggtgatctgcaatgtttctgaatctgtttctctttaggaagtgattgccatcaaatttagtgatatgatatttgagtcaaaaatctgaggttatagtaccagctgtcttttctctctggtctcctttttgtcgtctttctctttctgtctaaattggcctctgtcttttcctaaggacttaaaatataacccaaattaatgaagaactgccccaaaacttcagtgaaagccaaggaggtacagaattttttcaggacatctttaaccaatacaaaatttatgtcttaagaagataatttttacaatagtgtagtaatctgataaatgaaaactattggaagtcaatagttttttatattccagctttctgtattcaaacttgtgccttcagcaagcatctcttcactttctttcccttgtcaattgaaacatgaatgtttggctaactcatgatgtaaagtgtctgttaagttaataatacataatttaaagcacttagtctccacaaagcaatttagaaaaatcttcacttgttagatcccatgaagtacctatgaaattctcagcattgctataagcatttgattttttttaaggaaacttcctgtttaatggaatctgaatccaagatttgctttaatttcactctattcttcccattttcccttattcttcttgttgtctctctaattaaaaaaaaaaaaaacctaggcttttttttttctatccagaaagttgggttttcatgatctgagcttccttatgtctccttctctttgtgcaaacttaaaccagtcatagattgtcacccagacatattctccaacccagcattggaaatctgaacgaatcttttctctttttgtcctacaagtttgtcagagatgagaatggattgctgtctacattctacaaccagaccctagactttataccaggctgtgccacttcctcttcacttcactcagaggatggccccaaaactgaaaaggaaatgaaataatcaaatataccaaatccgaatttgactttatttgatgactcaatattttccttccagtactctaatttttttttatggcaatggcctatatggcacaagaaccaccacttaaagcaaatctgttgaacatttttataagggatgagcaagaaaaacacactccaaaattttaaagtgccattaatcaatttttaagaataaaggtaatatgaaatgagggctaaacaatgtaatataactgccagttaaggtagacagtagttgtggtcttagttacatttgatatggagttgtgtaatattaagcagatcccagtggagttagtaaaaacataggtattgagttttaatggctaccaattgggatatatacttagcctgcaggctgaactttagtcagtgtttttctatcatgttgttttgtgaacaagtcaaaatttatacaaagctaccctaagtgctgcaattgcagaggaacttgcctcttcgtgatattagagggcagtccaactccgctcaaactgagtccaagatttgaattcatccagaaaaacaaatggaggagaaaagcctaatgcaccacatgtgtttggcatttcatggctgggacaatggagtagagggtaggaagacaagctgtagaacaaaagcaaagtgaggtagaaagtaacaggtcccagacgaggacagacttagagatgtgtaaccttggatcctctttttcacttagaatatgggtaaacttcttagcacaagactggattaagagaagttctttctgttaaactcacctagggtagtggctttgaaggcctcagaggattaatagattcccaaaattttcttccagacctgggagatggagagaaagaggttcttgctttaaagcggctcgaagacaatctttatgacttcagcaactcttcaacatagtagcaccaataaaggagagattatgttaacttcctagtggtgagaataccatgggatgggagaagggccagtgagtgggatgggaatgagcttcatcaggaacagatttcagactctgcagggtgcaccggttctagcctcaaataacaacattgcaaggaggtggactacagggtccacaccctctgtccttcggggcccatggtcaggccattccctctttgttttgctcctagaggatgagcatgtaagatgagatcaggagggaaattgggtgctctgcctcaggctgttaaaatgctgctacctgcattctaaaacgtgcaagtcatgccccacaagacacctccttagggcagcatccactgtggtgtgccagcctgacacccctgcagtcacggtgtttgaatggcagctgatgctggcccacccagagtatcggtgcatctctcctaaagccacagttcagcactgcatgttgaccaggcggatatcctataatatagatgctcgtttggatccaaaaggaaaaccattaaaaataaaagaaagatgaaaaactttaatgttttgggggggataaaagaaaagaataaataaaaccttgttgt

SEQ ID NO: 2740 - DNA, 14886 bp, Homo sapiens
  source 1..14886: mol_type = unassigned DNA; mol_type = unassigned DNA
atggctcgcttcggggaggcggtggtcgccaggccagggtccggcgatggagactcggaccagagcaggaaccggcaaggaacccccgtgccggcctcggggcaggcggccgcctacaagcagacgaaagcacagagggcgcggactatggctttgtacaaccccattcccgtccggcagaactgtttcaccgtcaacagatccctgttcatcttcggagaagataacattgtcaggaaatatgccaagaagctcatcgattggccaccatttgagtacatgatcctggccaccatcattgccaactgcatcgtcctggccctggagcagcatcttcctgaggatgacaagacccccatgtcccgaagactggagaagacagaaccttatttcattgggatcttttgctttgaagctgggatcaaaattgtggccctggggttcatcttccataagggctcttacctccgcaatggctggaatgtcatggacttcatcgtggtcctcagtggcatcctggccactgcaggaacccacttcaatactcacgtggacctgaggaccctccgggctgtgcgtgtcctgcggcctttgaagctcgtgtcagggatacctagcctgcagattgtgttgaagtccatcatgaaggccatggtacctcttctgcagattggccttctgctcttctttgccatcctgatgtttgctatcattggtttggagttctacagtggcaagttacatcgagcatgcttcatgaacaattcaggtattctagaaggatttgacccccctcacccatgtggtgtgcagggctgcccagctggttatgaatgcaaggactggatcggccccaatgatgggatcacccagtttgataacatcctttttgctgtgctgactgtcttccagtgcatcaccatggaagggtggaccactgtgctgtacaataccaatgatgccttaggagccacctggaattggctgtacttcatccccctcatcatcattggatccttctttgttctcaacctagtcctgggagtgctttccggggaatttgccaaagagagagagagagtggagaaccgaagggctttcatgaagctgcggcgccagcagcagattgagcgtgagctgaatggctaccgtgcctggatagacaaagcagaggaagtcatgctcgctgaagaaaataaaaatgctggaacatccgccttagaagtgcttcgaagggcaaccatcaagaggagccggacagaggccatgactcgagactccagtgatgagcactgtgttgatatctcctctgtgggcacacctctggcccgagccagtatcaaaagtgcaaaggtagacggggtctcttatttccggcacaaggaaaggcttctgcgcatctccattcgccacatggttaaatcccaggtgttttactggattgtgctgagccttgtggcactcaacactgcctgtgtggccattgtccatcacaaccagccccagtggctcacccacctcctctactatgcagaatttctgtttctgggactcttcctcttggagatgtccctgaagatgtatggcatggggcctcgcctttattttcactcttcattcaactgctttgattttggggtcacagtgggcagtatctttgaagtggtctgggcaatcttcagacctggtacgtcttttggaatcagtgtcttgcgagccctccggcttctaagaatatttaaaataaccaagtattgggcttccctacggaatttggtggtctccttgatgagctcaatgaagtctatcatcagtttgcttttcctcctcttcctcttcatcgttgtctttgctctcctaggaatgcagttatttggaggcaggtttaactttaatgatgggactccttcggcaaattttgataccttccctgcagccatcatgactgtgttccagatcctgacgggtgaggactggaatgaggtgatgtacaatgggatccgctcccagggtggggtcagctcaggcatgtggtctgccatctacttcattgtgctcaccttgtttggcaactacacgctactgaatgtgttcttggctatcgctgtggataatctcgccaacgcccaggaactgaccaaggatgaacaggaggaagaagaggccttcaaccagaaacatgcactgcagaaggccaaggaggtcagcccgatgtctgcacccaacatgccttcgatcgaaagagacagaaggagaagacaccacatgtcgatgtgggagccacgcagcagccacctgagggagcggaggcgccggcaccacatgtccgtgtgggagcagcgtaccagccagctgaggaagcacatgcagatgtccagccaggaggccctcaacagagaggaggcgccgaccatgaacccgctcaaccccctcaacccgctcagctccctcaacccgctcaatgcccaccccagcctttatcggcgacccagggccattgagggcctggccctgggcctggccctggagaagttcgaggaggagcgcatcagccgtggggggtccctcaagggggatggaggggaccgatccagtgccctggacaaccagaggacccctttgtccctgggccagcgggagccaccatggctggccaggccctgtcatggaaactgtgacccgactcagcaggaggcagggggaggagaggctgtggtgacctttgaggaccgggccaggcacaggcagagccaacggcgcagccggcatcgccgcgtcaggacagaaggcaaggagtcctcttcagcctcccggagcaggtctgccagccaggaacgcagtctggatgaagccatgcccactgaaggggagaaggaccatgagctcaggggcaaccatggtgccaaggagccaacgatccaagaagagagagcccaggatttaaggaggaccaacagtctgatggtgtccagaggctccgggctggcaggaggccttgatgaggctgacacccccctagtcctgccccatcctgagctggaagtggggaagcacgtggtgctgacggagcaggagccagaaggcagcagtgagcaggccctgctggggaatgtgcagctagacatgggccgggtcatcagccagagcgagcctgacctctcctgcatcacggccaacacggacaaggccaccaccgagagcaccagcgtcaccgtcgccatccccgacgtggaccccttggtggactcaaccgtggtgcacattagcaacaagacggatggggaagccagtcccttgaaggaggcagagatcagagaggatgaggaggaggtggagaagaagaagcagaagaaggagaagcgtgagacaggcaaagccatggtgccccacagctcaatgttcatcttcagcaccaccaacccgatccggagggcctgccactacatcgtgaacctgcgctactttgagatgtgcatcctcctggtgattgcagccagcagcatcgccctggcggcagaggaccccgtcctgaccaactcggagcgcaacaaagtcctgaggtattttgactatgtgttcacgggcgtgttcacctttgagatggttataaagatgatagaccaaggcttgatcctgcaggatgggtcctacttccgagacttgtggaacatcctggactttgtggtggtcgttggcgcattggtggcctttgctctggcgaacgctttgggaaccaacaaaggacgggacatcaagaccatcaagtctctgcgggtgctccgagttctaaggccactgaaaaccatcaagcgcttgcccaagctcaaggccgtcttcgactgcgtagtgacctccttgaagaatgtcttcaacatactcattgtgtacaagctcttcatgttcatctttgctgtcatcgcagttcagctcttcaagggaaagttcttttattgcacggacagttccaaggacacagagaaggagtgcataggcaactatgtagatcatgagaaaaacaagatggaggtgaagggccgggaatggaagcgccatgaattccactacgacaacattatctgggccctgctgaccctcttcaccgtctccacaggggaaggatggcctcaagttctgcagcactctgtagatgtgacagaggaagaccgaggcccaagccgcagcaaccgcatggagatgtctatcttttatgtagtctactttgtggtcttccccttcttctttgtcaatatctttgtggctctcatcatcatcaccttccaggagcaaggggataagatgatggaggagtgcagcctggagaagaatgagagggcgtgcatcgacttcgccatcagcgccaaacctctcacccgctacatgccgcagaacagacacaccttccagtaccgcgtgtggcactttgtggtgtctccgtcctttgagtacaccattatggccatgatcgccttgaatactgttgtgctgatgatgaagtattattctgctccctgtacctatgagctggccctgaagtacctgaatatcgccttcaccatggtgttttccctggaatgtgtcctgaaggtcatcgcttttggctttttgaactatttccgagacacctggaatatctttgacttcatcaccgtgattggcagtatcacagaaattatcctgacagacagcaagctggtgaacaccagtggcttcaatatgagctttctgaagctcttccgagctgcccgcctcataaagctcctgcgtcagggctataccatacgcattttgctgtggacctttgtgcagtcctttaaggccctcccttatgtctgccttttaattgccatgcttttcttcatttatgccatcattgggatgcaggtatttggaaacataaaattagacgaggagagtcacatcaaccggcacaacaacttccggagtttctttgggtccctaatgctactcttcaggagtgccacaggtgaggcctggcaggagattatgctgtcatgccttggggagaagggctgtgagcctgacaccaccgcaccatcagggcagaacgagaacgaacgctgcggcaccgatctggcctacgtgtactttgtctccttcatcttcttctgctccttcttgatgctcaacctgtttgtggccgtcatcatggacaactttgagtacctgactcgggactcctccatcctggggcctcaccacttggacgagtttgtccgcgtctgggcagaatatgaccgagcagcatgtggccgcatccattacactgagatgtatgaaatgctgactctcatgtcacctccgctaggcctcggcaagagatgtccctccaaagtggcatataagaggttggtcctgatgaacatgccagtagctgaggacatgacggtccacttcacctccacacttatggctctgatccggacagctctggacattaaaattgccaaaggtggtgcagacaggcagcagctagactcagagctacaaaaggagaccctagccatctggcctcacctatcccagaagatgctggatctgcttgtgcccatgcccaaagcctctgacctgactgtgggcaaaatctatgcagcaatgatgatcatggactactataagcagagtaaggtgaagaagcagaggcagcagctggaggaacagaaaaatgcccccatgttccagcgcatggagccttcatctctgcctcaggagatcattgctaatgccaaagccctgccttacctccagcaggaccccgtttcaggcctgagtggccggagtggatacccttcgatgagtccactctctccccaggatatattccagttggcttgtatggaccccgccgatgacggacagttccaagaacggcagtctctggagccagaggttagtgaattaaaaagcgtgcagccctctaaccatggcatctaccttccttcggacacccaggagcatgcgggatctgggagggcatcttctatgccacgtctgactgtggatccccaggtggtgacagaccctagctccatgagacgttcattttccactattcgggataagcgttcaaattcctcgtggttggaggaattctccatggagcgaagcagtgaaaatacctacaagtcccgtcgccggagttaccactcctccttgcggctgtcagcccaccgcctgaactctgattcaggccacaagtctgacactcaccgctcagggggcagggagcggggacgatcaaaagagcgaaagcatcttctctctcctgatgtctcccgctgcaattcagaagagcgagggacccaggctgactgggagtccccagagcgccgtcaatccaggtcacccagtgagggcaggtcacagacgcccaacagacagggcacaggttccctaagtgagagctccatcccctctgtctctgacaccagcaccccaagaagaagtcgtcggcagctcccacccgtcccgccaaagccccggcccctcctttcctacagctccctgattcgacacgcgggcagcatctctccacctgctgatggaagcgaggagggctccccgctgacctcccaagctctggagagcaacaatgcttgcctgaccgagtcttccaactctccgcacccccagcagagccaacatgcctccccacagcgctacatctccgagccctacttggccctgcacgaagactcccacgcctcagactgtggtgaggaggagacgctcactttcgaagcagccgtggctactagcctgggccgttccaacaccatcggctcagccccacccctgcggcatagctggcagatgcccaacgggcactatcggcggcggaggcgcggggggcctgggccaggcatgatgtgtggggctgtcaacaacctgctaagtgacacggaagaagatgacaaatgctagaggctgctcccccctccgatgcatgctcttctctcacatggagaaaaccaagacagaattgggaagccagtgcggcccgggggggaggaagagggaaaaggaagatggaaggacaccatgcattatcagagaagaggaagtaaaggacaatcagaacaccagtcaaacccaccaaattgctttattcccctttgcaagatgggcactgccatagttctgcctctttgctggggaaagaaaccaggaacgtggagggttattactgcgggagaagggacacgaggatggctttgcttccccttgccccttcccacttttctaaaagctgtggagggatctagctggcctatgtctacactcagtgccctgagaagcctggaagactttctggctcttaactggggagtagtggagaccataggagaggactctcctccctcaccagctcttacgcctcagccagcaccactgccaccagggcaactgcagcagcatctcatgcataaccctgtggcttgcttcccccagggcagcacaggctaagtcaggaacatcggatgccagggagggaggagaaagccgaagcgaaaggggtcagggtgctgaggcaacagcagcaagggctggtctggacaagaaaagccatagcccggcagcccctaccatgagggagacagagaaacagaactggtggtgctggggggtatagccccccatccttgaggcctgtcacccacacagtaggtgctgagagttaggacaggtcaggaagtcccccagggtccacaaaggtgcctgaggctctggtaagggtgaagataaaagtatttaacaaccgctatggcatcaatgtaagtggagtttggtcctagtgccggagcccatgctattccaggcattggctctttagatgccagtcatgggggaaccctgagggtgtgggtagagtagcaggggccacctaagagattaaaaacagtctgttttccaaccagtgtggaagcaattaaatatgcgtaacagtgctacggccacaccagcacctcctggctgaaggtcagcccacactctggtccatgaggcagcaaggccagtgctgtgccaagcccggtaaggccaagtgccgaggcccagccttccctgccactcctctgagagggcagaacacacatatccaagtaggctacccaccactgggtagggatttctgtaaagatgggaaaggctgatagattgaaataagcttctgtgaaagtctggatttactgaggacctcccctgaggagggaccgttgggaccgcagattctgcagctggtgtggggttcaggtcagtttgtcaggatgctttaaggtgattagtaaatatacctcagcttagacttgggctgctccttctagcaaagcaggctccagtggggcctcatcatacaggatgacaagactggggccctgttcaccttgaacatgcccctgggccaagatggggcttcacccctccccagagtaagagctggggctgacagtcccaccctgtcattcctaatagcccaaacgcagaagcactgagcaagagagccctttcttgccaagccagtgctcttttggtatatggcatacagctccattggaggggacacatcactggctttatctggtggaaatgtacctttcccttaagttcctccttagtgccatcacagcaggtgaatgggtgccctacggggccctccttcccccaccaggaacagatggaacctgccacccaggatcctgatctgccctgcactgagcactcagtggataaacactcctccagcccagacacactcctcctcttgggcaggagcaatccagagttgttatttttcttagaaggagcctcttttccctctattttttaaattgaaatataatagctgcatcagccctgaaaagccaaattcaaccacatggctggagaatcatttgtcatggccccgccttctcttctgatactaatggagcttcatgacccacggtcagcccccaaaccaaagttgtcccaacagaggaggccagtgaggcagagacagagctctcccactctcagaccctcttttgtcttcattttcctctcccacttagcacatgtgtgcttgagggtggctgggaatgtgatatacagcaccctgatcctaacaggtgtgattgttacgtaagacgctgatactgggccttgtattgcttttaaagtttcctctgctcagcatcatttcatgccaaagtgctgctatgggctgctttgtgtgcacaaaattgctttttccacctcggaaatgcagctttccctagggggaggcctacaacaggacgaccattctgagccagtgagtctattgcatggtgttttgagaaagggaattttagtgacaccttatgccatttcaagaggagaaatgcaggctggcagagcaatttccagaaatggaatttgcctgcaaatagtataaacaacactaaatttactgtgccaggaaatcttcctgaactccttgaactcatacacacaggtatttgagtcctgaataaagtgttggaaagcactgcagatgcggtcacctgactgaccacctgggttttctattaccagtgaatttcttttattcaccttcccttgaccaagaaattgggtttcttttccctcagcctgcacttactcttctattaagaccagaaaataaaataattttccgttgagtcacaaactcatcatcttgtttggtgttctgctgcctctgaacaaaagtgaatgccagccttcccttgctgggtgtcagagtctgcctcccttgaaaagaggcccctgtagaccccaacacctattcttttctctggttaattacagcagcatctgagaaattccatgcaaaagaagactacaaccagtgtttcagatataccacaagatcaaatttgggcactggtggtccacctcagaagactcttgagtcatatattcagtttctcttgctaatatatgactcgtcttcaccatctcctcaaaacaagagcaaagccaagatagaggaaggtaaaaggaggaggaaaggaaaccaaggcagggagatgttctaagtaggtttgcatttagttacccctcatttcacttaaggctccagacagactccaggtagggaatgcatgctgtctctttctctgtgtctgtctccccatctcctagaggacagagtgccagcgacctctggacaggggcagggctccagccaaggtgcccctgagccagggtcaacatagaatttcctgccccgtgaagggctggcaccagctagcatccccttggctccacatgagtcatgaacacaattgtcagtgggggtctctgctgctcttctggctgaagaatctgtttttcttctgggcttcacttgtagttcctattcaatgtctccatagggcactgagatcaccaagaacattacccagaagctgaagtccaaatgttctagattttgacctctcttgactctggggccacaaagagaaggccccataatccacctctcagccagtatctcccttctttgcacagattcctcccaaccccatagagcctatgtggtgagcatgagggtcgtcttccctctgttctcccatcccagcctctgttttgctgcatgttagcgctgatccagctcctgagatggttaattccacccaatccaagcttatttgcttgcctgactgactccaccactctctcagctatgggggaatattgcattctaatgaaatagggtttggaactcacctggtgctcctcgcaagacaactgacacaaggtgtagggtgtgggggtggacaaaatgcccacctactggataaaagctcactgcaggaaaatgaggtctcctggcataatgcaacaaaaatctcatataattttgatttttaaaaagttgttctcaatttttcattacatcctacttctcagccctctggatgtttcatttttttggacaaagtgtttctttagtggttggggccagggacaggttgagggatatttctcggctcatttataagatataaatattatgaggttgtatgtaaagaaagggcaaacgtacagcagaaggggagcaaatagctacctttcaaggattttgagatttgaaggttaaggaatttttactgctatttttgttcatcagtttcatgtctgttatgttttgagatcctcagaggcctagggttagcgtataccaagaatcctggtgagaggcgttgccatgccttggggtgaattcttccccactagctctctcacccagcctacaagtccttctctcatagatcccagagcaatgggcaccgtccaggaggtacaggagaggactttatgatgcaggaaagaaggaagaagtgggtcccttgcaagtggccagacagggaatgatggtttgactccagaaatcaggaatcaggttcaggtttggataacttctctttaaaatatctccacattgagactcttattttaacaaaatccaaacaaaattaactcagggcttgtgacctaacctttgtaagaaggtgatcaaagagatcctacattaataagcactgcctgtagcaccagctttgtctttttgtcttttgttgtttctttcctgaaccaccctgtacatcatagccaggtctaccccaaatagagcagcagctgatggcttctctgctgtctgtggagggagggctcggctgcagacctatggtgttttgtcagctgttaggtgctacagcccacccagtcagagtacatagacatagcgctttaagggacaaaggacaaacagaactatctttgctttccggaggccatctttttctttccttgaatcctttctgctttaaacttctgaggtttatgcatcccagagaggtcacaccaagccaaagagaaaaaattcatagattgtcccagcctacccaaagggcctgaaaagcctctctaaacaaaactcaagatagctgagaagtatgaatggggttcacagcaaagtccaattgatggcttttgaggctgggacacccccaaactgcccttctgtttttgtagttttgctttcttccacccaccctctctccgcatgctgtaagttaggggagttagtatcttgaacttctaaatgcaaaaggagattttataataagccatgctacctgtaaatacattattgaggtttgcatttttatttttggaggtatgaaagagttgagtagaccaagtcaaaagaggtgtggggatttatgtttatttttatttgtttggggttgtttggttggtggctgggtttcttgtaacagacctattctggaatagcaaagaaggataccttggtgatctgcaatgtttctgaatctgtttctctttaggaagtgattgccatcaaatttagtgatatgatatttgagtcaaaaatctgaggttatagtaccagctgtcttttctctctggtctcctttttgtcgtctttctctttctgtctaaattggcctctgtcttttcctaaggacttaaaatataacccaaattaatgaagaactgccccaaaacttcagtgaaagccaaggaggtacagaattttttcaggacatctttaaccaatacaaaatttatgtcttaagaagataatttttacaatagtgtagtaatctgataaatgaaaactattggaagtcaatagttttttatattccagctttctgtattcaaacttgtgccttcagcaagcatctcttcactttctttcccttgtcaattgaaacatgaatgtttggctaactcatgatgtaaagtgtctgttaagttaataatacataatttaaagcacttagtctccacaaagcaatttagaaaaatcttcacttgttagatcccatgaagtacctatgaaattctcagcattgctataagcatttgattttttttaaggaaacttcctgtttaatggaatctgaatccaagatttgctttaatttcactctattcttcccattttcccttattcttcttgttgtctctctaattaaaaaaaaaaaaaacctaggcttttttttttctatccagaaagttgggttttcatgatctgagcttccttatgtctccttctctttgtgcaaacttaaaccagtcatagattgtcacccagacatattctccaacccagcattggaaatctgaacgaatcttttctctttttgtcctacaagtttgtcagagatgagaatggattgctgtctacattctacaaccagaccctagactttataccaggctgtgccacttcctcttcacttcactcagaggatggccccaaaactgaaaaggaaatgaaataatcaaatataccaaatccgaatttgactttatttgatgactcaatattttccttccagtactctaatttttttttatggcaatggcctatatggcacaagaaccaccacttaaagcaaatctgttgaacatttttataagggatgagcaagaaaaacacactccaaaattttaaagtgccattaatcaatttttaagaataaaggtaatatgaaatgagggctaaacaatgtaatataactgccagttaaggtagacagtagttgtggtcttagttacatttgatatggagttgtgtaatattaagcagatcccagtggagttagtaaaaacataggtattgagttttaatggctaccaattgggatatatacttagcctgcaggctgaactttagtcagtgtttttctatcatgttgttttgtgaacaagtcaaaatttatacaaagctaccctaagtgctgcaattgcagaggaacttgcctcttcgtgatattagagggcagtccaactccgctcaaactgagtccaagatttgaattcatccagaaaaacaaatggaggagaaaagcctaatgcaccacatgtgtttggcatttcatggctgggacaatggagtagagggtaggaagacaagctgtagaacaaaagcaaagtgaggtagaaagtaacaggtcccagacgaggacagacttagagatgtgtaaccttggatcctctttttcacttagaatatgggtaaacttcttagcacaagactggattaagagaagttctttctgttaaactcacctagggtagtggctttgaaggcctcagaggattaatagattcccaaaattttcttccagacctgggagatggagagaaagaggttcttgctttaaagcggctcgaagacaatctttatgacttcagcaactcttcaacatagtagcaccaataaaggagagattatgttaacttcctagtggtgagaataccatgggatgggagaagggccagtgagtgggatgggaatgagcttcatcaggaacagatttcagactctgcagggtgcaccggttctagcctcaaataacaacattgcaaggaggtggactacagggtccacaccctctgtccttcggggcccatggtcaggccattccctctttgttttgctcctagaggatgagcatgtaagatgagatcaggagggaaattgggtgctctgcctcaggctgttaaaatgctgctacctgcattctaaaacgtgcaagtcatgccccacaagacacctccttagggcagcatccactgtggtgtgccagcctgacacccctgcagtcacggtgtttgaatggcagctgatgctggcccacccagagtatcggtgcatctctcctaaagccacagttcagcactgcatgttgaccaggcggatatcctataatatagatgctcgtttggatccaaaaggaaaaccattaaaaataaaagaaagatgaaaaactttaatgttttgggggggataaaagaaaagaataaataaaaccttgttgt

SEQ ID NO: 2741 - DNA, 14700 bp, Homo sapiens
  source 1..14700: mol_type = unassigned DNA; mol_type = unassigned DNA
atggctcgcttcggggaggcggtggtcgccaggccagggtccggcgatggagactcggaccagagcaggaaccggcaaggaacccccgtgccggcctcggggcaggcggccgcctacaagcagacgaaagcacagagggcgcggactatggctttgtacaaccccattcccgtccggcagaactgtttcaccgtcaacagatccctgttcatcttcggagaagataacattgtcaggaaatatgccaagaagctcatcgattggccaccatttgagtacatgatcctggccaccatcattgccaactgcatcgtcctggccctggagcagcatcttcctgaggatgacaagacccccatgtcccgaagactggagaagacagaaccttatttcattgggatcttttgctttgaagctgggatcaaaattgtggccctggggttcatcttccataagggctcttacctccgcaatggctggaatgtcatggacttcatcgtggtcctcagtggcatcctggccactgcaggaacccacttcaatactcacgtggacctgaggaccctccgggctgtgcgtgtcctgcggcctttgaagctcgtgtcagggatacctagcctgcagattgtgttgaagtccatcatgaaggccatggtacctcttctgcagattggccttctgctcttctttgccatcctgatgtttgctatcattggtttggagttctacagtggcaagttacatcgagcatgcttcatgaacaattcaggtattctagaaggatttgacccccctcacccatgtggtgtgcagggctgcccagctggttatgaatgcaaggactggatcggccccaatgatgggatcacccagtttgataacatcctttttgctgtgctgactgtcttccagtgcatcaccatggaagggtggaccactgtgctgtacaataccaatgatgccttaggagccacctggaattggctgtacttcatccccctcatcatcattggatccttctttgttctcaacctagtcctgggagtgctttccggggaatttgccaaagagagagagagagtggagaaccgaagggctttcatgaagctgcggcgccagcagcagattgagcgtgagctgaatggctaccgtgcctggatagacaaagcagaggaagtcatgctcgctgaagaaaataaaaatgctggaacatccgccttagaagtgcttcgaagggcaaccatcaagaggagccggacagaggccatgactcgagactccagtgatgagcactgtgttgatatctcctctgtgggcacacctctggcccgagccagtatcaaaagtgcaaaggtagacggggtctcttatttccggcacaaggaaaggcttctgcgcatctccattcgccacatggttaaatcccaggtgttttactggattgtgctgagccttgtggcactcaacactgcctgtgtggccattgtccatcacaaccagccccagtggctcacccacctcctctactatgcagaatttctgtttctgggactcttcctcttggagatgtccctgaagatgtatggcatggggcctcgcctttattttcactcttcattcaactgctttgattttggggtcacagtgggcagtatctttgaagtggtctgggcaatcttcagacctggtacgtcttttggaatcagtgtcttgcgagccctccggcttctaagaatatttaaaataaccaagtattgggcttccctacggaatttggtggtctccttgatgagctcaatgaagtctatcatcagtttgcttttcctcctcttcctcttcatcgttgtctttgctctcctaggaatgcagttatttggaggcaggtttaactttaatgatgggactccttcggcaaattttgataccttccctgcagccatcatgactgtgttccagatcctgacgggtgaggactggaatgaggtgatgtacaatgggatccgctcccagggtggggtcagctcaggcatgtggtctgccatctacttcattgtgctcaccttgtttggcaactacacgctactgaatgtgttcttggctatcgctgtggataatctcgccaacgcccaggaactgaccaaggatgaacaggaggaagaagaggccttcaaccagaaacatgcactgcagaaggccaaggaggtcagcccgatgtctgcacccaacatgccttcgatcgagagggagcggaggcgccggcaccacatgtccgtgtgggagcagcgtaccagccagctgaggaagcacatgcagatgtccagccaggaggccctcaacagagaggaggcgccgaccatgaacccgctcaaccccctcaacccgctcagctccctcaacccgctcaatgcccaccccagcctttatcggcgacccagggccattgagggcctggccctgggcctggccctggagaagttcgaggaggagcgcatcagccgtggggggtccctcaagggggatggaggggaccgatccagtgccctggacaaccagaggacccctttgtccctgggccagcgggagccaccatggctggccaggccctgtcatggaaactgtgacccgactcagcaggaggcagggggaggagaggctgtggtgacctttgaggaccgggccaggcacaggcagagccaacggcgcagccggcatcgccgcgtcaggacagaaggcaaggagtcctcttcagcctcccggagcaggtctgccagccaggaacgcagtctggatgaagccatgcccactgaaggggagaaggaccatgagctcaggggcaaccatggtgccaaggagccaacgatccaagaagagagagcccaggatttaaggaggaccaacagtctgatggtgtccagaggctccgggctggcaggaggccttgatgaggctgacacccccctagtcctgccccatcctgagctggaagtggggaagcacgtggtgctgacggagcaggagccagaaggcagcagtgagcaggccctgctggggaatgtgcagctagacatgggccgggtcatcagccagagcgagcctgacctctcctgcatcacggccaacacggacaaggccaccaccgagagcaccagcgtcaccgtcgccatccccgacgtggaccccttggtggactcaaccgtggtgcacattagcaacaagacggatggggaagccagtcccttgaaggaggcagagatcagagaggatgaggaggaggtggagaagaagaagcagaagaaggagaagcgtgagacaggcaaagccatggtgccccacagctcaatgttcatcttcagcaccaccaacccgatccggagggcctgccactacatcgtgaacctgcgctactttgagatgtgcatcctcctggtgattgcagccagcagcatcgccctggcggcagaggaccccgtcctgaccaactcggagcgcaacaaagtcctgaggtattttgactatgtgttcacgggcgtgttcacctttgagatggttataaagatgatagaccaaggcttgatcctgcaggatgggtcctacttccgagacttgtggaacatcctggactttgtggtggtcgttggcgcattggtggcctttgctctggcgaacgctttgggaaccaacaaaggacgggacatcaagaccatcaagtctctgcgggtgctccgagttctaaggccactgaaaaccatcaagcgcttgcccaagctcaaggccgtcttcgactgcgtagtgacctccttgaagaatgtcttcaacatactcattgtgtacaagctcttcatgttcatctttgctgtcatcgcagttcagctcttcaagggaaagttcttttattgcacggacagttccaaggacacagagaaggagtgcataggcaactatgtagatcatgagaaaaacaagatggaggtgaagggccgggaatggaagcgccatgaattccactacgacaacattatctgggccctgctgaccctcttcaccgtctccacaggggaaggatggcctcaagttctgcagcactctgtagatgtgacagaggaagaccgaggcccaagccgcagcaaccgcatggagatgtctatcttttatgtagtctactttgtggtcttccccttcttctttgtcaatatctttgtggctctcatcatcatcaccttccaggagcaaggggataagatgatggaggagtgcagcctggagaagaatgagagggcgtgcatcgacttcgccatcagcgccaaacctctcacccgctacatgccgcagaacagacacaccttccagtaccgcgtgtggcactttgtggtgtctccgtcctttgagtacaccattatggccatgatcgccttgaatactgttgtgctgatgatgaagtattattctgctccctgtacctatgagctggccctgaagtacctgaatatcgccttcaccatggtgttttccctggaatgtgtcctgaaggtcatcgcttttggctttttgaactatttccgagacacctggaatatctttgacttcatcaccgtgattggcagtatcacagaaattatcctgacagacagcaagctggtgaacaccagtggcttcaatatgagctttctgaagctcttccgagctgcccgcctcataaagctcctgcgtcagggctataccatacgcattttgctgtggacctttgtgcagtcctttaaggccctcccttatgtctgccttttaattgccatgcttttcttcatttatgccatcattgggatgcaggtatttggaaacataaaattagacgaggagagtcacatcaaccggcacaacaacttccggagtttctttgggtccctaatgctactcttcaggagtgccacaggtgaggcctggcaggagattatgctgtcatgccttggggagaagggctgtgagcctgacaccaccgcaccatcagggcagaacgagaacgaacgctgcggcaccgatctggcctacgtgtactttgtctccttcatcttcttctgctccttcttgatgctcaacctgtttgtggccgtcatcatggacaactttgagtacctgactcgggactcctccatcctggggcctcaccacttggacgagtttgtccgcgtctgggcagaatatgaccgagcagcatgtggccgcatccattacactgagatgtatgaaatgctgactctcatgtcacctccgctaggcctcggcaagagatgtccctccaaagtggcatataagaggttggtcctgatgaacatgccagtagctgaggacatgacggtccacttcacctccacacttatggctctgatccggacagctctggacattaaaattgccaaaggtggtgcagacaggcagcagctagactcagagctacaaaaggagaccctagccatctggcctcacctatcccagaagatgctggatctgcttgtgcccatgcccaaagcctctgacctgactgtgggcaaaatctatgcagcaatgatgatcatggactactataagcagagtaaggtgaagaagcagaggcagcagctggaggaacagaaaaatgcccccatgttccagcgcatggagccttcatctctgcctcaggagatcattgctaatgccaaagccctgccttacctccagcaggaccccgtttcaggcctgagtggccggagtggatacccttcgatgagtccactctctccccaggatatattccagttggcttgtatggaccccgccgatgacggacagttccaagaacggcagtctctggtggtgacagaccctagctccatgagacgttcattttccactattcgggataagcgttcaaattcctcgtggttggaggaattctccatggagcgaagcagtgaaaatacctacaagtcccgtcgccggagttaccactcctccttgcggctgtcagcccaccgcctgaactctgattcaggccacaagtctgacactcaccgctcagggggcagggagcggggacgatcaaaagagcgaaagcatcttctctctcctgatgtctcccgctgcaattcagaagagcgagggacccaggctgactgggagtccccagagcgccgtcaatccaggtcacccagtgagggcaggtcacagacgcccaacagacagggcacaggttccctaagtgagagctccatcccctctgtctctgacaccagcaccccaagaagaagtcgtcggcagctcccacccgtcccgccaaagccccggcccctcctttcctacagctccctgattcgacacgcgggcagcatctctccacctgctgatggaagcgaggagggctccccgctgacctcccaagctctggagagcaacaatgcttgcctgaccgagtcttccaactctccgcacccccagcagagccaacatgcctccccacagcgctacatctccgagccctacttggccctgcacgaagactcccacgcctcagactgtggtgaggaggagacgctcactttcgaagcagccgtggctactagcctgggccgttccaacaccatcggctcagccccacccctgcggcatagctggcagatgcccaacgggcactatcggcggcggaggcgcggggggcctgggccaggcatgatgtgtggggctgtcaacaacctgctaagtgacacggaagaagatgacaaatgctagaggctgctcccccctccgatgcatgctcttctctcacatggagaaaaccaagacagaattgggaagccagtgcggcccgggggggaggaagagggaaaaggaagatggaaggacaccatgcattatcagagaagaggaagtaaaggacaatcagaacaccagtcaaacccaccaaattgctttattcccctttgcaagatgggcactgccatagttctgcctctttgctggggaaagaaaccaggaacgtggagggttattactgcgggagaagggacacgaggatggctttgcttccccttgccccttcccacttttctaaaagctgtggagggatctagctggcctatgtctacactcagtgccctgagaagcctggaagactttctggctcttaactggggagtagtggagaccataggagaggactctcctccctcaccagctcttacgcctcagccagcaccactgccaccagggcaactgcagcagcatctcatgcataaccctgtggcttgcttcccccagggcagcacaggctaagtcaggaacatcggatgccagggagggaggagaaagccgaagcgaaaggggtcagggtgctgaggcaacagcagcaagggctggtctggacaagaaaagccatagcccggcagcccctaccatgagggagacagagaaacagaactggtggtgctggggggtatagccccccatccttgaggcctgtcacccacacagtaggtgctgagagttaggacaggtcaggaagtcccccagggtccacaaaggtgcctgaggctctggtaagggtgaagataaaagtatttaacaaccgctatggcatcaatgtaagtggagtttggtcctagtgccggagcccatgctattccaggcattggctctttagatgccagtcatgggggaaccctgagggtgtgggtagagtagcaggggccacctaagagattaaaaacagtctgttttccaaccagtgtggaagcaattaaatatgcgtaacagtgctacggccacaccagcacctcctggctgaaggtcagcccacactctggtccatgaggcagcaaggccagtgctgtgccaagcccggtaaggccaagtgccgaggcccagccttccctgccactcctctgagagggcagaacacacatatccaagtaggctacccaccactgggtagggatttctgtaaagatgggaaaggctgatagattgaaataagcttctgtgaaagtctggatttactgaggacctcccctgaggagggaccgttgggaccgcagattctgcagctggtgtggggttcaggtcagtttgtcaggatgctttaaggtgattagtaaatatacctcagcttagacttgggctgctccttctagcaaagcaggctccagtggggcctcatcatacaggatgacaagactggggccctgttcaccttgaacatgcccctgggccaagatggggcttcacccctccccagagtaagagctggggctgacagtcccaccctgtcattcctaatagcccaaacgcagaagcactgagcaagagagccctttcttgccaagccagtgctcttttggtatatggcatacagctccattggaggggacacatcactggctttatctggtggaaatgtacctttcccttaagttcctccttagtgccatcacagcaggtgaatgggtgccctacggggccctccttcccccaccaggaacagatggaacctgccacccaggatcctgatctgccctgcactgagcactcagtggataaacactcctccagcccagacacactcctcctcttgggcaggagcaatccagagttgttatttttcttagaaggagcctcttttccctctattttttaaattgaaatataatagctgcatcagccctgaaaagccaaattcaaccacatggctggagaatcatttgtcatggccccgccttctcttctgatactaatggagcttcatgacccacggtcagcccccaaaccaaagttgtcccaacagaggaggccagtgaggcagagacagagctctcccactctcagaccctcttttgtcttcattttcctctcccacttagcacatgtgtgcttgagggtggctgggaatgtgatatacagcaccctgatcctaacaggtgtgattgttacgtaagacgctgatactgggccttgtattgcttttaaagtttcctctgctcagcatcatttcatgccaaagtgctgctatgggctgctttgtgtgcacaaaattgctttttccacctcggaaatgcagctttccctagggggaggcctacaacaggacgaccattctgagccagtgagtctattgcatggtgttttgagaaagggaattttagtgacaccttatgccatttcaagaggagaaatgcaggctggcagagcaatttccagaaatggaatttgcctgcaaatagtataaacaacactaaatttactgtgccaggaaatcttcctgaactccttgaactcatacacacaggtatttgagtcctgaataaagtgttggaaagcactgcagatgcggtcacctgactgaccacctgggttttctattaccagtgaatttcttttattcaccttcccttgaccaagaaattgggtttcttttccctcagcctgcacttactcttctattaagaccagaaaataaaataattttccgttgagtcacaaactcatcatcttgtttggtgttctgctgcctctgaacaaaagtgaatgccagccttcccttgctgggtgtcagagtctgcctcccttgaaaagaggcccctgtagaccccaacacctattcttttctctggttaattacagcagcatctgagaaattccatgcaaaagaagactacaaccagtgtttcagatataccacaagatcaaatttgggcactggtggtccacctcagaagactcttgagtcatatattcagtttctcttgctaatatatgactcgtcttcaccatctcctcaaaacaagagcaaagccaagatagaggaaggtaaaaggaggaggaaaggaaaccaaggcagggagatgttctaagtaggtttgcatttagttacccctcatttcacttaaggctccagacagactccaggtagggaatgcatgctgtctctttctctgtgtctgtctccccatctcctagaggacagagtgccagcgacctctggacaggggcagggctccagccaaggtgcccctgagccagggtcaacatagaatttcctgccccgtgaagggctggcaccagctagcatccccttggctccacatgagtcatgaacacaattgtcagtgggggtctctgctgctcttctggctgaagaatctgtttttcttctgggcttcacttgtagttcctattcaatgtctccatagggcactgagatcaccaagaacattacccagaagctgaagtccaaatgttctagattttgacctctcttgactctggggccacaaagagaaggccccataatccacctctcagccagtatctcccttctttgcacagattcctcccaaccccatagagcctatgtggtgagcatgagggtcgtcttccctctgttctcccatcccagcctctgttttgctgcatgttagcgctgatccagctcctgagatggttaattccacccaatccaagcttatttgcttgcctgactgactccaccactctctcagctatgggggaatattgcattctaatgaaatagggtttggaactcacctggtgctcctcgcaagacaactgacacaaggtgtagggtgtgggggtggacaaaatgcccacctactggataaaagctcactgcaggaaaatgaggtctcctggcataatgcaacaaaaatctcatataattttgatttttaaaaagttgttctcaatttttcattacatcctacttctcagccctctggatgtttcatttttttggacaaagtgtttctttagtggttggggccagggacaggttgagggatatttctcggctcatttataagatataaatattatgaggttgtatgtaaagaaagggcaaacgtacagcagaaggggagcaaatagctacctttcaaggattttgagatttgaaggttaaggaatttttactgctatttttgttcatcagtttcatgtctgttatgttttgagatcctcagaggcctagggttagcgtataccaagaatcctggtgagaggcgttgccatgccttggggtgaattcttccccactagctctctcacccagcctacaagtccttctctcatagatcccagagcaatgggcaccgtccaggaggtacaggagaggactttatgatgcaggaaagaaggaagaagtgggtcccttgcaagtggccagacagggaatgatggtttgactccagaaatcaggaatcaggttcaggtttggataacttctctttaaaatatctccacattgagactcttattttaacaaaatccaaacaaaattaactcagggcttgtgacctaacctttgtaagaaggtgatcaaagagatcctacattaataagcactgcctgtagcaccagctttgtctttttgtcttttgttgtttctttcctgaaccaccctgtacatcatagccaggtctaccccaaatagagcagcagctgatggcttctctgctgtctgtggagggagggctcggctgcagacctatggtgttttgtcagctgttaggtgctacagcccacccagtcagagtacatagacatagcgctttaagggacaaaggacaaacagaactatctttgctttccggaggccatctttttctttccttgaatcctttctgctttaaacttctgaggtttatgcatcccagagaggtcacaccaagccaaagagaaaaaattcatagattgtcccagcctacccaaagggcctgaaaagcctctctaaacaaaactcaagatagctgagaagtatgaatggggttcacagcaaagtccaattgatggcttttgaggctgggacacccccaaactgcccttctgtttttgtagttttgctttcttccacccaccctctctccgcatgctgtaagttaggggagttagtatcttgaacttctaaatgcaaaaggagattttataataagccatgctacctgtaaatacattattgaggtttgcatttttatttttggaggtatgaaagagttgagtagaccaagtcaaaagaggtgtggggatttatgtttatttttatttgtttggggttgtttggttggtggctgggtttcttgtaacagacctattctggaatagcaaagaaggataccttggtgatctgcaatgtttctgaatctgtttctctttaggaagtgattgccatcaaatttagtgatatgatatttgagtcaaaaatctgaggttatagtaccagctgtcttttctctctggtctcctttttgtcgtctttctctttctgtctaaattggcctctgtcttttcctaaggacttaaaatataacccaaattaatgaagaactgccccaaaacttcagtgaaagccaaggaggtacagaattttttcaggacatctttaaccaatacaaaatttatgtcttaagaagataatttttacaatagtgtagtaatctgataaatgaaaactattggaagtcaatagttttttatattccagctttctgtattcaaacttgtgccttcagcaagcatctcttcactttctttcccttgtcaattgaaacatgaatgtttggctaactcatgatgtaaagtgtctgttaagttaataatacataatttaaagcacttagtctccacaaagcaatttagaaaaatcttcacttgttagatcccatgaagtacctatgaaattctcagcattgctataagcatttgattttttttaaggaaacttcctgtttaatggaatctgaatccaagatttgctttaatttcactctattcttcccattttcccttattcttcttgttgtctctctaattaaaaaaaaaaaaaacctaggcttttttttttctatccagaaagttgggttttcatgatctgagcttccttatgtctccttctctttgtgcaaacttaaaccagtcatagattgtcacccagacatattctccaacccagcattggaaatctgaacgaatcttttctctttttgtcctacaagtttgtcagagatgagaatggattgctgtctacattctacaaccagaccctagactttataccaggctgtgccacttcctcttcacttcactcagaggatggccccaaaactgaaaaggaaatgaaataatcaaatataccaaatccgaatttgactttatttgatgactcaatattttccttccagtactctaatttttttttatggcaatggcctatatggcacaagaaccaccacttaaagcaaatctgttgaacatttttataagggatgagcaagaaaaacacactccaaaattttaaagtgccattaatcaatttttaagaataaaggtaatatgaaatgagggctaaacaatgtaatataactgccagttaaggtagacagtagttgtggtcttagttacatttgatatggagttgtgtaatattaagcagatcccagtggagttagtaaaaacataggtattgagttttaatggctaccaattgggatatatacttagcctgcaggctgaactttagtcagtgtttttctatcatgttgttttgtgaacaagtcaaaatttatacaaagctaccctaagtgctgcaattgcagaggaacttgcctcttcgtgatattagagggcagtccaactccgctcaaactgagtccaagatttgaattcatccagaaaaacaaatggaggagaaaagcctaatgcaccacatgtgtttggcatttcatggctgggacaatggagtagagggtaggaagacaagctgtagaacaaaagcaaagtgaggtagaaagtaacaggtcccagacgaggacagacttagagatgtgtaaccttggatcctctttttcacttagaatatgggtaaacttcttagcacaagactggattaagagaagttctttctgttaaactcacctagggtagtggctttgaaggcctcagaggattaatagattcccaaaattttcttccagacctgggagatggagagaaagaggttcttgctttaaagcggctcgaagacaatctttatgacttcagcaactcttcaacatagtagcaccaataaaggagagattatgttaacttcctagtggtgagaataccatgggatgggagaagggccagtgagtgggatgggaatgagcttcatcaggaacagatttcagactctgcagggtgcaccggttctagcctcaaataacaacattgcaaggaggtggactacagggtccacaccctctgtccttcggggcccatggtcaggccattccctctttgttttgctcctagaggatgagcatgtaagatgagatcaggagggaaattgggtgctctgcctcaggctgttaaaatgctgctacctgcattctaaaacgtgcaagtcatgccccacaagacacctccttagggcagcatccactgtggtgtgccagcctgacacccctgcagtcacggtgtttgaatggcagctgatgctggcccacccagagtatcggtgcatctctcctaaagccacagttcagcactgcatgttgaccaggcggatatcctataatatagatgctcgtttggatccaaaaggaaaaccattaaaaataaaagaaagatgaaaaactttaatgttttgggggggataaaagaaaagaataaataaaaccttgttgt

SEQ ID NO: 2742 - DNA, 7497 bp, Homo sapiens
  source 1..7497: mol_type = unassigned DNA; mol_type = unassigned DNA
ccgccctccgccgctgccccccttttcgttcgccctctcggggcggcttcgccgaaggtagcgccgaatccggcaaccggagcctgggcgcgaagcgaagaagccggaacaaagtgagggggagccggccggctggcccgggaagccccaggggcgcaggggaagcgggactcgcgccgggcggggtttccctgcgccccggcgccccgcgggcagcatgcccctgcgggcagggggagctgggctgaactggccctcccgggggctcagcttgcgccctagagcccaccagatgtgcccccgccggggcccccgggttgcgtgaggacacctcctctgaggggcgccgcttgcccctctccggatcgcccggggccccggctggccagaggatggacgaggaggaggatggagcgggcgccgaggagtcgggacagccccggagcttcatgcggctcaacgacctgtcgggggccgggggccggccggggccggggtcagcagaaaaggacccgggcagcgcggactccgaggcggaggggctgccgtacccggcgctggccccggtggttttcttctacttgagccaggacagccgcccgcggagctggtgtctccgcacggtctgtaacccctggtttgagcgcatcagcatgttggtcatccttctcaactgcgtgaccctgggcatgttccggccatgcgaggacatcgcctgtgactcccagcgctgccggatcctgcaggcctttgatgacttcatctttgccttctttgccgtggagatggtggtgaagatggtggccttgggcatctttgggaaaaagtgttacctgggagacacttggaaccggcttgactttttcatcgtcatcgcagggatgctggagtactcgctggacctgcagaacgtcagcttctcagctgtcaggacagtccgtgtgctgcgaccgctcagggccattaaccgggtgcccagcatgcgcatccttgtcacgttgctgctggatacgctgcccatgctgggcaacgtcctgctgctctgcttcttcgtcttcttcatcttcggcatcgtcggcgtccagctgtgggcagggctgcttcggaaccgatgcttcctacctgagaatttcagcctccccctgagcgtggacctggagcgctattaccagacagagaacgaggatgagagccccttcatctgctcccagccacgcgagaacggcatgcggtcctgcagaagcgtgcccacgctgcgcggggacgggggcggtggcccaccttgcggtctggactatgaggcctacaacagctccagcaacaccacctgtgtcaactggaaccagtactacaccaactgctcagcgggggagcacaaccccttcaagggcgccatcaactttgacaacattggctatgcctggatcgccatcttccaggtcatcacgctggagggctgggtcgacatcatgtactttgtgatggatgctcattccttctacaatttcatctacttcatcctcctcatcatcgtgggctccttcttcatgatcaacctgtgcctggtggtgattgccacgcagttctcagagaccaagcagcgggaaagccagctgatgcgggagcagcgtgtgcggttcctgtccaacgccagcaccctggctagcttctctgagcccggcagctgctatgaggagctgctcaagtacctggtgtacatccttcgtaaggcagcccgcaggctggctcaggtctctcgggcagcaggtgtgcgggttgggctgctcagcagcccagcacccctcgggggccaggagacccagcccagcagcagctgctctcgctcccaccgccgcctatccgtccaccacctggtgcaccaccaccaccaccatcaccaccactaccacctgggcaatgggacgctcagggccccccgggccagcccggagatccaggacagggatgccaatgggtcccgccggctcatgctgccaccaccctcgacgcctgccctctccggggccccccctggtggcgcagagtctgtgcacagcttctaccatgccgactgccacttagagccagtccgctgccaggcgccccctcccaggtccccatctgaggcatccggcaggactgtgggcagcgggaaggtgtatcccaccgtgcacaccagccctccaccggagacgctgaaggagaaggcactagtagaggtggctgccagctctgggcccccaaccctcaccagcctcaacatcccacccgggccctacagctccatgcacaagctgctggagacacagagtacaggtgcctgccaaagctcttgcaagatctccagcccttgcttgaaagcagacagtggagcctgtggtccagacagctgcccctactgtgcccgggccggggcaggggaggtggagctcgccgaccgtgaaatgcctgactcagacagcgaggcagtttatgagttcacacaggatgcccagcacagcgacctccgggacccccacagccggcggcaacggagcctgggcccagatgcagagcccagctctgtgctggccttctggaggctaatctgtgacaccttccgaaagattgtggacagcaagtactttggccggggaatcatgatcgccatcctggtcaacacactcagcatgggcatcgaataccacgagcagcccgaggagcttaccaacgccctagaaatcagcaacatcgtcttcaccagcctctttgccctggagatgctgctgaagctgcttgtgtatggtccctttggctacatcaagaatccctacaacatcttcgatggtgtcattgtggtcatcagcgtgtgggagatcgtgggccagcaggggggcggcctgtcggtgctgcggaccttccgcctgatgcgtgtgctgaagctggtgcgcttcctgccggcgctgcagcggcagctggtggtgctcatgaagaccatggacaacgtggccaccttctgcatgctgcttatgctcttcatcttcatcttcagcatcctgggcatgcatctcttcggctgcaagtttgcctctgagcgggatggggacaccctgccagaccggaagaattttgactccttgctctgggccatcgtcactgtctttcagatcctgacccaggaggactggaacaaagtcctctacaatggtatggcctccacgtcgtcctgggcggccctttatttcattgccctcatgaccttcggcaactacgtgctcttcaatttgctggtcgccattctggtggagggcttccaggcggagggagatgccaacaagtccgaatcagagcccgatttcttctcacccagcctggatggtgatggggacaggaagaagtgcttggccttggtgtccctgggagagcacccggagctgcggaagagcctgctgccgcctctcatcatccacacggccgccacacccatgtcgctgcccaagagcaccagcacgggcctgggcgaggcgctgggccctgcgtcgcgccgcaccagcagcagcgggtcggcagagcctggggcggcccacgagatgaagtcaccgcccagcgcccgcagctctccgcacagcccctggagcgctgcaagcagctggaccagcaggcgctccagccggaacagcctcggccgtgcacccagcctgaagcggagaagcccaagtggagagcggcggtccctgttgtcgggagaaggccaggagagccaggatgaagaggagagctcagaagaggagcgggccagccctgcgggcagtgaccatcgccacagggggtccctggagcgggaggccaagagttcctttgacctgccagacacactgcaggtgccagggctgcatcgcactgccagtggccgagggtctgcttctgagcaccaggactgcaatggcaagtcggcttcagggcgcctggcccgggccctgcggcctgatgaccccccactggatggggatgacgccgatgacgagggcaacctgagcaaaggggaacgggtccgcgcgtggatccgagcccgactccctgcctgctgcctcgagcgagactcctggtcagcctacatcttccctcctcagtccaggttccgcctcctgtgtcaccggatcatcacccacaagatgttcgaccacgtggtccttgtcatcatcttccttaactgcatcaccatcgccatggagcgccccaaaattgacccccacagcgctgaacgcatcttcctgaccctctccaattacatcttcaccgcagtctttctggctgaaatgacagtgaaggtggtggcactgggctggtgcttcggggagcaggcgtacctgcggagcagttggaacgtgctggacgggctgttggtgctcatctccgtcatcgacattctggtgtccatggtctctgacagcggcaccaagatcctgggcatgctgagggtgctgcggctgctgcggaccctgcgcccgctcagggtgatcagccgggcgcaggggctgaagctggtggtggagacgctgatgtcctcactgaaacccatcggcaacattgtagtcatctgctgtgccttcttcatcattttcggcatcttgggggtgcagctcttcaaagggaagtttttcgtgtgccagggcgaggataccaggaacatcaccaataaatcggactgtgccgaggccagttaccggtgggtccggcacaagtacaactttgacaaccttggccaggccctgatgtccctgttcgttttggcctccaaggatggttgggtggacatcatgtacgatgggctggatgctgtgggcgtggaccagcagcccatcatgaaccacaacccctggatgctgctgtacttcatctcgttcctgctcattgtggccttctttgtcctgaacatgtttgtgggtgtggtggtggagaacttccacaagtgtcggcagcaccaggaggaagaggaggcccggcggcgggaggagaagcgcctacgaagactggagaaaaagagaaggaatctaatgctggacgatgtaattgcttccggcagctcagccagcgctgcgtcagaagcccagtgcaaaccttactactccgactactcccgcttccggctcctcgtccaccacttgtgcaccagccactacctggacctcttcatcacaggtgtcatcgggctgaacgtggtcaccatggccatggagcactaccagcagccccagattctggatgaggctctgaagatctgcaactacatcttcactgtcatctttgtcttggagtcagttttcaaacttgtggcctttggtttccgtcggttcttccaggacaggtggaaccagctggacctggccattgtgctgctgtccatcatgggcatcacgctggaggaaatcgaggtcaacgcctcgctgcccatcaaccccaccatcatccgcatcatgagggtgctgcgcattgcccgagtgctgaagctgctgaagatggctgtgggcatgcgggcgctgctggacacggtgatgcaggccctgccccaggtggggaacctgggacttctcttcatgttgttgtttttcatctttgcagctctgggcgtggagctctttggagacctggagtgtgacgagacacacccctgtgagggcctgggccgtcatgccacctttcggaactttggcatggccttcctaaccctcttccgagtctccacaggtgacaattggaatggcattatgaaggacaccctccgggactgtgaccaggagtccacctgctacaacacggtcatctcgcctatctactttgtgtccttcgtgctgacggcccagttcgtgctagtcaacgtggtgatcgccgtgctgatgaagcacctggaggagagcaacaaggaggccaaggaggaggccgagctagaggctgagctggagctggagatgaagaccctcagcccccagccccactcgccactgggcagccccttcctctggcctggggtcgagggccccgacagccccgacagccccaagcctggggctctgcacccagcggcccacgcgagatcagcctcccacttttccctggagcaccccacgatgcagccccaccccacggagctgccaggaccagacttactgactgtgcggaagtctggggtcagccgaacgcactctctgcccaatgacagctacatgtgtcggcatgggagcactgccgaggggcccctgggacacaggggctgggggctccccaaagctcagtcaggctccgtcttgtccgttcactcccagccagcagataccagctacatcctgcagcttcccaaagatgcacctcatctgctccagccccacagcgccccaacctggggcaccatccccaaactgcccccaccaggacgctcccctttggctcagaggccactcaggcgccaggcagcaataaggactgactccttggacgttcagggtctgggcagccgggaagacctgctggcagaggtgagtgggccctccccgcccctggcccgggcctactctttctggggccagtcaagtacccaggcacagcagcactcccgcagccacagcaagatctccaagcacatgaccccgccagccccttgcccaggcccagaacccaactggggcaagggccctccagagaccagaagcagcttagagttggacacggagctgagctggatttcaggagacctcctgccccctggcggccaggaggagcccccatccccacgggacctgaagaagtgctacagcgtggaggcccagagctgccagcgccggcctacgtcctggctggatgagcagaggagacactctatcgccgtcagctgcctggacagcggctcccaaccccacctgggcacagacccctctaaccttgggggccagcctcttggggggcctgggagccggcccaagaaaaaactcagcccgcctagtatcaccatagacccccccgagagccaaggtcctcggaccccgcccagccctggtatctgcctccggaggagggctccgtccagcgactccaaggatcccttggcctctggcccccctgacagcatggctgcctcgccctccccaaagaaagatgtgctgagtctctccggtttatcctctgacccagcagacctggacccctgagtcctgccccactttcccactcacctttctccactgggtgccaagtcctagctcctcctcctgggctatattcctgacaaaagttccatatagacaccaaggaggcggaggcgctcctccctgcctcagtggctctgggtacctgcaagcagaacttccaaagagagttaaaagcagcagccccggcaactctggctccaggcagaaggagaggcccggtgcagctgaggttcccgacaccagaagctgttgggagaaagcaatacgtttgtgcagaatctctatgtatattctattttattaaattaattgaatctag

SEQ ID NO: 2743 - DNA, 7848 bp, Homo sapiens
  source 1..7848: mol_type = unassigned DNA; mol_type = unassigned DNA
ccttttcgttcgccctctcggggcggcttcgccgaaggtagcgccgaatccggcaaccggagcctgggcgcgaagcgaagaagccggaacaaagtgagggggagccggccggctggcccgggaagccccaggggcgcaggggaagcgggactcgcgccgggcggggtttccctgcgccccggcgccccgcgggcagcatgcccctgcgggcagggggagctgggctgaactggccctcccgggggctcagcttgcgccctagagcccaccagatgtgcccccgccggggcccccgggttgcgtgaggacacctcctctgaggggcgccgcttgcccctctccggatcgcccggggccccggctggccagaggatggacgaggaggaggatggagcgggcgccgaggagtcgggacagccccggagcttcatgcggctcaacgacctgtcgggggccgggggccggccggggccggggtcagcagaaaaggacccgggcagcgcggactccgaggcggaggggctgccgtacccggcgctggccccggtggttttcttctacttgagccaggacagccgcccgcggagctggtgtctccgcacggtctgtaacccctggtttgagcgcatcagcatgttggtcatccttctcaactgcgtgaccctgggcatgttccggccatgcgaggacatcgcctgtgactcccagcgctgccggatcctgcaggcctttgatgacttcatctttgccttctttgccgtggagatggtggtgaagatggtggccttgggcatctttgggaaaaagtgttacctgggagacacttggaaccggcttgactttttcatcgtcatcgcagggatgctggagtactcgctggacctgcagaacgtcagcttctcagctgtcaggacagtccgtgtgctgcgaccgctcagggccattaaccgggtgcccagcatgcgcatccttgtcacgttgctgctggatacgctgcccatgctgggcaacgtcctgctgctctgcttcttcgtcttcttcatcttcggcatcgtcggcgtccagctgtgggcagggctgcttcggaaccgatgcttcctacctgagaatttcagcctccccctgagcgtggacctggagcgctattaccagacagagaacgaggatgagagccccttcatctgctcccagccacgcgagaacggcatgcggtcctgcagaagcgtgcccacgctgcgcggggacgggggcggtggcccaccttgcggtctggactatgaggcctacaacagctccagcaacaccacctgtgtcaactggaaccagtactacaccaactgctcagcgggggagcacaaccccttcaagggcgccatcaactttgacaacattggctatgcctggatcgccatcttccaggtcatcacgctggagggctgggtcgacatcatgtactttgtgatggatgctcattccttctacaatttcatctacttcatcctcctcatcatcgtgggctccttcttcatgatcaacctgtgcctggtggtgattgccacgcagttctcagagaccaagcagcgggaaagccagctgatgcgggagcagcgtgtgcggttcctgtccaacgccagcaccctggctagcttctctgagcccggcagctgctatgaggagctgctcaagtacctggtgtacatccttcgtaaggcagcccgcaggctggctcaggtctctcgggcagcaggtgtgcgggttgggctgctcagcagcccagcacccctcgggggccaggagacccagcccagcagcagctgctctcgctcccaccgccgcctatccgtccaccacctggtgcaccaccaccaccaccatcaccaccactaccacctgggcaatgggacgctcagggccccccgggccagcccggagatccaggacagggatgccaatgggtcccgccggctcatgctgccaccaccctcgacgcctgccctctccggggccccccctggtggcgcagagtctgtgcacagcttctaccatgccgactgccacttagagccagtccgctgccaggcgccccctcccaggtccccatctgaggcatccggcaggactgtgggcagcgggaaggtgtatcccaccgtgcacaccagccctccaccggagacgctgaaggagaaggcactagtagaggtggctgccagctctgggcccccaaccctcaccagcctcaacatcccacccgggccctacagctccatgcacaagctgctggagacacagagtacaggtgcctgccaaagctcttgcaagatctccagcccttgcttgaaagcagacagtggagcctgtggtccagacagctgcccctactgtgcccgggccggggcaggggaggtggagctcgccgaccgtgaaatgcctgactcagacagcgaggcagtttatgagttcacacaggatgcccagcacagcgacctccgggacccccacagccggcggcaacggagcctgggcccagatgcagagcccagctctgtgctggccttctggaggctaatctgtgacaccttccgaaagattgtggacagcaagtactttggccggggaatcatgatcgccatcctggtcaacacactcagcatgggcatcgaataccacgagcagcccgaggagcttaccaacgccctagaaatcagcaacatcgtcttcaccagcctctttgccctggagatgctgctgaagctgcttgtgtatggtccctttggctacatcaagaatccctacaacatcttcgatggtgtcattgtggtcatcagcgtgtgggagatcgtgggccagcaggggggcggcctgtcggtgctgcggaccttccgcctgatgcgtgtgctgaagctggtgcgcttcctgccggcgctgcagcggcagctggtggtgctcatgaagaccatggacaacgtggccaccttctgcatgctgcttatgctcttcatcttcatcttcagcatcctgggcatgcatctcttcggctgcaagtttgcctctgagcgggatggggacaccctgccagaccggaagaattttgactccttgctctgggccatcgtcactgtctttcagatcctgacccaggaggactggaacaaagtcctctacaatggtatggcctccacgtcgtcctgggcggccctttatttcattgccctcatgaccttcggcaactacgtgctcttcaatttgctggtcgccattctggtggagggcttccaggcggagggagatgccaacaagtccgaatcagagcccgatttcttctcacccagcctggatggtgatggggacaggaagaagtgcttggccttggtgtccctgggagagcacccggagctgcggaagagcctgctgccgcctctcatcatccacacggccgccacacccatgtcgctgcccaagagcaccagcacgggcctgggcgaggcgctgggccctgcgtcgcgccgcaccagcagcagcgggtcggcagagcctggggcggcccacgagatgaagtcaccgcccagcgcccgcagctctccgcacagcccctggagcgctgcaagcagctggaccagcaggcgctccagccggaacagcctcggccgtgcacccagcctgaagcggagaagcccaagtggagagcggcggtccctgttgtcgggagaaggccaggagagccaggatgaagaggagagctcagaagaggagcgggccagccctgcgggcagtgaccatcgccacagggggtccctggagcgggaggccaagagttcctttgacctgccagacacactgcaggtgccagggctgcatcgcactgccagtggccgagggtctgcttctgagcaccaggactgcaatggcaagtcggcttcagggcgcctggcccgggccctgcggcctgatgaccccccactggatggggatgacgccgatgacgagggcaacctgagcaaaggggaacgggtccgcgcgtggatccgagcccgactccctgcctgctgcctcgagcgagactcctggtcagcctacatcttccctcctcagtccaggttccgcctcctgtgtcaccggatcatcacccacaagatgttcgaccacgtggtccttgtcatcatcttccttaactgcatcaccatcgccatggagcgccccaaaattgacccccacagcgctgaacgcatcttcctgaccctctccaattacatcttcaccgcagtctttctggctgaaatgacagtgaaggtggtggcactgggctggtgcttcggggagcaggcgtacctgcggagcagttggaacgtgctggacgggctgttggtgctcatctccgtcatcgacattctggtgtccatggtctctgacagcggcaccaagatcctgggcatgctgagggtgctgcggctgctgcggaccctgcgcccgctcagggtgatcagccgggcgcaggggctgaagctggtggtggagacgctgatgtcctcactgaaacccatcggcaacattgtagtcatctgctgtgccttcttcatcattttcggcatcttgggggtgcagctcttcaaagggaagtttttcgtgtgccagggcgaggataccaggaacatcaccaataaatcggactgtgccgaggccagttaccggtgggtccggcacaagtacaactttgacaaccttggccaggccctgatgtccctgttcgttttggcctccaaggatggttgggtggacatcatgtacgatgggctggatgctgtgggcgtggaccagcagcccatcatgaaccacaacccctggatgctgctgtacttcatctcgttcctgctcattgtggccttctttgtcctgaacatgtttgtgggtgtggtggtggagaacttccacaagtgtcggcagcaccaggaggaagaggaggcccggcggcgggaggagaagcgcctacgaagactggagaaaaagagaaggagtaaggagaagcagatggctgaagcccagtgcaaaccttactactccgactactcccgcttccggctcctcgtccaccacttgtgcaccagccactacctggacctcttcatcacaggtgtcatcgggctgaacgtggtcaccatggccatggagcactaccagcagccccagattctggatgaggctctgaagatctgcaactacatcttcactgtcatctttgtcttggagtcagttttcaaacttgtggcctttggtttccgtcggttcttccaggacaggtggaaccagctggacctggccattgtgctgctgtccatcatgggcatcacgctggaggaaatcgaggtcaacgcctcgctgcccatcaaccccaccatcatccgcatcatgagggtgctgcgcattgcccgagtgctgaagctgctgaagatggctgtgggcatgcgggcgctgctggacacggtgatgcaggccctgccccaggtggggaacctgggacttctcttcatgttgttgtttttcatctttgcagctctgggcgtggagctctttggagacctggagtgtgacgagacacacccctgtgagggcctgggccgtcatgccacctttcggaactttggcatggccttcctaaccctcttccgagtctccacaggtgacaattggaatggcattatgaaggacaccctccgggactgtgaccaggagtccacctgctacaacacggtcatctcgcctatctactttgtgtccttcgtgctgacggcccagttcgtgctagtcaacgtggtgatcgccgtgctgatgaagcacctggaggagagcaacaaggaggccaaggaggaggccgagctagaggctgagctggagctggagatgaagaccctcagcccccagccccactcgccactgggcagccccttcctctggcctggggtcgagggccccgacagccccgacagccccaagcctggggctctgcacccagcggcccacgcgagatcagcctcccacttttccctggagcaccccacgatgcagccccaccccacggagctgccaggaccagacttactgactgtgcggaagtctggggtcagccgaacgcactctctgcccaatgacagctacatgtgtcggcatgggagcactgccgaggggcccctgggacacaggggctgggggctccccaaagctcagtcaggctccgtcttgtccgttcactcccagccagcagataccagctacatcctgcagcttcccaaagatgcacctcatctgctccagccccacagcgccccaacctggggcaccatccccaaactgcccccaccaggacgctcccctttggctcagaggccactcaggcgccaggcagcaataaggactgactccttggacgttcagggtctgggcagccgggaagacctgctggcagaggtgagtgggccctccccgcccctggcccgggcctactctttctggggccagtcaagtacccaggcacagcagcactcccgcagccacagcaagatctccaagcacatgaccccgccagccccttgcccaggcccagaacccaactggggcaagggccctccagagaccagaagcagcttagagttggacacggagctgagctggatttcaggagacctcctgccccctggcggccaggaggagcccccatccccacgggacctgaagaagtgctacagcgtggaggcccagagctgccagcgccggcctacgtcctggctggatgagcagaggagacactctatcgccgtcagctgcctggacagcggctcccaaccccacctgggcacagacccctctaaccttgggggccagcctcttggggggcctgggagccggcccaagaaaaaactcagcccgcctagtatcaccatagacccccccgagagccaaggtcctcggaccccgcccagccctggtatctgcctccggaggagggctccgtccagcgactccaaggatcccttggcctctggcccccctgacagcatggctgcctcgccctccccaaagaaagatgtgctgagtctctccggtttatcctctgacccagcagacctggacccctgagtcctgccccactttcccactcacctttctccactgggtgccaagtcctagctcctcctcctgggctatattcctgacaaaagttccatatagacaccaaggaggcggaggcgctcctccctgcctcagtggctctgggtacctgcaagcagaacttccaaagagagttaaaagcagcagccccggcaactctggctccaggcagaaggagaggcccggtgcagctgaggttcccgacaccagaagctgttgggagaaagcaatacgtttgtgcagaatctctatgtatattctattttattaaattaattgaatctagtatatgcgggatgtacgacattttgtgactgaagagacttgtttccttctacttttatgtgtctcagaatatttttgaggcgaaggcgtctgtctcttggctattttaacctaaaataacagtctagttatattccctcttcttgcaaagcacaagctgggaccgcgagcacattgcagccccaacggtggcccatcttcagcggagagcgagaaccattttggaaactgtaatgtaacttattttttcctttaacctcgtcatcattttctgtagggaaaaaaaaaagaaaaagaaaaaatgagattttacaagtgaaatggaacctttttatatatacatacatacatatctatctatctatctatatatatataaaataaagtaattttcctaaataaaaa

SEQ ID NO: 2744 - DNA, 7226 bp, Homo sapiens
  source 1..7226: mol_type = unassigned DNA; mol_type = unassigned DNA
atgcccctgcgggcagggggagctgggctgaactggccctcccgggggctcagcttgcgccctagagcccaccagatgtgcccccgccggggcccccgggttgcgtgaggacacctcctctgaggggcgccgcttgcccctctccggatcgcccggggccccggctggccagaggatggacgaggaggaggatggagcgggcgccgaggagtcgggacagccccggagcttcatgcggctcaacgacctgtcgggggccgggggccggccggggccggggtcagcagaaaaggacccgggcagcgcggactccgaggcggaggggctgccgtacccggcgctggccccggtggttttcttctacttgagccaggacagccgcccgcggagctggtgtctccgcacggtctgtaacccctggtttgagcgcatcagcatgttggtcatccttctcaactgcgtgaccctgggcatgttccggccatgcgaggacatcgcctgtgactcccagcgctgccggatcctgcaggcctttgatgacttcatctttgccttctttgccgtggagatggtggtgaagatggtggccttgggcatctttgggaaaaagtgttacctgggagacacttggaaccggcttgactttttcatcgtcatcgcagggatgctggagtactcgctggacctgcagaacgtcagcttctcagctgtcaggacagtccgtgtgctgcgaccgctcagggccattaaccgggtgcccagcatgcgcatccttgtcacgttgctgctggatacgctgcccatgctgggcaacgtcctgctgctctgcttcttcgtcttcttcatcttcggcatcgtcggcgtccagctgtgggcagggctgcttcggaaccgatgcttcctacctgagaatttcagcctccccctgagcgtggacctggagcgctattaccagacagagaacgaggatgagagccccttcatctgctcccagccacgcgagaacggcatgcggtcctgcagaagcgtgcccacgctgcgcggggacgggggcggtggcccaccttgcggtctggactatgaggcctacaacagctccagcaacaccacctgtgtcaactggaaccagtactacaccaactgctcagcgggggagcacaaccccttcaagggcgccatcaactttgacaacattggctatgcctggatcgccatcttccaggtcatcacgctggagggctgggtcgacatcatgtactttgtgatggatgctcattccttctacaatttcatctacttcatcctcctcatcatcgtgggctccttcttcatgatcaacctgtgcctggtggtgattgccacgcagttctcagagaccaagcagcgggaaagccagctgatgcgggagcagcgtgtgcggttcctgtccaacgccagcaccctggctagcttctctgagcccggcagctgctatgaggagctgctcaagtacctggtgtacatccttcgtaaggcagcccgcaggctggctcaggtctctcgggcagcaggtgtgcgggttgggctgctcagcagcccagcacccctcgggggccaggagacccagcccagcagcagctgctctcgctcccaccgccgcctatccgtccaccacctggtgcaccaccaccaccaccatcaccaccactaccacctgggcaatgggacgctcagggccccccgggccagcccggagatccaggacagggatgccaatgggtcccgccggctcatgctgccaccaccctcgacgcctgccctctccggggccccccctggtggcgcagagtctgtgcacagcttctaccatgccgactgccacttagagccagtccgctgccaggcgccccctcccaggtccccatctgaggcatccggcaggactgtgggcagcgggaaggtgtatcccaccgtgcacaccagccctccaccggagacgctgaaggagaaggcactagtagaggtggctgccagctctgggcccccaaccctcaccagcctcaacatcccacccgggccctacagctccatgcacaagctgctggagacacagagtacaggtgcctgccaaagctcttgcaagatctccagcccttgcttgaaagcagacagtggagcctgtggtccagacagctgcccctactgtgcccgggccggggcaggggaggtggagctcgccgaccgtgaaatgcctgactcagacagcgaggcagtttatgagttcacacaggatgcccagcacagcgacctccgggacccccacagccggcggcaacggagcctgggcccagatgcagagcccagctctgtgctggccttctggaggctaatctgtgacaccttccgaaagattgtggacagcaagtactttggccggggaatcatgatcgccatcctggtcaacacactcagcatgggcatcgaataccacgagcagcccgaggagcttaccaacgccctagaaatcagcaacatcgtcttcaccagcctctttgccctggagatgctgctgaagctgcttgtgtatggtccctttggctacatcaagaatccctacaacatcttcgatggtgtcattgtggtcatcagcgtgtgggagatcgtgggccagcaggggggcggcctgtcggtgctgcggaccttccgcctgatgcgtgtgctgaagctggtgcgcttcctgccggcgctgcagcggcagctggtggtgctcatgaagaccatggacaacgtggccaccttctgcatgctgcttatgctcttcatcttcatcttcagcatcctgggcatgcatctcttcggctgcaagtttgcctctgagcgggatggggacaccctgccagaccggaagaattttgactccttgctctgggccatcgtcactgtctttcagatcctgacccaggaggactggaacaaagtcctctacaatggtatggcctccacgtcgtcctgggcggccctttatttcattgccctcatgaccttcggcaactacgtgctcttcaatttgctggtcgccattctggtggagggcttccaggcggagggagatgccaacaagtccgaatcagagcccgatttcttctcacccagcctggatggtgatggggacaggaagaagtgcttggccttggtgtccctgggagagcacccggagctgcggaagagcctgctgccgcctctcatcatccacacggccgccacacccatgtcgctgcccaagagcaccagcacgggcctgggcgaggcgctgggccctgcgtcgcgccgcaccagcagcagcgggtcggcagagcctggggcggcccacgagatgaagtcaccgcccagcgcccgcagctctccgcacagcccctggagcgctgcaagcagctggaccagcaggcgctccagccggaacagcctcggccgtgcacccagcctgaagcggagaagcccaagtggagagcggcggtccctgttgtcgggagaaggccaggagagccaggatgaagaggagagctcagaagaggagcgggccagccctgcgggcagtgaccatcgccacagggggtccctggagcgggaggccaagagttcctttgacctgccagacacactgcaggtgccagggctgcatcgcactgccagtggccgagggtctgcttctgagcaccaggactgcaatggcaagtcggcttcagggcgcctggcccgggccctgcggcctgatgaccccccactggatggggatgacgccgatgacgagggcaacctgagcaaaggggaacgggtccgcgcgtggatccgagcccgactccctgcctgctgcctcgagcgagactcctggtcagcctacatcttccctcctcagtccaggttccgcctcctgtgtcaccggatcatcacccacaagatgttcgaccacgtggtccttgtcatcatcttccttaactgcatcaccatcgccatggagcgccccaaaattgacccccacagcgctgaacgcatcttcctgaccctctccaattacatcttcaccgcagtctttctggctgaaatgacagtgaaggtggtggcactgggctggtgcttcggggagcaggcgtacctgcggagcagttggaacgtgctggacgggctgttggtgctcatctccgtcatcgacattctggtgtccatggtctctgacagcggcaccaagatcctgggcatgctgagggtgctgcggctgctgcggaccctgcgcccgctcagggtgatcagccgggcgcaggggctgaagctggtggtggagacgctgatgtcctcactgaaacccatcggcaacattgtagtcatctgctgtgccttcttcatcattttcggcatcttgggggtgcagctcttcaaagggaagtttttcgtgtgccagggcgaggataccaggaacatcaccaataaatcggactgtgccgaggccagttaccggtgggtccggcacaagtacaactttgacaaccttggccaggccctgatgtccctgttcgttttggcctccaaggatggttgggtggacatcatgtacgatgggctggatgctgtgggcgtggaccagcagcccatcatgaaccacaacccctggatgctgctgtacttcatctcgttcctgctcattgtggccttctttgtcctgaacatgtttgtgggtgtggtggtggagaacttccacaagtgtcggcagcaccaggaggaagaggaggcccggcggcgggaggagaagcgcctacgaagactggagaaaaagagaaggaaagcccagtgcaaaccttactactccgactactcccgcttccggctcctcgtccaccacttgtgcaccagccactacctggacctcttcatcacaggtgtcatcgggctgaacgtggtcaccatggccatggagcactaccagcagccccagattctggatgaggctctgaagatctgcaactacatcttcactgtcatctttgtcttggagtcagttttcaaacttgtggcctttggtttccgtcggttcttccaggacaggtggaaccagctggacctggccattgtgctgctgtccatcatgggcatcacgctggaggaaatcgaggtcaacgcctcgctgcccatcaaccccaccatcatccgcatcatgagggtgctgcgcattgcccgagtgctgaagctgctgaagatggctgtgggcatgcgggcgctgctggacacggtgatgcaggccctgccccaggtggggaacctgggacttctcttcatgttgttgtttttcatctttgcagctctgggcgtggagctctttggagacctggagtgtgacgagacacacccctgtgagggcctgggccgtcatgccacctttcggaactttggcatggccttcctaaccctcttccgagtctccacaggtgacaattggaatggcattatgaaggacaccctccgggactgtgaccaggagtccacctgctacaacacggtcatctcgcctatctactttgtgtccttcgtgctgacggcccagttcgtgctagtcaacgtggtgatcgccgtgctgatgaagcacctggaggagagcaacaaggaggccaaggaggaggccgagctagaggctgagctggagctggagatgaagaccctcagcccccagccccactcgccactgggcagccccttcctctggcctggggtcgagggccccgacagccccgacagccccaagcctggggctctgcacccagcggcccacgcgagatcagcctcccacttttccctggagcaccccacgatgcagccccaccccacggagctgccaggaccagacttactgactgtgcggaagtctggggtcagccgaacgcactctctgcccaatgacagctacatgtgtcggcatgggagcactgccgaggggcccctgggacacaggggctgggggctccccaaagctcagtcaggctccgtcttgtccgttcactcccagccagcagataccagctacatcctgcagcttcccaaagatgcacctcatctgctccagccccacagcgccccaacctggggcaccatccccaaactgcccccaccaggacgctcccctttggctcagaggccactcaggcgccaggcagcaataaggactgactccttggacgttcagggtctgggcagccgggaagacctgctggcagaggtgagtgggccctccccgcccctggcccgggcctactctttctggggccagtcaagtacccaggcacagcagcactcccgcagccacagcaagatctccaagcacatgaccccgccagccccttgcccaggcccagaacccaactggggcaagggccctccagagaccagaagcagcttagagttggacacggagctgagctggatttcaggagacctcctgccccctggcggccaggaggagcccccatccccacgggacctgaagaagtgctacagcgtggaggcccagagctgccagcgccggcctacgtcctggctggatgagcagaggagacactctatcgccgtcagctgcctggacagcggctcccaaccccacctgggcacagacccctctaaccttgggggccagcctcttggggggcctgggagccggcccaagaaaaaactcagcccgcctagtatcaccatagacccccccgagagccaaggtcctcggaccccgcccagccctggtatctgcctccggaggagggctccgtccagcgactccaaggatcccttggcctctggcccccctgacagcatggctgcctcgccctccccaaagaaagatgtgctgagtctctccggtttatcctctgacccagcagacctggacccctgagtcctgccccactttcccactcacctttctccactgggtgccaagtcctagctcctcctcctgggctatattcctgacaaaagttccatatagacaccaaggaggcggaggcgctcctccctgcctcagtggctctgggtacctgcaagcagaacttccaaagagagttaaaagcagcagccccggcaactctggctccaggcagaaggagaggcccggtgcagctgaggttcccgacaccagaagctgttgggagaaagcaatacgtttgtgcagaatctctatgtatattctattttattaaattaattgaatctag

SEQ ID NO: 2745 - DNA, 4899 bp, Homo sapiens
  source 1..4899: mol_type = unassigned DNA; mol_type = unassigned DNA
atcgcccggggccccggctggccagaggatggacgaggaggaggatggagcgggcgccgaggagtcgggacagccccggagcttcatgcggctcaacgacctgtcgggggccgggggccggccggggccggggtcagcagaaaaggacccgggcagcgcggactccgaggcggaggggctgccgtacccggcgctggccccggtggttttcttctacttgagccaggacagccgcccgcggagctggtgtctccgcacggtctgtaacccctggtttgagcgcatcagcatgttggtcatccttctcaactgcgtgaccctgggcatgttccggccatgcgaggacatcgcctgtgactcccagcgctgccggatcctgcaggcctttgatgacttcatctttgccttctttgccgtggagatggtggtgaagatggtggccttgggcatctttgggaaaaagtgttacctgggagacacttggaaccggcttgactttttcatcgtcatcgcagggatgctggagtactcgctggacctgcagaacgtcagcttctcagctgtcaggacagtccgtgtgctgcgaccgctcagggccattaaccgggtgcccagcatgcgcatccttgtcacgttgctgctggatacgctgcccatgctgggcaacgtcctgctgctctgcttcttcgtcttcttcatcttcggcatcgtcggcgtccagctgtgggcagggctgcttcggaaccgatgcttcctacctgagaatttcagcctccccctgagcgtggacctggagcgctattaccagacagagaacgaggatgagagccccttcatctgctcccagccacgcgagaacggcatgcggtcctgcagaagcgtgcccacgctgcgcggggacgggggcggtggcccaccttgcggtctggactatgaggcctacaacagctccagcaacaccacctgtgtcaactggaaccagtactacaccaactgctcagcgggggagcacaaccccttcaagggcgccatcaactttgacaacattggctatgcctggatcgccatcttccaggtcatcacgctggagggctgggtcgacatcatgtactttgtgatggatgctcattccttctacaatttcatctacttcatcctcctcatcatcgtgggctccttcttcatgatcaacctgtgcctggtggtgattgccacgcagttctcagagaccaagcagcgggaaagccagctgatgcgggagcagcgtgtgcggttcctgtccaacgccagcaccctggctagcttctctgagcccggcagctgctatgaggagctgctcaagtacctggtgtacatccttcgtaaggcagcccgcaggctggctcaggtctctcgggcagcaggtgtgcgggttgggctgctcagcagcccagcacccctcgggggccaggagacccagcccagcagcagctgctctcgctcccaccgccgcctatccgtccaccacctggtgcaccaccaccaccaccatcaccaccactaccacctgggcaatgggacgctcagggccccccgggccagcccggagatccaggacagggatgccaatgggtcccgccggctcatgctgccaccaccctcgacgcctgccctctccggggccccccctggtggcgcagagtctgtgcacagcttctaccatgccgactgccacttagagccagtccgctgccaggcgccccctcccaggtccccatctgaggcatccggcaggactgtgggcagcgggaaggtgtatcccaccgtgcacaccagccctccaccggagacgctgaaggagaaggcactagtagaggtggctgccagctctgggcccccaaccctcaccagcctcaacatcccacccgggccctacagctccatgcacaagctgctggagacacagagtacaggtgcctgccaaagctcttgcaagatctccagcccttgcttgaaagcagacagtggagcctgtggtccagacagctgcccctactgtgcccgggccggggcaggggaggtggagctcgccgaccgtgaaatgcctgactcagacagcgaggcagtttatgagttcacacaggatgcccagcacagcgacctccgggacccccacagccggcggcaacggagcctgggcccagatgcagagcccagctctgtgctggccttctggaggctaatctgtgacaccttccgaaagattgtggacagcaagtactttggccggggaatcatgatcgccatcctggtcaacacactcagcatgggcatcgaataccacgagcagcccgaggagcttaccaacgccctagaaatcagcaacatcgtcttcaccagcctctttgccctggagatgctgctgaagctgcttgtgtatggtccctttggctacatcaagaatccctacaacatcttcgatggtgtcattgtggtcatcagcgtgtgggagatcgtgggccagcaggggggcggcctgtcggtgctgcggaccttccgcctgatgcgtgtgctgaagctggtgcgcttcctgccggcgctgcagcggcagctggtggtgctcatgaagaccatggacaacgtggccaccttctgcatgctgcttatgctcttcatcttcatcttcagcatcctgggcatgcatctcttcggctgcaagtttgcctctgagcgggatggggacaccctgccagaccggaagaattttgactccttgctctgggccatcgtcactgtctttcagatcctgacccaggaggactggaacaaagtcctctacaatggtatggcctccacgtcgtcctgggcggccctttatttcattgccctcatgaccttcggcaactacgtgctcttcaatttgctggtcgccattctggtggagggcttccaggcggaggaaatcagcaaacgggaagatgcgagtggacagttaagctgtattcagctgcctgtcgactcccaggggggagatgccaacaagtccgaatcagagcccgatttcttctcacccagcctggatggtgatggggacaggaagaagtgcttggccttggtgtccctgggagagcacccggagctgcggaagagcctgctgccgcctctcatcatccacacggccgccacacccatgtcgctgcccaagagcaccagcacgggcctgggcgaggcgctgggccctgcgtcgcgccgcaccagcagcagcgggtcggcagagcctggggcggcccacgagatgaagtcaccgcccagcgcccgcagctctccgcacagcccctggagcgctgcaagcagctggaccagcaggcgctccagccggaacagcctcggccgtgcacccagcctgaagcggagaagcccaagtggagagcggcggtccctgttgtcgggagaaggccaggagagccaggatgaagaggagagctcagaagaggagcgggccagccctgcgggcagtgaccatcgccacagggggtccctggagcgggaggccaagagttcctttgacctgccagacacactgcaggtgccagggctgcatcgcactgccagtggccgagggtctgcttctgagcaccaggactgcaatggcaagtcggcttcagggcgcctggcccgggccctgcggcctgatgaccccccactggatggggatgacgccgatgacgagggcaacctgagcaaaggggaacgggtccgcgcgtggatccgagcccgactccctgcctgctgcctcgagcgagactcctggtcagcctacatcttccctcctcagtccaggttccgcctcctgtgtcaccggatcatcacccacaagatgttcgaccacgtggtccttgtcatcatcttccttaactgcatcaccatcgccatggagcgccccaaaattgacccccacagcgctgaacgcatcttcctgaccctctccaattacatcttcaccgcagtctttctggctgaaatgacagtgaaggtggtggcactgggctggtgcttcggggagcaggcgtacctgcggagcagttggaacgtgctggacgggctgttggtgctcatctccgtcatcgacattctggtgtccatggtctctgacagcggcaccaagatcctgggcatgctgagggtgctgcggctgctgcggaccctgcgcccgctcagggtgatcagccgggcgcaggggctgaagctggtggtggagacgctgatgtcctcactgaaacccatcggcaacattgtagtcatctgctgtgccttcttcatcattttcggcatcttgggggtgcagctcttcaaagggaagtttttcgtgtgccagggcgaggataccaggaacatcaccaataaatcggactgtgccgaggccagttaccggtgggtccggcacaagtacaactttgacaaccttggccaggtgagccccaggctcagaggtggggctgtggtgaaggaggctggagggggcacagggccatgcttagtgatacctgctgactccggtggaggtgggctccacgaagagatcagcccttcacaccctctgctgtctaaccaccagcatgtcgcaaagcccagtccatcccacagtgccccaaaaagtgggcccatggggtctctagccgtccttaaagatgaagaaacagaggctcagagagggtaaggggcttgcccagggccacagagctacatggtggagcaggaagcacacgtggcagtgggggcaggcagccctggatgtgaatcctgtgcaaatcctgaccccaccattgtcagctcaatgacctggagcagctgacttaccagggcctcagtttcattaactggtgaatggagtcataatagaatctcctcggaggtcacaat

SEQ ID NO: 2746 - DNA, 6921 bp, Homo sapiens
  source 1..6921: mol_type = unassigned DNA; mol_type = unassigned DNA
atggacgaggaggaggatggagcgggcgccgaggagtcgggacagccccggagcttcatgcggctcaacgacctgtcgggggccgggggccggccggggccggggtcagcagaaaaggacccgggcagcgcggactccgaggcggaggggctgccgtacccggcgctggccccggtggttttcttctacttgagccaggacagccgcccgcggagctggtgtctccgcacggtctgtaacccctggtttgagcgcatcagcatgttggtcatccttctcaactgcgtgaccctgggcatgttccggccatgcgaggacatcgcctgtgactcccagcgctgccggatcctgcaggcctttgatgacttcatctttgccttctttgccgtggagatggtggtgaagatggtggccttgggcatctttgggaaaaagtgttacctgggagacacttggaaccggcttgactttttcatcgtcatcgcagggatgctggagtactcgctggacctgcagaacgtcagcttctcagctgtcaggacagtccgtgtgctgcgaccgctcagggccattaaccgggtgcccagcatgcgcatccttgtcacgttgctgctggatacgctgcccatgctgggcaacgtcctgctgctctgcttcttcgtcttcttcatcttcggcatcgtcggcgtccagctgtgggcagggctgcttcggaaccgatgcttcctacctgagaatttcagcctccccctgagcgtggacctggagcgctattaccagacagagaacgaggatgagagccccttcatctgctcccagccacgcgagaacggcatgcggtcctgcagaagcgtgcccacgctgcgcggggacgggggcggtggcccaccttgcggtctggactatgaggcctacaacagctccagcaacaccacctgtgtcaactggaaccagtactacaccaactgctcagcgggggagcacaaccccttcaagggcgccatcaactttgacaacattggctatgcctggatcgccatcttccaggtcatcacgctggagggctgggtcgacatcatgtactttgtgatggatgctcattccttctacaatttcatctacttcatcctcctcatcatcgtgggctccttcttcatgatcaacctgtgcctggtggtgattgccacgcagttctcagagaccaagcagcgggaaagccagctgatgcgggagcagcgtgtgcggttcctgtccaacgccagcaccctggctagcttctctgagcccggcagctgctatgaggagctgctcaagtacctggtgtacatccttcgtaaggcagcccgcaggctggctcaggtctctcgggcagcaggtgtgcgggttgggctgctcagcagcccagcacccctcgggggccaggagacccagcccagcagcagctgctctcgctcccaccgccgcctatccgtccaccacctggtgcaccaccaccaccaccatcaccaccactaccacctgggcaatgggacgctcagggccccccgggccagcccggagatccaggacagggatgccaatgggtcccgccggctcatgctgccaccaccctcgacgcctgccctctccggggccccccctggtggcgcagagtctgtgcacagcttctaccatgccgactgccacttagagccagtccgctgccaggcgccccctcccaggtccccatctgaggcatccggcaggactgtgggcagcgggaaggtgtatcccaccgtgcacaccagccctccaccggagacgctgaaggagaaggcactagtagaggtggctgccagctctgggcccccaaccctcaccagcctcaacatcccacccgggccctacagctccatgcacaagctgctggagacacagagtacaggtgcctgccaaagctcttgcaagatctccagcccttgcttgaaagcagacagtggagcctgtggtccagacagctgcccctactgtgcccgggccggggcaggggaggtggagctcgccgaccgtgaaatgcctgactcagacagcgaggcagtttatgagttcacacaggatgcccagcacagcgacctccgggacccccacagccggcggcaacggagcctgggcccagatgcagagcccagctctgtgctggccttctggaggctaatctgtgacaccttccgaaagattgtggacagcaagtactttggccggggaatcatgatcgccatcctggtcaacacactcagcatgggcatcgaataccacgagcagcccgaggagcttaccaacgccctagaaatcagcaacatcgtcttcaccagcctctttgccctggagatgctgctgaagctgcttgtgtatggtccctttggctacatcaagaatccctacaacatcttcgatggtgtcattgtggtcatcagcgtgtgggagatcgtgggccagcaggggggcggcctgtcggtgctgcggaccttccgcctgatgcgtgtgctgaagctggtgcgcttcctgccggcgctgcagcggcagctggtggtgctcatgaagaccatggacaacgtggccaccttctgcatgctgcttatgctcttcatcttcatcttcagcatcctgggcatgcatctcttcggctgcaagtttgcctctgagcgggatggggacaccctgccagaccggaagaattttgactccttgctctgggccatcgtcactgtctttcagatcctgacccaggaggactggaacaaagtcctctacaatggtatggcctccacgtcgtcctgggcggccctttatttcattgccctcatgaccttcggcaactacgtgctcttcaatttgctggtcgccattctggtggagggcttccaggcggagggagatgccaacaagtccgaatcagagcccgatttcttctcacccagcctggatggtgatggggacaggaagaagtgcttggccttggtgtccctgggagagcacccggagctgcggaagagcctgctgccgcctctcatcatccacacggccgccacacccatgtcgctgcccaagagcaccagcacgggcctgggcgaggcgctgggccctgcgtcgcgccgcaccagcagcagcgggtcggcagagcctggggcggcccacgagatgaagtcaccgcccagcgcccgcagctctccgcacagcccctggagcgctgcaagcagctggaccagcaggcgctccagccggaacagcctcggccgtgcacccagcctgaagcggagaagcccaagtggagagcggcggtccctgttgtcgggagaaggccaggagagccaggatgaagaggagagctcagaagaggagcgggccagccctgcgggcagtgaccatcgccacagggggtccctggagcgggaggccaagagttcctttgacctgccagacacactgcaggtgccagggctgcatcgcactgccagtggccgagggtctgcttctgagcaccaggactgcaatggcaagtcggcttcagggcgcctggcccgggccctgcggcctgatgaccccccactggatggggatgacgccgatgacgagggcaacctgagcaaaggggaacgggtccgcgcgtggatccgagcccgactccctgcctgctgcctcgagcgagactcctggtcagcctacatcttccctcctcagtccaggttccgcctcctgtgtcaccggatcatcacccacaagatgttcgaccacgtggtccttgtcatcatcttccttaactgcatcaccatcgccatggagcgccccaaaattgacccccacagcgctgaacgcatcttcctgaccctctccaattacatcttcaccgcagtctttctggctgaaatgacagtgaaggtggtggcactgggctggtgcttcggggagcaggcgtacctgcggagcagttggaacgtgctggacgggctgttggtgctcatctccgtcatcgacattctggtgtccatggtctctgacagcggcaccaagatcctgggcatgctgagggtgctgcggctgctgcggaccctgcgcccgctcagggtgatcagccgggcgcaggggctgaagctggtggtggagacgctgatgtcctcactgaaacccatcggcaacattgtagtcatctgctgtgccttcttcatcattttcggcatcttgggggtgcagctcttcaaagggaagtttttcgtgtgccagggcgaggataccaggaacatcaccaataaatcggactgtgccgaggccagttaccggtgggtccggcacaagtacaactttgacaaccttggccaggccctgatgtccctgttcgttttggcctccaaggatggttgggtggacatcatgtacgatgggctggatgctgtgggcgtggaccagcagcccatcatgaaccacaacccctggatgctgctgtacttcatctcgttcctgctcattgtggccttctttgtcctgaacatgtttgtgggtgtggtggtggagaacttccacaagtgtcggcagcaccaggaggaagaggaggcccggcggcgggaggagaagcgcctacgaagactggagaaaaagagaaggaatctaatgctggacgatgtaattgcttccggcagctcagccagcgctgcgtcagaagcccagtgcaaaccttactactccgactactcccgcttccggctcctcgtccaccacttgtgcaccagccactacctggacctcttcatcacaggtgtcatcgggctgaacgtggtcaccatggccatggagcactaccagcagccccagattctggatgaggctctgaagatctgcaactacatcttcactgtcatctttgtcttggagtcagttttcaaacttgtggcctttggtttccgtcggttcttccaggacaggtggaaccagctggacctggccattgtgctgctgtccatcatgggcatcacgctggaggaaatcgaggtcaacgcctcgctgcccatcaaccccaccatcatccgcatcatgagggtgctgcgcattgcccgagtgctgaagctgctgaagatggctgtgggcatgcgggcgctgctggacacggtgatgcaggccctgccccaggtggggaacctgggacttctcttcatgttgttgtttttcatctttgcagctctgggcgtggagctctttggagacctggagtgtgacgagacacacccctgtgagggcctgggccgtcatgccacctttcggaactttggcatggccttcctaaccctcttccgagtctccacaggtgacaattggaatggcattatgaaggacaccctccgggactgtgaccaggagtccacctgctacaacacggtcatctcgcctatctactttgtgtccttcgtgctgacggcccagttcgtgctagtcaacgtggtgatcgccgtgctgatgaagcacctggaggagagcaacaaggaggccaaggaggaggccgagctagaggctgagctggagctggagatgaagaccctcagcccccagccccactcgccactgggcagccccttcctctggcctggggtcgagggccccgacagccccgacagccccaagcctggggctctgcacccagcggcccacgcgagatcagcctcccacttttccctggagcaccccacgatccctctagctgagatggaggctctgtctctgacgtcagagattgtgtctgaaccgtcctgctctctagctctgacggatgactctttgcctgatgacatgcacacactcttacttagtgccctggagagcaatatgcagccccaccccacggagctgccaggaccagacttactgactgtgcggaagtctggggtcagccgaacgcactctctgcccaatgacagctacatgtgtcggcatgggagcactgccgaggggcccctgggacacaggggctgggggctccccaaagctcagtcaggctccgtcttgtccgttcactcccagccagcagataccagctacatcctgcagcttcccaaagatgcacctcatctgctccagccccacagcgccccaacctggggcaccatccccaaactgcccccaccaggacgctcccctttggctcagaggccactcaggcgccaggcagcaataaggactgactccttggacgttcagggtctgggcagccgggaagacctgctggcagaggtgagtgggccctccccgcccctggcccgggcctactctttctggggccagtcaagtacccaggcacagcagcactcccgcagccacagcaagatctccaagcacatgaccccgccagccccttgcccaggcccagaacccaactggggcaagggccctccagagaccagaagcagcttagagttggacacggagctgagctggatttcaggagacctcctgccccctggcggccaggaggagcccccatccccacgggacctgaagaagtgctacagcgtggaggcccagagctgccagcgccggcctacgtcctggctggatgagcagaggagacactctatcgccgtcagctgcctggacagcggctcccaaccccacctgggcacagacccctctaaccttgggggccagcctcttggggggcctgggagccggcccaagaaaaaactcagcccgcctagtatcaccatagacccccccgagagccaaggtcctcggaccccgcccagccctggtatctgcctccggaggagggctccgtccagcgactccaaggatcccttggcctctggcccccctgacagcatggctgcctcgccctccccaaagaaagatgtgctgagtctctccggtttatcctctgacccagcagacctggacccctga

SEQ ID NO: 2747 - DNA, 6837 bp, Homo sapiens
  source 1..6837: mol_type = unassigned DNA; mol_type = unassigned DNA
atggacgaggaggaggatggagcgggcgccgaggagtcgggacagccccggagcttcatgcggctcaacgacctgtcgggggccgggggccggccggggccggggtcagcagaaaaggacccgggcagcgcggactccgaggcggaggggctgccgtacccggcgctggccccggtggttttcttctacttgagccaggacagccgcccgcggagctggtgtctccgcacggtctgtaacccctggtttgagcgcatcagcatgttggtcatccttctcaactgcgtgaccctgggcatgttccggccatgcgaggacatcgcctgtgactcccagcgctgccggatcctgcaggcctttgatgacttcatctttgccttctttgccgtggagatggtggtgaagatggtggccttgggcatctttgggaaaaagtgttacctgggagacacttggaaccggcttgactttttcatcgtcatcgcagggatgctggagtactcgctggacctgcagaacgtcagcttctcagctgtcaggacagtccgtgtgctgcgaccgctcagggccattaaccgggtgcccagcatgcgcatccttgtcacgttgctgctggatacgctgcccatgctgggcaacgtcctgctgctctgcttcttcgtcttcttcatcttcggcatcgtcggcgtccagctgtgggcagggctgcttcggaaccgatgcttcctacctgagaatttcagcctccccctgagcgtggacctggagcgctattaccagacagagaacgaggatgagagccccttcatctgctcccagccacgcgagaacggcatgcggtcctgcagaagcgtgcccacgctgcgcggggacgggggcggtggcccaccttgcggtctggactatgaggcctacaacagctccagcaacaccacctgtgtcaactggaaccagtactacaccaactgctcagcgggggagcacaaccccttcaagggcgccatcaactttgacaacattggctatgcctggatcgccatcttccaggtcatcacgctggagggctgggtcgacatcatgtactttgtgatggatgctcattccttctacaatttcatctacttcatcctcctcatcatcgtgggctccttcttcatgatcaacctgtgcctggtggtgattgccacgcagttctcagagaccaagcagcgggaaagccagctgatgcgggagcagcgtgtgcggttcctgtccaacgccagcaccctggctagcttctctgagcccggcagctgctatgaggagctgctcaagtacctggtgtacatccttcgtaaggcagcccgcaggctggctcaggtctctcgggcagcaggtgtgcgggttgggctgctcagcagcccagcacccctcgggggccaggagacccagcccagcagcagctgctctcgctcccaccgccgcctatccgtccaccacctggtgcaccaccaccaccaccatcaccaccactaccacctgggcaatgggacgctcagggccccccgggccagcccggagatccaggacagggatgccaatgggtcccgccggctcatgctgccaccaccctcgacgcctgccctctccggggccccccctggtggcgcagagtctgtgcacagcttctaccatgccgactgccacttagagccagtccgctgccaggcgccccctcccaggtccccatctgaggcatccggcaggactgtgggcagcgggaaggtgtatcccaccgtgcacaccagccctccaccggagacgctgaaggagaaggcactagtagaggtggctgccagctctgggcccccaaccctcaccagcctcaacatcccacccgggccctacagctccatgcacaagctgctggagacacagagtacaggtgcctgccaaagctcttgcaagatctccagcccttgcttgaaagcagacagtggagcctgtggtccagacagctgcccctactgtgcccgggccggggcaggggaggtggagctcgccgaccgtgaaatgcctgactcagacagcgaggcagtttatgagttcacacaggatgcccagcacagcgacctccgggacccccacagccggcggcaacggagcctgggcccagatgcagagcccagctctgtgctggccttctggaggctaatctgtgacaccttccgaaagattgtggacagcaagtactttggccggggaatcatgatcgccatcctggtcaacacactcagcatgggcatcgaataccacgagcagcccgaggagcttaccaacgccctagaaatcagcaacatcgtcttcaccagcctctttgccctggagatgctgctgaagctgcttgtgtatggtccctttggctacatcaagaatccctacaacatcttcgatggtgtcattgtggtcatcagcgtgtgggagatcgtgggccagcaggggggcggcctgtcggtgctgcggaccttccgcctgatgcgtgtgctgaagctggtgcgcttcctgccggcgctgcagcggcagctggtggtgctcatgaagaccatggacaacgtggccaccttctgcatgctgcttatgctcttcatcttcatcttcagcatcctgggcatgcatctcttcggctgcaagtttgcctctgagcgggatggggacaccctgccagaccggaagaattttgactccttgctctgggccatcgtcactgtctttcagatcctgacccaggaggactggaacaaagtcctctacaatggtatggcctccacgtcgtcctgggcggccctttatttcattgccctcatgaccttcggcaactacgtgctcttcaatttgctggtcgccattctggtggagggcttccaggcggaggaaatcagcaaacgggaagatgcgagtggacagttaagctgtattcagctgcctgtcgactcccaggggggagatgccaacaagtccgaatcagagcccgatttcttctcacccagcctggatggtgatggggacaggaagaagtgcttggccttggtgtccctgggagagcacccggagctgcggaagagcctgctgccgcctctcatcatccacacggccgccacacccatgtcgctgcccaagagcaccagcacgggcctgggcgaggcgctgggccctgcgtcgcgccgcaccagcagcagcgggtcggcagagcctggggcggcccacgagatgaagtcaccgcccagcgcccgcagctctccgcacagcccctggagcgctgcaagcagctggaccagcaggcgctccagccggaacagcctcggccgtgcacccagcctgaagcggagaagcccaagtggagagcggcggtccctgttgtcgggagaaggccaggagagccaggatgaagaggagagctcagaagaggagcgggccagccctgcgggcagtgaccatcgccacagggggtccctggagcgggaggccaagagttcctttgacctgccagacacactgcaggtgccagggctgcatcgcactgccagtggccgagggtctgcttctgagcaccaggactgcaatggcaagtcggcttcagggcgcctggcccgggccctgcggcctgatgaccccccactggatggggatgacgccgatgacgagggcaacctgagcaaaggggaacgggtccgcgcgtggatccgagcccgactccctgcctgctgcctcgagcgagactcctggtcagcctacatcttccctcctcagtccaggttccgcctcctgtgtcaccggatcatcacccacaagatgttcgaccacgtggtccttgtcatcatcttccttaactgcatcaccatcgccatggagcgccccaaaattgacccccacagcgctgaacgcatcttcctgaccctctccaattacatcttcaccgcagtctttctggctgaaatgacagtgaaggtggtggcactgggctggtgcttcggggagcaggcgtacctgcggagcagttggaacgtgctggacgggctgttggtgctcatctccgtcatcgacattctggtgtccatggtctctgacagcggcaccaagatcctgggcatgctgagggtgctgcggctgctgcggaccctgcgcccgctcagggtgatcagccgggcgcaggggctgaagctggtggtggagacgctgatgtcctcactgaaacccatcggcaacattgtagtcatctgctgtgccttcttcatcattttcggcatcttgggggtgcagctcttcaaagggaagtttttcgtgtgccagggcgaggataccaggaacatcaccaataaatcggactgtgccgaggccagttaccggtgggtccggcacaagtacaactttgacaaccttggccaggccctgatgtccctgttcgttttggcctccaaggatggttgggtggacatcatgtacgatgggctggatgctgtgggcgtggaccagcagcccatcatgaaccacaacccctggatgctgctgtacttcatctcgttcctgctcattgtggccttctttgtcctgaacatgtttgtgggtgtggtggtggagaacttccacaagtgtcggcagcaccaggaggaagaggaggcccggcggcgggaggagaagcgcctacgaagactggagaaaaagagaaggagtaaggagaagcagatggctgaagcccagtgcaaaccttactactccgactactcccgcttccggctcctcgtccaccacttgtgcaccagccactacctggacctcttcatcacaggtgtcatcgggctgaacgtggtcaccatggccatggagcactaccagcagccccagattctggatgaggctctgaagatctgcaactacatcttcactgtcatctttgtcttggagtcagttttcaaacttgtggcctttggtttccgtcggttcttccaggacaggtggaaccagctggacctggccattgtgctgctgtccatcatgggcatcacgctggaggaaatcgaggtcaacgcctcgctgcccatcaaccccaccatcatccgcatcatgagggtgctgcgcattgcccgagtgctgaagctgctgaagatggctgtgggcatgcgggcgctgctggacacggtgatgcaggccctgccccaggtggggaacctgggacttctcttcatgttgttgtttttcatctttgcagctctgggcgtggagctctttggagacctggagtgtgacgagacacacccctgtgagggcctgggccgtcatgccacctttcggaactttggcatggccttcctaaccctcttccgagtctccacaggtgacaattggaatggcattatgaaggacaccctccgggactgtgaccaggagtccacctgctacaacacggtcatctcgcctatctactttgtgtccttcgtgctgacggcccagttcgtgctagtcaacgtggtgatcgccgtgctgatgaagcacctggaggagagcaacaaggaggccaaggaggaggccgagctagaggctgagctggagctggagatgaagaccctcagcccccagccccactcgccactgggcagccccttcctctggcctggggtcgagggccccgacagccccgacagccccaagcctggggctctgcacccagcggcccacgcgagatcagcctcccacttttccctggagcaccccacgatgcagccccaccccacggagctgccaggaccagacttactgactgtgcggaagtctggggtcagccgaacgcactctctgcccaatgacagctacatgtgtcggcatgggagcactgccgaggggcccctgggacacaggggctgggggctccccaaagctcagtcaggctccgtcttgtccgttcactcccagccagcagataccagctacatcctgcagcttcccaaagatgcacctcatctgctccagccccacagcgccccaacctggggcaccatccccaaactgcccccaccaggacgctcccctttggctcagaggccactcaggcgccaggcagcaataaggactgactccttggacgttcagggtctgggcagccgggaagacctgctggcagaggtgagtgggccctccccgcccctggcccgggcctactctttctggggccagtcaagtacccaggcacagcagcactcccgcagccacagcaagatctccaagcacatgaccccgccagccccttgcccaggcccagaacccaactggggcaagggccctccagagaccagaagcagcttagagttggacacggagctgagctggatttcaggagacctcctgccccctggcggccaggaggagcccccatccccacgggacctgaagaagtgctacagcgtggaggcccagagctgccagcgccggcctacgtcctggctggatgagcagaggagacactctatcgccgtcagctgcctggacagcggctcccaaccccacctgggcacagacccctctaaccttgggggccagcctcttggggggcctgggagccggcccaagaaaaaactcagcccgcctagtatcaccatagacccccccgagagccaaggtcctcggaccccgcccagccctggtatctgcctccggaggagggctccgtccagcgactccaaggatcccttggcctctggcccccctgacagcatggctgcctcgccctccccaaagaaagatgtgctgagtctctccggtttatcctctgacccagcagacctggacccctgagtcctgccccacttt

SEQ ID NO: 2748 - DNA, 6735 bp, Homo sapiens
  source 1..6735: mol_type = unassigned DNA; mol_type = unassigned DNA
atggacgaggaggaggatggagcgggcgccgaggagtcgggacagccccggagcttcatgcggctcaacgacctgtcgggggccgggggccggccggggccggggtcagcagaaaaggacccgggcagcgcggactccgaggcggaggggctgccgtacccggcgctggccccggtggttttcttctacttgagccaggacagccgcccgcggagctggtgtctccgcacggtctgtaacccctggtttgagcgcatcagcatgttggtcatccttctcaactgcgtgaccctgggcatgttccggccatgcgaggacatcgcctgtgactcccagcgctgccggatcctgcaggcctttgatgacttcatctttgccttctttgccgtggagatggtggtgaagatggtggccttgggcatctttgggaaaaagtgttacctgggagacacttggaaccggcttgactttttcatcgtcatcgcagggatgctggagtactcgctggacctgcagaacgtcagcttctcagctgtcaggacagtccgtgtgctgcgaccgctcagggccattaaccgggtgcccagcatgcgcatccttgtcacgttgctgctggatacgctgcccatgctgggcaacgtcctgctgctctgcttcttcgtcttcttcatcttcggcatcgtcggcgtccagctgtgggcagggctgcttcggaaccgatgcttcctacctgagaatttcagcctccccctgagcgtggacctggagcgctattaccagacagagaacgaggatgagagccccttcatctgctcccagccacgcgagaacggcatgcggtcctgcagaagcgtgcccacgctgcgcggggacgggggcggtggcccaccttgcggtctggactatgaggcctacaacagctccagcaacaccacctgtgtcaactggaaccagtactacaccaactgctcagcgggggagcacaaccccttcaagggcgccatcaactttgacaacattggctatgcctggatcgccatcttccaggtcatcacgctggagggctgggtcgacatcatgtactttgtgatggatgctcattccttctacaatttcatctacttcatcctcctcatcatcgtgggctccttcttcatgatcaacctgtgcctggtggtgattgccacgcagttctcagagaccaagcagcgggaaagccagctgatgcgggagcagcgtgtgcggttcctgtccaacgccagcaccctggctagcttctctgagcccggcagctgctatgaggagctgctcaagtacctggtgtacatccttcgtaaggcagcccgcaggctggctcaggtctctcgggcagcaggtgtgcgggttgggctgctcagcagcccagcacccctcgggggccaggagacccagcccagcagcagctgctctcgctcccaccgccgcctatccgtccaccacctggtgcaccaccaccaccaccatcaccaccactaccacctgggcaatgggacgctcagggccccccgggccagcccggagatccaggacagggatgccaatgggtcccgccggctcatgctgccaccaccctcgacgcctgccctctccggggccccccctggtggcgcagagtctgtgcacagcttctaccatgccgactgccacttagagccagtccgctgccaggcgccccctcccaggtccccatctgaggcatccggcaggactgtgggcagcgggaaggtgtatcccaccgtgcacaccagccctccaccggagacgctgaaggagaaggcactagtagaggtggctgccagctctgggcccccaaccctcaccagcctcaacatcccacccgggccctacagctccatgcacaagctgctggagacacagagtacaggtgcctgccaaagctcttgcaagatctccagcccttgcttgaaagcagacagtggagcctgtggtccagacagctgcccctactgtgcccgggccggggcaggggaggtggagctcgccgaccgtgaaatgcctgactcagacagcgaggcagtttatgagttcacacaggatgcccagcacagcgacctccgggacccccacagccggcggcaacggagcctgggcccagatgcagagcccagctctgtgctggccttctggaggctaatctgtgacaccttccgaaagattgtggacagcaagtactttggccggggaatcatgatcgccatcctggtcaacacactcagcatgggcatcgaataccacgagcagcccgaggagcttaccaacgccctagaaatcagcaacatcgtcttcaccagcctctttgccctggagatgctgctgaagctgcttgtgtatggtccctttggctacatcaagaatccctacaacatcttcgatggtgtcattgtggtcatcagcgtgtgggagatcgtgggccagcaggggggcggcctgtcggtgctgcggaccttccgcctgatgcgtgtgctgaagctggtgcgcttcctgccggcgctgcagcggcagctggtggtgctcatgaagaccatggacaacgtggccaccttctgcatgctgcttatgctcttcatcttcatcttcagcatcctgggcatgcatctcttcggctgcaagtttgcctctgagcgggatggggacaccctgccagaccggaagaattttgactccttgctctgggccatcgtcactgtctttcagatcctgacccaggaggactggaacaaagtcctctacaatggtatggcctccacgtcgtcctgggcggccctttatttcattgccctcatgaccttcggcaactacgtgctcttcaatttgctggtcgccattctggtggagggcttccaggcggaggaaatcagcaaacgggaagatgcgagtggacagttaagctgtattcagctgcctgtcgactcccaggggggagatgccaacaagtccgaatcagagcccgatttcttctcacccagcctggatggtgatggggacaggaagaagtgcttggccttggtgtccctgggagagcacccggagctgcggaagagcctgctgccgcctctcatcatccacacggccgccacacccatgtcgctgcccaagagcaccagcacgggcctgggcgaggcgctgggccctgcgtcgcgccgcaccagcagcagcgggtcggcagagcctggggcggcccacgagatgaagtcaccgcccagcgcccgcagctctccgcacagcccctggagcgctgcaagcagctggaccagcaggcgctccagccggaacagcctcggccgtgcacccagcctgaagcggagaagcccaagtggagagcggcggtccctgttgtcgggagaaggccaggagagccaggatgaagaggagagctcagaagaggagcgggccagccctgcgggcagtgaccatcgccacagggggtccctggagcgggaggccaagagttcctttgacctgccagacacactgcaggtgccagggctgcatcgcactgccagtggccgagggtctgcttctgagcaccaggactgcaatggcaagtcggcttcagggcgcctggcccgggccctgcggcctgatgaccccccactggatggggatgacgccgatgacgagggcaacctgagcaaaggggaacgggtccgcgcgtggatccgagcccgactccctgcctgctgcctcgagcgagactcctggtcagcctacatcttccctcctcagtccaggttccgcctcctgtgtcaccggatcatcacccacaagatgttcgaccacgtggtccttgtcatcatcttccttaactgcatcaccatcgccatggagcgccccaaaattgacccccacagcgctgaacgcatcttcctgaccctctccaattacatcttcaccgcagtctttctggctgaaatgacagtgaaggtggtggcactgggctggtgcttcggggagcaggcgtacctgcggagcagttggaacgtgctggacgggctgttggtgctcatctccgtcatcgacattctggtgtccatggtctctgacagcggcaccaagatcctgggcatgctgagggtgctgcggctgctgcggaccctgcgcccgctcagggtgatcagccgggcgcaggggctgaagctggtggtggagacgctgatgtcctcactgaaacccatcggcaacattgtagtcatctgctgtgccttcttcatcattttcggcatcttgggggtgcagctcttcaaagggaagtttttcgtgtgccagggcgaggataccaggaacatcaccaataaatcggactgtgccgaggccagttaccggtgggtccggcacaagtacaactttgacaaccttggccaggccctgatgtccctgttcgttttggcctccaaggatggttgggtggacatcatgtacgatgggctggatgctgtgggcgtggaccagcagaacttccacaagtgtcggcagcaccaggaggaagaggaggcccggcggcgggaggagaagcgcctacgaagactggagaaaaagagaaggagtaaggagaagcagatggctgaagcccagtgcaaaccttactactccgactactcccgcttccggctcctcgtccaccacttgtgcaccagccactacctggacctcttcatcacaggtgtcatcgggctgaacgtggtcaccatggccatggagcactaccagcagccccagattctggatgaggctctgaagatctgcaactacatcttcactgtcatctttgtcttggagtcagttttcaaacttgtggcctttggtttccgtcggttcttccaggacaggtggaaccagctggacctggccattgtgctgctgtccatcatgggcatcacgctggaggaaatcgaggtcaacgcctcgctgcccatcaaccccaccatcatccgcatcatgagggtgctgcgcattgcccgagtgctgaagctgctgaagatggctgtgggcatgcgggcgctgctggacacggtgatgcaggccctgccccaggtggggaacctgggacttctcttcatgttgttgtttttcatctttgcagctctgggcgtggagctctttggagacctggagtgtgacgagacacacccctgtgagggcctgggccgtcatgccacctttcggaactttggcatggccttcctaaccctcttccgagtctccacaggtgacaattggaatggcattatgaaggacaccctccgggactgtgaccaggagtccacctgctacaacacggtcatctcgcctatctactttgtgtccttcgtgctgacggcccagttcgtgctagtcaacgtggtgatcgccgtgctgatgaagcacctggaggagagcaacaaggaggccaaggaggaggccgagctagaggctgagctggagctggagatgaagaccctcagcccccagccccactcgccactgggcagccccttcctctggcctggggtcgagggccccgacagccccgacagccccaagcctggggctctgcacccagcggcccacgcgagatcagcctcccacttttccctggagcaccccacgatgcagccccaccccacggagctgccaggaccagacttactgactgtgcggaagtctggggtcagccgaacgcactctctgcccaatgacagctacatgtgtcggcatgggagcactgccgaggggcccctgggacacaggggctgggggctccccaaagctcagtcaggctccgtcttgtccgttcactcccagccagcagataccagctacatcctgcagcttcccaaagatgcacctcatctgctccagccccacagcgccccaacctggggcaccatccccaaactgcccccaccaggacgctcccctttggctcagaggccactcaggcgccaggcagcaataaggactgactccttggacgttcagggtctgggcagccgggaagacctgctggcagaggtgagtgggccctccccgcccctggcccgggcctactctttctggggccagtcaagtacccaggcacagcagcactcccgcagccacagcaagatctccaagcacatgaccccgccagccccttgcccaggcccagaacccaactggggcaagggccctccagagaccagaagcagcttagagttggacacggagctgagctggatttcaggagacctcctgccccctggcggccaggaggagcccccatccccacgggacctgaagaagtgctacagcgtggaggcccagagctgccagcgccggcctacgtcctggctggatgagcagaggagacactctatcgccgtcagctgcctggacagcggctcccaaccccacctgggcacagacccctctaaccttgggggccagcctcttggggggcctgggagccggcccaagaaaaaactcagcccgcctagtatcaccatagacccccccgagagccaaggtcctcggaccccgcccagccctggtatctgcctccggaggagggctccgtccagcgactccaaggatcccttggcctctggcccccctgacagcatggctgcctcgccctccccaaagaaagatgtgctgagtctctccggtttatcctctgacccagcagacctggacccctgagtcctgccccacttt

SEQ ID NO: 2749 - DNA, 6699 bp, Homo sapiens
  source 1..6699: mol_type = unassigned DNA; mol_type = unassigned DNA
atggacgaggaggaggatggagcgggcgccgaggagtcgggacagccccggagcttcatgcggctcaacgacctgtcgggggccgggggccggccggggccggggtcagcagaaaaggacccgggcagcgcggactccgaggcggaggggctgccgtacccggcgctggccccggtggttttcttctacttgagccaggacagccgcccgcggagctggtgtctccgcacggtctgtaacccctggtttgagcgcatcagcatgttggtcatccttctcaactgcgtgaccctgggcatgttccggccatgcgaggacatcgcctgtgactcccagcgctgccggatcctgcaggcctttgatgacttcatctttgccttctttgccgtggagatggtggtgaagatggtggccttgggcatctttgggaaaaagtgttacctgggagacacttggaaccggcttgactttttcatcgtcatcgcagggatgctggagtactcgctggacctgcagaacgtcagcttctcagctgtcaggacagtccgtgtgctgcgaccgctcagggccattaaccgggtgcccagcatgcgcatccttgtcacgttgctgctggatacgctgcccatgctgggcaacgtcctgctgctctgcttcttcgtcttcttcatcttcggcatcgtcggcgtccagctgtgggcagggctgcttcggaaccgatgcttcctacctgagaatttcagcctccccctgagcgtggacctggagcgctattaccagacagagaacgaggatgagagccccttcatctgctcccagccacgcgagaacggcatgcggtcctgcagaagcgtgcccacgctgcgcggggacgggggcggtggcccaccttgcggtctggactatgaggcctacaacagctccagcaacaccacctgtgtcaactggaaccagtactacaccaactgctcagcgggggagcacaaccccttcaagggcgccatcaactttgacaacattggctatgcctggatcgccatcttccaggtcatcacgctggagggctgggtcgacatcatgtactttgtgatggatgctcattccttctacaatttcatctacttcatcctcctcatcatcgtgggctccttcttcatgatcaacctgtgcctggtggtgattgccacgcagttctcagagaccaagcagcgggaaagccagctgatgcgggagcagcgtgtgcggttcctgtccaacgccagcaccctggctagcttctctgagcccggcagctgctatgaggagctgctcaagtacctggtgtacatccttcgtaaggcagcccgcaggctggctcaggtctctcgggcagcaggtgtgcgggttgggctgctcagcagcccagcacccctcgggggccaggagacccagcccagcagcagctgctctcgctcccaccgccgcctatccgtccaccacctggtgcaccaccaccaccaccatcaccaccactaccacctgggcaatgggacgctcagggccccccgggccagcccggagatccaggacagggatgccaatgggtcccgccggctcatgctgccaccaccctcgacgcctgccctctccggggccccccctggtggcgcagagtctgtgcacagcttctaccatgccgactgccacttagagccagtccgctgccaggcgccccctcccaggtccccatctgaggcatccggcaggactgtgggcagcgggaaggtgtatcccaccgtgcacaccagccctccaccggagacgctgaaggagaaggcactagtagaggtggctgccagctctgggcccccaaccctcaccagcctcaacatcccacccgggccctacagctccatgcacaagctgctggagacacagagtacaggtgcctgccaaagctcttgcaagatctccagcccttgcttgaaagcagacagtggagcctgtggtccagacagctgcccctactgtgcccgggccggggcaggggaggtggagctcgccgaccgtgaaatgcctgactcagacagcgaggcagtttatgagttcacacaggatgcccagcacagcgacctccgggacccccacagccggcggcaacggagcctgggcccagatgcagagcccagctctgtgctggccttctggaggctaatctgtgacaccttccgaaagattgtggacagcaagtactttggccggggaatcatgatcgccatcctggtcaacacactcagcatgggcatcgaataccacgagcagcccgaggagcttaccaacgccctagaaatcagcaacatcgtcttcaccagcctctttgccctggagatgctgctgaagctgcttgtgtatggtccctttggctacatcaagaatccctacaacatcttcgatggtgtcattgtggtcatcagcgtgtgggagatcgtgggccagcaggggggcggcctgtcggtgctgcggaccttccgcctgatgcgtgtgctgaagctggtgcgcttcctgccggcgctgcagcggcagctggtggtgctcatgaagaccatggacaacgtggccaccttctgcatgctgcttatgctcttcatcttcatcttcagcatcctgggcatgcatctcttcggctgcaagtttgcctctgagcgggatggggacaccctgccagaccggaagaattttgactccttgctctgggccatcgtcactgtctttcagatcctgacccaggaggactggaacaaagtcctctacaatggtatggcctccacgtcgtcctgggcggccctttatttcattgccctcatgaccttcggcaactacgtgctcttcaatttgctggtcgccattctggtggagggcttccaggcggagggagatgccaacaagtccgaatcagagcccgatttcttctcacccagcctggatggtgatggggacaggaagaagtgcttggccttggtgtccctgggagagcacccggagctgcggaagagcctgctgccgcctctcatcatccacacggccgccacacccatgtcgctgcccaagagcaccagcacgggcctgggcgaggcgctgggccctgcgtcgcgccgcaccagcagcagcgggtcggcagagcctggggcggcccacgagatgaagtcaccgcccagcgcccgcagctctccgcacagcccctggagcgctgcaagcagctggaccagcaggcgctccagccggaacagcctcggccgtgcacccagcctgaagcggagaagcccaagtggagagcggcggtccctgttgtcgggagaaggccaggagagccaggatgaagaggagagctcagaagaggagcgggccagccctgcgggcagtgaccatcgccacagggggtccctggagcgggaggccaagagttcctttgacctgccagacacactgcaggtgccagggctgcatcgcactgccagtggccgagggtctgcttctgagcaccaggactgcaatggcaagtcggcttcagggcgcctggcccgggccctgcggcctgatgaccccccactggatggggatgacgccgatgacgagggcaacctgagcaaaggggaacgggtccgcgcgtggatccgagcccgactccctgcctgctgcctcgagcgagactcctggtcagcctacatcttccctcctcagtccaggttccgcctcctgtgtcaccggatcatcacccacaagatgttcgaccacgtggtccttgtcatcatcttccttaactgcatcaccatcgccatggagcgccccaaaattgacccccacagcgctgaacgcatcttcctgaccctctccaattacatcttcaccgcagtctttctggctgaaatgacagtgaaggtggtggcactgggctggtgcttcggggagcaggcgtacctgcggagcagttggaacgtgctggacgggctgttggtgctcatctccgtcatcgacattctggtgtccatggtctctgacagcggcaccaagatcctgggcatgctgagggtgctgcggctgctgcggaccctgcgcccgctcagggtgatcagccgggcgcaggggctgaagctggtggtggagacgctgatgtcctcactgaaacccatcggcaacattgtagtcatctgctgtgccttcttcatcattttcggcatcttgggggtgcagctcttcaaagggaagtttttcgtgtgccagggcgaggataccaggaacatcaccaataaatcggactgtgccgaggccagttaccggtgggtccggcacaagtacaactttgacaaccttggccaggccctgatgtccctgttcgttttggcctccaaggatggttgggtggacatcatgtacgatgggctggatgctgtgggcgtggaccagcagaacttccacaagtgtcggcagcaccaggaggaagaggaggcccggcggcgggaggagaagcgcctacgaagactggagaaaaagagaaggaatctaatgctggacgatgtaattgcttccggcagctcagccagcgctgcgtcagaagcccagtgcaaaccttactactccgactactcccgcttccggctcctcgtccaccacttgtgcaccagccactacctggacctcttcatcacaggtgtcatcgggctgaacgtggtcaccatggccatggagcactaccagcagccccagattctggatgaggctctgaagatctgcaactacatcttcactgtcatctttgtcttggagtcagttttcaaacttgtggcctttggtttccgtcggttcttccaggacaggtggaaccagctggacctggccattgtgctgctgtccatcatgggcatcacgctggaggaaatcgaggtcaacgcctcgctgcccatcaaccccaccatcatccgcatcatgagggtgctgcgcattgcccgagtgctgaagctgctgaagatggctgtgggcatgcgggcgctgctggacacggtgatgcaggccctgccccaggtggggaacctgggacttctcttcatgttgttgtttttcatctttgcagctctgggcgtggagctctttggagacctggagtgtgacgagacacacccctgtgagggcctgggccgtcatgccacctttcggaactttggcatggccttcctaaccctcttccgagtctccacaggtgacaattggaatggcattatgaaggacaccctccgggactgtgaccaggagtccacctgctacaacacggtcatctcgcctatctactttgtgtccttcgtgctgacggcccagttcgtgctagtcaacgtggtgatcgccgtgctgatgaagcacctggaggagagcaacaaggaggccaaggaggaggccgagctagaggctgagctggagctggagatgaagaccctcagcccccagccccactcgccactgggcagccccttcctctggcctggggtcgagggccccgacagccccgacagccccaagcctggggctctgcacccagcggcccacgcgagatcagcctcccacttttccctggagcaccccacgatgcagccccaccccacggagctgccaggaccagacttactgactgtgcggaagtctggggtcagccgaacgcactctctgcccaatgacagctacatgtgtcggcatgggagcactgccgaggggcccctgggacacaggggctgggggctccccaaagctcagtcaggctccgtcttgtccgttcactcccagccagcagataccagctacatcctgcagcttcccaaagatgcacctcatctgctccagccccacagcgccccaacctggggcaccatccccaaactgcccccaccaggacgctcccctttggctcagaggccactcaggcgccaggcagcaataaggactgactccttggacgttcagggtctgggcagccgggaagacctgctggcagaggtgagtgggccctccccgcccctggcccgggcctactctttctggggccagtcaagtacccaggcacagcagcactcccgcagccacagcaagatctccaagcacatgaccccgccagccccttgcccaggcccagaacccaactggggcaagggccctccagagaccagaagcagcttagagttggacacggagctgagctggatttcaggagacctcctgccccctggcggccaggaggagcccccatccccacgggacctgaagaagtgctacagcgtggaggcccagagctgccagcgccggcctacgtcctggctggatgagcagaggagacactctatcgccgtcagctgcctggacagcggctcccaaccccacctgggcacagacccctctaaccttgggggccagcctcttggggggcctgggagccggcccaagaaaaaactcagcccgcctagtatcaccatagacccccccgagagccaaggtcctcggaccccgcccagccctggtatctgcctccggaggagggctccgtccagcgactccaaggatcccttggcctctggcccccctgacagcatggctgcctcgccctccccaaagaaagatgtgctgagtctctccggtttatcctctgacccagcagacctggacccctgagtcctgccccacttt

SEQ ID NO: 2750 - DNA, 6714 bp, Homo sapiens
  source 1..6714: mol_type = unassigned DNA; mol_type = unassigned DNA
atggacgaggaggaggatggagcgggcgccgaggagtcgggacagccccggagcttcatgcggctcaacgacctgtcgggggccgggggccggccggggccggggtcagcagaaaaggacccgggcagcgcggactccgaggcggaggggctgccgtacccggcgctggccccggtggttttcttctacttgagccaggacagccgcccgcggagctggtgtctccgcacggtctgtaacccctggtttgagcgcatcagcatgttggtcatccttctcaactgcgtgaccctgggcatgttccggccatgcgaggacatcgcctgtgactcccagcgctgccggatcctgcaggcctttgatgacttcatctttgccttctttgccgtggagatggtggtgaagatggtggccttgggcatctttgggaaaaagtgttacctgggagacacttggaaccggcttgactttttcatcgtcatcgcagggatgctggagtactcgctggacctgcagaacgtcagcttctcagctgtcaggacagtccgtgtgctgcgaccgctcagggccattaaccgggtgcccagcatgcgcatccttgtcacgttgctgctggatacgctgcccatgctgggcaacgtcctgctgctctgcttcttcgtcttcttcatcttcggcatcgtcggcgtccagctgtgggcagggctgcttcggaaccgatgcttcctacctgagaatttcagcctccccctgagcgtggacctggagcgctattaccagacagagaacgaggatgagagccccttcatctgctcccagccacgcgagaacggcatgcggtcctgcagaagcgtgcccacgctgcgcggggacgggggcggtggcccaccttgcggtctggactatgaggcctacaacagctccagcaacaccacctgtgtcaactggaaccagtactacaccaactgctcagcgggggagcacaaccccttcaagggcgccatcaactttgacaacattggctatgcctggatcgccatcttccaggtcatcacgctggagggctgggtcgacatcatgtactttgtgatggatgctcattccttctacaatttcatctacttcatcctcctcatcatcgtgggctccttcttcatgatcaacctgtgcctggtggtgattgccacgcagttctcagagaccaagcagcgggaaagccagctgatgcgggagcagcgtgtgcggttcctgtccaacgccagcaccctggctagcttctctgagcccggcagctgctatgaggagctgctcaagtacctggtgtacatccttcgtaaggcagcccgcaggctggctcaggtctctcgggcagcaggtgtgcgggttgggctgctcagcagcccagcacccctcgggggccaggagacccagcccagcagcagctgctctcgctcccaccgccgcctatccgtccaccacctggtgcaccaccaccaccaccatcaccaccactaccacctgggcaatgggacgctcagggccccccgggccagcccggagatccaggacagggatgccaatgggtcccgccggctcatgctgccaccaccctcgacgcctgccctctccggggccccccctggtggcgcagagtctgtgcacagcttctaccatgccgactgccacttagagccagtccgctgccaggcgccccctcccaggtccccatctgaggcatccggcaggactgtgggcagcgggaaggtgtatcccaccgtgcacaccagccctccaccggagacgctgaaggagaaggcactagtagaggtggctgccagctctgggcccccaaccctcaccagcctcaacatcccacccgggccctacagctccatgcacaagctgctggagacacagagtacaggtgcctgccaaagctcttgcaagatctccagcccttgcttgaaagcagacagtggagcctgtggtccagacagctgcccctactgtgcccgggccggggcaggggaggtggagctcgccgaccgtgaaatgcctgactcagacagcgaggcagtttatgagttcacacaggatgcccagcacagcgacctccgggacccccacagccggcggcaacggagcctgggcccagatgcagagcccagctctgtgctggccttctggaggctaatctgtgacaccttccgaaagattgtggacagcaagtactttggccggggaatcatgatcgccatcctggtcaacacactcagcatgggcatcgaataccacgagcagcccgaggagcttaccaacgccctagaaatcagcaacatcgtcttcaccagcctctttgccctggagatgctgctgaagctgcttgtgtatggtccctttggctacatcaagaatccctacaacatcttcgatggtgtcattgtggtcatcagcgtgtgggagatcgtgggccagcaggggggcggcctgtcggtgctgcggaccttccgcctgatgcgtgtgctgaagctggtgcgcttcctgccggcgctgcagcggcagctggtggtgctcatgaagaccatggacaacgtggccaccttctgcatgctgcttatgctcttcatcttcatcttcagcatcctgggcatgcatctcttcggctgcaagtttgcctctgagcgggatggggacaccctgccagaccggaagaattttgactccttgctctgggccatcgtcactgtctttcagatcctgacccaggaggactggaacaaagtcctctacaatggtatggcctccacgtcgtcctgggcggccctttatttcattgccctcatgaccttcggcaactacgtgctcttcaatttgctggtcgccattctggtggagggcttccaggcggaggaaatcagcaaacgggaagatgcgagtggacagttaagctgtattcagctgcctgtcgactcccaggggggagatgccaacaagtccgaatcagagcccgatttcttctcacccagcctggatggtgatggggacaggaagaagtgcttggccttggtgtccctgggagagcacccggagctgcggaagagcctgctgccgcctctcatcatccacacggccgccacacccatgtcgctgcccaagagcaccagcacgggcctgggcgaggcgctgggccctgcgtcgcgccgcaccagcagcagcgggtcggcagagcctggggcggcccacgagatgaagtcaccgcccagcgcccgcagctctccgcacagcccctggagcgctgcaagcagctggaccagcaggcgctccagccggaacagcctcggccgtgcacccagcctgaagcggagaagcccaagtggagagcggcggtccctgttgtcgggagaaggccaggagagccaggatgaagaggagagctcagaagaggagcgggccagccctgcgggcagtgaccatcgccacagggggtccctggagcgggaggccaagagttcctttgacctgccagacacactgcaggtgccagggctgcatcgcactgccagtggccgagggtctgcttctgagcaccaggactgcaatggcaagtcggcttcagggcgcctggcccgggccctgcggcctgatgaccccccactggatggggatgacgccgatgacgagggcaacctgagcaaaggggaacgggtccgcgcgtggatccgagcccgactccctgcctgctgcctcgagcgagactcctggtcagcctacatcttccctcctcagtccaggttccgcctcctgtgtcaccggatcatcacccacaagatgttcgaccacgtggtccttgtcatcatcttccttaactgcatcaccatcgccatggagcgccccaaaattgacccccacagcgctgaacgcatcttcctgaccctctccaattacatcttcaccgcagtctttctggctgaaatgacagtgaaggtggtggcactgggctggtgcttcggggagcaggcgtacctgcggagcagttggaacgtgctggacgggctgttggtgctcatctccgtcatcgacattctggtgtccatggtctctgacagcggcaccaagatcctgggcatgctgagggtgctgcggctgctgcggaccctgcgcccgctcagggtgatcagccgggcgcaggggctgaagctggtggtggagacgctgatgtcctcactgaaacccatcggcaacattgtagtcatctgctgtgccttcttcatcattttcggcatcttgggggtgcagctcttcaaagggaagtttttcgtgtgccagggcgaggataccaggaacatcaccaataaatcggactgtgccgaggccagttaccggtgggtccggcacaagtacaactttgacaaccttggccaggccctgatgtccctgttcgttttggcctccaaggatggttgggtggacatcatgtacgatgggctggatgctgtgggcgtggaccagcagaacttccacaagtgtcggcagcaccaggaggaagaggaggcccggcggcgggaggagaagcgcctacgaagactggagaaaaagagaaggaaagcccagtgcaaaccttactactccgactactcccgcttccggctcctcgtccaccacttgtgcaccagccactacctggacctcttcatcacaggtgtcatcgggctgaacgtggtcaccatggccatggagcactaccagcagccccagattctggatgaggctctgaagatctgcaactacatcttcactgtcatctttgtcttggagtcagttttcaaacttgtggcctttggtttccgtcggttcttccaggacaggtggaaccagctggacctggccattgtgctgctgtccatcatgggcatcacgctggaggaaatcgaggtcaacgcctcgctgcccatcaaccccaccatcatccgcatcatgagggtgctgcgcattgcccgagtgctgaagctgctgaagatggctgtgggcatgcgggcgctgctggacacggtgatgcaggccctgccccaggtggggaacctgggacttctcttcatgttgttgtttttcatctttgcagctctgggcgtggagctctttggagacctggagtgtgacgagacacacccctgtgagggcctgggccgtcatgccacctttcggaactttggcatggccttcctaaccctcttccgagtctccacaggtgacaattggaatggcattatgaaggacaccctccgggactgtgaccaggagtccacctgctacaacacggtcatctcgcctatctactttgtgtccttcgtgctgacggcccagttcgtgctagtcaacgtggtgatcgccgtgctgatgaagcacctggaggagagcaacaaggaggccaaggaggaggccgagctagaggctgagctggagctggagatgaagaccctcagcccccagccccactcgccactgggcagccccttcctctggcctggggtcgagggccccgacagccccgacagccccaagcctggggctctgcacccagcggcccacgcgagatcagcctcccacttttccctggagcaccccacgatgcagccccaccccacggagctgccaggaccagacttactgactgtgcggaagtctggggtcagccgaacgcactctctgcccaatgacagctacatgtgtcggcatgggagcactgccgaggggcccctgggacacaggggctgggggctccccaaagctcagtcaggctccgtcttgtccgttcactcccagccagcagataccagctacatcctgcagcttcccaaagatgcacctcatctgctccagccccacagcgccccaacctggggcaccatccccaaactgcccccaccaggacgctcccctttggctcagaggccactcaggcgccaggcagcaataaggactgactccttggacgttcagggtctgggcagccgggaagacctgctggcagaggtgagtgggccctccccgcccctggcccgggcctactctttctggggccagtcaagtacccaggcacagcagcactcccgcagccacagcaagatctccaagcacatgaccccgccagccccttgcccaggcccagaacccaactggggcaagggccctccagagaccagaagcagcttagagttggacacggagctgagctggatttcaggagacctcctgccccctggcggccaggaggagcccccatccccacgggacctgaagaagtgctacagcgtggaggcccagagctgccagcgccggcctacgtcctggctggatgagcagaggagacactctatcgccgtcagctgcctggacagcggctcccaaccccacctgggcacagacccctctaaccttgggggccagcctcttggggggcctgggagccggcccaagaaaaaactcagcccgcctagtatcaccatagacccccccgagagccaaggtcctcggaccccgcccagccctggtatctgcctccggaggagggctccgtccagcgactccaaggatcccttggcctctggcccccctgacagcatggctgcctcgccctccccaaagaaagatgtgctgagtctctccggtttatcctctgacccagcagacctggacccctgagtcctgccccacttt

SEQ ID NO: 2751 - DNA, 6768 bp, Homo sapiens
  source 1..6768: mol_type = unassigned DNA; mol_type = unassigned DNA
atggacgaggaggaggatggagcgggcgccgaggagtcgggacagccccggagcttcatgcggctcaacgacctgtcgggggccgggggccggccggggccggggtcagcagaaaaggacccgggcagcgcggactccgaggcggaggggctgccgtacccggcgctggccccggtggttttcttctacttgagccaggacagccgcccgcggagctggtgtctccgcacggtctgtaacccctggtttgagcgcatcagcatgttggtcatccttctcaactgcgtgaccctgggcatgttccggccatgcgaggacatcgcctgtgactcccagcgctgccggatcctgcaggcctttgatgacttcatctttgccttctttgccgtggagatggtggtgaagatggtggccttgggcatctttgggaaaaagtgttacctgggagacacttggaaccggcttgactttttcatcgtcatcgcagggatgctggagtactcgctggacctgcagaacgtcagcttctcagctgtcaggacagtccgtgtgctgcgaccgctcagggccattaaccgggtgcccagcatgcgcatccttgtcacgttgctgctggatacgctgcccatgctgggcaacgtcctgctgctctgcttcttcgtcttcttcatcttcggcatcgtcggcgtccagctgtgggcagggctgcttcggaaccgatgcttcctacctgagaatttcagcctccccctgagcgtggacctggagcgctattaccagacagagaacgaggatgagagccccttcatctgctcccagccacgcgagaacggcatgcggtcctgcagaagcgtgcccacgctgcgcggggacgggggcggtggcccaccttgcggtctggactatgaggcctacaacagctccagcaacaccacctgtgtcaactggaaccagtactacaccaactgctcagcgggggagcacaaccccttcaagggcgccatcaactttgacaacattggctatgcctggatcgccatcttccaggtcatcacgctggagggctgggtcgacatcatgtactttgtgatggatgctcattccttctacaatttcatctacttcatcctcctcatcatcgtgggctccttcttcatgatcaacctgtgcctggtggtgattgccacgcagttctcagagaccaagcagcgggaaagccagctgatgcgggagcagcgtgtgcggttcctgtccaacgccagcaccctggctagcttctctgagcccggcagctgctatgaggagctgctcaagtacctggtgtacatccttcgtaaggcagcccgcaggctggctcaggtctctcgggcagcaggtgtgcgggttgggctgctcagcagcccagcacccctcgggggccaggagacccagcccagcagcagctgctctcgctcccaccgccgcctatccgtccaccacctggtgcaccaccaccaccaccatcaccaccactaccacctgggcaatgggacgctcagggccccccgggccagcccggagatccaggacagggatgccaatgggtcccgccggctcatgctgccaccaccctcgacgcctgccctctccggggccccccctggtggcgcagagtctgtgcacagcttctaccatgccgactgccacttagagccagtccgctgccaggcgccccctcccaggtccccatctgaggcatccggcaggactgtgggcagcgggaaggtgtatcccaccgtgcacaccagccctccaccggagacgctgaaggagaaggcactagtagaggtggctgccagctctgggcccccaaccctcaccagcctcaacatcccacccgggccctacagctccatgcacaagctgctggagacacagagtacaggtgcctgccaaagctcttgcaagatctccagcccttgcttgaaagcagacagtggagcctgtggtccagacagctgcccctactgtgcccgggccggggcaggggaggtggagctcgccgaccgtgaaatgcctgactcagacagcgaggcagtttatgagttcacacaggatgcccagcacagcgacctccgggacccccacagccggcggcaacggagcctgggcccagatgcagagcccagctctgtgctggccttctggaggctaatctgtgacaccttccgaaagattgtggacagcaagtactttggccggggaatcatgatcgccatcctggtcaacacactcagcatgggcatcgaataccacgagcagcccgaggagcttaccaacgccctagaaatcagcaacatcgtcttcaccagcctctttgccctggagatgctgctgaagctgcttgtgtatggtccctttggctacatcaagaatccctacaacatcttcgatggtgtcattgtggtcatcagcgtgtgggagatcgtgggccagcaggggggcggcctgtcggtgctgcggaccttccgcctgatgcgtgtgctgaagctggtgcgcttcctgccggcgctgcagcggcagctggtggtgctcatgaagaccatggacaacgtggccaccttctgcatgctgcttatgctcttcatcttcatcttcagcatcctgggcatgcatctcttcggctgcaagtttgcctctgagcgggatggggacaccctgccagaccggaagaattttgactccttgctctgggccatcgtcactgtctttcagatcctgacccaggaggactggaacaaagtcctctacaatggtatggcctccacgtcgtcctgggcggccctttatttcattgccctcatgaccttcggcaactacgtgctcttcaatttgctggtcgccattctggtggagggcttccaggcggaggaaatcagcaaacgggaagatgcgagtggacagttaagctgtattcagctgcctgtcgactcccaggggggagatgccaacaagtccgaatcagagcccgatttcttctcacccagcctggatggtgatggggacaggaagaagtgcttggccttggtgtccctgggagagcacccggagctgcggaagagcctgctgccgcctctcatcatccacacggccgccacacccatgtcgctgcccaagagcaccagcacgggcctgggcgaggcgctgggccctgcgtcgcgccgcaccagcagcagcgggtcggcagagcctggggcggcccacgagatgaagtcaccgcccagcgcccgcagctctccgcacagcccctggagcgctgcaagcagctggaccagcaggcgctccagccggaacagcctcggccgtgcacccagcctgaagcggagaagcccaagtggagagcggcggtccctgttgtcgggagaaggccaggagagccaggatgaagaggagagctcagaagaggagcgggccagccctgcgggcagtgaccatcgccacagggggtccctggagcgggaggccaagagttcctttgacctgccagacacactgcaggtgccagggctgcatcgcactgccagtggccgagggtctgcttctgagcaccaggactgcaatggcaagtcggcttcagggcgcctggcccgggccctgcggcctgatgaccccccactggatggggatgacgccgatgacgagggcaacctgagcaaaggggaacgggtccgcgcgtggatccgagcccgactccctgcctgctgcctcgagcgagactcctggtcagcctacatcttccctcctcagtccaggttccgcctcctgtgtcaccggatcatcacccacaagatgttcgaccacgtggtccttgtcatcatcttccttaactgcatcaccatcgccatggagcgccccaaaattgacccccacagcgctgaacgcatcttcctgaccctctccaattacatcttcaccgcagtctttctggctgaaatgacagtgaaggtggtggcactgggctggtgcttcggggagcaggcgtacctgcggagcagttggaacgtgctggacgggctgttggtgctcatctccgtcatcgacattctggtgtccatggtctctgacagcggcaccaagatcctgggcatgctgagggtgctgcggctgctgcggaccctgcgcccgctcagggtgatcagccgggcgcaggggctgaagctggtggtggagacgctgatgtcctcactgaaacccatcggcaacattgtagtcatctgctgtgccttcttcatcattttcggcatcttgggggtgcagctcttcaaagggaagtttttcgtgtgccagggcgaggataccaggaacatcaccaataaatcggactgtgccgaggccagttaccggtgggtccggcacaagtacaactttgacaaccttggccaggccctgatgtccctgttcgttttggcctccaaggatggttgggtggacatcatgtacgatgggctggatgctgtgggcgtggaccagcagaacttccacaagtgtcggcagcaccaggaggaagaggaggcccggcggcgggaggagaagcgcctacgaagactggagaaaaagagaaggaatctaatgctggacgatgtaattgcttccggcagctcagccagcgctgcgtcagaagcccagtgcaaaccttactactccgactactcccgcttccggctcctcgtccaccacttgtgcaccagccactacctggacctcttcatcacaggtgtcatcgggctgaacgtggtcaccatggccatggagcactaccagcagccccagattctggatgaggctctgaagatctgcaactacatcttcactgtcatctttgtcttggagtcagttttcaaacttgtggcctttggtttccgtcggttcttccaggacaggtggaaccagctggacctggccattgtgctgctgtccatcatgggcatcacgctggaggaaatcgaggtcaacgcctcgctgcccatcaaccccaccatcatccgcatcatgagggtgctgcgcattgcccgagtgctgaagctgctgaagatggctgtgggcatgcgggcgctgctggacacggtgatgcaggccctgccccaggtggggaacctgggacttctcttcatgttgttgtttttcatctttgcagctctgggcgtggagctctttggagacctggagtgtgacgagacacacccctgtgagggcctgggccgtcatgccacctttcggaactttggcatggccttcctaaccctcttccgagtctccacaggtgacaattggaatggcattatgaaggacaccctccgggactgtgaccaggagtccacctgctacaacacggtcatctcgcctatctactttgtgtccttcgtgctgacggcccagttcgtgctagtcaacgtggtgatcgccgtgctgatgaagcacctggaggagagcaacaaggaggccaaggaggaggccgagctagaggctgagctggagctggagatgaagaccctcagcccccagccccactcgccactgggcagccccttcctctggcctggggtcgagggccccgacagccccgacagccccaagcctggggctctgcacccagcggcccacgcgagatcagcctcccacttttccctggagcaccccacgatgcagccccaccccacggagctgccaggaccagacttactgactgtgcggaagtctggggtcagccgaacgcactctctgcccaatgacagctacatgtgtcggcatgggagcactgccgaggggcccctgggacacaggggctgggggctccccaaagctcagtcaggctccgtcttgtccgttcactcccagccagcagataccagctacatcctgcagcttcccaaagatgcacctcatctgctccagccccacagcgccccaacctggggcaccatccccaaactgcccccaccaggacgctcccctttggctcagaggccactcaggcgccaggcagcaataaggactgactccttggacgttcagggtctgggcagccgggaagacctgctggcagaggtgagtgggccctccccgcccctggcccgggcctactctttctggggccagtcaagtacccaggcacagcagcactcccgcagccacagcaagatctccaagcacatgaccccgccagccccttgcccaggcccagaacccaactggggcaagggccctccagagaccagaagcagcttagagttggacacggagctgagctggatttcaggagacctcctgccccctggcggccaggaggagcccccatccccacgggacctgaagaagtgctacagcgtggaggcccagagctgccagcgccggcctacgtcctggctggatgagcagaggagacactctatcgccgtcagctgcctggacagcggctcccaaccccacctgggcacagacccctctaaccttgggggccagcctcttggggggcctgggagccggcccaagaaaaaactcagcccgcctagtatcaccatagacccccccgagagccaaggtcctcggaccccgcccagccctggtatctgcctccggaggagggctccgtccagcgactccaaggatcccttggcctctggcccccctgacagcatggctgcctcgccctccccaaagaaagatgtgctgagtctctccggtttatcctctgacccagcagacctggacccctgagtcctgccccacttt

SEQ ID NO: 2752 - DNA, 7014 bp, Homo sapiens
  source 1..7014: mol_type = unassigned DNA; mol_type = unassigned DNA
atggacgaggaggaggatggagcgggcgccgaggagtcgggacagccccggagcttcatgcggctcaacgacctgtcgggggccgggggccggccggggccggggtcagcagaaaaggacccgggcagcgcggactccgaggcggaggggctgccgtacccggcgctggccccggtggttttcttctacttgagccaggacagccgcccgcggagctggtgtctccgcacggtctgtaacccctggtttgagcgcatcagcatgttggtcatccttctcaactgcgtgaccctgggcatgttccggccatgcgaggacatcgcctgtgactcccagcgctgccggatcctgcaggcctttgatgacttcatctttgccttctttgccgtggagatggtggtgaagatggtggccttgggcatctttgggaaaaagtgttacctgggagacacttggaaccggcttgactttttcatcgtcatcgcagggatgctggagtactcgctggacctgcagaacgtcagcttctcagctgtcaggacagtccgtgtgctgcgaccgctcagggccattaaccgggtgcccagcatgcgcatccttgtcacgttgctgctggatacgctgcccatgctgggcaacgtcctgctgctctgcttcttcgtcttcttcatcttcggcatcgtcggcgtccagctgtgggcagggctgcttcggaaccgatgcttcctacctgagaatttcagcctccccctgagcgtggacctggagcgctattaccagacagagaacgaggatgagagccccttcatctgctcccagccacgcgagaacggcatgcggtcctgcagaagcgtgcccacgctgcgcggggacgggggcggtggcccaccttgcggtctggactatgaggcctacaacagctccagcaacaccacctgtgtcaactggaaccagtactacaccaactgctcagcgggggagcacaaccccttcaagggcgccatcaactttgacaacattggctatgcctggatcgccatcttccaggtcatcacgctggagggctgggtcgacatcatgtactttgtgatggatgctcattccttctacaatttcatctacttcatcctcctcatcatcgtgggctccttcttcatgatcaacctgtgcctggtggtgattgccacgcagttctcagagaccaagcagcgggaaagccagctgatgcgggagcagcgtgtgcggttcctgtccaacgccagcaccctggctagcttctctgagcccggcagctgctatgaggagctgctcaagtacctggtgtacatccttcgtaaggcagcccgcaggctggctcaggtctctcgggcagcaggtgtgcgggttgggctgctcagcagcccagcacccctcgggggccaggagacccagcccagcagcagctgctctcgctcccaccgccgcctatccgtccaccacctggtgcaccaccaccaccaccatcaccaccactaccacctgggcaatgggacgctcagggccccccgggccagcccggagatccaggacagggatgccaatgggtcccgccggctcatgctgccaccaccctcgacgcctgccctctccggggccccccctggtggcgcagagtctgtgcacagcttctaccatgccgactgccacttagagccagtccgctgccaggcgccccctcccaggtccccatctgaggcatccggcaggactgtgggcagcgggaaggtgtatcccaccgtgcacaccagccctccaccggagacgctgaaggagaaggcactagtagaggtggctgccagctctgggcccccaaccctcaccagcctcaacatcccacccgggccctacagctccatgcacaagctgctggagacacagagtacaggtgcctgccaaagctcttgcaagatctccagcccttgcttgaaagcagacagtggagcctgtggtccagacagctgcccctactgtgcccgggccggggcaggggaggtggagctcgccgaccgtgaaatgcctgactcagacagcgaggcagtttatgagttcacacaggatgcccagcacagcgacctccgggacccccacagccggcggcaacggagcctgggcccagatgcagagcccagctctgtgctggccttctggaggctaatctgtgacaccttccgaaagattgtggacagcaagtactttggccggggaatcatgatcgccatcctggtcaacacactcagcatgggcatcgaataccacgagcagcccgaggagcttaccaacgccctagaaatcagcaacatcgtcttcaccagcctctttgccctggagatgctgctgaagctgcttgtgtatggtccctttggctacatcaagaatccctacaacatcttcgatggtgtcattgtggtcatcagcgtgtgggagatcgtgggccagcaggggggcggcctgtcggtgctgcggaccttccgcctgatgcgtgtgctgaagctggtgcgcttcctgccggcgctgcagcggcagctggtggtgctcatgaagaccatggacaacgtggccaccttctgcatgctgcttatgctcttcatcttcatcttcagcatcctgggcatgcatctcttcggctgcaagtttgcctctgagcgggatggggacaccctgccagaccggaagaattttgactccttgctctgggccatcgtcactgtctttcagatcctgacccaggaggactggaacaaagtcctctacaatggtatggcctccacgtcgtcctgggcggccctttatttcattgccctcatgaccttcggcaactacgtgctcttcaatttgctggtcgccattctggtggagggcttccaggcggaggaaatcagcaaacgggaagatgcgagtggacagttaagctgtattcagctgcctgtcgactcccaggggggagatgccaacaagtccgaatcagagcccgatttcttctcacccagcctggatggtgatggggacaggaagaagtgcttggccttggtgtccctgggagagcacccggagctgcggaagagcctgctgccgcctctcatcatccacacggccgccacacccatgtcgctgcccaagagcaccagcacgggcctgggcgaggcgctgggccctgcgtcgcgccgcaccagcagcagcgggtcggcagagcctggggcggcccacgagatgaagtcaccgcccagcgcccgcagctctccgcacagcccctggagcgctgcaagcagctggaccagcaggcgctccagccggaacagcctcggccgtgcacccagcctgaagcggagaagcccaagtggagagcggcggtccctgttgtcgggagaaggccaggagagccaggatgaagaggagagctcagaagaggagcgggccagccctgcgggcagtgaccatcgccacagggggtccctggagcgggaggccaagagttcctttgacctgccagacacactgcaggtgccagggctgcatcgcactgccagtggccgagggtctgcttctgagcaccaggactgcaatggcaagtcggcttcagggcgcctggcccgggccctgcggcctgatgaccccccactggatggggatgacgccgatgacgagggcaacctgagcaaaggggaacgggtccgcgcgtggatccgagcccgactccctgcctgctgcctcgagcgagactcctggtcagcctacatcttccctcctcagtccaggttccgcctcctgtgtcaccggatcatcacccacaagatgttcgaccacgtggtccttgtcatcatcttccttaactgcatcaccatcgccatggagcgccccaaaattgacccccacagcgctgaacgcatcttcctgaccctctccaattacatcttcaccgcagtctttctggctgaaatgacagtgaaggtggtggcactgggctggtgcttcggggagcaggcgtacctgcggagcagttggaacgtgctggacgggctgttggtgctcatctccgtcatcgacattctggtgtccatggtctctgacagcggcaccaagatcctgggcatgctgagggtgctgcggctgctgcggaccctgcgcccgctcagggtgatcagccgggcgcaggggctgaagctggtggtggagacgctgatgtcctcactgaaacccatcggcaacattgtagtcatctgctgtgccttcttcatcattttcggcatcttgggggtgcagctcttcaaagggaagtttttcgtgtgccagggcgaggataccaggaacatcaccaataaatcggactgtgccgaggccagttaccggtgggtccggcacaagtacaactttgacaaccttggccaggccctgatgtccctgttcgttttggcctccaaggatggttgggtggacatcatgtacgatgggctggatgctgtgggcgtggaccagcagcccatcatgaaccacaacccctggatgctgctgtacttcatctcgttcctgctcattgtggccttctttgtcctgaacatgtttgtgggtgtggtggtggagaacttccacaagtgtcggcagcaccaggaggaagaggaggcccggcggcgggaggagaagcgcctacgaagactggagaaaaagagaaggaatctaatgctggacgatgtaattgcttccggcagctcagccagcgctgcgtcagaagcccagtgcaaaccttactactccgactactcccgcttccggctcctcgtccaccacttgtgcaccagccactacctggacctcttcatcacaggtgtcatcgggctgaacgtggtcaccatggccatggagcactaccagcagccccagattctggatgaggctctgaagatctgcaactacatcttcactgtcatctttgtcttggagtcagttttcaaacttgtggcctttggtttccgtcggttcttccaggacaggtggaaccagctggacctggccattgtgctgctgtccatcatgggcatcacgctggaggaaatcgaggtcaacgcctcgctgcccatcaaccccaccatcatccgcatcatgagggtgctgcgcattgcccgagtgctgaagctgctgaagatggctgtgggcatgcgggcgctgctggacacggtgatgcaggccctgccccaggtggggaacctgggacttctcttcatgttgttgtttttcatctttgcagctctgggcgtggagctctttggagacctggagtgtgacgagacacacccctgtgagggcctgggccgtcatgccacctttcggaactttggcatggccttcctaaccctcttccgagtctccacaggtgacaattggaatggcattatgaaggacaccctccgggactgtgaccaggagtccacctgctacaacacggtcatctcgcctatctactttgtgtccttcgtgctgacggcccagttcgtgctagtcaacgtggtgatcgccgtgctgatgaagcacctggaggagagcaacaaggaggccaaggaggaggccgagctagaggctgagctggagctggagatgaagaccctcagcccccagccccactcgccactgggcagccccttcctctggcctggggtcgagggccccgacagccccgacagccccaagcctggggctctgcacccagcggcccacgcgagatcagcctcccacttttccctggagcaccccacggacaggcagctgtttgacaccatatccctgctgatccagggctccctggagtgggagctgaagctgatggacgagctggcaggcccagggggccagccctctgccttcccttctgcccccagcctgggaggctccgacccacagatgcagccccaccccacggagctgccaggaccagacttactgactgtgcggaagtctggggtcagccgaacgcactctctgcccaatgacagctacatgtgtcggcatgggagcactgccgaggggcccctgggacacaggggctgggggctccccaaagctcagtcaggctccgtcttgtccgttcactcccagccagcagataccagctacatcctgcagcttcccaaagatgcacctcatctgctccagccccacagcgccccaacctggggcaccatccccaaactgcccccaccaggacgctcccctttggctcagaggccactcaggcgccaggcagcaataaggactgactccttggacgttcagggtctgggcagccgggaagacctgctggcagaggtgagtgggccctccccgcccctggcccgggcctactctttctggggccagtcaagtacccaggcacagcagcactcccgcagccacagcaagatctccaagcacatgaccccgccagccccttgcccaggcccagaacccaactggggcaagggccctccagagaccagaagcagcttagagttggacacggagctgagctggatttcaggagacctcctgccccctggcggccaggaggagcccccatccccacgggacctgaagaagtgctacagcgtggaggcccagagctgccagcgccggcctacgtcctggctggatgagcagaggagacactctatcgccgtcagctgcctggacagcggctcccaaccccacctgggcacagacccctctaaccttgggggccagcctcttggggggcctgggagccggcccaagaaaaaactcagcccgcctagtatcaccatagacccccccgagagccaaggtcctcggaccccgcccagccctggtatctgcctccggaggagggctccgtccagcgactccaaggatcccttggcctctggcccccctgacagcatggctgcctcgccctccccaaagaaagatgtgctgagtctctccggtttatcctctgacccagcagacctggacccctgagtcctgccccacttt

SEQ ID NO: 2753 - DNA, 6767 bp, Homo sapiens
  source 1..6767: mol_type = unassigned DNA; mol_type = unassigned DNA
atggacgaggaggaggatggagcgggcgccgaggagtcgggacagccccggagcttcatgcggctcaacgacctgtcgggggccgggggccggccggggccggggtcagcagaaaaggacccgggcagcgcggactccgaggcggaggggctgccgtacccggcgctggccccggtggttttcttctacttgagccaggacagccgcccgcggagctggtgtctccgcacggtctgtaacccctggtttgagcgcatcagcatgttggtcatccttctcaactgcgtgaccctgggcatgttccggccatgcgaggacatcgcctgtgactcccagcgctgccggatcctgcaggcctttgatgacttcatctttgccttctttgccgtggagatggtggtgaagatggtggccttgggcatctttgggaaaaagtgttacctgggagacacttggaaccggcttgactttttcatcgtcatcgcagggatgctggagtactcgctggacctgcagaacgtcagcttctcagctgtcaggacagtccgtgtgctgcgaccgctcagggccattaaccgggtgcccagcatgcgcatccttgtcacgttgctgctggatacgctgcccatgctgggcaacgtcctgctgctctgcttcttcgtcttcttcatcttcggcatcgtcggcgtccagctgtgggcagggctgcttcggaaccgatgcttcctacctgagaatttcagcctccccctgagcgtggacctggagcgctattaccagacagagaacgaggatgagagccccttcatctgctcccagccacgcgagaacggcatgcggtcctgcagaagcgtgcccacgctgcgcggggacgggggcggtggcccaccttgcggtctggactatgaggcctacaacagctccagcaacaccacctgtgtcaactggaaccagtactacaccaactgctcagcgggggagcacaaccccttcaagggcgccatcaactttgacaacattggctatgcctggatcgccatcttccaggtcatcacgctggagggctgggtcgacatcatgtactttgtgatggatgctcattccttctacaatttcatctacttcatcctcctcatcatcgtgggctccttcttcatgatcaacctgtgcctggtggtgattgccacgcagttctcagagaccaagcagcgggaaagccagctgatgcgggagcagcgtgtgcggttcctgtccaacgccagcaccctggctagcttctctgagcccggcagctgctatgaggagctgctcaagtacctggtgtacatccttcgtaaggcagcccgcaggctggctcaggtctctcgggcagcaggtgtgcgggttgggctgctcagcagcccagcacccctcgggggccaggagacccagcccagcagcagctgctctcgctcccaccgccgcctatccgtccaccacctggtgcaccaccaccaccaccatcaccaccactaccacctgggcaatgggacgctcagggccccccgggccagcccggagatccaggacagggatgccaatgggtcccgccggctcatgctgccaccaccctcgacgcctgccctctccggggccccccctggtggcgcagagtctgtgcacagcttctaccatgccgactgccacttagagccagtccgctgccaggcgccccctcccaggtccccatctgaggcatccggcaggactgtgggcagcgggaaggtgtatcccaccgtgcacaccagccctccaccggagacgctgaaggagaaggcactagtagaggtggctgccagctctgggcccccaaccctcaccagcctcaacatcccacccgggccctacagctccatgcacaagctgctggagacacagagtacaggtgcctgccaaagctcttgcaagatctccagcccttgcttgaaagcagacagtggagcctgtggtccagacagctgcccctactgtgcccgggccggggcaggggaggtggagctcgccgaccgtgaaatgcctgactcagacagcgaggcagtttatgagttcacacaggatgcccagcacagcgacctccgggacccccacagccggcggcaacggagcctgggcccagatgcagagcccagctctgtgctggccttctggaggctaatctgtgacaccttccgaaagattgtggacagcaagtactttggccggggaatcatgatcgccatcctggtcaacacactcagcatgggcatcgaataccacgagcagcccgaggagcttaccaacgccctagaaatcagcaacatcgtcttcaccagcctctttgccctggagatgctgctgaagctgcttgtgtatggtccctttggctacatcaagaatccctacaacatcttcgatggtgtcattgtggtcatcagcgtgtgggagatcgtgggccagcaggggggcggcctgtcggtgctgcggaccttccgcctgatgcgtgtgctgaagctggtgcgcttcctgccggcgctgcagcggcagctggtggtgctcatgaagaccatggacaacgtggccaccttctgcatgctgcttatgctcttcatcttcatcttcagcatcctgggcatgcatctcttcggctgcaagtttgcctctgagcgggatggggacaccctgccagaccggaagaattttgactccttgctctgggccatcgtcactgtctttcagatcctgacccaggaggactggaacaaagtcctctacaatggtatggcctccacgtcgtcctgggcggccctttatttcattgccctcatgaccttcggcaactacgtgctcttcaatttgctggtcgccattctggtggagggcttccaggcggaggaaatcagcaaacgggaagatgcgagtggacagttaagctgtattcagctgcctgtcgactcccaggggggagatgccaacaagtccgaatcagagcccgatttcttctcacccagcctggatggtgatggggacaggaagaagtgcttggccttggtgtccctgggagagcacccggagctgcggaagagcctgctgccgcctctcatcatccacacggccgccacacccatgtcgctgcccaagagcaccagcacgggcctgggcgaggcgctgggccctgcgtcgcgccgcaccagcagcagcgggtcggcagagcctggggcggcccacgagatgaagtcaccgcccagcgcccgcagctctccgcacagcccctggagcgctgcaagcagctggaccagcaggcgctccagccggaacagcctcggccgtgcacccagcctgaagcggagaagcccaagtggagagcggcggtccctgttgtcgggagaaggccaggagagccaggatgaagaggagagctcagaagaggagcgggccagccctgcgggcagtgaccatcgccacagggggtccctggagcgggaggccaagagttcctttgacctgccagacacactgcaggtgccagggctgcatcgcactgccagtggccgagggtctgcttctgagcaccaggactgcaatggcaagtcggcttcagggcgcctggcccgggccctgcggcctgatgaccccccactggatggggatgacgccgatgacgagggcaacctgagcaaaggggaacgggtccgcgcgtggatccgagcccgactccctgcctgctgcctcgagcgagactcctggtcagcctacatcttccctcctcagtccaggttccgcctcctgtgtcaccggatcatcacccacaagatgttcgaccacgtggtccttgtcatcatcttccttaactgcatcaccatcgccatggagcgccccaaaattgacccccacagcgctgaacgcatcttcctgaccctctccaattacatcttcaccgcagtctttctggctgaaatgacagtgaaggtggtggcactgggctggtgcttcggggagcaggcgtacctgcggagcagttggaacgtgctggacgggctgttggtgctcatctccgtcatcgacattctggtgtccatggtctctgacagcggcaccaagatcctgggcatgctgagggtgctgcggctgctgcggaccctgcgcccgctcagggtgatcagccgggcgcaggggctgaagctggtggtggagacgctgatgtcctcactgaaacccatcggcaacattgtagtcatctgctgtgccttcttcatcattttcggcatcttgggggtgcagctcttcaaagggaagtttttcgtgtgccagggcgaggataccaggaacatcaccaataaatcggactgtgccgaggccagttaccggtgggtccggcacaagtacaactttgacaaccttggccaggccctgatgtccctgttcgttttggcctccaaggatggttgggtggacatcatgtacgatgggctggatgctgtgggcgtggaccagcagcccatcatgaaccacaacccctggatgctgctgtacttcatctcgttcctgctcattgtggccttctttgtcctgaacatgtttgtgggtgtggtggtggagaacttccacaagtgtcggcagcaccaggaggaagaggaggcccggcggcgggaggagaagcgcctacgaagactggagaaaaagagaaggaaagcccagtgcaaaccttactactccgactactcccgcttccggctcctcgtccaccacttgtgcaccagccactacctggacctcttcatcacaggtgtcatcgggctgaacgtggtcaccatggccatggagcactaccagcagccccagattctggatgaggctctgaagatctgcaactacatcttcactgtcatctttgtcttggagtcagttttcaaacttgtggcctttggtttccgtcggttcttccaggacaggtggaaccagctggacctggccattgtgctgctgtccatcatgggcatcacgctggaggaaatcgaggtcaacgcctcgctgcccatcaaccccaccatcatccgcatcatgagggtgctgcgcattgcccgagtgctgaagctgctgaagatggctgtgggcatgcgggcgctgctggacacggtgatgcaggccctgccccagctctgggcgtggagctctttggagacctggagtgtgacgagacacacccctgtgagggcctgggccgtcatgccacctttcggaactttggcatggccttcctaaccctcttccgagtctccacaggtgacaattggaatggcattatgaaggacaccctccgggactgtgaccaggagtccacctgctacaacacggtcatctcgcctatctactttgtgtccttcgtgctgacggcccagttcgtgctagtcaacgtggtgatcgccgtgctgatgaagcacctggaggagagcaacaaggaggccaaggaggaggccgagctagaggctgagctggagctggagatgaagaccctcagcccccagccccactcgccactgggcagccccttcctctggcctggggtcgagggccccgacagccccgacagccccaagcctggggctctgcacccagcggcccacgcgagatcagcctcccacttttccctggagcaccccacgatgcagccccaccccacggagctgccaggaccagacttactgactgtgcggaagtctggggtcagccgaacgcactctctgcccaatgacagctacatgtgtcggcatgggagcactgccgaggggcccctgggacacaggggctgggggctccccaaagctcagtcaggctccgtcttgtccgttcactcccagccagcagataccagctacatcctgcagcttcccaaagatgcacctcatctgctccagccccacagcgccccaacctggggcaccatccccaaactgcccccaccaggacgctcccctttggctcagaggccactcaggcgccaggcagcaataaggactgactccttggacgttcagggtctgggcagccgggaagacctgctggcagaggtgagtgggccctccccgcccctggcccgggcctactctttctggggccagtcaagtacccaggcacagcagcactcccgcagccacagcaagatctccaagcacatgaccccgccagccccttgcccaggcccagaacccaactggggcaagggccctccagagaccagaagcagcttagagttggacacggagctgagctggatttcaggagacctcctgccccctggcggccaggaggagcccccatccccacgggacctgaagaagtgctacagcgtggaggcccagagctgccagcgccggcctacgtcctggctggatgagcagaggagacactctatcgccgtcagctgcctggacagcggctcccaaccccacctgggcacagacccctctaaccttgggggccagcctcttggggggcctgggagccggcccaagaaaaaactcagcccgcctagtatcaccatagacccccccgagagccaaggtcctcggaccccgcccagccctggtatctgcctccggaggagggctccgtccagcgactccaaggatcccttggcctctggcccccctgacagcatggctgcctcgccctccccaaagaaagatgtgctgagtctctccggtttatcctctgacccagcagacctggacccctgagtcctgccccacttt

SEQ ID NO: 2754 - DNA, 7116 bp, Homo sapiens
  source 1..7116: mol_type = unassigned DNA; mol_type = unassigned DNA
atggacgaggaggaggatggagcgggcgccgaggagtcgggacagccccggagcttcatgcggctcaacgacctgtcgggggccgggggccggccggggccggggtcagcagaaaaggacccgggcagcgcggactccgaggcggaggggctgccgtacccggcgctggccccggtggttttcttctacttgagccaggacagccgcccgcggagctggtgtctccgcacggtctgtaacccctggtttgagcgcatcagcatgttggtcatccttctcaactgcgtgaccctgggcatgttccggccatgcgaggacatcgcctgtgactcccagcgctgccggatcctgcaggcctttgatgacttcatctttgccttctttgccgtggagatggtggtgaagatggtggccttgggcatctttgggaaaaagtgttacctgggagacacttggaaccggcttgactttttcatcgtcatcgcagggatgctggagtactcgctggacctgcagaacgtcagcttctcagctgtcaggacagtccgtgtgctgcgaccgctcagggccattaaccgggtgcccagcatgcgcatccttgtcacgttgctgctggatacgctgcccatgctgggcaacgtcctgctgctctgcttcttcgtcttcttcatcttcggcatcgtcggcgtccagctgtgggcagggctgcttcggaaccgatgcttcctacctgagaatttcagcctccccctgagcgtggacctggagcgctattaccagacagagaacgaggatgagagccccttcatctgctcccagccacgcgagaacggcatgcggtcctgcagaagcgtgcccacgctgcgcggggacgggggcggtggcccaccttgcggtctggactatgaggcctacaacagctccagcaacaccacctgtgtcaactggaaccagtactacaccaactgctcagcgggggagcacaaccccttcaagggcgccatcaactttgacaacattggctatgcctggatcgccatcttccaggtcatcacgctggagggctgggtcgacatcatgtactttgtgatggatgctcattccttctacaatttcatctacttcatcctcctcatcatcgtgggctccttcttcatgatcaacctgtgcctggtggtgattgccacgcagttctcagagaccaagcagcgggaaagccagctgatgcgggagcagcgtgtgcggttcctgtccaacgccagcaccctggctagcttctctgagcccggcagctgctatgaggagctgctcaagtacctggtgtacatccttcgtaaggcagcccgcaggctggctcaggtctctcgggcagcaggtgtgcgggttgggctgctcagcagcccagcacccctcgggggccaggagacccagcccagcagcagctgctctcgctcccaccgccgcctatccgtccaccacctggtgcaccaccaccaccaccatcaccaccactaccacctgggcaatgggacgctcagggccccccgggccagcccggagatccaggacagggatgccaatgggtcccgccggctcatgctgccaccaccctcgacgcctgccctctccggggccccccctggtggcgcagagtctgtgcacagcttctaccatgccgactgccacttagagccagtccgctgccaggcgccccctcccaggtccccatctgaggcatccggcaggactgtgggcagcgggaaggtgtatcccaccgtgcacaccagccctccaccggagacgctgaaggagaaggcactagtagaggtggctgccagctctgggcccccaaccctcaccagcctcaacatcccacccgggccctacagctccatgcacaagctgctggagacacagagtacaggtgcctgccaaagctcttgcaagatctccagcccttgcttgaaagcagacagtggagcctgtggtccagacagctgcccctactgtgcccgggccggggcaggggaggtggagctcgccgaccgtgaaatgcctgactcagacagcgaggcagtttatgagttcacacaggatgcccagcacagcgacctccgggacccccacagccggcggcaacggagcctgggcccagatgcagagcccagctctgtgctggccttctggaggctaatctgtgacaccttccgaaagattgtggacagcaagtactttggccggggaatcatgatcgccatcctggtcaacacactcagcatgggcatcgaataccacgagcagcccgaggagcttaccaacgccctagaaatcagcaacatcgtcttcaccagcctctttgccctggagatgctgctgaagctgcttgtgtatggtccctttggctacatcaagaatccctacaacatcttcgatggtgtcattgtggtcatcagcgtgtgggagatcgtgggccagcaggggggcggcctgtcggtgctgcggaccttccgcctgatgcgtgtgctgaagctggtgcgcttcctgccggcgctgcagcggcagctggtggtgctcatgaagaccatggacaacgtggccaccttctgcatgctgcttatgctcttcatcttcatcttcagcatcctgggcatgcatctcttcggctgcaagtttgcctctgagcgggatggggacaccctgccagaccggaagaattttgactccttgctctgggccatcgtcactgtctttcagatcctgacccaggaggactggaacaaagtcctctacaatggtatggcctccacgtcgtcctgggcggccctttatttcattgccctcatgaccttcggcaactacgtgctcttcaatttgctggtcgccattctggtggagggcttccaggcggaggaaatcagcaaacgggaagatgcgagtggacagttaagctgtattcagctgcctgtcgactcccaggggggagatgccaacaagtccgaatcagagcccgatttcttctcacccagcctggatggtgatggggacaggaagaagtgcttggccttggtgtccctgggagagcacccggagctgcggaagagcctgctgccgcctctcatcatccacacggccgccacacccatgtcgctgcccaagagcaccagcacgggcctgggcgaggcgctgggccctgcgtcgcgccgcaccagcagcagcgggtcggcagagcctggggcggcccacgagatgaagtcaccgcccagcgcccgcagctctccgcacagcccctggagcgctgcaagcagctggaccagcaggcgctccagccggaacagcctcggccgtgcacccagcctgaagcggagaagcccaagtggagagcggcggtccctgttgtcgggagaaggccaggagagccaggatgaagaggagagctcagaagaggagcgggccagccctgcgggcagtgaccatcgccacagggggtccctggagcgggaggccaagagttcctttgacctgccagacacactgcaggtgccagggctgcatcgcactgccagtggccgagggtctgcttctgagcaccaggactgcaatggcaagtcggcttcagggcgcctggcccgggccctgcggcctgatgaccccccactggatggggatgacgccgatgacgagggcaacctgagcaaaggggaacgggtccgcgcgtggatccgagcccgactccctgcctgctgcctcgagcgagactcctggtcagcctacatcttccctcctcagtccaggttccgcctcctgtgtcaccggatcatcacccacaagatgttcgaccacgtggtccttgtcatcatcttccttaactgcatcaccatcgccatggagcgccccaaaattgacccccacagcgctgaacgcatcttcctgaccctctccaattacatcttcaccgcagtctttctggctgaaatgacagtgaaggtggtggcactgggctggtgcttcggggagcaggcgtacctgcggagcagttggaacgtgctggacgggctgttggtgctcatctccgtcatcgacattctggtgtccatggtctctgacagcggcaccaagatcctgggcatgctgagggtgctgcggctgctgcggaccctgcgcccgctcagggtgatcagccgggcgcaggggctgaagctggtggtggagacgctgatgtcctcactgaaacccatcggcaacattgtagtcatctgctgtgccttcttcatcattttcggcatcttgggggtgcagctcttcaaagggaagtttttcgtgtgccagggcgaggataccaggaacatcaccaataaatcggactgtgccgaggccagttaccggtgggtccggcacaagtacaactttgacaaccttggccaggccctgatgtccctgttcgttttggcctccaaggatggttgggtggacatcatgtacgatgggctggatgctgtgggcgtggaccagcagcccatcatgaaccacaacccctggatgctgctgtacttcatctcgttcctgctcattgtggccttctttgtcctgaacatgtttgtgggtgtggtggtggagaacttccacaagtgtcggcagcaccaggaggaagaggaggcccggcggcgggaggagaagcgcctacgaagactggagaaaaagagaaggagtaaggagaagcagatggctgaagcccagtgcaaaccttactactccgactactcccgcttccggctcctcgtccaccacttgtgcaccagccactacctggacctcttcatcacaggtgtcatcgggctgaacgtggtcaccatggccatggagcactaccagcagccccagattctggatgaggctctgaagatctgcaactacatcttcactgtcatctttgtcttggagtcagttttcaaacttgtggcctttggtttccgtcggttcttccaggacaggtggaaccagctggacctggccattgtgctgctgtccatcatgggcatcacgctggaggaaatcgaggtcaacgcctcgctgcccatcaaccccaccatcatccgcatcatgagggtgctgcgcattgcccgagtgctgaagctgctgaagatggctgtgggcatgcgggcgctgctggacacggtgatgcaggccctgccccaggtggggaacctgggacttctcttcatgttgttgtttttcatctttgcagctctgggcgtggagctctttggagacctggagtgtgacgagacacacccctgtgagggcctgggccgtcatgccacctttcggaactttggcatggccttcctaaccctcttccgagtctccacaggtgacaattggaatggcattatgaaggacaccctccgggactgtgaccaggagtccacctgctacaacacggtcatctcgcctatctactttgtgtccttcgtgctgacggcccagttcgtgctagtcaacgtggtgatcgccgtgctgatgaagcacctggaggagagcaacaaggaggccaaggaggaggccgagctagaggctgagctggagctggagatgaagaccctcagcccccagccccactcgccactgggcagccccttcctctggcctggggtcgagggccccgacagccccgacagccccaagcctggggctctgcacccagcggcccacgcgagatcagcctcccacttttccctggagcaccccacggacaggcagctgtttgacaccatatccctgctgatccagggctccctggagtgggagctgaagctgatggacgagctggcaggcccagggggccagccctctgccttcccttctgcccccagcctgggaggctccgacccacagatccctctagctgagatggaggctctgtctctgacgtcagagattgtgtctgaaccgtcctgctctctagctctgacggatgactctttgcctgatgacatgcacacactcttacttagtgccctggagagcaatatgcagccccaccccacggagctgccaggaccagacttactgactgtgcggaagtctggggtcagccgaacgcactctctgcccaatgacagctacatgtgtcggcatgggagcactgccgaggggcccctgggacacaggggctgggggctccccaaagctcagtcaggctccgtcttgtccgttcactcccagccagcagataccagctacatcctgcagcttcccaaagatgcacctcatctgctccagccccacagcgccccaacctggggcaccatccccaaactgcccccaccaggacgctcccctttggctcagaggccactcaggcgccaggcagcaataaggactgactccttggacgttcagggtctgggcagccgggaagacctgctggcagaggtgagtgggccctccccgcccctggcccgggcctactctttctggggccagtcaagtacccaggcacagcagcactcccgcagccacagcaagatctccaagcacatgaccccgccagccccttgcccaggcccagaacccaactggggcaagggccctccagagaccagaagcagcttagagttggacacggagctgagctggatttcaggagacctcctgccccctggcggccaggaggagcccccatccccacgggacctgaagaagtgctacagcgtggaggcccagagctgccagcgccggcctacgtcctggctggatgagcagaggagacactctatcgccgtcagctgcctggacagcggctcccaaccccacctgggcacagacccctctaaccttgggggccagcctcttggggggcctgggagccggcccaagaaaaaactcagcccgcctagtatcaccatagacccccccgagagccaaggtcctcggaccccgcccagccctggtatctgcctccggaggagggctccgtccagcgactccaaggatcccttggcctctggcccccctgacagcatggctgcctcgccctccccaaagaaagatgtgctgagtctctccggtttatcctctgacccagcagacctggacccctgagtcctgccccacttt

SEQ ID NO: 2755 - DNA, 6821 bp, Homo sapiens
  source 1..6821: mol_type = unassigned DNA; mol_type = unassigned DNA
atggacgaggaggaggatggagcgggcgccgaggagtcgggacagccccggagcttcatgcggctcaacgacctgtcgggggccgggggccggccggggccggggtcagcagaaaaggacccgggcagcgcggactccgaggcggaggggctgccgtacccggcgctggccccggtggttttcttctacttgagccaggacagccgcccgcggagctggtgtctccgcacggtctgtaacccctggtttgagcgcatcagcatgttggtcatccttctcaactgcgtgaccctgggcatgttccggccatgcgaggacatcgcctgtgactcccagcgctgccggatcctgcaggcctttgatgacttcatctttgccttctttgccgtggagatggtggtgaagatggtggccttgggcatctttgggaaaaagtgttacctgggagacacttggaaccggcttgactttttcatcgtcatcgcagggatgctggagtactcgctggacctgcagaacgtcagcttctcagctgtcaggacagtccgtgtgctgcgaccgctcagggccattaaccgggtgcccagcatgcgcatccttgtcacgttgctgctggatacgctgcccatgctgggcaacgtcctgctgctctgcttcttcgtcttcttcatcttcggcatcgtcggcgtccagctgtgggcagggctgcttcggaaccgatgcttcctacctgagaatttcagcctccccctgagcgtggacctggagcgctattaccagacagagaacgaggatgagagccccttcatctgctcccagccacgcgagaacggcatgcggtcctgcagaagcgtgcccacgctgcgcggggacgggggcggtggcccaccttgcggtctggactatgaggcctacaacagctccagcaacaccacctgtgtcaactggaaccagtactacaccaactgctcagcgggggagcacaaccccttcaagggcgccatcaactttgacaacattggctatgcctggatcgccatcttccaggtcatcacgctggagggctgggtcgacatcatgtactttgtgatggatgctcattccttctacaatttcatctacttcatcctcctcatcatcgtgggctccttcttcatgatcaacctgtgcctggtggtgattgccacgcagttctcagagaccaagcagcgggaaagccagctgatgcgggagcagcgtgtgcggttcctgtccaacgccagcaccctggctagcttctctgagcccggcagctgctatgaggagctgctcaagtacctggtgtacatccttcgtaaggcagcccgcaggctggctcaggtctctcgggcagcaggtgtgcgggttgggctgctcagcagcccagcacccctcgggggccaggagacccagcccagcagcagctgctctcgctcccaccgccgcctatccgtccaccacctggtgcaccaccaccaccaccatcaccaccactaccacctgggcaatgggacgctcagggccccccgggccagcccggagatccaggacagggatgccaatgggtcccgccggctcatgctgccaccaccctcgacgcctgccctctccggggccccccctggtggcgcagagtctgtgcacagcttctaccatgccgactgccacttagagccagtccgctgccaggcgccccctcccaggtccccatctgaggcatccggcaggactgtgggcagcgggaaggtgtatcccaccgtgcacaccagccctccaccggagacgctgaaggagaaggcactagtagaggtggctgccagctctgggcccccaaccctcaccagcctcaacatcccacccgggccctacagctccatgcacaagctgctggagacacagagtacaggtgcctgccaaagctcttgcaagatctccagcccttgcttgaaagcagacagtggagcctgtggtccagacagctgcccctactgtgcccgggccggggcaggggaggtggagctcgccgaccgtgaaatgcctgactcagacagcgaggcagtttatgagttcacacaggatgcccagcacagcgacctccgggacccccacagccggcggcaacggagcctgggcccagatgcagagcccagctctgtgctggccttctggaggctaatctgtgacaccttccgaaagattgtggacagcaagtactttggccggggaatcatgatcgccatcctggtcaacacactcagcatgggcatcgaataccacgagcagcccgaggagcttaccaacgccctagaaatcagcaacatcgtcttcaccagcctctttgccctggagatgctgctgaagctgcttgtgtatggtccctttggctacatcaagaatccctacaacatcttcgatggtgtcattgtggtcatcagcgtgtgggagatcgtgggccagcaggggggcggcctgtcggtgctgcggaccttccgcctgatgcgtgtgctgaagctggtgcgcttcctgccggcgctgcagcggcagctggtggtgctcatgaagaccatggacaacgtggccaccttctgcatgctgcttatgctcttcatcttcatcttcagcatcctgggcatgcatctcttcggctgcaagtttgcctctgagcgggatggggacaccctgccagaccggaagaattttgactccttgctctgggccatcgtcactgtctttcagatcctgacccaggaggactggaacaaagtcctctacaatggtatggcctccacgtcgtcctgggcggccctttatttcattgccctcatgaccttcggcaactacgtgctcttcaatttgctggtcgccattctggtggagggcttccaggcggaggaaatcagcaaacgggaagatgcgagtggacagttaagctgtattcagctgcctgtcgactcccaggggggagatgccaacaagtccgaatcagagcccgatttcttctcacccagcctggatggtgatggggacaggaagaagtgcttggccttggtgtccctgggagagcacccggagctgcggaagagcctgctgccgcctctcatcatccacacggccgccacacccatgtcgctgcccaagagcaccagcacgggcctgggcgaggcgctgggccctgcgtcgcgccgcaccagcagcagcgggtcggcagagcctggggcggcccacgagatgaagtcaccgcccagcgcccgcagctctccgcacagcccctggagcgctgcaagcagctggaccagcaggcgctccagccggaacagcctcggccgtgcacccagcctgaagcggagaagcccaagtggagagcggcggtccctgttgtcgggagaaggccaggagagccaggatgaagaggagagctcagaagaggagcgggccagccctgcgggcagtgaccatcgccacagggggtccctggagcgggaggccaagagttcctttgacctgccagacacactgcaggtgccagggctgcatcgcactgccagtggccgagggtctgcttctgagcaccaggactgcaatggcaagtcggcttcagggcgcctggcccgggccctgcggcctgatgaccccccactggatggggatgacgccgatgacgagggcaacctgagcaaaggggaacgggtccgcgcgtggatccgagcccgactccctgcctgctgcctcgagcgagactcctggtcagcctacatcttccctcctcagtccaggttccgcctcctgtgtcaccggatcatcacccacaagatgttcgaccacgtggtccttgtcatcatcttccttaactgcatcaccatcgccatggagcgccccaaaattgacccccacagcgctgaacgcatcttcctgaccctctccaattacatcttcaccgcagtctttctggctgaaatgacagtgaaggtggtggcactgggctggtgcttcggggagcaggcgtacctgcggagcagttggaacgtgctggacgggctgttggtgctcatctccgtcatcgacattctggtgtccatggtctctgacagcggcaccaagatcctgggcatgctgagggtgctgcggctgctgcggaccctgcgcccgctcagggtgatcagccgggcgcaggggctgaagctggtggtggagacgctgatgtcctcactgaaacccatcggcaacattgtagtcatctgctgtgccttcttcatcattttcggcatcttgggggtgcagctcttcaaagggaagtttttcgtgtgccagggcgaggataccaggaacatcaccaataaatcggactgtgccgaggccagttaccggtgggtccggcacaagtacaactttgacaaccttggccaggccctgatgtccctgttcgttttggcctccaaggatggttgggtggacatcatgtacgatgggctggatgctgtgggcgtggaccagcagcccatcatgaaccacaacccctggatgctgctgtacttcatctcgttcctgctcattgtggccttctttgtcctgaacatgtttgtgggtgtggtggtggagaacttccacaagtgtcggcagcaccaggaggaagaggaggcccggcggcgggaggagaagcgcctacgaagactggagaaaaagagaaggaatctaatgctggacgatgtaattgcttccggcagctcagccagcgctgcgtcagaagcccagtgcaaaccttactactccgactactcccgcttccggctcctcgtccaccacttgtgcaccagccactacctggacctcttcatcacaggtgtcatcgggctgaacgtggtcaccatggccatggagcactaccagcagccccagattctggatgaggctctgaagatctgcaactacatcttcactgtcatctttgtcttggagtcagttttcaaacttgtggcctttggtttccgtcggttcttccaggacaggtggaaccagctggacctggccattgtgctgctgtccatcatgggcatcacgctggaggaaatcgaggtcaacgcctcgctgcccatcaaccccaccatcatccgcatcatgagggtgctgcgcattgcccgagtgctgaagctgctgaagatggctgtgggcatgcgggcgctgctggacacggtgatgcaggccctgccccagctctgggcgtggagctctttggagacctggagtgtgacgagacacacccctgtgagggcctgggccgtcatgccacctttcggaactttggcatggccttcctaaccctcttccgagtctccacaggtgacaattggaatggcattatgaaggacaccctccgggactgtgaccaggagtccacctgctacaacacggtcatctcgcctatctactttgtgtccttcgtgctgacggcccagttcgtgctagtcaacgtggtgatcgccgtgctgatgaagcacctggaggagagcaacaaggaggccaaggaggaggccgagctagaggctgagctggagctggagatgaagaccctcagcccccagccccactcgccactgggcagccccttcctctggcctggggtcgagggccccgacagccccgacagccccaagcctggggctctgcacccagcggcccacgcgagatcagcctcccacttttccctggagcaccccacgatgcagccccaccccacggagctgccaggaccagacttactgactgtgcggaagtctggggtcagccgaacgcactctctgcccaatgacagctacatgtgtcggcatgggagcactgccgaggggcccctgggacacaggggctgggggctccccaaagctcagtcaggctccgtcttgtccgttcactcccagccagcagataccagctacatcctgcagcttcccaaagatgcacctcatctgctccagccccacagcgccccaacctggggcaccatccccaaactgcccccaccaggacgctcccctttggctcagaggccactcaggcgccaggcagcaataaggactgactccttggacgttcagggtctgggcagccgggaagacctgctggcagaggtgagtgggccctccccgcccctggcccgggcctactctttctggggccagtcaagtacccaggcacagcagcactcccgcagccacagcaagatctccaagcacatgaccccgccagccccttgcccaggcccagaacccaactggggcaagggccctccagagaccagaagcagcttagagttggacacggagctgagctggatttcaggagacctcctgccccctggcggccaggaggagcccccatccccacgggacctgaagaagtgctacagcgtggaggcccagagctgccagcgccggcctacgtcctggctggatgagcagaggagacactctatcgccgtcagctgcctggacagcggctcccaaccccacctgggcacagacccctctaaccttgggggccagcctcttggggggcctgggagccggcccaagaaaaaactcagcccgcctagtatcaccatagacccccccgagagccaaggtcctcggaccccgcccagccctggtatctgcctccggaggagggctccgtccagcgactccaaggatcccttggcctctggcccccctgacagcatggctgcctcgccctccccaaagaaagatgtgctgagtctctccggtttatcctctgacccagcagacctggacccctgagtcctgccccacttt

SEQ ID NO: 2756 - DNA, 6788 bp, Homo sapiens
  source 1..6788: mol_type = unassigned DNA; mol_type = unassigned DNA
atggacgaggaggaggatggagcgggcgccgaggagtcgggacagccccggagcttcatgcggctcaacgacctgtcgggggccgggggccggccggggccggggtcagcagaaaaggacccgggcagcgcggactccgaggcggaggggctgccgtacccggcgctggccccggtggttttcttctacttgagccaggacagccgcccgcggagctggtgtctccgcacggtctgtaacccctggtttgagcgcatcagcatgttggtcatccttctcaactgcgtgaccctgggcatgttccggccatgcgaggacatcgcctgtgactcccagcgctgccggatcctgcaggcctttgatgacttcatctttgccttctttgccgtggagatggtggtgaagatggtggccttgggcatctttgggaaaaagtgttacctgggagacacttggaaccggcttgactttttcatcgtcatcgcagggatgctggagtactcgctggacctgcagaacgtcagcttctcagctgtcaggacagtccgtgtgctgcgaccgctcagggccattaaccgggtgcccagcatgcgcatccttgtcacgttgctgctggatacgctgcccatgctgggcaacgtcctgctgctctgcttcttcgtcttcttcatcttcggcatcgtcggcgtccagctgtgggcagggctgcttcggaaccgatgcttcctacctgagaatttcagcctccccctgagcgtggacctggagcgctattaccagacagagaacgaggatgagagccccttcatctgctcccagccacgcgagaacggcatgcggtcctgcagaagcgtgcccacgctgcgcggggacgggggcggtggcccaccttgcggtctggactatgaggcctacaacagctccagcaacaccacctgtgtcaactggaaccagtactacaccaactgctcagcgggggagcacaaccccttcaagggcgccatcaactttgacaacattggctatgcctggatcgccatcttccaggtcatcacgctggagggctgggtcgacatcatgtactttgtgatggatgctcattccttctacaatttcatctacttcatcctcctcatcatcgtgggctccttcttcatgatcaacctgtgcctggtggtgattgccacgcagttctcagagaccaagcagcgggaaagccagctgatgcgggagcagcgtgtgcggttcctgtccaacgccagcaccctggctagcttctctgagcccggcagctgctatgaggagctgctcaagtacctggtgtacatccttcgtaaggcagcccgcaggctggctcaggtctctcgggcagcaggtgtgcgggttgggctgctcagcagcccagcacccctcgggggccaggagacccagcccagcagcagctgctctcgctcccaccgccgcctatccgtccaccacctggtgcaccaccaccaccaccatcaccaccactaccacctgggcaatgggacgctcagggccccccgggccagcccggagatccaggacagggatgccaatgggtcccgccggctcatgctgccaccaccctcgacgcctgccctctccggggccccccctggtggcgcagagtctgtgcacagcttctaccatgccgactgccacttagagccagtccgctgccaggcgccccctcccaggtccccatctgaggcatccggcaggactgtgggcagcgggaaggtgtatcccaccgtgcacaccagccctccaccggagacgctgaaggagaaggcactagtagaggtggctgccagctctgggcccccaaccctcaccagcctcaacatcccacccgggccctacagctccatgcacaagctgctggagacacagagtacaggtgcctgccaaagctcttgcaagatctccagcccttgcttgaaagcagacagtggagcctgtggtccagacagctgcccctactgtgcccgggccggggcaggggaggtggagctcgccgaccgtgaaatgcctgactcagacagcgaggcagtttatgagttcacacaggatgcccagcacagcgacctccgggacccccacagccggcggcaacggagcctgggcccagatgcagagcccagctctgtgctggccttctggaggctaatctgtgacaccttccgaaagattgtggacagcaagtactttggccggggaatcatgatcgccatcctggtcaacacactcagcatgggcatcgaataccacgagcagcccgaggagcttaccaacgccctagaaatcagcaacatcgtcttcaccagcctctttgccctggagatgctgctgaagctgcttgtgtatggtccctttggctacatcaagaatccctacaacatcttcgatggtgtcattgtggtcatcagcgtgtgggagatcgtgggccagcaggggggcggcctgtcggtgctgcggaccttccgcctgatgcgtgtgctgaagctggtgcgcttcctgccggcgctgcagcggcagctggtggtgctcatgaagaccatggacaacgtggccaccttctgcatgctgcttatgctcttcatcttcatcttcagcatcctgggcatgcatctcttcggctgcaagtttgcctctgagcgggatggggacaccctgccagaccggaagaattttgactccttgctctgggccatcgtcactgtctttcagatcctgacccaggaggactggaacaaagtcctctacaatggtatggcctccacgtcgtcctgggcggccctttatttcattgccctcatgaccttcggcaactacgtgctcttcaatttgctggtcgccattctggtggagggcttccaggcggaggaaatcagcaaacgggaagatgcgagtggacagttaagctgtattcagctgcctgtcgactcccaggggggagatgccaacaagtccgaatcagagcccgatttcttctcacccagcctggatggtgatggggacaggaagaagtgcttggccttggtgtccctgggagagcacccggagctgcggaagagcctgctgccgcctctcatcatccacacggccgccacacccatgtcgctgcccaagagcaccagcacgggcctgggcgaggcgctgggccctgcgtcgcgccgcaccagcagcagcgggtcggcagagcctggggcggcccacgagatgaagtcaccgcccagcgcccgcagctctccgcacagcccctggagcgctgcaagcagctggaccagcaggcgctccagccggaacagcctcggccgtgcacccagcctgaagcggagaagcccaagtggagagcggcggtccctgttgtcgggagaaggccaggagagccaggatgaagaggagagctcagaagaggagcgggccagccctgcgggcagtgaccatcgccacagggggtccctggagcgggaggccaagagttcctttgacctgccagacacactgcaggtgccagggctgcatcgcactgccagtggccgagggtctgcttctgagcaccaggactgcaatggcaagtcggcttcagggcgcctggcccgggccctgcggcctgatgaccccccactggatggggatgacgccgatgacgagggcaacctgagcaaaggggaacgggtccgcgcgtggatccgagcccgactccctgcctgctgcctcgagcgagactcctggtcagcctacatcttccctcctcagtccaggttccgcctcctgtgtcaccggatcatcacccacaagatgttcgaccacgtggtccttgtcatcatcttccttaactgcatcaccatcgccatggagcgccccaaaattgacccccacagcgctgaacgcatcttcctgaccctctccaattacatcttcaccgcagtctttctggctgaaatgacagtgaaggtggtggcactgggctggtgcttcggggagcaggcgtacctgcggagcagttggaacgtgctggacgggctgttggtgctcatctccgtcatcgacattctggtgtccatggtctctgacagcggcaccaagatcctgggcatgctgagggtgctgcggctgctgcggaccctgcgcccgctcagggtgatcagccgggcgcaggggctgaagctggtggtggagacgctgatgtcctcactgaaacccatcggcaacattgtagtcatctgctgtgccttcttcatcattttcggcatcttgggggtgcagctcttcaaagggaagtttttcgtgtgccagggcgaggataccaggaacatcaccaataaatcggactgtgccgaggccagttaccggtgggtccggcacaagtacaactttgacaaccttggccaggccctgatgtccctgttcgttttggcctccaaggatggttgggtggacatcatgtacgatgggctggatgctgtgggcgtggaccagcagcccatcatgaaccacaacccctggatgctgctgtacttcatctcgttcctgctcattgtggccttctttgtcctgaacatgtttgtgggtgtggtggtggagaacttccacaagtgtcggcagcaccaggaggaagaggaggcccggcggcgggaggagaagcgcctacgaagactggagaaaaagagaaggagtaaggagaagcagatggctgaagcccagtgcaaaccttactactccgactactcccgcttccggctcctcgtccaccacttgtgcaccagccactacctggacctcttcatcacaggtgtcatcgggctgaacgtggtcaccatggccatggagcactaccagcagccccagattctggatgaggctctgaagatctgcaactacatcttcactgtcatctttgtcttggagtcagttttcaaacttgtggcctttggtttccgtcggttcttccaggacaggtggaaccagctggacctggccattgtgctgctgtccatcatgggcatcacgctggaggaaatcgaggtcaacgcctcgctgcccatcaaccccaccatcatccgcatcatgagggtgctgcgcattgcccgagtgctgaagctgctgaagatggctgtgggcatgcgggcgctgctggacacggtgatgcaggccctgccccagctctgggcgtggagctctttggagacctggagtgtgacgagacacacccctgtgagggcctgggccgtcatgccacctttcggaactttggcatggccttcctaaccctcttccgagtctccacaggtgacaattggaatggcattatgaaggacaccctccgggactgtgaccaggagtccacctgctacaacacggtcatctcgcctatctactttgtgtccttcgtgctgacggcccagttcgtgctagtcaacgtggtgatcgccgtgctgatgaagcacctggaggagagcaacaaggaggccaaggaggaggccgagctagaggctgagctggagctggagatgaagaccctcagcccccagccccactcgccactgggcagccccttcctctggcctggggtcgagggccccgacagccccgacagccccaagcctggggctctgcacccagcggcccacgcgagatcagcctcccacttttccctggagcaccccacgatgcagccccaccccacggagctgccaggaccagacttactgactgtgcggaagtctggggtcagccgaacgcactctctgcccaatgacagctacatgtgtcggcatgggagcactgccgaggggcccctgggacacaggggctgggggctccccaaagctcagtcaggctccgtcttgtccgttcactcccagccagcagataccagctacatcctgcagcttcccaaagatgcacctcatctgctccagccccacagcgccccaacctggggcaccatccccaaactgcccccaccaggacgctcccctttggctcagaggccactcaggcgccaggcagcaataaggactgactccttggacgttcagggtctgggcagccgggaagacctgctggcagaggtgagtgggccctccccgcccctggcccgggcctactctttctggggccagtcaagtacccaggcacagcagcactcccgcagccacagcaagatctccaagcacatgaccccgccagccccttgcccaggcccagaacccaactggggcaagggccctccagagaccagaagcagcttagagttggacacggagctgagctggatttcaggagacctcctgccccctggcggccaggaggagcccccatccccacgggacctgaagaagtgctacagcgtggaggcccagagctgccagcgccggcctacgtcctggctggatgagcagaggagacactctatcgccgtcagctgcctggacagcggctcccaaccccacctgggcacagacccctctaaccttgggggccagcctcttggggggcctgggagccggcccaagaaaaaactcagcccgcctagtatcaccatagacccccccgagagccaaggtcctcggaccccgcccagccctggtatctgcctccggaggagggctccgtccagcgactccaaggatcccttggcctctggcccccctgacagcatggctgcctcgccctccccaaagaaagatgtgctgagtctctccggtttatcctctgacccagcagacctggacccctgagtcctgccccacttt

SEQ ID NO: 2757 - DNA, 6879 bp, Homo sapiens
  source 1..6879: mol_type = unassigned DNA; mol_type = unassigned DNA
atggacgaggaggaggatggagcgggcgccgaggagtcgggacagccccggagcttcatgcggctcaacgacctgtcgggggccgggggccggccggggccggggtcagcagaaaaggacccgggcagcgcggactccgaggcggaggggctgccgtacccggcgctggccccggtggttttcttctacttgagccaggacagccgcccgcggagctggtgtctccgcacggtctgtaacccctggtttgagcgcatcagcatgttggtcatccttctcaactgcgtgaccctgggcatgttccggccatgcgaggacatcgcctgtgactcccagcgctgccggatcctgcaggcctttgatgacttcatctttgccttctttgccgtggagatggtggtgaagatggtggccttgggcatctttgggaaaaagtgttacctgggagacacttggaaccggcttgactttttcatcgtcatcgcagggatgctggagtactcgctggacctgcagaacgtcagcttctcagctgtcaggacagtccgtgtgctgcgaccgctcagggccattaaccgggtgcccagcatgcgcatccttgtcacgttgctgctggatacgctgcccatgctgggcaacgtcctgctgctctgcttcttcgtcttcttcatcttcggcatcgtcggcgtccagctgtgggcagggctgcttcggaaccgatgcttcctacctgagaatttcagcctccccctgagcgtggacctggagcgctattaccagacagagaacgaggatgagagccccttcatctgctcccagccacgcgagaacggcatgcggtcctgcagaagcgtgcccacgctgcgcggggacgggggcggtggcccaccttgcggtctggactatgaggcctacaacagctccagcaacaccacctgtgtcaactggaaccagtactacaccaactgctcagcgggggagcacaaccccttcaagggcgccatcaactttgacaacattggctatgcctggatcgccatcttccaggtcatcacgctggagggctgggtcgacatcatgtactttgtgatggatgctcattccttctacaatttcatctacttcatcctcctcatcatcgtgggctccttcttcatgatcaacctgtgcctggtggtgattgccacgcagttctcagagaccaagcagcgggaaagccagctgatgcgggagcagcgtgtgcggttcctgtccaacgccagcaccctggctagcttctctgagcccggcagctgctatgaggagctgctcaagtacctggtgtacatccttcgtaaggcagcccgcaggctggctcaggtctctcgggcagcaggtgtgcgggttgggctgctcagcagcccagcacccctcgggggccaggagacccagcccagcagcagctgctctcgctcccaccgccgcctatccgtccaccacctggtgcaccaccaccaccaccatcaccaccactaccacctgggcaatgggacgctcagggccccccgggccagcccggagatccaggacagggatgccaatgggtcccgccggctcatgctgccaccaccctcgacgcctgccctctccggggccccccctggtggcgcagagtctgtgcacagcttctaccatgccgactgccacttagagccagtccgctgccaggcgccccctcccaggtccccatctgaggcatccggcaggactgtgggcagcgggaaggtgtatcccaccgtgcacaccagccctccaccggagacgctgaaggagaaggcactagtagaggtggctgccagctctgggcccccaaccctcaccagcctcaacatcccacccgggccctacagctccatgcacaagctgctggagacacagagtacaggtgcctgccaaagctcttgcaagatctccagcccttgcttgaaagcagacagtggagcctgtggtccagacagctgcccctactgtgcccgggccggggcaggggaggtggagctcgccgaccgtgaaatgcctgactcagacagcgaggcagtttatgagttcacacaggatgcccagcacagcgacctccgggacccccacagccggcggcaacggagcctgggcccagatgcagagcccagctctgtgctggccttctggaggctaatctgtgacaccttccgaaagattgtggacagcaagtactttggccggggaatcatgatcgccatcctggtcaacacactcagcatgggcatcgaataccacgagcagcccgaggagcttaccaacgccctagaaatcagcaacatcgtcttcaccagcctctttgccctggagatgctgctgaagctgcttgtgtatggtccctttggctacatcaagaatccctacaacatcttcgatggtgtcattgtggtcatcagcgtgtgggagatcgtgggccagcaggggggcggcctgtcggtgctgcggaccttccgcctgatgcgtgtgctgaagctggtgcgcttcctgccggcgctgcagcggcagctggtggtgctcatgaagaccatggacaacgtggccaccttctgcatgctgcttatgctcttcatcttcatcttcagcatcctgggcatgcatctcttcggctgcaagtttgcctctgagcgggatggggacaccctgccagaccggaagaattttgactccttgctctgggccatcgtcactgtctttcagatcctgacccaggaggactggaacaaagtcctctacaatggtatggcctccacgtcgtcctgggcggccctttatttcattgccctcatgaccttcggcaactacgtgctcttcaatttgctggtcgccattctggtggagggcttccaggcggaggaaatcagcaaacgggaagatgcgagtggacagttaagctgtattcagctgcctgtcgactcccaggggggagatgccaacaagtccgaatcagagcccgatttcttctcacccagcctggatggtgatggggacaggaagaagtgcttggccttggtgtccctgggagagcacccggagctgcggaagagcctgctgccgcctctcatcatccacacggccgccacacccatgtcgctgcccaagagcaccagcacgggcctgggcgaggcgctgggccctgcgtcgcgccgcaccagcagcagcgggtcggcagagcctggggcggcccacgagatgaagtcaccgcccagcgcccgcagctctccgcacagcccctggagcgctgcaagcagctggaccagcaggcgctccagccggaacagcctcggccgtgcacccagcctgaagcggagaagcccaagtggagagcggcggtccctgttgtcgggagaaggccaggagagccaggatgaagaggagagctcagaagaggagcgggccagccctgcgggcagtgaccatcgccacagggggtccctggagcgggaggccaagagttcctttgacctgccagacacactgcaggtgccagggctgcatcgcactgccagtggccgagggtctgcttctgagcaccaggactgcaatggcaagtcggcttcagggcgcctggcccgggccctgcggcctgatgaccccccactggatggggatgacgccgatgacgagggcaacctgagcaaaggggaacgggtccgcgcgtggatccgagcccgactccctgcctgctgcctcgagcgagactcctggtcagcctacatcttccctcctcagtccaggttccgcctcctgtgtcaccggatcatcacccacaagatgttcgaccacgtggtccttgtcatcatcttccttaactgcatcaccatcgccatggagcgccccaaaattgacccccacagcgctgaacgcatcttcctgaccctctccaattacatcttcaccgcagtctttctggctgaaatgacagtgaaggtggtggcactgggctggtgcttcggggagcaggcgtacctgcggagcagttggaacgtgctggacgggctgttggtgctcatctccgtcatcgacattctggtgtccatggtctctgacagcggcaccaagatcctgggcatgctgagggtgctgcggctgctgcggaccctgcgcccgctcagggtgatcagccgggcgcaggggctgaagctggtggtggagacgctgatgtcctcactgaaacccatcggcaacattgtagtcatctgctgtgccttcttcatcattttcggcatcttgggggtgcagctcttcaaagggaagtttttcgtgtgccagggcgaggataccaggaacatcaccaataaatcggactgtgccgaggccagttaccggtgggtccggcacaagtacaactttgacaaccttggccaggccctgatgtccctgttcgttttggcctccaaggatggttgggtggacatcatgtacgatgggctggatgctgtgggcgtggaccagcagaacttccacaagtgtcggcagcaccaggaggaagaggaggcccggcggcgggaggagaagcgcctacgaagactggagaaaaagagaaggagtaaggagaagcagatggctgaagcccagtgcaaaccttactactccgactactcccgcttccggctcctcgtccaccacttgtgcaccagccactacctggacctcttcatcacaggtgtcatcgggctgaacgtggtcaccatggccatggagcactaccagcagccccagattctggatgaggctctgaagatctgcaactacatcttcactgtcatctttgtcttggagtcagttttcaaacttgtggcctttggtttccgtcggttcttccaggacaggtggaaccagctggacctggccattgtgctgctgtccatcatgggcatcacgctggaggaaatcgaggtcaacgcctcgctgcccatcaaccccaccatcatccgcatcatgagggtgctgcgcattgcccgagtgctgaagctgctgaagatggctgtgggcatgcgggcgctgctggacacggtgatgcaggccctgccccaggtggggaacctgggacttctcttcatgttgttgtttttcatctttgcagctctgggcgtggagctctttggagacctggagtgtgacgagacacacccctgtgagggcctgggccgtcatgccacctttcggaactttggcatggccttcctaaccctcttccgagtctccacaggtgacaattggaatggcattatgaaggacaccctccgggactgtgaccaggagtccacctgctacaacacggtcatctcgcctatctactttgtgtccttcgtgctgacggcccagttcgtgctagtcaacgtggtgatcgccgtgctgatgaagcacctggaggagagcaacaaggaggccaaggaggaggccgagctagaggctgagctggagctggagatgaagaccctcagcccccagccccactcgccactgggcagccccttcctctggcctggggtcgagggccccgacagccccgacagccccaagcctggggctctgcacccagcggcccacgcgagatcagcctcccacttttccctggagcaccccacggacaggcagctgtttgacaccatatccctgctgatccagggctccctggagtgggagctgaagctgatggacgagctggcaggcccagggggccagccctctgccttcccttctgcccccagcctgggaggctccgacccacagatgcagccccaccccacggagctgccaggaccagacttactgactgtgcggaagtctggggtcagccgaacgcactctctgcccaatgacagctacatgtgtcggcatgggagcactgccgaggggcccctgggacacaggggctgggggctccccaaagctcagtcaggctccgtcttgtccgttcactcccagccagcagataccagctacatcctgcagcttcccaaagatgcacctcatctgctccagccccacagcgccccaacctggggcaccatccccaaactgcccccaccaggacgctcccctttggctcagaggccactcaggcgccaggcagcaataaggactgactccttggacgttcagggtctgggcagccgggaagacctgctggcagaggtgagtgggccctccccgcccctggcccgggcctactctttctggggccagtcaagtacccaggcacagcagcactcccgcagccacagcaagatctccaagcacatgaccccgccagccccttgcccaggcccagaacccaactggggcaagggccctccagagaccagaagcagcttagagttggacacggagctgagctggatttcaggagacctcctgccccctggcggccaggaggagcccccatccccacgggacctgaagaagtgctacagcgtggaggcccagagctgccagcgccggcctacgtcctggctggatgagcagaggagacactctatcgccgtcagctgcctggacagcggctcccaaccccacctgggcacagacccctctaaccttgggggccagcctcttggggggcctgggagccggcccaagaaaaaactcagcccgcctagtatcaccatagacccccccgagagccaaggtcctcggaccccgcccagccctggtatctgcctccggaggagggctccgtccagcgactccaaggatcccttggcctctggcccccctgacagcatggctgcctcgccctccccaaagaaagatgtgctgagtctctccggtttatcctctgacccagcagacctggacccctgagtcctgccccacttt

SEQ ID NO: 2758 - DNA, 6849 bp, Homo sapiens
  source 1..6849: mol_type = unassigned DNA; mol_type = unassigned DNA
atggacgaggaggaggatggagcgggcgccgaggagtcgggacagccccggagcttcatgcggctcaacgacctgtcgggggccgggggccggccggggccggggtcagcagaaaaggacccgggcagcgcggactccgaggcggaggggctgccgtacccggcgctggccccggtggttttcttctacttgagccaggacagccgcccgcggagctggtgtctccgcacggtctgtaacccctggtttgagcgcatcagcatgttggtcatccttctcaactgcgtgaccctgggcatgttccggccatgcgaggacatcgcctgtgactcccagcgctgccggatcctgcaggcctttgatgacttcatctttgccttctttgccgtggagatggtggtgaagatggtggccttgggcatctttgggaaaaagtgttacctgggagacacttggaaccggcttgactttttcatcgtcatcgcagggatgctggagtactcgctggacctgcagaacgtcagcttctcagctgtcaggacagtccgtgtgctgcgaccgctcagggccattaaccgggtgcccagcatgcgcatccttgtcacgttgctgctggatacgctgcccatgctgggcaacgtcctgctgctctgcttcttcgtcttcttcatcttcggcatcgtcggcgtccagctgtgggcagggctgcttcggaaccgatgcttcctacctgagaatttcagcctccccctgagcgtggacctggagcgctattaccagacagagaacgaggatgagagccccttcatctgctcccagccacgcgagaacggcatgcggtcctgcagaagcgtgcccacgctgcgcggggacgggggcggtggcccaccttgcggtctggactatgaggcctacaacagctccagcaacaccacctgtgtcaactggaaccagtactacaccaactgctcagcgggggagcacaaccccttcaagggcgccatcaactttgacaacattggctatgcctggatcgccatcttccaggtcatcacgctggagggctgggtcgacatcatgtactttgtgatggatgctcattccttctacaatttcatctacttcatcctcctcatcatcgtgggctccttcttcatgatcaacctgtgcctggtggtgattgccacgcagttctcagagaccaagcagcgggaaagccagctgatgcgggagcagcgtgtgcggttcctgtccaacgccagcaccctggctagcttctctgagcccggcagctgctatgaggagctgctcaagtacctggtgtacatccttcgtaaggcagcccgcaggctggctcaggtctctcgggcagcaggtgtgcgggttgggctgctcagcagcccagcacccctcgggggccaggagacccagcccagcagcagctgctctcgctcccaccgccgcctatccgtccaccacctggtgcaccaccaccaccaccatcaccaccactaccacctgggcaatgggacgctcagggccccccgggccagcccggagatccaggacagggatgccaatgggtcccgccggctcatgctgccaccaccctcgacgcctgccctctccggggccccccctggtggcgcagagtctgtgcacagcttctaccatgccgactgccacttagagccagtccgctgccaggcgccccctcccaggtccccatctgaggcatccggcaggactgtgggcagcgggaaggtgtatcccaccgtgcacaccagccctccaccggagacgctgaaggagaaggcactagtagaggtggctgccagctctgggcccccaaccctcaccagcctcaacatcccacccgggccctacagctccatgcacaagctgctggagacacagagtacaggtgcctgccaaagctcttgcaagatctccagcccttgcttgaaagcagacagtggagcctgtggtccagacagctgcccctactgtgcccgggccggggcaggggaggtggagctcgccgaccgtgaaatgcctgactcagacagcgaggcagtttatgagttcacacaggatgcccagcacagcgacctccgggacccccacagccggcggcaacggagcctgggcccagatgcagagcccagctctgtgctggccttctggaggctaatctgtgacaccttccgaaagattgtggacagcaagtactttggccggggaatcatgatcgccatcctggtcaacacactcagcatgggcatcgaataccacgagcagcccgaggagcttaccaacgccctagaaatcagcaacatcgtcttcaccagcctctttgccctggagatgctgctgaagctgcttgtgtatggtccctttggctacatcaagaatccctacaacatcttcgatggtgtcattgtggtcatcagcgtgtgggagatcgtgggccagcaggggggcggcctgtcggtgctgcggaccttccgcctgatgcgtgtgctgaagctggtgcgcttcctgccggcgctgcagcggcagctggtggtgctcatgaagaccatggacaacgtggccaccttctgcatgctgcttatgctcttcatcttcatcttcagcatcctgggcatgcatctcttcggctgcaagtttgcctctgagcgggatggggacaccctgccagaccggaagaattttgactccttgctctgggccatcgtcactgtctttcagatcctgacccaggaggactggaacaaagtcctctacaatggtatggcctccacgtcgtcctgggcggccctttatttcattgccctcatgaccttcggcaactacgtgctcttcaatttgctggtcgccattctggtggagggcttccaggcggaggaaatcagcaaacgggaagatgcgagtggacagttaagctgtattcagctgcctgtcgactcccaggggggagatgccaacaagtccgaatcagagcccgatttcttctcacccagcctggatggtgatggggacaggaagaagtgcttggccttggtgtccctgggagagcacccggagctgcggaagagcctgctgccgcctctcatcatccacacggccgccacacccatgtcgctgcccaagagcaccagcacgggcctgggcgaggcgctgggccctgcgtcgcgccgcaccagcagcagcgggtcggcagagcctggggcggcccacgagatgaagtcaccgcccagcgcccgcagctctccgcacagcccctggagcgctgcaagcagctggaccagcaggcgctccagccggaacagcctcggccgtgcacccagcctgaagcggagaagcccaagtggagagcggcggtccctgttgtcgggagaaggccaggagagccaggatgaagaggagagctcagaagaggagcgggccagccctgcgggcagtgaccatcgccacagggggtccctggagcgggaggccaagagttcctttgacctgccagacacactgcaggtgccagggctgcatcgcactgccagtggccgagggtctgcttctgagcaccaggactgcaatggcaagtcggcttcagggcgcctggcccgggccctgcggcctgatgaccccccactggatggggatgacgccgatgacgagggcaacctgagcaaaggggaacgggtccgcgcgtggatccgagcccgactccctgcctgctgcctcgagcgagactcctggtcagcctacatcttccctcctcagtccaggttccgcctcctgtgtcaccggatcatcacccacaagatgttcgaccacgtggtccttgtcatcatcttccttaactgcatcaccatcgccatggagcgccccaaaattgacccccacagcgctgaacgcatcttcctgaccctctccaattacatcttcaccgcagtctttctggctgaaatgacagtgaaggtggtggcactgggctggtgcttcggggagcaggcgtacctgcggagcagttggaacgtgctggacgggctgttggtgctcatctccgtcatcgacattctggtgtccatggtctctgacagcggcaccaagatcctgggcatgctgagggtgctgcggctgctgcggaccctgcgcccgctcagggtgatcagccgggcgcaggggctgaagctggtggtggagacgctgatgtcctcactgaaacccatcggcaacattgtagtcatctgctgtgccttcttcatcattttcggcatcttgggggtgcagctcttcaaagggaagtttttcgtgtgccagggcgaggataccaggaacatcaccaataaatcggactgtgccgaggccagttaccggtgggtccggcacaagtacaactttgacaaccttggccaggccctgatgtccctgttcgttttggcctccaaggatggttgggtggacatcatgtacgatgggctggatgctgtgggcgtggaccagcagcccatcatgaaccacaacccctggatgctgctgtacttcatctcgttcctgctcattgtggccttctttgtcctgaacatgtttgtgggtgtggtggtggagaacttccacaagtgtcggcagcaccaggaggaagaggaggcccggcggcgggaggagaagcgcctacgaagactggagaaaaagagaaggaatctaatgctggacgatgtaattgcttccggcagctcagccagcgctgcgtcagaagcccagtgcaaaccttactactccgactactcccgcttccggctcctcgtccaccacttgtgcaccagccactacctggacctcttcatcacaggtgtcatcgggctgaacgtggtcaccatggccatggagcactaccagcagccccagattctggatgaggctctgaagatctgcaactacatcttcactgtcatctttgtcttggagtcagttttcaaacttgtggcctttggtttccgtcggttcttccaggacaggtggaaccagctggacctggccattgtgctgctgtccatcatgggcatcacgctggaggaaatcgaggtcaacgcctcgctgcccatcaaccccaccatcatccgcatcatgagggtgctgcgcattgcccgagtgctgaagctgctgaagatggctgtgggcatgcgggcgctgctggacacggtggggaacctgggacttctcttcatgttgttgtttttcatctttgcagctctgggcgtggagctctttggagacctggagtgtgacgagacacacccctgtgagggcctgggccgtcatgccacctttcggaactttggcatggccttcctaaccctcttccgagtctccacaggtgacaattggaatggcattatgaaggacaccctccgggactgtgaccaggagtccacctgctacaacacggtcatctcgcctatctactttgtgtccttcgtgctgacggcccagttcgtgctagtcaacgtggtgatcgccgtgctgatgaagcacctggaggagagcaacaaggaggccaaggaggaggccgagctagaggctgagctggagctggagatgaagaccctcagcccccagccccactcgccactgggcagccccttcctctggcctggggtcgagggccccgacagccccgacagccccaagcctggggctctgcacccagcggcccacgcgagatcagcctcccacttttccctggagcaccccacgatgcagccccaccccacggagctgccaggaccagacttactgactgtgcggaagtctggggtcagccgaacgcactctctgcccaatgacagctacatgtgtcggcatgggagcactgccgaggggcccctgggacacaggggctgggggctccccaaagctcagtcaggctccgtcttgtccgttcactcccagccagcagataccagctacatcctgcagcttcccaaagatgcacctcatctgctccagccccacagcgccccaacctggggcaccatccccaaactgcccccaccaggacgctcccctttggctcagaggccactcaggcgccaggcagcaataaggactgactccttggacgttcagggtctgggcagccgggaagacctgctggcagaggtgagtgggccctccccgcccctggcccgggcctactctttctggggccagtcaagtacccaggcacagcagcactcccgcagccacagcaagatctccaagcacatgaccccgccagccccttgcccaggcccagaacccaactggggcaagggccctccagagaccagaagcagcttagagttggacacggagctgagctggatttcaggagacctcctgccccctggcggccaggaggagcccccatccccacgggacctgaagaagtgctacagcgtggaggcccagagctgccagcgccggcctacgtcctggctggatgagcagaggagacactctatcgccgtcagctgcctggacagcggctcccaaccccacctgggcacagacccctctaaccttgggggccagcctcttggggggcctgggagccggcccaagaaaaaactcagcccgcctagtatcaccatagacccccccgagagccaaggtcctcggaccccgcccagccctggtatctgcctccggaggagggctccgtccagcgactccaaggatcccttggcctctggcccccctgacagcatggctgcctcgccctccccaaagaaagatgtgctgagtctctccggtttatcctctgacccagcagacctggacccctgagtcctgccccacttt

SEQ ID NO: 2759 - DNA, 6752 bp, Homo sapiens
  source 1..6752: mol_type = unassigned DNA; mol_type = unassigned DNA
atggacgaggaggaggatggagcgggcgccgaggagtcgggacagccccggagcttcatgcggctcaacgacctgtcgggggccgggggccggccggggccggggtcagcagaaaaggacccgggcagcgcggactccgaggcggaggggctgccgtacccggcgctggccccggtggttttcttctacttgagccaggacagccgcccgcggagctggtgtctccgcacggtctgtaacccctggtttgagcgcatcagcatgttggtcatccttctcaactgcgtgaccctgggcatgttccggccatgcgaggacatcgcctgtgactcccagcgctgccggatcctgcaggcctttgatgacttcatctttgccttctttgccgtggagatggtggtgaagatggtggccttgggcatctttgggaaaaagtgttacctgggagacacttggaaccggcttgactttttcatcgtcatcgcagggatgctggagtactcgctggacctgcagaacgtcagcttctcagctgtcaggacagtccgtgtgctgcgaccgctcagggccattaaccgggtgcccagcatgcgcatccttgtcacgttgctgctggatacgctgcccatgctgggcaacgtcctgctgctctgcttcttcgtcttcttcatcttcggcatcgtcggcgtccagctgtgggcagggctgcttcggaaccgatgcttcctacctgagaatttcagcctccccctgagcgtggacctggagcgctattaccagacagagaacgaggatgagagccccttcatctgctcccagccacgcgagaacggcatgcggtcctgcagaagcgtgcccacgctgcgcggggacgggggcggtggcccaccttgcggtctggactatgaggcctacaacagctccagcaacaccacctgtgtcaactggaaccagtactacaccaactgctcagcgggggagcacaaccccttcaagggcgccatcaactttgacaacattggctatgcctggatcgccatcttccaggtcatcacgctggagggctgggtcgacatcatgtactttgtgatggatgctcattccttctacaatttcatctacttcatcctcctcatcatcgtgggctccttcttcatgatcaacctgtgcctggtggtgattgccacgcagttctcagagaccaagcagcgggaaagccagctgatgcgggagcagcgtgtgcggttcctgtccaacgccagcaccctggctagcttctctgagcccggcagctgctatgaggagctgctcaagtacctggtgtacatccttcgtaaggcagcccgcaggctggctcaggtctctcgggcagcaggtgtgcgggttgggctgctcagcagcccagcacccctcgggggccaggagacccagcccagcagcagctgctctcgctcccaccgccgcctatccgtccaccacctggtgcaccaccaccaccaccatcaccaccactaccacctgggcaatgggacgctcagggccccccgggccagcccggagatccaggacagggatgccaatgggtcccgccggctcatgctgccaccaccctcgacgcctgccctctccggggccccccctggtggcgcagagtctgtgcacagcttctaccatgccgactgccacttagagccagtccgctgccaggcgccccctcccaggtccccatctgaggcatccggcaggactgtgggcagcgggaaggtgtatcccaccgtgcacaccagccctccaccggagacgctgaaggagaaggcactagtagaggtggctgccagctctgggcccccaaccctcaccagcctcaacatcccacccgggccctacagctccatgcacaagctgctggagacacagagtacaggtgcctgccaaagctcttgcaagatctccagcccttgcttgaaagcagacagtggagcctgtggtccagacagctgcccctactgtgcccgggccggggcaggggaggtggagctcgccgaccgtgaaatgcctgactcagacagcgaggcagtttatgagttcacacaggatgcccagcacagcgacctccgggacccccacagccggcggcaacggagcctgggcccagatgcagagcccagctctgtgctggccttctggaggctaatctgtgacaccttccgaaagattgtggacagcaagtactttggccggggaatcatgatcgccatcctggtcaacacactcagcatgggcatcgaataccacgagcagcccgaggagcttaccaacgccctagaaatcagcaacatcgtcttcaccagcctctttgccctggagatgctgctgaagctgcttgtgtatggtccctttggctacatcaagaatccctacaacatcttcgatggtgtcattgtggtcatcagcgtgtgggagatcgtgggccagcaggggggcggcctgtcggtgctgcggaccttccgcctgatgcgtgtgctgaagctggtgcgcttcctgccggcgctgcagcggcagctggtggtgctcatgaagaccatggacaacgtggccaccttctgcatgctgcttatgctcttcatcttcatcttcagcatcctgggcatgcatctcttcggctgcaagtttgcctctgagcgggatggggacaccctgccagaccggaagaattttgactccttgctctgggccatcgtcactgtctttcagatcctgacccaggaggactggaacaaagtcctctacaatggtatggcctccacgtcgtcctgggcggccctttatttcattgccctcatgaccttcggcaactacgtgctcttcaatttgctggtcgccattctggtggagggcttccaggcggagggagatgccaacaagtccgaatcagagcccgatttcttctcacccagcctggatggtgatggggacaggaagaagtgcttggccttggtgtccctgggagagcacccggagctgcggaagagcctgctgccgcctctcatcatccacacggccgccacacccatgtcgctgcccaagagcaccagcacgggcctgggcgaggcgctgggccctgcgtcgcgccgcaccagcagcagcgggtcggcagagcctggggcggcccacgagatgaagtcaccgcccagcgcccgcagctctccgcacagcccctggagcgctgcaagcagctggaccagcaggcgctccagccggaacagcctcggccgtgcacccagcctgaagcggagaagcccaagtggagagcggcggtccctgttgtcgggagaaggccaggagagccaggatgaagaggagagctcagaagaggagcgggccagccctgcgggcagtgaccatcgccacagggggtccctggagcgggaggccaagagttcctttgacctgccagacacactgcaggtgccagggctgcatcgcactgccagtggccgagggtctgcttctgagcaccaggactgcaatggcaagtcggcttcagggcgcctggcccgggccctgcggcctgatgaccccccactggatggggatgacgccgatgacgagggcaacctgagcaaaggggaacgggtccgcgcgtggatccgagcccgactccctgcctgctgcctcgagcgagactcctggtcagcctacatcttccctcctcagtccaggttccgcctcctgtgtcaccggatcatcacccacaagatgttcgaccacgtggtccttgtcatcatcttccttaactgcatcaccatcgccatggagcgccccaaaattgacccccacagcgctgaacgcatcttcctgaccctctccaattacatcttcaccgcagtctttctggctgaaatgacagtgaaggtggtggcactgggctggtgcttcggggagcaggcgtacctgcggagcagttggaacgtgctggacgggctgttggtgctcatctccgtcatcgacattctggtgtccatggtctctgacagcggcaccaagatcctgggcatgctgagggtgctgcggctgctgcggaccctgcgcccgctcagggtgatcagccgggcgcaggggctgaagctggtggtggagacgctgatgtcctcactgaaacccatcggcaacattgtagtcatctgctgtgccttcttcatcattttcggcatcttgggggtgcagctcttcaaagggaagtttttcgtgtgccagggcgaggataccaggaacatcaccaataaatcggactgtgccgaggccagttaccggtgggtccggcacaagtacaactttgacaaccttggccaggccctgatgtccctgttcgttttggcctccaaggatggttgggtggacatcatgtacgatgggctggatgctgtgggcgtggaccagcagcccatcatgaaccacaacccctggatgctgctgtacttcatctcgttcctgctcattgtggccttctttgtcctgaacatgtttgtgggtgtggtggtggagaacttccacaagtgtcggcagcaccaggaggaagaggaggcccggcggcgggaggagaagcgcctacgaagactggagaaaaagagaaggaatctaatgctggacgatgtaattgcttccggcagctcagccagcgctgcgtcagaagcccagtgcaaaccttactactccgactactcccgcttccggctcctcgtccaccacttgtgcaccagccactacctggacctcttcatcacaggtgtcatcgggctgaacgtggtcaccatggccatggagcactaccagcagccccagattctggatgaggctctgaagatctgcaactacatcttcactgtcatctttgtcttggagtcagttttcaaacttgtggcctttggtttccgtcggttcttccaggacaggtggaaccagctggacctggccattgtgctgctgtccatcatgggcatcacgctggaggaaatcgaggtcaacgcctcgctgcccatcaaccccaccatcatccgcatcatgagggtgctgcgcattgcccgagtgctgaagctgctgaagatggctgtgggcatgcgggcgctgctggacacggtgatgcaggccctgccccagctctgggcgtggagctctttggagacctggagtgtgacgagacacacccctgtgagggcctgggccgtcatgccacctttcggaactttggcatggccttcctaaccctcttccgagtctccacaggtgacaattggaatggcattatgaaggacaccctccgggactgtgaccaggagtccacctgctacaacacggtcatctcgcctatctactttgtgtccttcgtgctgacggcccagttcgtgctagtcaacgtggtgatcgccgtgctgatgaagcacctggaggagagcaacaaggaggccaaggaggaggccgagctagaggctgagctggagctggagatgaagaccctcagcccccagccccactcgccactgggcagccccttcctctggcctggggtcgagggccccgacagccccgacagccccaagcctggggctctgcacccagcggcccacgcgagatcagcctcccacttttccctggagcaccccacgatgcagccccaccccacggagctgccaggaccagacttactgactgtgcggaagtctggggtcagccgaacgcactctctgcccaatgacagctacatgtgtcggcatgggagcactgccgaggggcccctgggacacaggggctgggggctccccaaagctcagtcaggctccgtcttgtccgttcactcccagccagcagataccagctacatcctgcagcttcccaaagatgcacctcatctgctccagccccacagcgccccaacctggggcaccatccccaaactgcccccaccaggacgctcccctttggctcagaggccactcaggcgccaggcagcaataaggactgactccttggacgttcagggtctgggcagccgggaagacctgctggcagaggtgagtgggccctccccgcccctggcccgggcctactctttctggggccagtcaagtacccaggcacagcagcactcccgcagccacagcaagatctccaagcacatgaccccgccagccccttgcccaggcccagaacccaactggggcaagggccctccagagaccagaagcagcttagagttggacacggagctgagctggatttcaggagacctcctgccccctggcggccaggaggagcccccatccccacgggacctgaagaagtgctacagcgtggaggcccagagctgccagcgccggcctacgtcctggctggatgagcagaggagacactctatcgccgtcagctgcctggacagcggctcccaaccccacctgggcacagacccctctaaccttgggggccagcctcttggggggcctgggagccggcccaagaaaaaactcagcccgcctagtatcaccatagacccccccgagagccaaggtcctcggaccccgcccagccctggtatctgcctccggaggagggctccgtccagcgactccaaggatcccttggcctctggcccccctgacagcatggctgcctcgccctccccaaagaaagatgtgctgagtctctccggtttatcctctgacccagcagacctggacccctgagtcctgccccacttt

SEQ ID NO: 2760 - DNA, 6912 bp, Homo sapiens
  source 1..6912: mol_type = unassigned DNA; mol_type = unassigned DNA
atggacgaggaggaggatggagcgggcgccgaggagtcgggacagccccggagcttcatgcggctcaacgacctgtcgggggccgggggccggccggggccggggtcagcagaaaaggacccgggcagcgcggactccgaggcggaggggctgccgtacccggcgctggccccggtggttttcttctacttgagccaggacagccgcccgcggagctggtgtctccgcacggtctgtaacccctggtttgagcgcatcagcatgttggtcatccttctcaactgcgtgaccctgggcatgttccggccatgcgaggacatcgcctgtgactcccagcgctgccggatcctgcaggcctttgatgacttcatctttgccttctttgccgtggagatggtggtgaagatggtggccttgggcatctttgggaaaaagtgttacctgggagacacttggaaccggcttgactttttcatcgtcatcgcagggatgctggagtactcgctggacctgcagaacgtcagcttctcagctgtcaggacagtccgtgtgctgcgaccgctcagggccattaaccgggtgcccagcatgcgcatccttgtcacgttgctgctggatacgctgcccatgctgggcaacgtcctgctgctctgcttcttcgtcttcttcatcttcggcatcgtcggcgtccagctgtgggcagggctgcttcggaaccgatgcttcctacctgagaatttcagcctccccctgagcgtggacctggagcgctattaccagacagagaacgaggatgagagccccttcatctgctcccagccacgcgagaacggcatgcggtcctgcagaagcgtgcccacgctgcgcggggacgggggcggtggcccaccttgcggtctggactatgaggcctacaacagctccagcaacaccacctgtgtcaactggaaccagtactacaccaactgctcagcgggggagcacaaccccttcaagggcgccatcaactttgacaacattggctatgcctggatcgccatcttccaggtcatcacgctggagggctgggtcgacatcatgtactttgtgatggatgctcattccttctacaatttcatctacttcatcctcctcatcatcgtgggctccttcttcatgatcaacctgtgcctggtggtgattgccacgcagttctcagagaccaagcagcgggaaagccagctgatgcgggagcagcgtgtgcggttcctgtccaacgccagcaccctggctagcttctctgagcccggcagctgctatgaggagctgctcaagtacctggtgtacatccttcgtaaggcagcccgcaggctggctcaggtctctcgggcagcaggtgtgcgggttgggctgctcagcagcccagcacccctcgggggccaggagacccagcccagcagcagctgctctcgctcccaccgccgcctatccgtccaccacctggtgcaccaccaccaccaccatcaccaccactaccacctgggcaatgggacgctcagggccccccgggccagcccggagatccaggacagggatgccaatgggtcccgccggctcatgctgccaccaccctcgacgcctgccctctccggggccccccctggtggcgcagagtctgtgcacagcttctaccatgccgactgccacttagagccagtccgctgccaggcgccccctcccaggtccccatctgaggcatccggcaggactgtgggcagcgggaaggtgtatcccaccgtgcacaccagccctccaccggagacgctgaaggagaaggcactagtagaggtggctgccagctctgggcccccaaccctcaccagcctcaacatcccacccgggccctacagctccatgcacaagctgctggagacacagagtacaggtgcctgccaaagctcttgcaagatctccagcccttgcttgaaagcagacagtggagcctgtggtccagacagctgcccctactgtgcccgggccggggcaggggaggtggagctcgccgaccgtgaaatgcctgactcagacagcgaggcagtttatgagttcacacaggatgcccagcacagcgacctccgggacccccacagccggcggcaacggagcctgggcccagatgcagagcccagctctgtgctggccttctggaggctaatctgtgacaccttccgaaagattgtggacagcaagtactttggccggggaatcatgatcgccatcctggtcaacacactcagcatgggcatcgaataccacgagcagcccgaggagcttaccaacgccctagaaatcagcaacatcgtcttcaccagcctctttgccctggagatgctgctgaagctgcttgtgtatggtccctttggctacatcaagaatccctacaacatcttcgatggtgtcattgtggtcatcagcgtgtgggagatcgtgggccagcaggggggcggcctgtcggtgctgcggaccttccgcctgatgcgtgtgctgaagctggtgcgcttcctgccggcgctgcagcggcagctggtggtgctcatgaagaccatggacaacgtggccaccttctgcatgctgcttatgctcttcatcttcatcttcagcatcctgggcatgcatctcttcggctgcaagtttgcctctgagcgggatggggacaccctgccagaccggaagaattttgactccttgctctgggccatcgtcactgtctttcagatcctgacccaggaggactggaacaaagtcctctacaatggtatggcctccacgtcgtcctgggcggccctttatttcattgccctcatgaccttcggcaactacgtgctcttcaatttgctggtcgccattctggtggagggcttccaggcggagggagatgccaacaagtccgaatcagagcccgatttcttctcacccagcctggatggtgatggggacaggaagaagtgcttggccttggtgtccctgggagagcacccggagctgcggaagagcctgctgccgcctctcatcatccacacggccgccacacccatgtcgctgcccaagagcaccagcacgggcctgggcgaggcgctgggccctgcgtcgcgccgcaccagcagcagcgggtcggcagagcctggggcggcccacgagatgaagtcaccgcccagcgcccgcagctctccgcacagcccctggagcgctgcaagcagctggaccagcaggcgctccagccggaacagcctcggccgtgcacccagcctgaagcggagaagcccaagtggagagcggcggtccctgttgtcgggagaaggccaggagagccaggatgaagaggagagctcagaagaggagcgggccagccctgcgggcagtgaccatcgccacagggggtccctggagcgggaggccaagagttcctttgacctgccagacacactgcaggtgccagggctgcatcgcactgccagtggccgagggtctgcttctgagcaccaggactgcaatggcaagtcggcttcagggcgcctggcccgggccctgcggcctgatgaccccccactggatggggatgacgccgatgacgagggcaacctgagcaaaggggaacgggtccgcgcgtggatccgagcccgactccctgcctgctgcctcgagcgagactcctggtcagcctacatcttccctcctcagtccaggttccgcctcctgtgtcaccggatcatcacccacaagatgttcgaccacgtggtccttgtcatcatcttccttaactgcatcaccatcgccatggagcgccccaaaattgacccccacagcgctgaacgcatcttcctgaccctctccaattacatcttcaccgcagtctttctggctgaaatgacagtgaaggtggtggcactgggctggtgcttcggggagcaggcgtacctgcggagcagttggaacgtgctggacgggctgttggtgctcatctccgtcatcgacattctggtgtccatggtctctgacagcggcaccaagatcctgggcatgctgagggtgctgcggctgctgcggaccctgcgcccgctcagggtgatcagccgggcgcaggggctgaagctggtggtggagacgctgatgtcctcactgaaacccatcggcaacattgtagtcatctgctgtgccttcttcatcattttcggcatcttgggggtgcagctcttcaaagggaagtttttcgtgtgccagggcgaggataccaggaacatcaccaataaatcggactgtgccgaggccagttaccggtgggtccggcacaagtacaactttgacaaccttggccaggccctgatgtccctgttcgttttggcctccaaggatggttgggtggacatcatgtacgatgggctggatgctgtgggcgtggaccagcagcccatcatgaaccacaacccctggatgctgctgtacttcatctcgttcctgctcattgtggccttctttgtcctgaacatgtttgtgggtgtggtggtggagaacttccacaagtgtcggcagcaccaggaggaagaggaggcccggcggcgggaggagaagcgcctacgaagactggagaaaaagagaaggagtaaggagaagcagatggctgaagcccagtgcaaaccttactactccgactactcccgcttccggctcctcgtccaccacttgtgcaccagccactacctggacctcttcatcacaggtgtcatcgggctgaacgtggtcaccatggccatggagcactaccagcagccccagattctggatgaggctctgaagatctgcaactacatcttcactgtcatctttgtcttggagtcagttttcaaacttgtggcctttggtttccgtcggttcttccaggacaggtggaaccagctggacctggccattgtgctgctgtccatcatgggcatcacgctggaggaaatcgaggtcaacgcctcgctgcccatcaaccccaccatcatccgcatcatgagggtgctgcgcattgcccgagtgctgaagctgctgaagatggctgtgggcatgcgggcgctgctggacacggtgatgcaggccctgccccaggtggggaacctgggacttctcttcatgttgttgtttttcatctttgcagctctgggcgtggagctctttggagacctggagtgtgacgagacacacccctgtgagggcctgggccgtcatgccacctttcggaactttggcatggccttcctaaccctcttccgagtctccacaggtgacaattggaatggcattatgaaggacaccctccgggactgtgaccaggagtccacctgctacaacacggtcatctcgcctatctactttgtgtccttcgtgctgacggcccagttcgtgctagtcaacgtggtgatcgccgtgctgatgaagcacctggaggagagcaacaaggaggccaaggaggaggccgagctagaggctgagctggagctggagatgaagaccctcagcccccagccccactcgccactgggcagccccttcctctggcctggggtcgagggccccgacagccccgacagccccaagcctggggctctgcacccagcggcccacgcgagatcagcctcccacttttccctggagcaccccacggacaggcagctgtttgacaccatatccctgctgatccagggctccctggagtgggagctgaagctgatggacgagctggcaggcccagggggccagccctctgccttcccttctgcccccagcctgggaggctccgacccacagatgcagccccaccccacggagctgccaggaccagacttactgactgtgcggaagtctggggtcagccgaacgcactctctgcccaatgacagctacatgtgtcggcatgggagcactgccgaggggcccctgggacacaggggctgggggctccccaaagctcagtcaggctccgtcttgtccgttcactcccagccagcagataccagctacatcctgcagcttcccaaagatgcacctcatctgctccagccccacagcgccccaacctggggcaccatccccaaactgcccccaccaggacgctcccctttggctcagaggccactcaggcgccaggcagcaataaggactgactccttggacgttcagggtctgggcagccgggaagacctgctggcagaggtgagtgggccctccccgcccctggcccgggcctactctttctggggccagtcaagtacccaggcacagcagcactcccgcagccacagcaagatctccaagcacatgaccccgccagccccttgcccaggcccagaacccaactggggcaagggccctccagagaccagaagcagcttagagttggacacggagctgagctggatttcaggagacctcctgccccctggcggccaggaggagcccccatccccacgggacctgaagaagtgctacagcgtggaggcccagagctgccagcgccggcctacgtcctggctggatgagcagaggagacactctatcgccgtcagctgcctggacagcggctcccaaccccacctgggcacagacccctctaaccttgggggccagcctcttggggggcctgggagccggcccaagaaaaaactcagcccgcctagtatcaccatagacccccccgagagccaaggtcctcggaccccgcccagccctggtatctgcctccggaggagggctccgtccagcgactccaaggatcccttggcctctggcccccctgacagcatggctgcctcgccctccccaaagaaagatgtgctgagtctctccggtttatcctctgacccagcagacctggacccctgagtcctgccccacttt

SEQ ID NO: 2761 - DNA, 6870 bp, Homo sapiens
  source 1..6870: mol_type = unassigned DNA; mol_type = unassigned DNA
atggacgaggaggaggatggagcgggcgccgaggagtcgggacagccccggagcttcatgcggctcaacgacctgtcgggggccgggggccggccggggccggggtcagcagaaaaggacccgggcagcgcggactccgaggcggaggggctgccgtacccggcgctggccccggtggttttcttctacttgagccaggacagccgcccgcggagctggtgtctccgcacggtctgtaacccctggtttgagcgcatcagcatgttggtcatccttctcaactgcgtgaccctgggcatgttccggccatgcgaggacatcgcctgtgactcccagcgctgccggatcctgcaggcctttgatgacttcatctttgccttctttgccgtggagatggtggtgaagatggtggccttgggcatctttgggaaaaagtgttacctgggagacacttggaaccggcttgactttttcatcgtcatcgcagggatgctggagtactcgctggacctgcagaacgtcagcttctcagctgtcaggacagtccgtgtgctgcgaccgctcagggccattaaccgggtgcccagcatgcgcatccttgtcacgttgctgctggatacgctgcccatgctgggcaacgtcctgctgctctgcttcttcgtcttcttcatcttcggcatcgtcggcgtccagctgtgggcagggctgcttcggaaccgatgcttcctacctgagaatttcagcctccccctgagcgtggacctggagcgctattaccagacagagaacgaggatgagagccccttcatctgctcccagccacgcgagaacggcatgcggtcctgcagaagcgtgcccacgctgcgcggggacgggggcggtggcccaccttgcggtctggactatgaggcctacaacagctccagcaacaccacctgtgtcaactggaaccagtactacaccaactgctcagcgggggagcacaaccccttcaagggcgccatcaactttgacaacattggctatgcctggatcgccatcttccaggtcatcacgctggagggctgggtcgacatcatgtactttgtgatggatgctcattccttctacaatttcatctacttcatcctcctcatcatcgtgggctccttcttcatgatcaacctgtgcctggtggtgattgccacgcagttctcagagaccaagcagcgggaaagccagctgatgcgggagcagcgtgtgcggttcctgtccaacgccagcaccctggctagcttctctgagcccggcagctgctatgaggagctgctcaagtacctggtgtacatccttcgtaaggcagcccgcaggctggctcaggtctctcgggcagcaggtgtgcgggttgggctgctcagcagcccagcacccctcgggggccaggagacccagcccagcagcagctgctctcgctcccaccgccgcctatccgtccaccacctggtgcaccaccaccaccaccatcaccaccactaccacctgggcaatgggacgctcagggccccccgggccagcccggagatccaggacagggatgccaatgggtcccgccggctcatgctgccaccaccctcgacgcctgccctctccggggccccccctggtggcgcagagtctgtgcacagcttctaccatgccgactgccacttagagccagtccgctgccaggcgccccctcccaggtccccatctgaggcatccggcaggactgtgggcagcgggaaggtgtatcccaccgtgcacaccagccctccaccggagacgctgaaggagaaggcactagtagaggtggctgccagctctgggcccccaaccctcaccagcctcaacatcccacccgggccctacagctccatgcacaagctgctggagacacagagtacaggtgcctgccaaagctcttgcaagatctccagcccttgcttgaaagcagacagtggagcctgtggtccagacagctgcccctactgtgcccgggccggggcaggggaggtggagctcgccgaccgtgaaatgcctgactcagacagcgaggcagtttatgagttcacacaggatgcccagcacagcgacctccgggacccccacagccggcggcaacggagcctgggcccagatgcagagcccagctctgtgctggccttctggaggctaatctgtgacaccttccgaaagattgtggacagcaagtactttggccggggaatcatgatcgccatcctggtcaacacactcagcatgggcatcgaataccacgagcagcccgaggagcttaccaacgccctagaaatcagcaacatcgtcttcaccagcctctttgccctggagatgctgctgaagctgcttgtgtatggtccctttggctacatcaagaatccctacaacatcttcgatggtgtcattgtggtcatcagcgtgtgggagatcgtgggccagcaggggggcggcctgtcggtgctgcggaccttccgcctgatgcgtgtgctgaagctggtgcgcttcctgccggcgctgcagcggcagctggtggtgctcatgaagaccatggacaacgtggccaccttctgcatgctgcttatgctcttcatcttcatcttcagcatcctgggcatgcatctcttcggctgcaagtttgcctctgagcgggatggggacaccctgccagaccggaagaattttgactccttgctctgggccatcgtcactgtctttcagatcctgacccaggaggactggaacaaagtcctctacaatggtatggcctccacgtcgtcctgggcggccctttatttcattgccctcatgaccttcggcaactacgtgctcttcaatttgctggtcgccattctggtggagggcttccaggcggaggaaatcagcaaacgggaagatgcgagtggacagttaagctgtattcagctgcctgtcgactcccaggggggagatgccaacaagtccgaatcagagcccgatttcttctcacccagcctggatggtgatggggacaggaagaagtgcttggccttggtgtccctgggagagcacccggagctgcggaagagcctgctgccgcctctcatcatccacacggccgccacacccatgtcgctgcccaagagcaccagcacgggcctgggcgaggcgctgggccctgcgtcgcgccgcaccagcagcagcgggtcggcagagcctggggcggcccacgagatgaagtcaccgcccagcgcccgcagctctccgcacagcccctggagcgctgcaagcagctggaccagcaggcgctccagccggaacagcctcggccgtgcacccagcctgaagcggagaagcccaagtggagagcggcggtccctgttgtcgggagaaggccaggagagccaggatgaagaggagagctcagaagaggagcgggccagccctgcgggcagtgaccatcgccacagggggtccctggagcgggaggccaagagttcctttgacctgccagacacactgcaggtgccagggctgcatcgcactgccagtggccgagggtctgcttctgagcaccaggactgcaatggcaagtcggcttcagggcgcctggcccgggccctgcggcctgatgaccccccactggatggggatgacgccgatgacgagggcaacctgagcaaaggggaacgggtccgcgcgtggatccgagcccgactccctgcctgctgcctcgagcgagactcctggtcagcctacatcttccctcctcagtccaggttccgcctcctgtgtcaccggatcatcacccacaagatgttcgaccacgtggtccttgtcatcatcttccttaactgcatcaccatcgccatggagcgccccaaaattgacccccacagcgctgaacgcatcttcctgaccctctccaattacatcttcaccgcagtctttctggctgaaatgacagtgaaggtggtggcactgggctggtgcttcggggagcaggcgtacctgcggagcagttggaacgtgctggacgggctgttggtgctcatctccgtcatcgacattctggtgtccatggtctctgacagcggcaccaagatcctgggcatgctgagggtgctgcggctgctgcggaccctgcgcccgctcagggtgatcagccgggcgcaggggctgaagctggtggtggagacgctgatgtcctcactgaaacccatcggcaacattgtagtcatctgctgtgccttcttcatcattttcggcatcttgggggtgcagctcttcaaagggaagtttttcgtgtgccagggcgaggataccaggaacatcaccaataaatcggactgtgccgaggccagttaccggtgggtccggcacaagtacaactttgacaaccttggccaggccctgatgtccctgttcgttttggcctccaaggatggttgggtggacatcatgtacgatgggctggatgctgtgggcgtggaccagcagcccatcatgaaccacaacccctggatgctgctgtacttcatctcgttcctgctcattgtggccttctttgtcctgaacatgtttgtgggtgtggtggtggagaacttccacaagtgtcggcagcaccaggaggaagaggaggcccggcggcgggaggagaagcgcctacgaagactggagaaaaagagaaggaatctaatgctggacgatgtaattgcttccggcagctcagccagcgctgcgtcagaagcccagtgcaaaccttactactccgactactcccgcttccggctcctcgtccaccacttgtgcaccagccactacctggacctcttcatcacaggtgtcatcgggctgaacgtggtcaccatggccatggagcactaccagcagccccagattctggatgaggctctgaagatctgcaactacatcttcactgtcatctttgtcttggagtcagttttcaaacttgtggcctttggtttccgtcggttcttccaggacaggtggaaccagctggacctggccattgtgctgctgtccatcatgggcatcacgctggaggaaatcgaggtcaacgcctcgctgcccatcaaccccaccatcatccgcatcatgagggtgctgcgcattgcccgagtgctgaagctgctgaagatggctgtgggcatgcgggcgctgctggacacggtgatgcaggccctgccccaggtggggaacctgggacttctcttcatgttgttgtttttcatctttgcagctctgggcgtggagctctttggagacctggagtgtgacgagacacacccctgtgagggcctgggccgtcatgccacctttcggaactttggcatggccttcctaaccctcttccgagtctccacaggtgacaattggaatggcattatgaaggacaccctccgggactgtgaccaggagtccacctgctacaacacggtcatctcgcctatctactttgtgtccttcgtgctgacggcccagttcgtgctagtcaacgtggtgatcgccgtgctgatgaagcacctggaggagagcaacaaggaggccaaggaggaggccgagctagaggctgagctggagctggagatgaagaccctcagcccccagccccactcgccactgggcagccccttcctctggcctggggtcgagggccccgacagccccgacagccccaagcctggggctctgcacccagcggcccacgcgagatcagcctcccacttttccctggagcaccccacgatgcagccccaccccacggagctgccaggaccagacttactgactgtgcggaagtctggggtcagccgaacgcactctctgcccaatgacagctacatgtgtcggcatgggagcactgccgaggggcccctgggacacaggggctgggggctccccaaagctcagtcaggctccgtcttgtccgttcactcccagccagcagataccagctacatcctgcagcttcccaaagatgcacctcatctgctccagccccacagcgccccaacctggggcaccatccccaaactgcccccaccaggacgctcccctttggctcagaggccactcaggcgccaggcagcaataaggactgactccttggacgttcagggtctgggcagccgggaagacctgctggcagaggtgagtgggccctccccgcccctggcccgggcctactctttctggggccagtcaagtacccaggcacagcagcactcccgcagccacagcaagatctccaagcacatgaccccgccagccccttgcccaggcccagaacccaactggggcaagggccctccagagaccagaagcagcttagagttggacacggagctgagctggatttcaggagacctcctgccccctggcggccaggaggagcccccatccccacgggacctgaagaagtgctacagcgtggaggcccagagctgccagcgccggcctacgtcctggctggatgagcagaggagacactctatcgccgtcagctgcctggacagcggctcccaaccccacctgggcacagacccctctaaccttgggggccagcctcttggggggcctgggagccggcccaagaaaaaactcagcccgcctagtatcaccatagacccccccgagagccaaggtcctcggaccccgcccagccctggtatctgcctccggaggagggctccgtccagcgactccaaggatcccttggcctctggcccccctgacagcatggctgcctcgccctccccaaagaaagatgtgctgagtctctccggtttatcctctgacccagcagacctggacccctgagtcctgccccacttt

SEQ ID NO: 2762 - DNA, 6795 bp, Homo sapiens
  source 1..6795: mol_type = unassigned DNA; mol_type = unassigned DNA
atggacgaggaggaggatggagcgggcgccgaggagtcgggacagccccggagcttcatgcggctcaacgacctgtcgggggccgggggccggccggggccggggtcagcagaaaaggacccgggcagcgcggactccgaggcggaggggctgccgtacccggcgctggccccggtggttttcttctacttgagccaggacagccgcccgcggagctggtgtctccgcacggtctgtaacccctggtttgagcgcatcagcatgttggtcatccttctcaactgcgtgaccctgggcatgttccggccatgcgaggacatcgcctgtgactcccagcgctgccggatcctgcaggcctttgatgacttcatctttgccttctttgccgtggagatggtggtgaagatggtggccttgggcatctttgggaaaaagtgttacctgggagacacttggaaccggcttgactttttcatcgtcatcgcagggatgctggagtactcgctggacctgcagaacgtcagcttctcagctgtcaggacagtccgtgtgctgcgaccgctcagggccattaaccgggtgcccagcatgcgcatccttgtcacgttgctgctggatacgctgcccatgctgggcaacgtcctgctgctctgcttcttcgtcttcttcatcttcggcatcgtcggcgtccagctgtgggcagggctgcttcggaaccgatgcttcctacctgagaatttcagcctccccctgagcgtggacctggagcgctattaccagacagagaacgaggatgagagccccttcatctgctcccagccacgcgagaacggcatgcggtcctgcagaagcgtgcccacgctgcgcggggacgggggcggtggcccaccttgcggtctggactatgaggcctacaacagctccagcaacaccacctgtgtcaactggaaccagtactacaccaactgctcagcgggggagcacaaccccttcaagggcgccatcaactttgacaacattggctatgcctggatcgccatcttccaggtcatcacgctggagggctgggtcgacatcatgtactttgtgatggatgctcattccttctacaatttcatctacttcatcctcctcatcatcgtgggctccttcttcatgatcaacctgtgcctggtggtgattgccacgcagttctcagagaccaagcagcgggaaagccagctgatgcgggagcagcgtgtgcggttcctgtccaacgccagcaccctggctagcttctctgagcccggcagctgctatgaggagctgctcaagtacctggtgtacatccttcgtaaggcagcccgcaggctggctcaggtctctcgggcagcaggtgtgcgggttgggctgctcagcagcccagcacccctcgggggccaggagacccagcccagcagcagctgctctcgctcccaccgccgcctatccgtccaccacctggtgcaccaccaccaccaccatcaccaccactaccacctgggcaatgggacgctcagggccccccgggccagcccggagatccaggacagggatgccaatgggtcccgccggctcatgctgccaccaccctcgacgcctgccctctccggggccccccctggtggcgcagagtctgtgcacagcttctaccatgccgactgccacttagagccagtccgctgccaggcgccccctcccaggtccccatctgaggcatccggcaggactgtgggcagcgggaaggtgtatcccaccgtgcacaccagccctccaccggagacgctgaaggagaaggcactagtagaggtggctgccagctctgggcccccaaccctcaccagcctcaacatcccacccgggccctacagctccatgcacaagctgctggagacacagagtacaggtgcctgccaaagctcttgcaagatctccagcccttgcttgaaagcagacagtggagcctgtggtccagacagctgcccctactgtgcccgggccggggcaggggaggtggagctcgccgaccgtgaaatgcctgactcagacagcgaggcagtttatgagttcacacaggatgcccagcacagcgacctccgggacccccacagccggcggcaacggagcctgggcccagatgcagagcccagctctgtgctggccttctggaggctaatctgtgacaccttccgaaagattgtggacagcaagtactttggccggggaatcatgatcgccatcctggtcaacacactcagcatgggcatcgaataccacgagcagcccgaggagcttaccaacgccctagaaatcagcaacatcgtcttcaccagcctctttgccctggagatgctgctgaagctgcttgtgtatggtccctttggctacatcaagaatccctacaacatcttcgatggtgtcattgtggtcatcagcgtgtgggagatcgtgggccagcaggggggcggcctgtcggtgctgcggaccttccgcctgatgcgtgtgctgaagctggtgcgcttcctgccggcgctgcagcggcagctggtggtgctcatgaagaccatggacaacgtggccaccttctgcatgctgcttatgctcttcatcttcatcttcagcatcctgggcatgcatctcttcggctgcaagtttgcctctgagcgggatggggacaccctgccagaccggaagaattttgactccttgctctgggccatcgtcactgtctttcagatcctgacccaggaggactggaacaaagtcctctacaatggtatggcctccacgtcgtcctgggcggccctttatttcattgccctcatgaccttcggcaactacgtgctcttcaatttgctggtcgccattctggtggagggcttccaggcggaggaaatcagcaaacgggaagatgcgagtggacagttaagctgtattcagctgcctgtcgactcccaggggggagatgccaacaagtccgaatcagagcccgatttcttctcacccagcctggatggtgatggggacaggaagaagtgcttggccttggtgtccctgggagagcacccggagctgcggaagagcctgctgccgcctctcatcatccacacggccgccacacccatgtcgctgcccaagagcaccagcacgggcctgggcgaggcgctgggccctgcgtcgcgccgcaccagcagcagcgggtcggcagagcctggggcggcccacgagatgaagtcaccgcccagcgcccgcagctctccgcacagcccctggagcgctgcaagcagctggaccagcaggcgctccagccggaacagcctcggccgtgcacccagcctgaagcggagaagcccaagtggagagcggcggtccctgttgtcgggagaaggccaggagagccaggatgaagaggagagctcagaagaggagcgggccagccctgcgggcagtgaccatcgccacagggggtccctggagcgggaggccaagagttcctttgacctgccagacacactgcaggtgccagggctgcatcgcactgccagtggccgagggtctgcttctgagcaccaggactgcaatggcaagtcggcttcagggcgcctggcccgggccctgcggcctgatgaccccccactggatggggatgacgccgatgacgagggcaacctgagcaaaggggaacgggtccgcgcgtggatccgagcccgactccctgcctgctgcctcgagcgagactcctggtcagcctacatcttccctcctcagtccaggttccgcctcctgtgtcaccggatcatcacccacaagatgttcgaccacgtggtccttgtcatcatcttccttaactgcatcaccatcgccatggagcgccccaaaattgacccccacagcgctgaacgcatcttcctgaccctctccaattacatcttcaccgcagtctttctggctgaaatgacagtgaaggtggtggcactgggctggtgcttcggggagcaggcgtacctgcggagcagttggaacgtgctggacgggctgttggtgctcatctccgtcatcgacattctggtgtccatggtctctgacagcggcaccaagatcctgggcatgctgagggtgctgcggctgctgcggaccctgcgcccgctcagggtgatcagccgggcgcaggggctgaagctggtggtggagacgctgatgtcctcactgaaacccatcggcaacattgtagtcatctgctgtgccttcttcatcattttcggcatcttgggggtgcagctcttcaaagggaagtttttcgtgtgccagggcgaggataccaggaacatcaccaataaatcggactgtgccgaggccagttaccggtgggtccggcacaagtacaactttgacaaccttggccaggccctgatgtccctgttcgttttggcctccaaggatggttgggtggacatcatgtacgatgggctggatgctgtgggcgtggaccagcagcccatcatgaaccacaacccctggatgctgctgtacttcatctcgttcctgctcattgtggccttctttgtcctgaacatgtttgtgggtgtggtggtggagaacttccacaagtgtcggcagcaccaggaggaagaggaggcccggcggcgggaggagaagcgcctacgaagactggagaaaaagagaaggaaagcccagtgcaaaccttactactccgactactcccgcttccggctcctcgtccaccacttgtgcaccagccactacctggacctcttcatcacaggtgtcatcgggctgaacgtggtcaccatggccatggagcactaccagcagccccagattctggatgaggctctgaagatctgcaactacatcttcactgtcatctttgtcttggagtcagttttcaaacttgtggcctttggtttccgtcggttcttccaggacaggtggaaccagctggacctggccattgtgctgctgtccatcatgggcatcacgctggaggaaatcgaggtcaacgcctcgctgcccatcaaccccaccatcatccgcatcatgagggtgctgcgcattgcccgagtgctgaagctgctgaagatggctgtgggcatgcgggcgctgctggacacggtggggaacctgggacttctcttcatgttgttgtttttcatctttgcagctctgggcgtggagctctttggagacctggagtgtgacgagacacacccctgtgagggcctgggccgtcatgccacctttcggaactttggcatggccttcctaaccctcttccgagtctccacaggtgacaattggaatggcattatgaaggacaccctccgggactgtgaccaggagtccacctgctacaacacggtcatctcgcctatctactttgtgtccttcgtgctgacggcccagttcgtgctagtcaacgtggtgatcgccgtgctgatgaagcacctggaggagagcaacaaggaggccaaggaggaggccgagctagaggctgagctggagctggagatgaagaccctcagcccccagccccactcgccactgggcagccccttcctctggcctggggtcgagggccccgacagccccgacagccccaagcctggggctctgcacccagcggcccacgcgagatcagcctcccacttttccctggagcaccccacgatgcagccccaccccacggagctgccaggaccagacttactgactgtgcggaagtctggggtcagccgaacgcactctctgcccaatgacagctacatgtgtcggcatgggagcactgccgaggggcccctgggacacaggggctgggggctccccaaagctcagtcaggctccgtcttgtccgttcactcccagccagcagataccagctacatcctgcagcttcccaaagatgcacctcatctgctccagccccacagcgccccaacctggggcaccatccccaaactgcccccaccaggacgctcccctttggctcagaggccactcaggcgccaggcagcaataaggactgactccttggacgttcagggtctgggcagccgggaagacctgctggcagaggtgagtgggccctccccgcccctggcccgggcctactctttctggggccagtcaagtacccaggcacagcagcactcccgcagccacagcaagatctccaagcacatgaccccgccagccccttgcccaggcccagaacccaactggggcaagggccctccagagaccagaagcagcttagagttggacacggagctgagctggatttcaggagacctcctgccccctggcggccaggaggagcccccatccccacgggacctgaagaagtgctacagcgtggaggcccagagctgccagcgccggcctacgtcctggctggatgagcagaggagacactctatcgccgtcagctgcctggacagcggctcccaaccccacctgggcacagacccctctaaccttgggggccagcctcttggggggcctgggagccggcccaagaaaaaactcagcccgcctagtatcaccatagacccccccgagagccaaggtcctcggaccccgcccagccctggtatctgcctccggaggagggctccgtccagcgactccaaggatcccttggcctctggcccccctgacagcatggctgcctcgccctccccaaagaaagatgtgctgagtctctccggtttatcctctgacccagcagacctggacccctgagtcctgccccacttt

SEQ ID NO: 2763 - DNA, 6981 bp, Homo sapiens
  source 1..6981: mol_type = unassigned DNA; mol_type = unassigned DNA
atggacgaggaggaggatggagcgggcgccgaggagtcgggacagccccggagcttcatgcggctcaacgacctgtcgggggccgggggccggccggggccggggtcagcagaaaaggacccgggcagcgcggactccgaggcggaggggctgccgtacccggcgctggccccggtggttttcttctacttgagccaggacagccgcccgcggagctggtgtctccgcacggtctgtaacccctggtttgagcgcatcagcatgttggtcatccttctcaactgcgtgaccctgggcatgttccggccatgcgaggacatcgcctgtgactcccagcgctgccggatcctgcaggcctttgatgacttcatctttgccttctttgccgtggagatggtggtgaagatggtggccttgggcatctttgggaaaaagtgttacctgggagacacttggaaccggcttgactttttcatcgtcatcgcagggatgctggagtactcgctggacctgcagaacgtcagcttctcagctgtcaggacagtccgtgtgctgcgaccgctcagggccattaaccgggtgcccagcatgcgcatccttgtcacgttgctgctggatacgctgcccatgctgggcaacgtcctgctgctctgcttcttcgtcttcttcatcttcggcatcgtcggcgtccagctgtgggcagggctgcttcggaaccgatgcttcctacctgagaatttcagcctccccctgagcgtggacctggagcgctattaccagacagagaacgaggatgagagccccttcatctgctcccagccacgcgagaacggcatgcggtcctgcagaagcgtgcccacgctgcgcggggacgggggcggtggcccaccttgcggtctggactatgaggcctacaacagctccagcaacaccacctgtgtcaactggaaccagtactacaccaactgctcagcgggggagcacaaccccttcaagggcgccatcaactttgacaacattggctatgcctggatcgccatcttccaggtcatcacgctggagggctgggtcgacatcatgtactttgtgatggatgctcattccttctacaatttcatctacttcatcctcctcatcatcgtgggctccttcttcatgatcaacctgtgcctggtggtgattgccacgcagttctcagagaccaagcagcgggaaagccagctgatgcgggagcagcgtgtgcggttcctgtccaacgccagcaccctggctagcttctctgagcccggcagctgctatgaggagctgctcaagtacctggtgtacatccttcgtaaggcagcccgcaggctggctcaggtctctcgggcagcaggtgtgcgggttgggctgctcagcagcccagcacccctcgggggccaggagacccagcccagcagcagctgctctcgctcccaccgccgcctatccgtccaccacctggtgcaccaccaccaccaccatcaccaccactaccacctgggcaatgggacgctcagggccccccgggccagcccggagatccaggacagggatgccaatgggtcccgccggctcatgctgccaccaccctcgacgcctgccctctccggggccccccctggtggcgcagagtctgtgcacagcttctaccatgccgactgccacttagagccagtccgctgccaggcgccccctcccaggtccccatctgaggcatccggcaggactgtgggcagcgggaaggtgtatcccaccgtgcacaccagccctccaccggagacgctgaaggagaaggcactagtagaggtggctgccagctctgggcccccaaccctcaccagcctcaacatcccacccgggccctacagctccatgcacaagctgctggagacacagagtacaggtgcctgccaaagctcttgcaagatctccagcccttgcttgaaagcagacagtggagcctgtggtccagacagctgcccctactgtgcccgggccggggcaggggaggtggagctcgccgaccgtgaaatgcctgactcagacagcgaggcagtttatgagttcacacaggatgcccagcacagcgacctccgggacccccacagccggcggcaacggagcctgggcccagatgcagagcccagctctgtgctggccttctggaggctaatctgtgacaccttccgaaagattgtggacagcaagtactttggccggggaatcatgatcgccatcctggtcaacacactcagcatgggcatcgaataccacgagcagcccgaggagcttaccaacgccctagaaatcagcaacatcgtcttcaccagcctctttgccctggagatgctgctgaagctgcttgtgtatggtccctttggctacatcaagaatccctacaacatcttcgatggtgtcattgtggtcatcagcgtgtgggagatcgtgggccagcaggggggcggcctgtcggtgctgcggaccttccgcctgatgcgtgtgctgaagctggtgcgcttcctgccggcgctgcagcggcagctggtggtgctcatgaagaccatggacaacgtggccaccttctgcatgctgcttatgctcttcatcttcatcttcagcatcctgggcatgcatctcttcggctgcaagtttgcctctgagcgggatggggacaccctgccagaccggaagaattttgactccttgctctgggccatcgtcactgtctttcagatcctgacccaggaggactggaacaaagtcctctacaatggtatggcctccacgtcgtcctgggcggccctttatttcattgccctcatgaccttcggcaactacgtgctcttcaatttgctggtcgccattctggtggagggcttccaggcggaggaaatcagcaaacgggaagatgcgagtggacagttaagctgtattcagctgcctgtcgactcccaggggggagatgccaacaagtccgaatcagagcccgatttcttctcacccagcctggatggtgatggggacaggaagaagtgcttggccttggtgtccctgggagagcacccggagctgcggaagagcctgctgccgcctctcatcatccacacggccgccacacccatgtcgctgcccaagagcaccagcacgggcctgggcgaggcgctgggccctgcgtcgcgccgcaccagcagcagcgggtcggcagagcctggggcggcccacgagatgaagtcaccgcccagcgcccgcagctctccgcacagcccctggagcgctgcaagcagctggaccagcaggcgctccagccggaacagcctcggccgtgcacccagcctgaagcggagaagcccaagtggagagcggcggtccctgttgtcgggagaaggccaggagagccaggatgaagaggagagctcagaagaggagcgggccagccctgcgggcagtgaccatcgccacagggggtccctggagcgggaggccaagagttcctttgacctgccagacacactgcaggtgccagggctgcatcgcactgccagtggccgagggtctgcttctgagcaccaggactgcaatggcaagtcggcttcagggcgcctggcccgggccctgcggcctgatgaccccccactggatggggatgacgccgatgacgagggcaacctgagcaaaggggaacgggtccgcgcgtggatccgagcccgactccctgcctgctgcctcgagcgagactcctggtcagcctacatcttccctcctcagtccaggttccgcctcctgtgtcaccggatcatcacccacaagatgttcgaccacgtggtccttgtcatcatcttccttaactgcatcaccatcgccatggagcgccccaaaattgacccccacagcgctgaacgcatcttcctgaccctctccaattacatcttcaccgcagtctttctggctgaaatgacagtgaaggtggtggcactgggctggtgcttcggggagcaggcgtacctgcggagcagttggaacgtgctggacgggctgttggtgctcatctccgtcatcgacattctggtgtccatggtctctgacagcggcaccaagatcctgggcatgctgagggtgctgcggctgctgcggaccctgcgcccgctcagggtgatcagccgggcgcaggggctgaagctggtggtggagacgctgatgtcctcactgaaacccatcggcaacattgtagtcatctgctgtgccttcttcatcattttcggcatcttgggggtgcagctcttcaaagggaagtttttcgtgtgccagggcgaggataccaggaacatcaccaataaatcggactgtgccgaggccagttaccggtgggtccggcacaagtacaactttgacaaccttggccaggccctgatgtccctgttcgttttggcctccaaggatggttgggtggacatcatgtacgatgggctggatgctgtgggcgtggaccagcagcccatcatgaaccacaacccctggatgctgctgtacttcatctcgttcctgctcattgtggccttctttgtcctgaacatgtttgtgggtgtggtggtggagaacttccacaagtgtcggcagcaccaggaggaagaggaggcccggcggcgggaggagaagcgcctacgaagactggagaaaaagagaaggagtaaggagaagcagatggctgaagcccagtgcaaaccttactactccgactactcccgcttccggctcctcgtccaccacttgtgcaccagccactacctggacctcttcatcacaggtgtcatcgggctgaacgtggtcaccatggccatggagcactaccagcagccccagattctggatgaggctctgaagatctgcaactacatcttcactgtcatctttgtcttggagtcagttttcaaacttgtggcctttggtttccgtcggttcttccaggacaggtggaaccagctggacctggccattgtgctgctgtccatcatgggcatcacgctggaggaaatcgaggtcaacgcctcgctgcccatcaaccccaccatcatccgcatcatgagggtgctgcgcattgcccgagtgctgaagctgctgaagatggctgtgggcatgcgggcgctgctggacacggtgatgcaggccctgccccaggtggggaacctgggacttctcttcatgttgttgtttttcatctttgcagctctgggcgtggagctctttggagacctggagtgtgacgagacacacccctgtgagggcctgggccgtcatgccacctttcggaactttggcatggccttcctaaccctcttccgagtctccacaggtgacaattggaatggcattatgaaggacaccctccgggactgtgaccaggagtccacctgctacaacacggtcatctcgcctatctactttgtgtccttcgtgctgacggcccagttcgtgctagtcaacgtggtgatcgccgtgctgatgaagcacctggaggagagcaacaaggaggccaaggaggaggccgagctagaggctgagctggagctggagatgaagaccctcagcccccagccccactcgccactgggcagccccttcctctggcctggggtcgagggccccgacagccccgacagccccaagcctggggctctgcacccagcggcccacgcgagatcagcctcccacttttccctggagcaccccacggacaggcagctgtttgacaccatatccctgctgatccagggctccctggagtgggagctgaagctgatggacgagctggcaggcccagggggccagccctctgccttcccttctgcccccagcctgggaggctccgacccacagatgcagccccaccccacggagctgccaggaccagacttactgactgtgcggaagtctggggtcagccgaacgcactctctgcccaatgacagctacatgtgtcggcatgggagcactgccgaggggcccctgggacacaggggctgggggctccccaaagctcagtcaggctccgtcttgtccgttcactcccagccagcagataccagctacatcctgcagcttcccaaagatgcacctcatctgctccagccccacagcgccccaacctggggcaccatccccaaactgcccccaccaggacgctcccctttggctcagaggccactcaggcgccaggcagcaataaggactgactccttggacgttcagggtctgggcagccgggaagacctgctggcagaggtgagtgggccctccccgcccctggcccgggcctactctttctggggccagtcaagtacccaggcacagcagcactcccgcagccacagcaagatctccaagcacatgaccccgccagccccttgcccaggcccagaacccaactggggcaagggccctccagagaccagaagcagcttagagttggacacggagctgagctggatttcaggagacctcctgccccctggcggccaggaggagcccccatccccacgggacctgaagaagtgctacagcgtggaggcccagagctgccagcgccggcctacgtcctggctggatgagcagaggagacactctatcgccgtcagctgcctggacagcggctcccaaccccacctgggcacagacccctctaaccttgggggccagcctcttggggggcctgggagccggcccaagaaaaaactcagcccgcctagtatcaccatagacccccccgagagccaaggtcctcggaccccgcccagccctggtatctgcctccggaggagggctccgtccagcgactccaaggatcccttggcctctggcccccctgacagcatggctgcctcgccctccccaaagaaagatgtgctgagtctctccggtttatcctctgacccagcagacctggacccctgagtcctgccccacttt

SEQ ID NO: 2764 - DNA, 6891 bp, Homo sapiens
  source 1..6891: mol_type = unassigned DNA; mol_type = unassigned DNA
atggacgaggaggaggatggagcgggcgccgaggagtcgggacagccccggagcttcatgcggctcaacgacctgtcgggggccgggggccggccggggccggggtcagcagaaaaggacccgggcagcgcggactccgaggcggaggggctgccgtacccggcgctggccccggtggttttcttctacttgagccaggacagccgcccgcggagctggtgtctccgcacggtctgtaacccctggtttgagcgcatcagcatgttggtcatccttctcaactgcgtgaccctgggcatgttccggccatgcgaggacatcgcctgtgactcccagcgctgccggatcctgcaggcctttgatgacttcatctttgccttctttgccgtggagatggtggtgaagatggtggccttgggcatctttgggaaaaagtgttacctgggagacacttggaaccggcttgactttttcatcgtcatcgcagggatgctggagtactcgctggacctgcagaacgtcagcttctcagctgtcaggacagtccgtgtgctgcgaccgctcagggccattaaccgggtgcccagcatgcgcatccttgtcacgttgctgctggatacgctgcccatgctgggcaacgtcctgctgctctgcttcttcgtcttcttcatcttcggcatcgtcggcgtccagctgtgggcagggctgcttcggaaccgatgcttcctacctgagaatttcagcctccccctgagcgtggacctggagcgctattaccagacagagaacgaggatgagagccccttcatctgctcccagccacgcgagaacggcatgcggtcctgcagaagcgtgcccacgctgcgcggggacgggggcggtggcccaccttgcggtctggactatgaggcctacaacagctccagcaacaccacctgtgtcaactggaaccagtactacaccaactgctcagcgggggagcacaaccccttcaagggcgccatcaactttgacaacattggctatgcctggatcgccatcttccaggtcatcacgctggagggctgggtcgacatcatgtactttgtgatggatgctcattccttctacaatttcatctacttcatcctcctcatcatcgtgggctccttcttcatgatcaacctgtgcctggtggtgattgccacgcagttctcagagaccaagcagcgggaaagccagctgatgcgggagcagcgtgtgcggttcctgtccaacgccagcaccctggctagcttctctgagcccggcagctgctatgaggagctgctcaagtacctggtgtacatccttcgtaaggcagcccgcaggctggctcaggtctctcgggcagcaggtgtgcgggttgggctgctcagcagcccagcacccctcgggggccaggagacccagcccagcagcagctgctctcgctcccaccgccgcctatccgtccaccacctggtgcaccaccaccaccaccatcaccaccactaccacctgggcaatgggacgctcagggccccccgggccagcccggagatccaggacagggatgccaatgggtcccgccggctcatgctgccaccaccctcgacgcctgccctctccggggccccccctggtggcgcagagtctgtgcacagcttctaccatgccgactgccacttagagccagtccgctgccaggcgccccctcccaggtccccatctgaggcatccggcaggactgtgggcagcgggaaggtgtatcccaccgtgcacaccagccctccaccggagacgctgaaggagaaggcactagtagaggtggctgccagctctgggcccccaaccctcaccagcctcaacatcccacccgggccctacagctccatgcacaagctgctggagacacagagtacaggtgcctgccaaagctcttgcaagatctccagcccttgcttgaaagcagacagtggagcctgtggtccagacagctgcccctactgtgcccgggccggggcaggggaggtggagctcgccgaccgtgaaatgcctgactcagacagcgaggcagtttatgagttcacacaggatgcccagcacagcgacctccgggacccccacagccggcggcaacggagcctgggcccagatgcagagcccagctctgtgctggccttctggaggctaatctgtgacaccttccgaaagattgtggacagcaagtactttggccggggaatcatgatcgccatcctggtcaacacactcagcatgggcatcgaataccacgagcagcccgaggagcttaccaacgccctagaaatcagcaacatcgtcttcaccagcctctttgccctggagatgctgctgaagctgcttgtgtatggtccctttggctacatcaagaatccctacaacatcttcgatggtgtcattgtggtcatcagcgtgtgggagatcgtgggccagcaggggggcggcctgtcggtgctgcggaccttccgcctgatgcgtgtgctgaagctggtgcgcttcctgccggcgctgcagcggcagctggtggtgctcatgaagaccatggacaacgtggccaccttctgcatgctgcttatgctcttcatcttcatcttcagcatcctgggcatgcatctcttcggctgcaagtttgcctctgagcgggatggggacaccctgccagaccggaagaattttgactccttgctctgggccatcgtcactgtctttcagatcctgacccaggaggactggaacaaagtcctctacaatggtatggcctccacgtcgtcctgggcggccctttatttcattgccctcatgaccttcggcaactacgtgctcttcaatttgctggtcgccattctggtggagggcttccaggcggaggaaatcagcaaacgggaagatgcgagtggacagttaagctgtattcagctgcctgtcgactcccaggggggagatgccaacaagtccgaatcagagcccgatttcttctcacccagcctggatggtgatggggacaggaagaagtgcttggccttggtgtccctgggagagcacccggagctgcggaagagcctgctgccgcctctcatcatccacacggccgccacacccatgtcgctgcccaagagcaccagcacgggcctgggcgaggcgctgggccctgcgtcgcgccgcaccagcagcagcgggtcggcagagcctggggcggcccacgagatgaagtcaccgcccagcgcccgcagctctccgcacagcccctggagcgctgcaagcagctggaccagcaggcgctccagccggaacagcctcggccgtgcacccagcctgaagcggagaagcccaagtggagagcggcggtccctgttgtcgggagaaggccaggagagccaggatgaagaggagagctcagaagaggagcgggccagccctgcgggcagtgaccatcgccacagggggtccctggagcgggaggccaagagttcctttgacctgccagacacactgcaggtgccagggctgcatcgcactgccagtggccgagggtctgcttctgagcaccaggactgcaatggcaagtcggcttcagggcgcctggcccgggccctgcggcctgatgaccccccactggatggggatgacgccgatgacgagggcaacctgagcaaaggggaacgggtccgcgcgtggatccgagcccgactccctgcctgctgcctcgagcgagactcctggtcagcctacatcttccctcctcagtccaggttccgcctcctgtgtcaccggatcatcacccacaagatgttcgaccacgtggtccttgtcatcatcttccttaactgcatcaccatcgccatggagcgccccaaaattgacccccacagcgctgaacgcatcttcctgaccctctccaattacatcttcaccgcagtctttctggctgaaatgacagtgaaggtggtggcactgggctggtgcttcggggagcaggcgtacctgcggagcagttggaacgtgctggacgggctgttggtgctcatctccgtcatcgacattctggtgtccatggtctctgacagcggcaccaagatcctgggcatgctgagggtgctgcggctgctgcggaccctgcgcccgctcagggtgatcagccgggcgcaggggctgaagctggtggtggagacgctgatgtcctcactgaaacccatcggcaacattgtagtcatctgctgtgccttcttcatcattttcggcatcttgggggtgcagctcttcaaagggaagtttttcgtgtgccagggcgaggataccaggaacatcaccaataaatcggactgtgccgaggccagttaccggtgggtccggcacaagtacaactttgacaaccttggccaggccctgatgtccctgttcgttttggcctccaaggatggttgggtggacatcatgtacgatgggctggatgctgtgggcgtggaccagcagcccatcatgaaccacaacccctggatgctgctgtacttcatctcgttcctgctcattgtggccttctttgtcctgaacatgtttgtgggtgtggtggtggagaacttccacaagtgtcggcagcaccaggaggaagaggaggcccggcggcgggaggagaagcgcctacgaagactggagaaaaagagaaggagtaaggagaagcagatggctgatctaatgctggacgatgtaattgcttccggcagctcagccagcgctgcgtcagaagcccagtgcaaaccttactactccgactactcccgcttccggctcctcgtccaccacttgtgcaccagccactacctggacctcttcatcacaggtgtcatcgggctgaacgtggtcaccatggccatggagcactaccagcagccccagattctggatgaggctctgaagatctgcaactacatcttcactgtcatctttgtcttggagtcagttttcaaacttgtggcctttggtttccgtcggttcttccaggacaggtggaaccagctggacctggccattgtgctgctgtccatcatgggcatcacgctggaggaaatcgaggtcaacgcctcgctgcccatcaaccccaccatcatccgcatcatgagggtgctgcgcattgcccgagtgctgaagctgctgaagatggctgtgggcatgcgggcgctgctggacacggtgatgcaggccctgccccaggtggggaacctgggacttctcttcatgttgttgtttttcatctttgcagctctgggcgtggagctctttggagacctggagtgtgacgagacacacccctgtgagggcctgggccgtcatgccacctttcggaactttggcatggccttcctaaccctcttccgagtctccacaggtgacaattggaatggcattatgaaggacaccctccgggactgtgaccaggagtccacctgctacaacacggtcatctcgcctatctactttgtgtccttcgtgctgacggcccagttcgtgctagtcaacgtggtgatcgccgtgctgatgaagcacctggaggagagcaacaaggaggccaaggaggaggccgagctagaggctgagctggagctggagatgaagaccctcagcccccagccccactcgccactgggcagccccttcctctggcctggggtcgagggccccgacagccccgacagccccaagcctggggctctgcacccagcggcccacgcgagatcagcctcccacttttccctggagcaccccacgatgcagccccaccccacggagctgccaggaccagacttactgactgtgcggaagtctggggtcagccgaacgcactctctgcccaatgacagctacatgtgtcggcatgggagcactgccgaggggcccctgggacacaggggctgggggctccccaaagctcagtcaggctccgtcttgtccgttcactcccagccagcagataccagctacatcctgcagcttcccaaagatgcacctcatctgctccagccccacagcgccccaacctggggcaccatccccaaactgcccccaccaggacgctcccctttggctcagaggccactcaggcgccaggcagcaataaggactgactccttggacgttcagggtctgggcagccgggaagacctgctggcagaggtgagtgggccctccccgcccctggcccgggcctactctttctggggccagtcaagtacccaggcacagcagcactcccgcagccacagcaagatctccaagcacatgaccccgccagccccttgcccaggcccagaacccaactggggcaagggccctccagagaccagaagcagcttagagttggacacggagctgagctggatttcaggagacctcctgccccctggcggccaggaggagcccccatccccacgggacctgaagaagtgctacagcgtggaggcccagagctgccagcgccggcctacgtcctggctggatgagcagaggagacactctatcgccgtcagctgcctggacagcggctcccaaccccacctgggcacagacccctctaaccttgggggccagcctcttggggggcctgggagccggcccaagaaaaaactcagcccgcctagtatcaccatagacccccccgagagccaaggtcctcggaccccgcccagccctggtatctgcctccggaggagggctccgtccagcgactccaaggatcccttggcctctggcccccctgacagcatggctgcctcgccctccccaaagaaagatgtgctgagtctctccggtttatcctctgacccagcagacctggacccctgagtcctgccccacttt

SEQ ID NO: 2765 - DNA, 6600 bp, Homo sapiens
  source 1..6600: mol_type = unassigned DNA; mol_type = unassigned DNA
atggacgaggaggaggatggagcgggcgccgaggagtcgggacagccccggagcttcatgcggctcaacgacctgtcgggggccgggggccggccggggccggggtcagcagaaaaggacccgggcagcgcggactccgaggcggaggggctgccgtacccggcgctggccccggtggttttcttctacttgagccaggacagccgcccgcggagctggtgtctccgcacggtctgtaacccctggtttgagcgcatcagcatgttggtcatccttctcaactgcgtgaccctgggcatgttccggccatgcgaggacatcgcctgtgactcccagcgctgccggatcctgcaggcctttgatgacttcatctttgccttctttgccgtggagatggtggtgaagatggtggccttgggcatctttgggaaaaagtgttacctgggagacacttggaaccggcttgactttttcatcgtcatcgcagggatgctggagtactcgctggacctgcagaacgtcagcttctcagctgtcaggacagtccgtgtgctgcgaccgctcagggccattaaccgggtgcccagcatgcgcatccttgtcacgttgctgctggatacgctgcccatgctgggcaacgtcctgctgctctgcttcttcgtcttcttcatcttcggcatcgtcggcgtccagctgtgggcagggctgcttcggaaccgatgcttcctacctgagaatttcagcctccccctgagcgtggacctggagcgctattaccagacagagaacgaggatgagagccccttcatctgctcccagccacgcgagaacggcatgcggtcctgcagaagcgtgcccacgctgcgcggggacgggggcggtggcccaccttgcggtctggactatgaggcctacaacagctccagcaacaccacctgtgtcaactggaaccagtactacaccaactgctcagcgggggagcacaaccccttcaagggcgccatcaactttgacaacattggctatgcctggatcgccatcttccaggtcatcacgctggagggctgggtcgacatcatgtactttgtgatggatgctcattccttctacaatttcatctacttcatcctcctcatcatcgtgggctccttcttcatgatcaacctgtgcctggtggtgattgccacgcagttctcagagaccaagcagcgggaaagccagctgatgcgggagcagcgtgtgcggttcctgtccaacgccagcaccctggctagcttctctgagcccggcagctgctatgaggagctgctcaagtacctggtgtacatccttcgtaaggcagcccgcaggctggctcaggtctctcgggcagcaggtgtgcgggttgggctgctcagcagcccagcacccctcgggggccaggagacccagcccagcagcagctgctctcgctcccaccgccgcctatccgtccaccacctggtgcaccaccaccaccaccatcaccaccactaccacctgggcaatgggacgctcagggccccccgggccagcccggagatccaggacagggatgccaatgggtcccgccggctcatgctgccaccaccctcgacgcctgccctctccggggccccccctggtggcgcagagtctgtgcacagcttctaccatgccgactgccacttagagccagtccgctgccaggcgccccctcccaggtccccatctgaggcatccggcaggactgtgggcagcgggaaggtgtatcccaccgtgcacaccagccctccaccggagacgctgaaggagaaggcactagtagaggtggctgccagctctgggcccccaaccctcaccagcctcaacatcccacccgggccctacagctccatgcacaagctgctggagacacagagtacaggtgcctgccaaagctcttgcaagatctccagcccttgcttgaaagcagacagtggagcctgtggtccagacagctgcccctactgtgcccgggccggggcaggggaggtggagctcgccgaccgtgaaatgcctgactcagacagcgaggcagtttatgagttcacacaggatgcccagcacagcgacctccgggacccccacagccggcggcaacggagcctgggcccagatgcagagcccagctctgtgctggccttctggaggctaatctgtgacaccttccgaaagattgtggacagcaagtactttggccggggaatcatgatcgccatcctggtcaacacactcagcatgggcatcgaataccacgagcagcccgaggagcttaccaacgccctagaaatcagcaacatcgtcttcaccagcctctttgccctggagatgctgctgaagctgcttgtgtatggtccctttggctacatcaagaatccctacaacatcttcgatggtgtcattgtggtcatcagcgtgtgggagatcgtgggccagcaggggggcggcctgtcggtgctgcggaccttccgcctgatgcgtgtgctgaagctggtgcgcttcctgccggcgctgcagcggcagctggtggtgctcatgaagaccatggacaacgtggccaccttctgcatgctgcttatgctcttcatcttcatcttcagcatcctgggcatgcatctcttcggctgcaagtttgcctctgagcgggatggggacaccctgccagaccggaagaattttgactccttgctctgggccatcgtcactgtctttcagatcctgacccaggaggactggaacaaagtcctctacaatggtatggcctccacgtcgtcctgggcggccctttatttcattgccctcatgaccttcggcaactacgtgctcttcaatttgctggtcgccattctggtggagggcttccaggcggaggaaatcagcaaacgggaagatgcgagtggacagttaagctgtattcagctgcctgtcgactcccaggggggagatgccaacaagtccgaatcagagcccgatttcttctcacccagcctggatggtgatggggacaggaagaagtgcttggccttggtgtccctgggagagcacccggagctgcggaagagcctgctgccgcctctcatcatccacacggccgccacacccatgtcgctgcccaagagcaccagcacgggcctgggcgaggcgctgggccctgcgtcgcgccgcaccagcagcagcgggtcggcagagcctggggcggcccacgagatgaagtcaccgcccagcgcccgcagctctccgcacagcccctggagcgctgcaagcagctggaccagcaggcgctccagccggaacagcctcggccgtgcacccagcctgaagcggagaagcccaagtggagagcggcggtccctgttgtcgggagaaggccaggagagccaggatgaagaggagagctcagaagaggagcgggccagccctgcgggcagtgaccatcgccacagggggtccctggagcgggaggccaagagttcctttgacctgccagacacactgcaggtgccagggctgcatcgcactgccagtggccgagggtctgcttctgagcaccaggactgcaatggcaagtcggcttcagggcgcctggcccgggccctgcggcctgatgaccccccactggatggggatgacgccgatgacgagggcaacctgagcaaaggggaacgggtccgcgcgtggatccgagcccgactccctgcctgctgcctcgagcgagactcctggtcagcctacatcttccctcctcagtccaggttccgcctcctgtgtcaccggatcatcacccacaagatgttcgaccacgtggtccttgtcatcatcttccttaactgcatcaccatcgccatggagcgccccaaaattgacccccacagcgctgaacgcatcttcctgaccctctccaattacatcttcaccgcagtctttctggctgaaatgacagtgaaggtggtggcactgggctggtgcttcggggagcaggcgtacctgcggagcagttggaacgtgctggacgggctgttggtgctcatctccgtcatcgacattctggtgtccatggtctctgacagcggcaccaagatcctgggcatgctgagggtgctgcggctgctgcggaccctgcgcccgctcagggtgatcagccgggcgcaggggctgaagctggtggtggagacgctgatgtcctcactgaaacccatcggcaacattgtagtcatctgctgtgccttcttcatcattttcggcatcttgggggtgcagctcttcaaagggaagtttttcgtgtgccagggcgaggataccaggaacatcaccaataaatcggactgtgccgaggccagttaccggtgggtccggcacaagtacaactttgacaaccttggccaggccctgatgtccctgttcgttttggcctccaaggatggttgggtggacatcatgtacgatgggctggatgctgtgggcgtggaccagcagcccatcatgaaccacaacccctggatgctgctgtacttcatctcgttcctgctcattgtggccttctttgtcctgaacatgtttgtgggtgtggtggtggagaacttccacaagtgtcggcagcaccaggaggaagaggaggcccggcggcgggaggagaagcgcctacgaagactggagaaaaagagaaggagtaaggagaagcagatggctgaagcccagtgcaaaccttactactccgactactcccgcttccggctcctcgtccaccacttgtgcaccagccactacctggacctcttcatcacaggtgtcatcgggctgaacgtggtcaccatggccatggagcactaccagcagccccagattctggatgaggctctgaagatctgcaactacatcttcactgtcatctttgtcttggagtcagttttcaaacttgtggcctttggtttccgtcggttcttccaggacaggtggaaccagctggacctggccattgtgctgctgtccatcatgggcatcacgctggaggaaatcgaggtcaacgcctcgctgcccatcaaccccaccatcatccgcatcatgagggtgctgcgcattgcccgagtgctgaagctgctgaagatggctgtgggcatgcgggcgctgctggacacggtgatgcaggccctgccccaggtggggaacctgggacttctcttcatgttgttgtttttcatctttgcagctctgggcgtggagctctttggagacctggagtgtgacgagacacacccctgtgagggcctgggccgtcatgccacctttcggaactttggcatggccttcctaaccctcttccgagtctccacaggtgacaattggaatggcattatgaaggacaccctccgggactgtgaccaggagtccacctgctacaacacggtcatctcgcctatctactttgtgtccttcgtgctgacggcccagttcgtgctagtcaacgtggtgatcgccgtgctgatgaagcacctggaggagagcaacaaggaggccaaggaggaggccgagctagaggctgagctggagctggagatgaagaccctcagcccccagccccactcgccactgggcagccccttcctctggcctggggtcgagggccccgacagccccgacagccccaagcctggggctctgcacccagcggcccacgcgagatcagcctcccacttttccctggagcaccccacgatgcagccccaccccacggagctgccaggaccagacttactgactgtgcggaagtctggggtcagccgaacgcactctctgcccaatgacagctacatgtgtcggcatgggagcactgccgaggggcccctgggacacaggggctgggggctccccaaagctcagtcaggctccgtcttgtccgttcactcccagccagcagataccagctacatcctgcagcttcccaaagatgcacctcatctgctccagccccacagcgccccaacctggggcaccatccccaaactgcccccaccaggacgctcccctttggctcagaggccactcaggcgccaggcagcaataaggactgactccttggacgttcagggtctgggcagccgggaagacctgctggcagaggaggagcccccatccccacgggacctgaagaagtgctacagcgtggaggcccagagctgccagcgccggcctacgtcctggctggatgagcagaggagacactctatcgccgtcagctgcctggacagcggctcccaaccccacctgggcacagacccctctaaccttgggggccagcctcttggggggcctgggagccggcccaagaaaaaactcagcccgcctagtatcaccatagacccccccgagagccaaggtcctcggaccccgcccagccctggtatctgcctccggaggagggctccgtccagcgactccaaggatcccttggcctctggcccccctgacagcatggctgcctcgccctccccaaagaaagatgtgctgagtctctccggtttatcctctgacccagcagacctggacccctgagtcctgccccacttt

SEQ ID NO: 2766 - DNA, 6731 bp, Homo sapiens
  source 1..6731: mol_type = unassigned DNA; mol_type = unassigned DNA
atggacgaggaggaggatggagcgggcgccgaggagtcgggacagccccggagcttcatgcggctcaacgacctgtcgggggccgggggccggccggggccggggtcagcagaaaaggacccgggcagcgcggactccgaggcggaggggctgccgtacccggcgctggccccggtggttttcttctacttgagccaggacagccgcccgcggagctggtgtctccgcacggtctgtaacccctggtttgagcgcatcagcatgttggtcatccttctcaactgcgtgaccctgggcatgttccggccatgcgaggacatcgcctgtgactcccagcgctgccggatcctgcaggcctttgatgacttcatctttgccttctttgccgtggagatggtggtgaagatggtggccttgggcatctttgggaaaaagtgttacctgggagacacttggaaccggcttgactttttcatcgtcatcgcagggatgctggagtactcgctggacctgcagaacgtcagcttctcagctgtcaggacagtccgtgtgctgcgaccgctcagggccattaaccgggtgcccagcatgcgcatccttgtcacgttgctgctggatacgctgcccatgctgggcaacgtcctgctgctctgcttcttcgtcttcttcatcttcggcatcgtcggcgtccagctgtgggcagggctgcttcggaaccgatgcttcctacctgagaatttcagcctccccctgagcgtggacctggagcgctattaccagacagagaacgaggatgagagccccttcatctgctcccagccacgcgagaacggcatgcggtcctgcagaagcgtgcccacgctgcgcggggacgggggcggtggcccaccttgcggtctggactatgaggcctacaacagctccagcaacaccacctgtgtcaactggaaccagtactacaccaactgctcagcgggggagcacaaccccttcaagggcgccatcaactttgacaacattggctatgcctggatcgccatcttccaggtcatcacgctggagggctgggtcgacatcatgtactttgtgatggatgctcattccttctacaatttcatctacttcatcctcctcatcatcgtgggctccttcttcatgatcaacctgtgcctggtggtgattgccacgcagttctcagagaccaagcagcgggaaagccagctgatgcgggagcagcgtgtgcggttcctgtccaacgccagcaccctggctagcttctctgagcccggcagctgctatgaggagctgctcaagtacctggtgtacatccttcgtaaggcagcccgcaggctggctcaggtctctcgggcagcaggtgtgcgggttgggctgctcagcagcccagcacccctcgggggccaggagacccagcccagcagcagctgctctcgctcccaccgccgcctatccgtccaccacctggtgcaccaccaccaccaccatcaccaccactaccacctgggcaatgggacgctcagggccccccgggccagcccggagatccaggacagggatgccaatgggtcccgccggctcatgctgccaccaccctcgacgcctgccctctccggggccccccctggtggcgcagagtctgtgcacagcttctaccatgccgactgccacttagagccagtccgctgccaggcgccccctcccaggtccccatctgaggcatccggcaggactgtgggcagcgggaaggtgtatcccaccgtgcacaccagccctccaccggagacgctgaaggagaaggcactagtagaggtggctgccagctctgggcccccaaccctcaccagcctcaacatcccacccgggccctacagctccatgcacaagctgctggagacacagagtacaggtgcctgccaaagctcttgcaagatctccagcccttgcttgaaagcagacagtggagcctgtggtccagacagctgcccctactgtgcccgggccggggcaggggaggtggagctcgccgaccgtgaaatgcctgactcagacagcgaggcagtttatgagttcacacaggatgcccagcacagcgacctccgggacccccacagccggcggcaacggagcctgggcccagatgcagagcccagctctgtgctggccttctggaggctaatctgtgacaccttccgaaagattgtggacagcaagtactttggccggggaatcatgatcgccatcctggtcaacacactcagcatgggcatcgaataccacgagcagcccgaggagcttaccaacgccctagaaatcagcaacatcgtcttcaccagcctctttgccctggagatgctgctgaagctgcttgtgtatggtccctttggctacatcaagaatccctacaacatcttcgatggtgtcattgtggtcatcagcgtgtgggagatcgtgggccagcaggggggcggcctgtcggtgctgcggaccttccgcctgatgcgtgtgctgaagctggtgcgcttcctgccggcgctgcagcggcagctggtggtgctcatgaagaccatggacaacgtggccaccttctgcatgctgcttatgctcttcatcttcatcttcagcatcctgggcatgcatctcttcggctgcaagtttgcctctgagcgggatggggacaccctgccagaccggaagaattttgactccttgctctgggccatcgtcactgtctttcagatcctgacccaggaggactggaacaaagtcctctacaatggtatggcctccacgtcgtcctgggcggccctttatttcattgccctcatgaccttcggcaactacgtgctcttcaatttgctggtcgccattctggtggagggcttccaggcggagggagatgccaacaagtccgaatcagagcccgatttcttctcacccagcctggatggtgatggggacaggaagaagtgcttggccttggtgtccctgggagagcacccggagctgcggaagagcctgctgccgcctctcatcatccacacggccgccacacccatgtcgctgcccaagagcaccagcacgggcctgggcgaggcgctgggccctgcgtcgcgccgcaccagcagcagcgggtcggcagagcctggggcggcccacgagatgaagtcaccgcccagcgcccgcagctctccgcacagcccctggagcgctgcaagcagctggaccagcaggcgctccagccggaacagcctcggccgtgcacccagcctgaagcggagaagcccaagtggagagcggcggtccctgttgtcgggagaaggccaggagagccaggatgaagaggagagctcagaagaggagcgggccagccctgcgggcagtgaccatcgccacagggggtccctggagcgggaggccaagagttcctttgacctgccagacacactgcaggtgccagggctgcatcgcactgccagtggccgagggtctgcttctgagcaccaggactgcaatggcaagtcggcttcagggcgcctggcccgggccctgcggcctgatgaccccccactggatggggatgacgccgatgacgagggcaacctgagcaaaggggaacgggtccgcgcgtggatccgagcccgactccctgcctgctgcctcgagcgagactcctggtcagcctacatcttccctcctcagtccaggttccgcctcctgtgtcaccggatcatcacccacaagatgttcgaccacgtggtccttgtcatcatcttccttaactgcatcaccatcgccatggagcgccccaaaattgacccccacagcgctgaacgcatcttcctgaccctctccaattacatcttcaccgcagtctttctggctgaaatgacagtgaaggtggtggcactgggctggtgcttcggggagcaggcgtacctgcggagcagttggaacgtgctggacgggctgttggtgctcatctccgtcatcgacattctggtgtccatggtctctgacagcggcaccaagatcctgggcatgctgagggtgctgcggctgctgcggaccctgcgcccgctcagggtgatcagccgggcgcaggggctgaagctggtggtggagacgctgatgtcctcactgaaacccatcggcaacattgtagtcatctgctgtgccttcttcatcattttcggcatcttgggggtgcagctcttcaaagggaagtttttcgtgtgccagggcgaggataccaggaacatcaccaataaatcggactgtgccgaggccagttaccggtgggtccggcacaagtacaactttgacaaccttggccaggccctgatgtccctgttcgttttggcctccaaggatggttgggtggacatcatgtacgatgggctggatgctgtgggcgtggaccagcagcccatcatgaaccacaacccctggatgctgctgtacttcatctcgttcctgctcattgtggccttctttgtcctgaacatgtttgtgggtgtggtggtggagaacttccacaagtgtcggcagcaccaggaggaagaggaggcccggcggcgggaggagaagcgcctacgaagactggagaaaaagagaaggaatctaatgctggacgatgtaattgcttccggcagctcagccagcgctgcgtcagaagcccagtgcaaaccttactactccgactactcccgcttccggctcctcgtccaccacttgtgcaccagccactacctggacctcttcatcacaggtgtcatcgggctgaacgtggtcaccatggccatggagcactaccagcagccccagattctggatgaggctctgaagatctgcaactacatcttcactgtcatctttgtcttggagtcagttttcaaacttgtggcctttggtttccgtcggttcttccaggacaggtggaaccagctggacctggccattgtgctgctgtccatcatgggcatcacgctggaggaaatcgaggtcaacgcctcgctgcccatcaaccccaccatcatccgcatcatgagggtgctgcgcattgcccgagtgctgaagctgctgaagatggctgtgggcatgcgggcgctgctggacacgctctgggcgtggagctctttggagacctggagtgtgacgagacacacccctgtgagggcctgggccgtcatgccacctttcggaactttggcatggccttcctaaccctcttccgagtctccacaggtgacaattggaatggcattatgaaggacaccctccgggactgtgaccaggagtccacctgctacaacacggtcatctcgcctatctactttgtgtccttcgtgctgacggcccagttcgtgctagtcaacgtggtgatcgccgtgctgatgaagcacctggaggagagcaacaaggaggccaaggaggaggccgagctagaggctgagctggagctggagatgaagaccctcagcccccagccccactcgccactgggcagccccttcctctggcctggggtcgagggccccgacagccccgacagccccaagcctggggctctgcacccagcggcccacgcgagatcagcctcccacttttccctggagcaccccacgatgcagccccaccccacggagctgccaggaccagacttactgactgtgcggaagtctggggtcagccgaacgcactctctgcccaatgacagctacatgtgtcggcatgggagcactgccgaggggcccctgggacacaggggctgggggctccccaaagctcagtcaggctccgtcttgtccgttcactcccagccagcagataccagctacatcctgcagcttcccaaagatgcacctcatctgctccagccccacagcgccccaacctggggcaccatccccaaactgcccccaccaggacgctcccctttggctcagaggccactcaggcgccaggcagcaataaggactgactccttggacgttcagggtctgggcagccgggaagacctgctggcagaggtgagtgggccctccccgcccctggcccgggcctactctttctggggccagtcaagtacccaggcacagcagcactcccgcagccacagcaagatctccaagcacatgaccccgccagccccttgcccaggcccagaacccaactggggcaagggccctccagagaccagaagcagcttagagttggacacggagctgagctggatttcaggagacctcctgccccctggcggccaggaggagcccccatccccacgggacctgaagaagtgctacagcgtggaggcccagagctgccagcgccggcctacgtcctggctggatgagcagaggagacactctatcgccgtcagctgcctggacagcggctcccaaccccacctgggcacagacccctctaaccttgggggccagcctcttggggggcctgggagccggcccaagaaaaaactcagcccgcctagtatcaccatagacccccccgagagccaaggtcctcggaccccgcccagccctggtatctgcctccggaggagggctccgtccagcgactccaaggatcccttggcctctggcccccctgacagcatggctgcctcgccctccccaaagaaagatgtgctgagtctctccggtttatcctctgacccagcagacctggacccctgagtcctgccccacttt

SEQ ID NO: 2767 - DNA, 6633 bp, Homo sapiens
  source 1..6633: mol_type = unassigned DNA
atggacgaggaggaggatggagcgggcgccgaggagtcgggacagccccggagcttcatgcggctcaacgacctgtcgggggccgggggccggccggggccggggtcagcagaaaaggacccgggcagcgcggactccgaggcggaggggctgccgtacccggcgctggccccggtggttttcttctacttgagccaggacagccgcccgcggagctggtgtctccgcacggtctgtaacccctggtttgagcgcatcagcatgttggtcatccttctcaactgcgtgaccctgggcatgttccggccatgcgaggacatcgcctgtgactcccagcgctgccggatcctgcaggcctttgatgacttcatctttgccttctttgccgtggagatggtggtgaagatggtggccttgggcatctttgggaaaaagtgttacctgggagacacttggaaccggcttgactttttcatcgtcatcgcagggatgctggagtactcgctggacctgcagaacgtcagcttctcagctgtcaggacagtccgtgtgctgcgaccgctcagggccattaaccgggtgcccagcatgcgcatccttgtcacgttgctgctggatacgctgcccatgctgggcaacgtcctgctgctctgcttcttcgtcttcttcatcttcggcatcgtcggcgtccagctgtgggcagggctgcttcggaaccgatgcttcctacctgagaatttcagcctccccctgagcgtggacctggagcgctattaccagacagagaacgaggatgagagccccttcatctgctcccagccacgcgagaacggcatgcggtcctgcagaagcgtgcccacgctgcgcggggacgggggcggtggcccaccttgcggtctggactatgaggcctacaacagctccagcaacaccacctgtgtcaactggaaccagtactacaccaactgctcagcgggggagcacaaccccttcaagggcgccatcaactttgacaacattggctatgcctggatcgccatcttccaggtcatcacgctggagggctgggtcgacatcatgtactttgtgatggatgctcattccttctacaatttcatctacttcatcctcctcatcatcgtgggctccttcttcatgatcaacctgtgcctggtggtgattgccacgcagttctcagagaccaagcagcgggaaagccagctgatgcgggagcagcgtgtgcggttcctgtccaacgccagcaccctggctagcttctctgagcccggcagctgctatgaggagctgctcaagtacctggtgtacatccttcgtaaggcagcccgcaggctggctcaggtctctcgggcagcaggtgtgcgggttgggctgctcagcagcccagcacccctcgggggccaggagacccagcccagcagcagctgctctcgctcccaccgccgcctatccgtccaccacctggtgcaccaccaccaccaccatcaccaccactaccacctgggcaatgggacgctcagggccccccgggccagcccggagatccaggacagggatgccaatgggtcccgccggctcatgctgccaccaccctcgacgcctgccctctccggggccccccctggtggcgcagagtctgtgcacagcttctaccatgccgactgccacttagagccagtccgctgccaggcgccccctcccaggtccccatctgaggcatccggcaggactgtgggcagcgggaaggtgtatcccaccgtgcacaccagccctccaccggagacgctgaaggagaaggcactagtagaggtggctgccagctctgggcccccaaccctcaccagcctcaacatcccacccgggccctacagctccatgcacaagctgctggagacacagagtacaggtgcctgccaaagctcttgcaagatctccagcccttgcttgaaagcagacagtggagcctgtggtccagacagctgcccctactgtgcccgggccggggcaggggaggtggagctcgccgaccgtgaaatgcctgactcagacagcgaggcagtttatgagttcacacaggatgcccagcacagcgacctccgggacccccacagccggcggcaacggagcctgggcccagatgcagagcccagctctgtgctggccttctggaggctaatctgtgacaccttccgaaagattgtggacagcaagtactttggccggggaatcatgatcgccatcctggtcaacacactcagcatgggcatcgaataccacgagcagcccgaggagcttaccaacgccctagaaatcagcaacatcgtcttcaccagcctctttgccctggagatgctgctgaagctgcttgtgtatggtccctttggctacatcaagaatccctacaacatcttcgatggtgtcattgtggtcatcagcgtgtgggagatcgtgggccagcaggggggcggcctgtcggtgctgcggaccttccgcctgatgcgtgtgctgaagctggtgcgcttcctgccggcgctgcagcggcagctggtggtgctcatgaagaccatggacaacgtggccaccttctgcatgctgcttatgctcttcatcttcatcttcagcatcctgggcatgcatctcttcggctgcaagtttgcctctgagcgggatggggacaccctgccagaccggaagaattttgactccttgctctgggccatcgtcactgtctttcagatcctgacccaggaggactggaacaaagtcctctacaatggtatggcctccacgtcgtcctgggcggccctttatttcattgccctcatgaccttcggcaactacgtgctcttcaatttgctggtcgccattctggtggagggcttccaggcggaggaaatcagcaaacgggaagatgcgagtggacagttaagctgtattcagctgcctgtcgactcccaggggggagatgccaacaagtccgaatcagagcccgatttcttctcacccagcctggatggtgatggggacaggaagaagtgcttggccttggtgtccctgggagagcacccggagctgcggaagagcctgctgccgcctctcatcatccacacggccgccacacccatgtcgctgcccaagagcaccagcacgggcctgggcgaggcgctgggccctgcgtcgcgccgcaccagcagcagcgggtcggcagagcctggggcggcccacgagatgaagtcaccgcccagcgcccgcagctctccgcacagcccctggagcgctgcaagcagctggaccagcaggcgctccagccggaacagcctcggccgtgcacccagcctgaagcggagaagcccaagtggagagcggcggtccctgttgtcgggagaaggccaggagagccaggatgaagaggagagctcagaagaggagcgggccagccctgcgggcagtgaccatcgccacagggggtccctggagcgggaggccaagagttcctttgacctgccagacacactgcaggtgccagggctgcatcgcactgccagtggccgagggtctgcttctgagcaccaggactgcaatggcaagtcggcttcagggcgcctggcccgggccctgcggcctgatgaccccccactggatggggatgacgccgatgacgagggcaacctgagcaaaggggaacgggtccgcgcgtggatccgagcccgactccctgcctgctgcctcgagcgagactcctggtcagcctacatcttccctcctcagtccaggttccgcctcctgtgtcaccggatcatcacccacaagatgttcgaccacgtggtccttgtcatcatcttccttaactgcatcaccatcgccatggagcgccccaaaattgacccccacagcgctgaacgcatcttcctgaccctctccaattacatcttcaccgcagtctttctggctgaaatgacagtgaaggtggtggcactgggctggtgcttcggggagcaggcgtacctgcggagcagttggaacgtgctggacgggctgttggtgctcatctccgtcatcgacattctggtgtccatggtctctgacagcggcaccaagatcctgggcatgctgagggtgctgcggctgctgcggaccctgcgcccgctcagggtgatcagccgggcgcaggggctgaagctggtggtggagacgctgatgtcctcactgaaacccatcggcaacattgtagtcatctgctgtgccttcttcatcattttcggcatcttgggggtgcagctcttcaaagggaagtttttcgtgtgccagggcgaggataccaggaacatcaccaataaatcggactgtgccgaggccagttaccggtgggtccggcacaagtacaactttgacaaccttggccaggccctgatgtccctgttcgttttggcctccaaggatggttgggtggacatcatgtacgatgggctggatgctgtgggcgtggaccagcagcccatcatgaaccacaacccctggatgctgctgtacttcatctcgttcctgctcattgtggccttctttgtcctgaacatgtttgtgggtgtggtggtggagaacttccacaagtgtcggcagcaccaggaggaagaggaggcccggcggcgggaggagaagcgcctacgaagactggagaaaaagagaaggaatctaatgctggacgatgtaattgcttccggcagctcagccagcgctgcgtcagaagcccagtgcaaaccttactactccgactactcccgcttccggctcctcgtccaccacttgtgcaccagccactacctggacctcttcatcacaggtgtcatcgggctgaacgtggtcaccatggccatggagcactaccagcagccccagattctggatgaggctctgaagatctgcaactacatcttcactgtcatctttgtcttggagtcagttttcaaacttgtggcctttggtttccgtcggttcttccaggacaggtggaaccagctggacctggccattgtgctgctgtccatcatgggcatcacgctggaggaaatcgaggtcaacgcctcgctgcccatcaaccccaccatcatccgcatcatgagggtgctgcgcattgcccgagtgctgaagctgctgaagatggctgtgggcatgcgggcgctgctggacacggtgatgcaggccctgccccaggtggggaacctgggacttctcttcatgttgttgtttttcatctttgcagctctgggcgtggagctctttggagacctggagtgtgacgagacacacccctgtgagggcctgggccgtcatgccacctttcggaactttggcatggccttcctaaccctcttccgagtctccacaggtgacaattggaatggcattatgaaggacaccctccgggactgtgaccaggagtccacctgctacaacacggtcatctcgcctatctactttgtgtccttcgtgctgacggcccagttcgtgctagtcaacgtggtgatcgccgtgctgatgaagcacctggaggagagcaacaaggaggccaaggaggaggccgagctagaggctgagctggagctggagatgaagaccctcagcccccagccccactcgccactgggcagccccttcctctggcctggggtcgagggccccgacagccccgacagccccaagcctggggctctgcacccagcggcccacgcgagatcagcctcccacttttccctggagcaccccacgatgcagccccaccccacggagctgccaggaccagacttactgactgtgcggaagtctggggtcagccgaacgcactctctgcccaatgacagctacatgtgtcggcatgggagcactgccgaggggcccctgggacacaggggctgggggctccccaaagctcagtcaggctccgtcttgtccgttcactcccagccagcagataccagctacatcctgcagcttcccaaagatgcacctcatctgctccagccccacagcgccccaacctggggcaccatccccaaactgcccccaccaggacgctcccctttggctcagaggccactcaggcgccaggcagcaataaggactgactccttggacgttcagggtctgggcagccgggaagacctgctggcagaggaggagcccccatccccacgggacctgaagaagtgctacagcgtggaggcccagagctgccagcgccggcctacgtcctggctggatgagcagaggagacactctatcgccgtcagctgcctggacagcggctcccaaccccacctgggcacagacccctctaaccttgggggccagcctcttggggggcctgggagccggcccaagaaaaaactcagcccgcctagtatcaccatagacccccccgagagccaaggtcctcggaccccgcccagccctggtatctgcctccggaggagggctccgtccagcgactccaaggatcccttggcctctggcccccctgacagcatggctgcctcgccctccccaaagaaagatgtgctgagtctctccggtttatcctctgacccagcagacctggacccctgagtcctgccccacttt

SEQ ID NO: 2768 - DNA, 6698 bp, Homo sapiens
  source 1..6698: mol_type = unassigned DNA
atggacgaggaggaggatggagcgggcgccgaggagtcgggacagccccggagcttcatgcggctcaacgacctgtcgggggccgggggccggccggggccggggtcagcagaaaaggacccgggcagcgcggactccgaggcggaggggctgccgtacccggcgctggccccggtggttttcttctacttgagccaggacagccgcccgcggagctggtgtctccgcacggtctgtaacccctggtttgagcgcatcagcatgttggtcatccttctcaactgcgtgaccctgggcatgttccggccatgcgaggacatcgcctgtgactcccagcgctgccggatcctgcaggcctttgatgacttcatctttgccttctttgccgtggagatggtggtgaagatggtggccttgggcatctttgggaaaaagtgttacctgggagacacttggaaccggcttgactttttcatcgtcatcgcagggatgctggagtactcgctggacctgcagaacgtcagcttctcagctgtcaggacagtccgtgtgctgcgaccgctcagggccattaaccgggtgcccagcatgcgcatccttgtcacgttgctgctggatacgctgcccatgctgggcaacgtcctgctgctctgcttcttcgtcttcttcatcttcggcatcgtcggcgtccagctgtgggcagggctgcttcggaaccgatgcttcctacctgagaatttcagcctccccctgagcgtggacctggagcgctattaccagacagagaacgaggatgagagccccttcatctgctcccagccacgcgagaacggcatgcggtcctgcagaagcgtgcccacgctgcgcggggacgggggcggtggcccaccttgcggtctggactatgaggcctacaacagctccagcaacaccacctgtgtcaactggaaccagtactacaccaactgctcagcgggggagcacaaccccttcaagggcgccatcaactttgacaacattggctatgcctggatcgccatcttccaggtcatcacgctggagggctgggtcgacatcatgtactttgtgatggatgctcattccttctacaatttcatctacttcatcctcctcatcatcgtgggctccttcttcatgatcaacctgtgcctggtggtgattgccacgcagttctcagagaccaagcagcgggaaagccagctgatgcgggagcagcgtgtgcggttcctgtccaacgccagcaccctggctagcttctctgagcccggcagctgctatgaggagctgctcaagtacctggtgtacatccttcgtaaggcagcccgcaggctggctcaggtctctcgggcagcaggtgtgcgggttgggctgctcagcagcccagcacccctcgggggccaggagacccagcccagcagcagctgctctcgctcccaccgccgcctatccgtccaccacctggtgcaccaccaccaccaccatcaccaccactaccacctgggcaatgggacgctcagggccccccgggccagcccggagatccaggacagggatgccaatgggtcccgccggctcatgctgccaccaccctcgacgcctgccctctccggggccccccctggtggcgcagagtctgtgcacagcttctaccatgccgactgccacttagagccagtccgctgccaggcgccccctcccaggtccccatctgaggcatccggcaggactgtgggcagcgggaaggtgtatcccaccgtgcacaccagccctccaccggagacgctgaaggagaaggcactagtagaggtggctgccagctctgggcccccaaccctcaccagcctcaacatcccacccgggccctacagctccatgcacaagctgctggagacacagagtacaggtgcctgccaaagctcttgcaagatctccagcccttgcttgaaagcagacagtggagcctgtggtccagacagctgcccctactgtgcccgggccggggcaggggaggtggagctcgccgaccgtgaaatgcctgactcagacagcgaggcagtttatgagttcacacaggatgcccagcacagcgacctccgggacccccacagccggcggcaacggagcctgggcccagatgcagagcccagctctgtgctggccttctggaggctaatctgtgacaccttccgaaagattgtggacagcaagtactttggccggggaatcatgatcgccatcctggtcaacacactcagcatgggcatcgaataccacgagcagcccgaggagcttaccaacgccctagaaatcagcaacatcgtcttcaccagcctctttgccctggagatgctgctgaagctgcttgtgtatggtccctttggctacatcaagaatccctacaacatcttcgatggtgtcattgtggtcatcagcgtgtgggagatcgtgggccagcaggggggcggcctgtcggtgctgcggaccttccgcctgatgcgtgtgctgaagctggtgcgcttcctgccggcgctgcagcggcagctggtggtgctcatgaagaccatggacaacgtggccaccttctgcatgctgcttatgctcttcatcttcatcttcagcatcctgggcatgcatctcttcggctgcaagtttgcctctgagcgggatggggacaccctgccagaccggaagaattttgactccttgctctgggccatcgtcactgtctttcagatcctgacccaggaggactggaacaaagtcctctacaatggtatggcctccacgtcgtcctgggcggccctttatttcattgccctcatgaccttcggcaactacgtgctcttcaatttgctggtcgccattctggtggagggcttccaggcggagggagatgccaacaagtccgaatcagagcccgatttcttctcacccagcctggatggtgatggggacaggaagaagtgcttggccttggtgtccctgggagagcacccggagctgcggaagagcctgctgccgcctctcatcatccacacggccgccacacccatgtcgctgcccaagagcaccagcacgggcctgggcgaggcgctgggccctgcgtcgcgccgcaccagcagcagcgggtcggcagagcctggggcggcccacgagatgaagtcaccgcccagcgcccgcagctctccgcacagcccctggagcgctgcaagcagctggaccagcaggcgctccagccggaacagcctcggccgtgcacccagcctgaagcggagaagcccaagtggagagcggcggtccctgttgtcgggagaaggccaggagagccaggatgaagaggagagctcagaagaggagcgggccagccctgcgggcagtgaccatcgccacagggggtccctggagcgggaggccaagagttcctttgacctgccagacacactgcaggtgccagggctgcatcgcactgccagtggccgagggtctgcttctgagcaccaggactgcaatggcaagtcggcttcagggcgcctggcccgggccctgcggcctgatgaccccccactggatggggatgacgccgatgacgagggcaacctgagcaaaggggaacgggtccgcgcgtggatccgagcccgactccctgcctgctgcctcgagcgagactcctggtcagcctacatcttccctcctcagtccaggttccgcctcctgtgtcaccggatcatcacccacaagatgttcgaccacgtggtccttgtcatcatcttccttaactgcatcaccatcgccatggagcgccccaaaattgacccccacagcgctgaacgcatcttcctgaccctctccaattacatcttcaccgcagtctttctggctgaaatgacagtgaaggtggtggcactgggctggtgcttcggggagcaggcgtacctgcggagcagttggaacgtgctggacgggctgttggtgctcatctccgtcatcgacattctggtgtccatggtctctgacagcggcaccaagatcctgggcatgctgagggtgctgcggctgctgcggaccctgcgcccgctcagggtgatcagccgggcgcaggggctgaagctggtggtggagacgctgatgtcctcactgaaacccatcggcaacattgtagtcatctgctgtgccttcttcatcattttcggcatcttgggggtgcagctcttcaaagggaagtttttcgtgtgccagggcgaggataccaggaacatcaccaataaatcggactgtgccgaggccagttaccggtgggtccggcacaagtacaactttgacaaccttggccaggccctgatgtccctgttcgttttggcctccaaggatggttgggtggacatcatgtacgatgggctggatgctgtgggcgtggaccagcagcccatcatgaaccacaacccctggatgctgctgtacttcatctcgttcctgctcattgtggccttctttgtcctgaacatgtttgtgggtgtggtggtggagaacttccacaagtgtcggcagcaccaggaggaagaggaggcccggcggcgggaggagaagcgcctacgaagactggagaaaaagagaaggaaagcccagtgcaaaccttactactccgactactcccgcttccggctcctcgtccaccacttgtgcaccagccactacctggacctcttcatcacaggtgtcatcgggctgaacgtggtcaccatggccatggagcactaccagcagccccagattctggatgaggctctgaagatctgcaactacatcttcactgtcatctttgtcttggagtcagttttcaaacttgtggcctttggtttccgtcggttcttccaggacaggtggaaccagctggacctggccattgtgctgctgtccatcatgggcatcacgctggaggaaatcgaggtcaacgcctcgctgcccatcaaccccaccatcatccgcatcatgagggtgctgcgcattgcccgagtgctgaagctgctgaagatggctgtgggcatgcgggcgctgctggacacggtgatgcaggccctgccccagctctgggcgtggagctctttggagacctggagtgtgacgagacacacccctgtgagggcctgggccgtcatgccacctttcggaactttggcatggccttcctaaccctcttccgagtctccacaggtgacaattggaatggcattatgaaggacaccctccgggactgtgaccaggagtccacctgctacaacacggtcatctcgcctatctactttgtgtccttcgtgctgacggcccagttcgtgctagtcaacgtggtgatcgccgtgctgatgaagcacctggaggagagcaacaaggaggccaaggaggaggccgagctagaggctgagctggagctggagatgaagaccctcagcccccagccccactcgccactgggcagccccttcctctggcctggggtcgagggccccgacagccccgacagccccaagcctggggctctgcacccagcggcccacgcgagatcagcctcccacttttccctggagcaccccacgatgcagccccaccccacggagctgccaggaccagacttactgactgtgcggaagtctggggtcagccgaacgcactctctgcccaatgacagctacatgtgtcggcatgggagcactgccgaggggcccctgggacacaggggctgggggctccccaaagctcagtcaggctccgtcttgtccgttcactcccagccagcagataccagctacatcctgcagcttcccaaagatgcacctcatctgctccagccccacagcgccccaacctggggcaccatccccaaactgcccccaccaggacgctcccctttggctcagaggccactcaggcgccaggcagcaataaggactgactccttggacgttcagggtctgggcagccgggaagacctgctggcagaggtgagtgggccctccccgcccctggcccgggcctactctttctggggccagtcaagtacccaggcacagcagcactcccgcagccacagcaagatctccaagcacatgaccccgccagccccttgcccaggcccagaacccaactggggcaagggccctccagagaccagaagcagcttagagttggacacggagctgagctggatttcaggagacctcctgccccctggcggccaggaggagcccccatccccacgggacctgaagaagtgctacagcgtggaggcccagagctgccagcgccggcctacgtcctggctggatgagcagaggagacactctatcgccgtcagctgcctggacagcggctcccaaccccacctgggcacagacccctctaaccttgggggccagcctcttggggggcctgggagccggcccaagaaaaaactcagcccgcctagtatcaccatagacccccccgagagccaaggtcctcggaccccgcccagccctggtatctgcctccggaggagggctccgtccagcgactccaaggatcccttggcctctggcccccctgacagcatggctgcctcgccctccccaaagaaagatgtgctgagtctctccggtttatcctctgacccagcagacctggacccctgagtcctgccccacttt

SEQ ID NO: 2769 - DNA, 6960 bp, Homo sapiens
  source 1..6960: mol_type = unassigned DNA
atggacgaggaggaggatggagcgggcgccgaggagtcgggacagccccggagcttcatgcggctcaacgacctgtcgggggccgggggccggccggggccggggtcagcagaaaaggacccgggcagcgcggactccgaggcggaggggctgccgtacccggcgctggccccggtggttttcttctacttgagccaggacagccgcccgcggagctggtgtctccgcacggtctgtaacccctggtttgagcgcatcagcatgttggtcatccttctcaactgcgtgaccctgggcatgttccggccatgcgaggacatcgcctgtgactcccagcgctgccggatcctgcaggcctttgatgacttcatctttgccttctttgccgtggagatggtggtgaagatggtggccttgggcatctttgggaaaaagtgttacctgggagacacttggaaccggcttgactttttcatcgtcatcgcagggatgctggagtactcgctggacctgcagaacgtcagcttctcagctgtcaggacagtccgtgtgctgcgaccgctcagggccattaaccgggtgcccagcatgcgcatccttgtcacgttgctgctggatacgctgcccatgctgggcaacgtcctgctgctctgcttcttcgtcttcttcatcttcggcatcgtcggcgtccagctgtgggcagggctgcttcggaaccgatgcttcctacctgagaatttcagcctccccctgagcgtggacctggagcgctattaccagacagagaacgaggatgagagccccttcatctgctcccagccacgcgagaacggcatgcggtcctgcagaagcgtgcccacgctgcgcggggacgggggcggtggcccaccttgcggtctggactatgaggcctacaacagctccagcaacaccacctgtgtcaactggaaccagtactacaccaactgctcagcgggggagcacaaccccttcaagggcgccatcaactttgacaacattggctatgcctggatcgccatcttccaggtcatcacgctggagggctgggtcgacatcatgtactttgtgatggatgctcattccttctacaatttcatctacttcatcctcctcatcatcgtgggctccttcttcatgatcaacctgtgcctggtggtgattgccacgcagttctcagagaccaagcagcgggaaagccagctgatgcgggagcagcgtgtgcggttcctgtccaacgccagcaccctggctagcttctctgagcccggcagctgctatgaggagctgctcaagtacctggtgtacatccttcgtaaggcagcccgcaggctggctcaggtctctcgggcagcaggtgtgcgggttgggctgctcagcagcccagcacccctcgggggccaggagacccagcccagcagcagctgctctcgctcccaccgccgcctatccgtccaccacctggtgcaccaccaccaccaccatcaccaccactaccacctgggcaatgggacgctcagggccccccgggccagcccggagatccaggacagggatgccaatgggtcccgccggctcatgctgccaccaccctcgacgcctgccctctccggggccccccctggtggcgcagagtctgtgcacagcttctaccatgccgactgccacttagagccagtccgctgccaggcgccccctcccaggtccccatctgaggcatccggcaggactgtgggcagcgggaaggtgtatcccaccgtgcacaccagccctccaccggagacgctgaaggagaaggcactagtagaggtggctgccagctctgggcccccaaccctcaccagcctcaacatcccacccgggccctacagctccatgcacaagctgctggagacacagagtacaggtgcctgccaaagctcttgcaagatctccagcccttgcttgaaagcagacagtggagcctgtggtccagacagctgcccctactgtgcccgggccggggcaggggaggtggagctcgccgaccgtgaaatgcctgactcagacagcgaggcagtttatgagttcacacaggatgcccagcacagcgacctccgggacccccacagccggcggcaacggagcctgggcccagatgcagagcccagctctgtgctggccttctggaggctaatctgtgacaccttccgaaagattgtggacagcaagtactttggccggggaatcatgatcgccatcctggtcaacacactcagcatgggcatcgaataccacgagcagcccgaggagcttaccaacgccctagaaatcagcaacatcgtcttcaccagcctctttgccctggagatgctgctgaagctgcttgtgtatggtccctttggctacatcaagaatccctacaacatcttcgatggtgtcattgtggtcatcagcgtgtgggagatcgtgggccagcaggggggcggcctgtcggtgctgcggaccttccgcctgatgcgtgtgctgaagctggtgcgcttcctgccggcgctgcagcggcagctggtggtgctcatgaagaccatggacaacgtggccaccttctgcatgctgcttatgctcttcatcttcatcttcagcatcctgggcatgcatctcttcggctgcaagtttgcctctgagcgggatggggacaccctgccagaccggaagaattttgactccttgctctgggccatcgtcactgtctttcagatcctgacccaggaggactggaacaaagtcctctacaatggtatggcctccacgtcgtcctgggcggccctttatttcattgccctcatgaccttcggcaactacgtgctcttcaatttgctggtcgccattctggtggagggcttccaggcggaggaaatcagcaaacgggaagatgcgagtggacagttaagctgtattcagctgcctgtcgactcccaggggggagatgccaacaagtccgaatcagagcccgatttcttctcacccagcctggatggtgatggggacaggaagaagtgcttggccttggtgtccctgggagagcacccggagctgcggaagagcctgctgccgcctctcatcatccacacggccgccacacccatgtcgctgcccaagagcaccagcacgggcctgggcgaggcgctgggccctgcgtcgcgccgcaccagcagcagcgggtcggcagagcctggggcggcccacgagatgaagtcaccgcccagcgcccgcagctctccgcacagcccctggagcgctgcaagcagctggaccagcaggcgctccagccggaacagcctcggccgtgcacccagcctgaagcggagaagcccaagtggagagcggcggtccctgttgtcgggagaaggccaggagagccaggatgaagaggagagctcagaagaggagcgggccagccctgcgggcagtgaccatcgccacagggggtccctggagcgggaggccaagagttcctttgacctgccagacacactgcaggtgccagggctgcatcgcactgccagtggccgagggtctgcttctgagcaccaggactgcaatggcaagtcggcttcagggcgcctggcccgggccctgcggcctgatgaccccccactggatggggatgacgccgatgacgagggcaacctgagcaaaggggaacgggtccgcgcgtggatccgagcccgactccctgcctgctgcctcgagcgagactcctggtcagcctacatcttccctcctcagtccaggttccgcctcctgtgtcaccggatcatcacccacaagatgttcgaccacgtggtccttgtcatcatcttccttaactgcatcaccatcgccatggagcgccccaaaattgacccccacagcgctgaacgcatcttcctgaccctctccaattacatcttcaccgcagtctttctggctgaaatgacagtgaaggtggtggcactgggctggtgcttcggggagcaggcgtacctgcggagcagttggaacgtgctggacgggctgttggtgctcatctccgtcatcgacattctggtgtccatggtctctgacagcggcaccaagatcctgggcatgctgagggtgctgcggctgctgcggaccctgcgcccgctcagggtgatcagccgggcgcaggggctgaagctggtggtggagacgctgatgtcctcactgaaacccatcggcaacattgtagtcatctgctgtgccttcttcatcattttcggcatcttgggggtgcagctcttcaaagggaagtttttcgtgtgccagggcgaggataccaggaacatcaccaataaatcggactgtgccgaggccagttaccggtgggtccggcacaagtacaactttgacaaccttggccaggccctgatgtccctgttcgttttggcctccaaggatggttgggtggacatcatgtacgatgggctggatgctgtgggcgtggaccagcagcccatcatgaaccacaacccctggatgctgctgtacttcatctcgttcctgctcattgtggccttctttgtcctgaacatgtttgtgggtgtggtggtggagaacttccacaagtgtcggcagcaccaggaggaagaggaggcccggcggcgggaggagaagcgcctacgaagactggagaaaaagagaaggaaagcccagtgcaaaccttactactccgactactcccgcttccggctcctcgtccaccacttgtgcaccagccactacctggacctcttcatcacaggtgtcatcgggctgaacgtggtcaccatggccatggagcactaccagcagccccagattctggatgaggctctgaagatctgcaactacatcttcactgtcatctttgtcttggagtcagttttcaaacttgtggcctttggtttccgtcggttcttccaggacaggtggaaccagctggacctggccattgtgctgctgtccatcatgggcatcacgctggaggaaatcgaggtcaacgcctcgctgcccatcaaccccaccatcatccgcatcatgagggtgctgcgcattgcccgagtgctgaagctgctgaagatggctgtgggcatgcgggcgctgctggacacggtgatgcaggccctgccccaggtggggaacctgggacttctcttcatgttgttgtttttcatctttgcagctctgggcgtggagctctttggagacctggagtgtgacgagacacacccctgtgagggcctgggccgtcatgccacctttcggaactttggcatggccttcctaaccctcttccgagtctccacaggtgacaattggaatggcattatgaaggacaccctccgggactgtgaccaggagtccacctgctacaacacggtcatctcgcctatctactttgtgtccttcgtgctgacggcccagttcgtgctagtcaacgtggtgatcgccgtgctgatgaagcacctggaggagagcaacaaggaggccaaggaggaggccgagctagaggctgagctggagctggagatgaagaccctcagcccccagccccactcgccactgggcagccccttcctctggcctggggtcgagggccccgacagccccgacagccccaagcctggggctctgcacccagcggcccacgcgagatcagcctcccacttttccctggagcaccccacggacaggcagctgtttgacaccatatccctgctgatccagggctccctggagtgggagctgaagctgatggacgagctggcaggcccagggggccagccctctgccttcccttctgcccccagcctgggaggctccgacccacagatgcagccccaccccacggagctgccaggaccagacttactgactgtgcggaagtctggggtcagccgaacgcactctctgcccaatgacagctacatgtgtcggcatgggagcactgccgaggggcccctgggacacaggggctgggggctccccaaagctcagtcaggctccgtcttgtccgttcactcccagccagcagataccagctacatcctgcagcttcccaaagatgcacctcatctgctccagccccacagcgccccaacctggggcaccatccccaaactgcccccaccaggacgctcccctttggctcagaggccactcaggcgccaggcagcaataaggactgactccttggacgttcagggtctgggcagccgggaagacctgctggcagaggtgagtgggccctccccgcccctggcccgggcctactctttctggggccagtcaagtacccaggcacagcagcactcccgcagccacagcaagatctccaagcacatgaccccgccagccccttgcccaggcccagaacccaactggggcaagggccctccagagaccagaagcagcttagagttggacacggagctgagctggatttcaggagacctcctgccccctggcggccaggaggagcccccatccccacgggacctgaagaagtgctacagcgtggaggcccagagctgccagcgccggcctacgtcctggctggatgagcagaggagacactctatcgccgtcagctgcctggacagcggctcccaaccccacctgggcacagacccctctaaccttgggggccagcctcttggggggcctgggagccggcccaagaaaaaactcagcccgcctagtatcaccatagacccccccgagagccaaggtcctcggaccccgcccagccctggtatctgcctccggaggagggctccgtccagcgactccaaggatcccttggcctctggcccccctgacagcatggctgcctcgccctccccaaagaaagatgtgctgagtctctccggtttatcctctgacccagcagacctggacccctgagtcctgccccacttt

SEQ ID NO: 2770 - DNA, 7120 bp, Homo sapiens
  source 1..7120: mol_type = unassigned DNA
atggacgaggaggaggatggagcgggcgccgaggagtcgggacagccccggagcttcatgcggctcaacgacctgtcgggggccgggggccggccggggccggggtcagcagaaaaggacccgggcagcgcggactccgaggcggaggggctgccgtacccggcgctggccccggtggttttcttctacttgagccaggacagccgcccgcggagctggtgtctccgcacggtctgtaacccctggtttgagcgcatcagcatgttggtcatccttctcaactgcgtgaccctgggcatgttccggccatgcgaggacatcgcctgtgactcccagcgctgccggatcctgcaggcctttgatgacttcatctttgccttctttgccgtggagatggtggtgaagatggtggccttgggcatctttgggaaaaagtgttacctgggagacacttggaaccggcttgactttttcatcgtcatcgcagggatgctggagtactcgctggacctgcagaacgtcagcttctcagctgtcaggacagtccgtgtgctgcgaccgctcagggccattaaccgggtgcccagcatgcgcatccttgtcacgttgctgctggatacgctgcccatgctgggcaacgtcctgctgctctgcttcttcgtcttcttcatcttcggcatcgtcggcgtccagctgtgggcagggctgcttcggaaccgatgcttcctacctgagaatttcagcctccccctgagcgtggacctggagcgctattaccagacagagaacgaggatgagagccccttcatctgctcccagccacgcgagaacggcatgcggtcctgcagaagcgtgcccacgctgcgcggggacgggggcggtggcccaccttgcggtctggactatgaggcctacaacagctccagcaacaccacctgtgtcaactggaaccagtactacaccaactgctcagcgggggagcacaaccccttcaagggcgccatcaactttgacaacattggctatgcctggatcgccatcttccaggtcatcacgctggagggctgggtcgacatcatgtactttgtgatggatgctcattccttctacaatttcatctacttcatcctcctcatcatcgtgggctccttcttcatgatcaacctgtgcctggtggtgattgccacgcagttctcagagaccaagcagcgggaaagccagctgatgcgggagcagcgtgtgcggttcctgtccaacgccagcaccctggctagcttctctgagcccggcagctgctatgaggagctgctcaagtacctggtgtacatccttcgtaaggcagcccgcaggctggctcaggtctctcgggcagcaggtgtgcgggttgggctgctcagcagcccagcacccctcgggggccaggagacccagcccagcagcagctgctctcgctcccaccgccgcctatccgtccaccacctggtgcaccaccaccaccaccatcaccaccactaccacctgggcaatgggacgctcagggccccccgggccagcccggagatccaggacagggatgccaatgggtcccgccggctcatgctgccaccaccctcgacgcctgccctctccggggccccccctggtggcgcagagtctgtgcacagcttctaccatgccgactgccacttagagccagtccgctgccaggcgccccctcccaggtccccatctgaggcatccggcaggactgtgggcagcgggaaggtgtatcccaccgtgcacaccagccctccaccggagacgctgaaggagaaggcactagtagaggtggctgccagctctgggcccccaaccctcaccagcctcaacatcccacccgggccctacagctccatgcacaagctgctggagacacagagtacaggtgcctgccaaagctcttgcaagatctccagcccttgcttgaaagcagacagtggagcctgtggtccagacagctgcccctactgtgcccgggccggggcaggggaggtggagctcgccgaccgtgaaatgcctgactcagacagcgaggcagtttatgagttcacacaggatgcccagcacagcgacctccgggacccccacagccggcggcaacggagcctgggcccagatgcagagcccagctctgtgctggccttctggaggctaatctgtgacaccttccgaaagattgtggacagcaagtactttggccggggaatcatgatcgccatcctggtcaacacactcagcatgggcatcgaataccacgagcagcccgaggagcttaccaacgccctagaaatcagcaacatcgtcttcaccagcctctttgccctggagatgctgctgaagctgcttgtgtatggtccctttggctacatcaagaatccctacaacatcttcgatggtgtcattgtggtcatcagcgtgtgggagatcgtgggccagcaggggggcggcctgtcggtgctgcggaccttccgcctgatgcgtgtgctgaagctggtgcgcttcctgccggcgctgcagcggcagctggtggtgctcatgaagaccatggacaacgtggccaccttctgcatgctgcttatgctcttcatcttcatcttcagcatcctgggcatgcatctcttcggctgcaagtttgcctctgagcgggatggggacaccctgccagaccggaagaattttgactccttgctctgggccatcgtcactgtctttcagatcctgacccaggaggactggaacaaagtcctctacaatggtatggcctccacgtcgtcctgggcggccctttatttcattgccctcatgaccttcggcaactacgtgctcttcaatttgctggtcgccattctggtggagggcttccaggcggaggaaatcagcaaacgggaagatgcgagtggacagttaagctgtattcagctgcctgtcgactcccaggggggagatgccaacaagtccgaatcagagcccgatttcttctcacccagcctggatggtgatggggacaggaagaagtgcttggccttggtgtccctgggagagcacccggagctgcggaagagcctgctgccgcctctcatcatccacacggccgccacacccatgtcgctgcccaagagcaccagcacgggcctgggcgaggcgctgggccctgcgtcgcgccgcaccagcagcagcgggtcggcagagcctggggcggcccacgagatgaagtcaccgcccagcgcccgcagctctccgcacagcccctggagcgctgcaagcagctggaccagcaggcgctccagccggaacagcctcggccgtgcacccagcctgaagcggagaagcccaagtggagagcggcggtccctgttgtcgggagaaggccaggagagccaggatgaagaggagagctcagaagaggagcgggccagccctgcgggcagtgaccatcgccacagggggtccctggagcgggaggccaagagttcctttgacctgccagacacactgcaggtgccagggctgcatcgcactgccagtggccgagggtctgcttctgagcaccaggactgcaatggcaagtcggcttcagggcgcctggcccgggccctgcggcctgatgaccccccactggatggggatgacgccgatgacgagggcaacctgagcaaaggggaacgggtccgcgcgtggatccgagcccgactccctgcctgctgcctcgagcgagactcctggtcagcctacatcttccctcctcagtccaggttccgcctcctgtgtcaccggatcatcacccacaagatgttcgaccacgtggtccttgtcatcatcttccttaactgcatcaccatcgccatggagcgccccaaaattgacccccacagcgctgaacgcatcttcctgaccctctccaattacatcttcaccgcagtctttctggctgaaatgacagtgaaggtggtggcactgggctggtgcttcggggagcaggcgtacctgcggagcagttggaacgtgctggacgggctgttggtgctcatctccgtcatcgacattctggtgtccatggtctctgacagcggcaccaagatcctgggcatgctgagggtgctgcggctgctgcggaccctgcgcccgctcagggtgatcagccgggcgcaggggctgaagctggtggtggagacgctgatgtcctcactgaaacccatcggcaacattgtagtcatctgctgtgccttcttcatcattttcggcatcttgggggtgcagctcttcaaagggaagtttttcgtgtgccagggcgaggataccaggaacatcaccaataaatcggactgtgccgaggccagttaccggtgggtccggcacaagtacaactttgacaaccttggccaggccctgatgtccctgttcgttttggcctccaaggatggttgggtggacatcatgtacgatgggctggatgctgtgggcgtggaccagcagcccatcatgaaccacaacccctggatgctgctgtacttcatctcgttcctgctcattgtggccttctttgtcctgaacatgtttgtgggtgtggtggtggagaacttccacaagtgtcggcagcaccaggaggaagaggaggcccggcggcgggaggagaagcgcctacgaagactggagaaaaagagaaggaaagcccagtgcaaaccttactactccgactactcccgcttccggctcctcgtccaccacttgtgcaccagccactacctggacctcttcatcacaggtgtcatcgggctgaacgtggtcaccatggccatggagcactaccagcagccccagattctggatgaggctctgaagatctgcaactacatcttcactgtcatctttgtcttggagtcagttttcaaacttgtggcctttggtttccgtcggttcttccaggacaggtggaaccagctggacctggccattgtgctgctgtccatcatgggcatcacgctggaggaaatcgaggtcaacgcctcgctgcccatcaaccccaccatcatccgcatcatgagggtgctgcgcattgcccgagtgctgaagctgctgaagatggctgtgggcatgcgggcgctgctggacacggtgatgcaggccctgccccaggtggggaacctgggacttctcttcatgttgttgtttttcatctttgcagctctgggcgtggagctctttggagacctggagtgtgacgagacacacccctgtgagggcctgggccgtcatgccacctttcggaactttggcatggccttcctaaccctcttccgagtctccacaggtgacaattggaatggcattatgaaggacaccctccgggactgtgaccaggagtccacctgctacaacacggtcatctcgcctatctactttgtgtccttcgtgctgacggcccagttcgtgctagtcaacgtggtgatcgccgtgctgatgaagcacctggaggagagcaacaaggaggccaaggaggaggccgagctagaggctgagctggagctggagatgaagaccctcagcccccagccccactcgccactgggcagccccttcctctggcctggggtcgagggccccgacagccccgacagccccaagcctggggctctgcacccagcggcccacgcgagatcagcctcccacttttccctggagcaccccacgatgcagccccaccccacggagctgccaggaccagacttactgactgtgcggaagtctggggtcagccgaacgcactctctgcccaatgacagctacatgtgtcggcatgggagcactgccgaggggcccctgggacacaggggctgggggctccccaaagctcagtcaggctccgtcttgtccgttcactcccagccagcagataccagctacatcctgcagcttcccaaagatgcacctcatctgctccagccccacagcgccccaacctggggcaccatccccaaactgcccccaccaggacgctcccctttggctcagaggccactcaggcgccaggcagcaataaggactgactccttggacgttcagggtctgggcagccgggaagacctgctggcagaggtgagtgggccctccccgcccctggcccgggcctactctttctggggccagtcaagtacccaggcacagcagcactcccgcagccacagcaagatctccaagcacatgaccccgccagccccttgcccaggcccagaacccaactggggcaagggccctccagagaccagaagcagcttagagttggacacggagctgagctggatttcaggagacctcctgccccctggcggccaggaggagcccccatccccacgggacctgaagaagtgctacagcgtggaggcccagagctgccagcgccggcctacgtcctggctggatgagcagaggagacactctatcgccgtcagctgcctggacagcggctcccaaccccacctgggcacagacccctctaaccttgggggccagcctcttggggggcctgggagccggcccaagaaaaaactcagcccgcctagtatcaccatagacccccccgagagccaaggtcctcggaccccgcccagccctggtatctgcctccggaggagggctccgtccagcgactccaaggatcccttggcctctggcccccctgacagcatggctgcctcgccctccccaaagaaagatgtgctgagtctctccggtttatcctctgacccagcagacctggacccctgagtcctgccccactttcccactcacctttctccactgggtgccaagtcctagctcctcctcctgggctatattcctgacaaaagttccatatagacaccaaggaggcggaggcgctcctccctgcctcagtggctctgggtacctgcaagcagaacttccaaagagagttaaaagcagcagccccggcaactctggctccaggcagaaggagaggcccggtgcagctgaggttcccgacaccagaagctgttgggagaaagcaatacgtttgtgcagaatctctatgtatattctattttattaaattaattgaatctag

SEQ ID NO: 2771 - DNA, 7648 bp, Homo sapiens
  source 1..7648: mol_type = unassigned DNA
atggacgaggaggaggatggagcgggcgccgaggagtcgggacagccccggagcttcatgcggctcaacgacctgtcgggggccgggggccggccggggccggggtcagcagaaaaggacccgggcagcgcggactccgaggcggaggggctgccgtacccggcgctggccccggtggttttcttctacttgagccaggacagccgcccgcggagctggtgtctccgcacggtctgtaacccctggtttgagcgcatcagcatgttggtcatccttctcaactgcgtgaccctgggcatgttccggccatgcgaggacatcgcctgtgactcccagcgctgccggatcctgcaggcctttgatgacttcatctttgccttctttgccgtggagatggtggtgaagatggtggccttgggcatctttgggaaaaagtgttacctgggagacacttggaaccggcttgactttttcatcgtcatcgcagggatgctggagtactcgctggacctgcagaacgtcagcttctcagctgtcaggacagtccgtgtgctgcgaccgctcagggccattaaccgggtgcccagcatgcgcatccttgtcacgttgctgctggatacgctgcccatgctgggcaacgtcctgctgctctgcttcttcgtcttcttcatcttcggcatcgtcggcgtccagctgtgggcagggctgcttcggaaccgatgcttcctacctgagaatttcagcctccccctgagcgtggacctggagcgctattaccagacagagaacgaggatgagagccccttcatctgctcccagccacgcgagaacggcatgcggtcctgcagaagcgtgcccacgctgcgcggggacgggggcggtggcccaccttgcggtctggactatgaggcctacaacagctccagcaacaccacctgtgtcaactggaaccagtactacaccaactgctcagcgggggagcacaaccccttcaagggcgccatcaactttgacaacattggctatgcctggatcgccatcttccaggtcatcacgctggagggctgggtcgacatcatgtactttgtgatggatgctcattccttctacaatttcatctacttcatcctcctcatcatcgtgggctccttcttcatgatcaacctgtgcctggtggtgattgccacgcagttctcagagaccaagcagcgggaaagccagctgatgcgggagcagcgtgtgcggttcctgtccaacgccagcaccctggctagcttctctgagcccggcagctgctatgaggagctgctcaagtacctggtgtacatccttcgtaaggcagcccgcaggctggctcaggtctctcgggcagcaggtgtgcgggttgggctgctcagcagcccagcacccctcgggggccaggagacccagcccagcagcagctgctctcgctcccaccgccgcctatccgtccaccacctggtgcaccaccaccaccaccatcaccaccactaccacctgggcaatgggacgctcagggccccccgggccagcccggagatccaggacagggatgccaatgggtcccgccggctcatgctgccaccaccctcgacgcctgccctctccggggccccccctggtggcgcagagtctgtgcacagcttctaccatgccgactgccacttagagccagtccgctgccaggcgccccctcccaggtccccatctgaggcatccggcaggactgtgggcagcgggaaggtgtatcccaccgtgcacaccagccctccaccggagacgctgaaggagaaggcactagtagaggtggctgccagctctgggcccccaaccctcaccagcctcaacatcccacccgggccctacagctccatgcacaagctgctggagacacagagtacaggtgcctgccaaagctcttgcaagatctccagcccttgcttgaaagcagacagtggagcctgtggtccagacagctgcccctactgtgcccgggccggggcaggggaggtggagctcgccgaccgtgaaatgcctgactcagacagcgaggcagtttatgagttcacacaggatgcccagcacagcgacctccgggacccccacagccggcggcaacggagcctgggcccagatgcagagcccagctctgtgctggccttctggaggctaatctgtgacaccttccgaaagattgtggacagcaagtactttggccggggaatcatgatcgccatcctggtcaacacactcagcatgggcatcgaataccacgagcagcccgaggagcttaccaacgccctagaaatcagcaacatcgtcttcaccagcctctttgccctggagatgctgctgaagctgcttgtgtatggtccctttggctacatcaagaatccctacaacatcttcgatggtgtcattgtggtcatcagcgtgtgggagatcgtgggccagcaggggggcggcctgtcggtgctgcggaccttccgcctgatgcgtgtgctgaagctggtgcgcttcctgccggcgctgcagcggcagctggtggtgctcatgaagaccatggacaacgtggccaccttctgcatgctgcttatgctcttcatcttcatcttcagcatcctgggcatgcatctcttcggctgcaagtttgcctctgagcgggatggggacaccctgccagaccggaagaattttgactccttgctctgggccatcgtcactgtctttcagatcctgacccaggaggactggaacaaagtcctctacaatggtatggcctccacgtcgtcctgggcggccctttatttcattgccctcatgaccttcggcaactacgtgctcttcaatttgctggtcgccattctggtggagggcttccaggcggaggaaatcagcaaacgggaagatgcgagtggacagttaagctgtattcagctgcctgtcgactcccaggggggagatgccaacaagtccgaatcagagcccgatttcttctcacccagcctggatggtgatggggacaggaagaagtgcttggccttggtgtccctgggagagcacccggagctgcggaagagcctgctgccgcctctcatcatccacacggccgccacacccatgtcgctgcccaagagcaccagcacgggcctgggcgaggcgctgggccctgcgtcgcgccgcaccagcagcagcgggtcggcagagcctggggcggcccacgagatgaagtcaccgcccagcgcccgcagctctccgcacagcccctggagcgctgcaagcagctggaccagcaggcgctccagccggaacagcctcggccgtgcacccagcctgaagcggagaagcccaagtggagagcggcggtccctgttgtcgggagaaggccaggagagccaggatgaagaggagagctcagaagaggagcgggccagccctgcgggcagtgaccatcgccacagggggtccctggagcgggaggccaagagttcctttgacctgccagacacactgcaggtgccagggctgcatcgcactgccagtggccgagggtctgcttctgagcaccaggactgcaatggcaagtcggcttcagggcgcctggcccgggccctgcggcctgatgaccccccactggatggggatgacgccgatgacgagggcaacctgagcaaaggggaacgggtccgcgcgtggatccgagcccgactccctgcctgctgcctcgagcgagactcctggtcagcctacatcttccctcctcagtccaggttccgcctcctgtgtcaccggatcatcacccacaagatgttcgaccacgtggtccttgtcatcatcttccttaactgcatcaccatcgccatggagcgccccaaaattgacccccacagcgctgaacgcatcttcctgaccctctccaattacatcttcaccgcagtctttctggctgaaatgacagtgaaggtggtggcactgggctggtgcttcggggagcaggcgtacctgcggagcagttggaacgtgctggacgggctgttggtgctcatctccgtcatcgacattctggtgtccatggtctctgacagcggcaccaagatcctgggcatgctgagggtgctgcggctgctgcggaccctgcgcccgctcagggtgatcagccgggcgcaggggctgaagctggtggtggagacgctgatgtcctcactgaaacccatcggcaacattgtagtcatctgctgtgccttcttcatcattttcggcatcttgggggtgcagctcttcaaagggaagtttttcgtgtgccagggcgaggataccaggaacatcaccaataaatcggactgtgccgaggccagttaccggtgggtccggcacaagtacaactttgacaaccttggccaggccctgatgtccctgttcgttttggcctccaaggatggttgggtggacatcatgtacgatgggctggatgctgtgggcgtggaccagcagcccatcatgaaccacaacccctggatgctgctgtacttcatctcgttcctgctcattgtggccttctttgtcctgaacatgtttgtgggtgtggtggtggagaacttccacaagtgtcggcagcaccaggaggaagaggaggcccggcggcgggaggagaagcgcctacgaagactggagaaaaagagaaggaatctaatgctggacgatgtaattgcttccggcagctcagccagcgctgcgtcagaagcccagtgcaaaccttactactccgactactcccgcttccggctcctcgtccaccacttgtgcaccagccactacctggacctcttcatcacaggtgtcatcgggctgaacgtggtcaccatggccatggagcactaccagcagccccagattctggatgaggctctgaagatctgcaactacatcttcactgtcatctttgtcttggagtcagttttcaaacttgtggcctttggtttccgtcggttcttccaggacaggtggaaccagctggacctggccattgtgctgctgtccatcatgggcatcacgctggaggaaatcgaggtcaacgcctcgctgcccatcaaccccaccatcatccgcatcatgagggtgctgcgcattgcccgagtgctgaagctgctgaagatggctgtgggcatgcgggcgctgctggacacggtgatgcaggccctgccccaggtggggaacctgggacttctcttcatgttgttgtttttcatctttgcagctctgggcgtggagctctttggagacctggagtgtgacgagacacacccctgtgagggcctgggccgtcatgccacctttcggaactttggcatggccttcctaaccctcttccgagtctccacaggtgacaattggaatggcattatgaaggacaccctccgggactgtgaccaggagtccacctgctacaacacggtcatctcgcctatctactttgtgtccttcgtgctgacggcccagttcgtgctagtcaacgtggtgatcgccgtgctgatgaagcacctggaggagagcaacaaggaggccaaggaggaggccgagctagaggctgagctggagctggagatgaagaccctcagcccccagccccactcgccactgggcagccccttcctctggcctggggtcgagggccccgacagccccgacagccccaagcctggggctctgcacccagcggcccacgcgagatcagcctcccacttttccctggagcaccccacggacaggcagctgtttgacaccatatccctgctgatccagggctccctggagtgggagctgaagctgatggacgagctggcaggcccagggggccagccctctgccttcccttctgcccccagcctgggaggctccgacccacagatccctctagctgagatggaggctctgtctctgacgtcagagattgtgtctgaaccgtcctgctctctagctctgacggatgactctttgcctgatgacatgcacacactcttacttagtgccctggagagcaatatgcagccccaccccacggagctgccaggaccagacttactgactgtgcggaagtctggggtcagccgaacgcactctctgcccaatgacagctacatgtgtcggcatgggagcactgccgaggggcccctgggacacaggggctgggggctccccaaagctcagtcaggctccgtcttgtccgttcactcccagccagcagataccagctacatcctgcagcttcccaaagatgcacctcatctgctccagccccacagcgccccaacctggggcaccatccccaaactgcccccaccaggacgctcccctttggctcagaggccactcaggcgccaggcagcaataaggactgactccttggacgttcagggtctgggcagccgggaagacctgctggcagaggtgagtgggccctccccgcccctggcccgggcctactctttctggggccagtcaagtacccaggcacagcagcactcccgcagccacagcaagatctccaagcacatgaccccgccagccccttgcccaggcccagaacccaactggggcaagggccctccagagaccagaagcagcttagagttggacacggagctgagctggatttcaggagacctcctgccccctggcggccaggaggagcccccatccccacgggacctgaagaagtgctacagcgtggaggcccagagctgccagcgccggcctacgtcctggctggatgagcagaggagacactctatcgccgtcagctgcctggacagcggctcccaaccccacctgggcacagacccctctaaccttgggggccagcctcttggggggcctgggagccggcccaagaaaaaactcagcccgcctagtatcaccatagacccccccgagagccaaggtcctcggaccccgcccagccctggtatctgcctccggaggagggctccgtccagcgactccaaggatcccttggcctctggcccccctgacagcatggctgcctcgccctccccaaagaaagatgtgctgagtctctccggtttatcctctgacccagcagacctggacccctgagtcctgccccactttcccactcacctttctccactgggtgccaagtcctagctcctcctcctgggctatattcctgacaaaagttccatatagacaccaaggaggcggaggcgctcctccctgcctcagtggctctgggtacctgcaagcagaacttccaaagagagttaaaagcagcagccccggcaactctggctccaggcagaaggagaggcccggtgcagctgaggttcccgacaccagaagctgttgggagaaagcaatacgtttgtgcagaatctctatgtatattctattttattaaattaattgaatctagtatatgcgggatgtacgacattttgtgactgaagagacttgtttccttctacttttatgtgtctcagaatatttttgaggcgaaggcgtctgtctcttggctattttaacctaaaataacagtctagttatattccctcttcttgcaaagcacaagctgggaccgcgagcacattgcagccccaacggtggccca

SEQ ID NO: 2772 - DNA, 7030 bp, Homo sapiens
  source 1..7030: mol_type = unassigned DNA
atggacgaggaggaggatggagcgggcgccgaggagtcgggacagccccggagcttcatgcggctcaacgacctgtcgggggccgggggccggccggggccggggtcagcagaaaaggacccgggcagcgcggactccgaggcggaggggctgccgtacccggcgctggccccggtggttttcttctacttgagccaggacagccgcccgcggagctggtgtctccgcacggtctgtaacccctggtttgagcgcatcagcatgttggtcatccttctcaactgcgtgaccctgggcatgttccggccatgcgaggacatcgcctgtgactcccagcgctgccggatcctgcaggcctttgatgacttcatctttgccttctttgccgtggagatggtggtgaagatggtggccttgggcatctttgggaaaaagtgttacctgggagacacttggaaccggcttgactttttcatcgtcatcgcagggatgctggagtactcgctggacctgcagaacgtcagcttctcagctgtcaggacagtccgtgtgctgcgaccgctcagggccattaaccgggtgcccagcatgcgcatccttgtcacgttgctgctggatacgctgcccatgctgggcaacgtcctgctgctctgcttcttcgtcttcttcatcttcggcatcgtcggcgtccagctgtgggcagggctgcttcggaaccgatgcttcctacctgagaatttcagcctccccctgagcgtggacctggagcgctattaccagacagagaacgaggatgagagccccttcatctgctcccagccacgcgagaacggcatgcggtcctgcagaagcgtgcccacgctgcgcggggacgggggcggtggcccaccttgcggtctggactatgaggcctacaacagctccagcaacaccacctgtgtcaactggaaccagtactacaccaactgctcagcgggggagcacaaccccttcaagggcgccatcaactttgacaacattggctatgcctggatcgccatcttccaggtcatcacgctggagggctgggtcgacatcatgtactttgtgatggatgctcattccttctacaatttcatctacttcatcctcctcatcatcgtgggctccttcttcatgatcaacctgtgcctggtggtgattgccacgcagttctcagagaccaagcagcgggaaagccagctgatgcgggagcagcgtgtgcggttcctgtccaacgccagcaccctggctagcttctctgagcccggcagctgctatgaggagctgctcaagtacctggtgtacatccttcgtaaggcagcccgcaggctggctcaggtctctcgggcagcaggtgtgcgggttgggctgctcagcagcccagcacccctcgggggccaggagacccagcccagcagcagctgctctcgctcccaccgccgcctatccgtccaccacctggtgcaccaccaccaccaccatcaccaccactaccacctgggcaatgggacgctcagggccccccgggccagcccggagatccaggacagggatgccaatgggtcccgccggctcatgctgccaccaccctcgacgcctgccctctccggggccccccctggtggcgcagagtctgtgcacagcttctaccatgccgactgccacttagagccagtccgctgccaggcgccccctcccaggtccccatctgaggcatccggcaggactgtgggcagcgggaaggtgtatcccaccgtgcacaccagccctccaccggagacgctgaaggagaaggcactagtagaggtggctgccagctctgggcccccaaccctcaccagcctcaacatcccacccgggccctacagctccatgcacaagctgctggagacacagagtacaggtgcctgccaaagctcttgcaagatctccagcccttgcttgaaagcagacagtggagcctgtggtccagacagctgcccctactgtgcccgggccggggcaggggaggtggagctcgccgaccgtgaaatgcctgactcagacagcgaggcagtttatgagttcacacaggatgcccagcacagcgacctccgggacccccacagccggcggcaacggagcctgggcccagatgcagagcccagctctgtgctggccttctggaggctaatctgtgacaccttccgaaagattgtggacagcaagtactttggccggggaatcatgatcgccatcctggtcaacacactcagcatgggcatcgaataccacgagcagcccgaggagcttaccaacgccctagaaatcagcaacatcgtcttcaccagcctctttgccctggagatgctgctgaagctgcttgtgtatggtccctttggctacatcaagaatccctacaacatcttcgatggtgtcattgtggtcatcagcgtgtgggagatcgtgggccagcaggggggcggcctgtcggtgctgcggaccttccgcctgatgcgtgtgctgaagctggtgcgcttcctgccggcgctgcagcggcagctggtggtgctcatgaagaccatggacaacgtggccaccttctgcatgctgcttatgctcttcatcttcatcttcagcatcctgggcatgcatctcttcggctgcaagtttgcctctgagcgggatggggacaccctgccagaccggaagaattttgactccttgctctgggccatcgtcactgtctttcagatcctgacccaggaggactggaacaaagtcctctacaatggtatggcctccacgtcgtcctgggcggccctttatttcattgccctcatgaccttcggcaactacgtgctcttcaatttgctggtcgccattctggtggagggcttccaggcggagggagatgccaacaagtccgaatcagagcccgatttcttctcacccagcctggatggtgatggggacaggaagaagtgcttggccttggtgtccctgggagagcacccggagctgcggaagagcctgctgccgcctctcatcatccacacggccgccacacccatgtcgctgcccaagagcaccagcacgggcctgggcgaggcgctgggccctgcgtcgcgccgcaccagcagcagcgggtcggcagagcctggggcggcccacgagatgaagtcaccgcccagcgcccgcagctctccgcacagcccctggagcgctgcaagcagctggaccagcaggcgctccagccggaacagcctcggccgtgcacccagcctgaagcggagaagcccaagtggagagcggcggtccctgttgtcgggagaaggccaggagagccaggatgaagaggagagctcagaagaggagcgggccagccctgcgggcagtgaccatcgccacagggggtccctggagcgggaggccaagagttcctttgacctgccagacacactgcaggtgccagggctgcatcgcactgccagtggccgagggtctgcttctgagcaccaggactgcaatggcaagtcggcttcagggcgcctggcccgggccctgcggcctgatgaccccccactggatggggatgacgccgatgacgagggcaacctgagcaaaggggaacgggtccgcgcgtggatccgagcccgactccctgcctgctgcctcgagcgagactcctggtcagcctacatcttccctcctcagtccaggttccgcctcctgtgtcaccggatcatcacccacaagatgttcgaccacgtggtccttgtcatcatcttccttaactgcatcaccatcgccatggagcgccccaaaattgacccccacagcgctgaacgcatcttcctgaccctctccaattacatcttcaccgcagtctttctggctgaaatgacagtgaaggtggtggcactgggctggtgcttcggggagcaggcgtacctgcggagcagttggaacgtgctggacgggctgttggtgctcatctccgtcatcgacattctggtgtccatggtctctgacagcggcaccaagatcctgggcatgctgagggtgctgcggctgctgcggaccctgcgcccgctcagggtgatcagccgggcgcaggggctgaagctggtggtggagacgctgatgtcctcactgaaacccatcggcaacattgtagtcatctgctgtgccttcttcatcattttcggcatcttgggggtgcagctcttcaaagggaagtttttcgtgtgccagggcgaggataccaggaacatcaccaataaatcggactgtgccgaggccagttaccggtgggtccggcacaagtacaactttgacaaccttggccaggccctgatgtccctgttcgttttggcctccaaggatggttgggtggacatcatgtacgatgggctggatgctgtgggcgtggaccagcagcccatcatgaaccacaacccctggatgctgctgtacttcatctcgttcctgctcattgtggccttctttgtcctgaacatgtttgtgggtgtggtggtggagaacttccacaagtgtcggcagcaccaggaggaagaggaggcccggcggcgggaggagaagcgcctacgaagactggagaaaaagagaaggagtaaggagaagcagatggctgaagcccagtgcaaaccttactactccgactactcccgcttccggctcctcgtccaccacttgtgcaccagccactacctggacctcttcatcacaggtgtcatcgggctgaacgtggtcaccatggccatggagcactaccagcagccccagattctggatgaggctctgaagatctgcaactacatcttcactgtcatctttgtcttggagtcagttttcaaacttgtggcctttggtttccgtcggttcttccaggacaggtggaaccagctggacctggccattgtgctgctgtccatcatgggcatcacgctggaggaaatcgaggtcaacgcctcgctgcccatcaaccccaccatcatccgcatcatgagggtgctgcgcattgcccgagtgctgaagctgctgaagatggctgtgggcatgcgggcgctgctggacacggtgatgcaggccctgccccaggtggggaacctgggacttctcttcatgttgttgtttttcatctttgcagctctgggcgtggagctctttggagacctggagtgtgacgagacacacccctgtgagggcctgggccgtcatgccacctttcggaactttggcatggccttcctaaccctcttccgagtctccacaggtgacaattggaatggcattatgaaggacaccctccgggactgtgaccaggagtccacctgctacaacacggtcatctcgcctatctactttgtgtccttcgtgctgacggcccagttcgtgctagtcaacgtggtgatcgccgtgctgatgaagcacctggaggagagcaacaaggaggccaaggaggaggccgagctagaggctgagctggagctggagatgaagaccctcagcccccagccccactcgccactgggcagccccttcctctggcctggggtcgagggccccgacagccccgacagccccaagcctggggctctgcacccagcggcccacgcgagatcagcctcccacttttccctggagcaccccacgatgcagccccaccccacggagctgccaggaccagacttactgactgtgcggaagtctggggtcagccgaacgcactctctgcccaatgacagctacatgtgtcggcatgggagcactgccgaggggcccctgggacacaggggctgggggctccccaaagctcagtcaggctccgtcttgtccgttcactcccagccagcagataccagctacatcctgcagcttcccaaagatgcacctcatctgctccagccccacagcgccccaacctggggcaccatccccaaactgcccccaccaggacgctcccctttggctcagaggccactcaggcgccaggcagcaataaggactgactccttggacgttcagggtctgggcagccgggaagacctgctggcagaggaggagcccccatccccacgggacctgaagaagtgctacagcgtggaggcccagagctgccagcgccggcctacgtcctggctggatgagcagaggagacactctatcgccgtcagctgcctggacagcggctcccaaccccacctgggcacagacccctctaaccttgggggccagcctcttggggggcctgggagccggcccaagaaaaaactcagcccgcctagtatcaccatagacccccccgagagccaaggtcctcggaccccgcccagccctggtatctgcctccggaggagggctccgtccagcgactccaaggatcccttggcctctggcccccctgacagcatggctgcctcgccctccccaaagaaagatgtgctgagtctctccggtttatcctctgacccagcagacctggacccctgagtcctgccccactttcccactcacctttctccactgggtgccaagtcctagctcctcctcctgggctatattcctgacaaaagttccatatagacaccaaggaggcggaggcgctcctccctgcctcagtggctctgggtacctgcaagcagaacttccaaagagagttaaaagcagcagccccggcaactctggctccaggcagaaggagaggcccggtgcagctgaggttcccgacaccagaagctgttgggagaaagcaatacgtttgtgcagaatctctatgtatattctattttattaaattaattgaatctagtatatgcgggatgtacgacattttgtgactgaagagacttgtttccttctacttttatgtgtctcagaatatttttgaggcgaaggcgtctgtctcttggctattttaacctaaaataacagtctagttatattccctcttcttgcaaagcacaagctgggaccgcgagcacattgcagccccaacggtggccca

SEQ ID NO: 2773 - DNA, 1255 bp, Homo sapiens
  source 1..1255: mol_type = unassigned DNA
gcctttgatgacttcatctttgccttctttgccgtggagatggtggtgaagatggtggccttgggcatctttgggaaaaagtgttacctgggagacacttggaaccggcttgactttttcatcgtcatcgcagggatgctggagtactcgctggacctgcagaacgtcagcttctcagctgtcaggacagtccgtgtgctgcgaccgctcagggccattaaccgggtgcccagcatgcgcatccttgtcacgttgctgctggatacgctgcccatgctgggcaacgtcctgctgctctgcttcttcgtcttcttcatcttcggcatcgtcggcgtccagctgtgggcagggctgcttcggaaccgatgcttcctacctgagaatttcagcctccccctgagcgtggacctggagcgctattaccagacagagaacgaggatgagagccccttcatctgctcccagccacgcgagaacggcatgcggtcctgcagaagcgtgcccacgctgcgcggggacgggggcggtggcccaccttgcggtctggactatgaggcctacaacagctccagcaacaccacctgtgtcaactggaaccagtactacaccaactgctcagcgggggagcacaaccccttcaagggcgccatcaactttgacaacattggctatgcctggatcgccatcttccaggtcatcacgctggagggctgggtcgacatcatgtactttgtgatggatgctcattccttctacaatttcatctacttcatcctcctcatcatctttttagctctcaggacaagtcctgtagagagggcatccatcatatagtaggagggacaccagatgcagagtcaggaggaaatccaaggtcaaggcgggacttaactgctattgggaccttgggcaagtcattctccatgaggcctccagcactgctctgggcctctgtttcttcatgggtaaaatgaatggttctcaacctgagatgataccacctctcccagagggcatttggaaatgggaaagggtgattctggttttgattttttttaatagctttattgagacataactcacatatcattcaattcatccctttgaatgaatccagtggttttttaagcatgtttacagagttctgtttttttgtaaggacaaggggagtgcaattggcaatttgttactgggggaggggagagaagctaaacatcctgaaatgcttgcaaataaagaattattctacccaaaa

SEQ ID NO: 2774 - DNA, 1478 bp, Homo sapiens
  source 1..1478: mol_type = unassigned DNA
actgccagtggccgagggtctgcttctgagcaccaggactgcaatggcaagtcggcttcagggcgcctggcccgggccctgcggcctgatgaccccccactggatggggatgacgccgatgacgagggcaacctgagcaaaggggaacgggtccgcgcgtggatccgagcccgactccctgcctgctgcctcgagcgagactcctggtcagcctacatcttccctcctcagtccaggttccgcctcctgtgtcaccggatcatcacccacaagatgttcgaccacgtggtccttgtcatcatcttccttaactgcatcaccatcgccatggagcgccccaaaattgacccccacagcgctgaacgcatcttcctgaccctctccaattacatcttcaccgcagtctttctggctgaaatgacagtgaaggtggtggcactgggctggtgcttcggggagcaggcgtacctgcggagcagttggaacgtgctggacgggctgttggtgctcatctccgtcatcgacattctggtgtccatggtctctgacagcggcaccaagatcctgggcatgctgagggtgctgcggctgctgcggaccctgcgcccgctcagggtgatcagccgggcgcaggggctgaagctggtggtggagacgctgatgtcctcactgaaacccatcggcaacattgtagtcatctgctgtgccttcttcatcattttcggcatcttgggggtgcagctcttcaaagggaagtttttcgtgtgccagggcgaggataccaggaacatcaccaataaatcggactgtgccgaggccagttaccggtgggtccggcacaagtacaactttgacaaccttggccaggccctgatgtccctgttcgttttggcctccaaggatggttgggtggacatcatgtacgatgggctggatgctgtgggcgtggaccagcaggtagggctgaggtgggcaggatccatctgtgggctcaggtcactcagcatgggctgattccaggacagaaagagcaaggcagggtggcaaaatgccatgaaagaagcatcatattttacagcagaggctgttgctggtagcctgtgggccaaatctgggcatgttttattggtctacaacatgtttaacatgttttgaattagtgatgaatatttttaaactggtgaatttgggctgtgtgcagtggctcacacctgtaatgccagtgcattgggaggcctaggcaagaggatcacttgaggccaggagttggagaccagcctgggcatcatagcaagacccccagctctacaaaaaataaaaacaattagccgggtgtggtggtatcatctggagtcccagctgaggtgggaggatctcttgagcccaggagtttgaggctgcaataagctgtgatcgcaccactgcactccagcctaagcaatagaacaagaccctgtctctaaaaaaagaaaaaataa

SEQ ID NO: 2775 - DNA, 8138 bp, Homo sapiens
  source 1..8138: mol_type = unassigned DNA
ccgccctccgccgctgccccccttttcgttcgccctctcggggcggcttcgccgaaggtagcgccgaatccggcaaccggagcctgggcgcgaagcgaagaagccggaacaaagtgagggggagccggccggctggcccgggaagccccaggggcgcaggggaagcgggactcgcgccgggcggggtttccctgcgccccggcgccccgcgggcagcatgcccctgcgggcagggggagctgggctgaactggccctcccgggggctcagcttgcgccctagagcccaccagatgtgcccccgccggggcccccgggttgcgtgaggacacctcctctgaggggcgccgcttgcccctctccggatcgcccggggccccggctggccagaggatggacgaggaggaggatggagcgggcgccgaggagtcgggacagccccggagcttcatgcggctcaacgacctgtcgggggccgggggccggccggggccggggtcagcagaaaaggacccgggcagcgcggactccgaggcggaggggctgccgtacccggcgctggccccggtggttttcttctacttgagccaggacagccgcccgcggagctggtgtctccgcacggtctgtaacccctggtttgagcgcatcagcatgttggtcatccttctcaactgcgtgaccctgggcatgttccggccatgcgaggacatcgcctgtgactcccagcgctgccggatcctgcaggcctttgatgacttcatctttgccttctttgccgtggagatggtggtgaagatggtggccttgggcatctttgggaaaaagtgttacctgggagacacttggaaccggcttgactttttcatcgtcatcgcagggatgctggagtactcgctggacctgcagaacgtcagcttctcagctgtcaggacagtccgtgtgctgcgaccgctcagggccattaaccgggtgcccagcatgcgcatccttgtcacgttgctgctggatacgctgcccatgctgggcaacgtcctgctgctctgcttcttcgtcttcttcatcttcggcatcgtcggcgtccagctgtgggcagggctgcttcggaaccgatgcttcctacctgagaatttcagcctccccctgagcgtggacctggagcgctattaccagacagagaacgaggatgagagccccttcatctgctcccagccacgcgagaacggcatgcggtcctgcagaagcgtgcccacgctgcgcggggacgggggcggtggcccaccttgcggtctggactatgaggcctacaacagctccagcaacaccacctgtgtcaactggaaccagtactacaccaactgctcagcgggggagcacaaccccttcaagggcgccatcaactttgacaacattggctatgcctggatcgccatcttccaggtcatcacgctggagggctgggtcgacatcatgtactttgtgatggatgctcattccttctacaatttcatctacttcatcctcctcatcatcgtgggctccttcttcatgatcaacctgtgcctggtggtgattgccacgcagttctcagagaccaagcagcgggaaagccagctgatgcgggagcagcgtgtgcggttcctgtccaacgccagcaccctggctagcttctctgagcccggcagctgctatgaggagctgctcaagtacctggtgtacatccttcgtaaggcagcccgcaggctggctcaggtctctcgggcagcaggtgtgcgggttgggctgctcagcagcccagcacccctcgggggccaggagacccagcccagcagcagctgctctcgctcccaccgccgcctatccgtccaccacctggtgcaccaccaccaccaccatcaccaccactaccacctgggcaatgggacgctcagggccccccgggccagcccggagatccaggacagggatgccaatgggtcccgccggctcatgctgccaccaccctcgacgcctgccctctccggggccccccctggtggcgcagagtctgtgcacagcttctaccatgccgactgccacttagagccagtccgctgccaggcgccccctcccaggtccccatctgaggcatccggcaggactgtgggcagcgggaaggtgtatcccaccgtgcacaccagccctccaccggagacgctgaaggagaaggcactagtagaggtggctgccagctctgggcccccaaccctcaccagcctcaacatcccacccgggccctacagctccatgcacaagctgctggagacacagagtacaggtgcctgccaaagctcttgcaagatctccagcccttgcttgaaagcagacagtggagcctgtggtccagacagctgcccctactgtgcccgggccggggcaggggaggtggagctcgccgaccgtgaaatgcctgactcagacagcgaggcagtttatgagttcacacaggatgcccagcacagcgacctccgggacccccacagccggcggcaacggagcctgggcccagatgcagagcccagctctgtgctggccttctggaggctaatctgtgacaccttccgaaagattgtggacagcaagtactttggccggggaatcatgatcgccatcctggtcaacacactcagcatgggcatcgaataccacgagcagcccgaggagcttaccaacgccctagaaatcagcaacatcgtcttcaccagcctctttgccctggagatgctgctgaagctgcttgtgtatggtccctttggctacatcaagaatccctacaacatcttcgatggtgtcattgtggtcatcagcgtgtgggagatcgtgggccagcaggggggcggcctgtcggtgctgcggaccttccgcctgatgcgtgtgctgaagctggtgcgcttcctgccggcgctgcagcggcagctggtggtgctcatgaagaccatggacaacgtggccaccttctgcatgctgcttatgctcttcatcttcatcttcagcatcctgggcatgcatctcttcggctgcaagtttgcctctgagcgggatggggacaccctgccagaccggaagaattttgactccttgctctgggccatcgtcactgtctttcagatcctgacccaggaggactggaacaaagtcctctacaatggtatggcctccacgtcgtcctgggcggccctttatttcattgccctcatgaccttcggcaactacgtgctcttcaatttgctggtcgccattctggtggagggcttccaggcggagggagatgccaacaagtccgaatcagagcccgatttcttctcacccagcctggatggtgatggggacaggaagaagtgcttggccttggtgtccctgggagagcacccggagctgcggaagagcctgctgccgcctctcatcatccacacggccgccacacccatgtcgctgcccaagagcaccagcacgggcctgggcgaggcgctgggccctgcgtcgcgccgcaccagcagcagcgggtcggcagagcctggggcggcccacgagatgaagtcaccgcccagcgcccgcagctctccgcacagcccctggagcgctgcaagcagctggaccagcaggcgctccagccggaacagcctcggccgtgcacccagcctgaagcggagaagcccaagtggagagcggcggtccctgttgtcgggagaaggccaggagagccaggatgaagaggagagctcagaagaggagcgggccagccctgcgggcagtgaccatcgccacagggggtccctggagcgggaggccaagagttcctttgacctgccagacacactgcaggtgccagggctgcatcgcactgccagtggccgagggtctgcttctgagcaccaggactgcaatggcaagtcggcttcagggcgcctggcccgggccctgcggcctgatgaccccccactggatggggatgacgccgatgacgagggcaacctgagcaaaggggaacgggtccgcgcgtggatccgagcccgactccctgcctgctgcctcgagcgagactcctggtcagcctacatcttccctcctcagtccaggttccgcctcctgtgtcaccggatcatcacccacaagatgttcgaccacgtggtccttgtcatcatcttccttaactgcatcaccatcgccatggagcgccccaaaattgacccccacagcgctgaacgcatcttcctgaccctctccaattacatcttcaccgcagtctttctggctgaaatgacagtgaaggtggtggcactgggctggtgcttcggggagcaggcgtacctgcggagcagttggaacgtgctggacgggctgttggtgctcatctccgtcatcgacattctggtgtccatggtctctgacagcggcaccaagatcctgggcatgctgagggtgctgcggctgctgcggaccctgcgcccgctcagggtgatcagccgggcgcaggggctgaagctggtggtggagacgctgatgtcctcactgaaacccatcggcaacattgtagtcatctgctgtgccttcttcatcattttcggcatcttgggggtgcagctcttcaaagggaagtttttcgtgtgccagggcgaggataccaggaacatcaccaataaatcggactgtgccgaggccagttaccggtgggtccggcacaagtacaactttgacaaccttggccaggccctgatgtccctgttcgttttggcctccaaggatggttgggtggacatcatgtacgatgggctggatgctgtgggcgtggaccagcagcccatcatgaaccacaacccctggatgctgctgtacttcatctcgttcctgctcattgtggccttctttgtcctgaacatgtttgtgggtgtggtggtggagaacttccacaagtgtcggcagcaccaggaggaagaggaggcccggcggcgggaggagaagcgcctacgaagactggagaaaaagagaaggagtaaggagaagcagatggctgaagcccagtgcaaaccttactactccgactactcccgcttccggctcctcgtccaccacttgtgcaccagccactacctggacctcttcatcacaggtgtcatcgggctgaacgtggtcaccatggccatggagcactaccagcagccccagattctggatgaggctctgaagatctgcaactacatcttcactgtcatctttgtcttggagtcagttttcaaacttgtggcctttggtttccgtcggttcttccaggacaggtggaaccagctggacctggccattgtgctgctgtccatcatgggcatcacgctggaggaaatcgaggtcaacgcctcgctgcccatcaaccccaccatcatccgcatcatgagggtgctgcgcattgcccgagtgctgaagctgctgaagatggctgtgggcatgcgggcgctgctggacacggtgatgcaggccctgccccaggtggggaacctgggacttctcttcatgttgttgtttttcatctttgcagctctgggcgtggagctctttggagacctggagtgtgacgagacacacccctgtgagggcctgggccgtcatgccacctttcggaactttggcatggccttcctaaccctcttccgagtctccacaggtgacaattggaatggcattatgaaggacaccctccgggactgtgaccaggagtccacctgctacaacacggtcatctcgcctatctactttgtgtccttcgtgctgacggcccagttcgtgctagtcaacgtggtgatcgccgtgctgatgaagcacctggaggagagcaacaaggaggccaaggaggaggccgagctagaggctgagctggagctggagatgaagaccctcagcccccagccccactcgccactgggcagccccttcctctggcctggggtcgagggccccgacagccccgacagccccaagcctggggctctgcacccagcggcccacgcgagatcagcctcccacttttccctggagcaccccacggacaggcagctgtttgacaccatatccctgctgatccagggctccctggagtgggagctgaagctgatggacgagctggcaggcccagggggccagccctctgccttcccttctgcccccagcctgggaggctccgacccacagatccctctagctgagatggaggctctgtctctgacgtcagagattgtgtctgaaccgtcctgctctctagctctgacggatgactctttgcctgatgacatgcacacactcttacttagtgccctggagagcaatatgcagccccaccccacggagctgccaggaccagacttactgactgtgcggaagtctggggtcagccgaacgcactctctgcccaatgacagctacatgtgtcggcatgggagcactgccgaggggcccctgggacacaggggctgggggctccccaaagctcagtcaggctccgtcttgtccgttcactcccagccagcagataccagctacatcctgcagcttcccaaagatgcacctcatctgctccagccccacagcgccccaacctggggcaccatccccaaactgcccccaccaggacgctcccctttggctcagaggccactcaggcgccaggcagcaataaggactgactccttggacgttcagggtctgggcagccgggaagacctgctggcagaggtgagtgggccctccccgcccctggcccgggcctactctttctggggccagtcaagtacccaggcacagcagcactcccgcagccacagcaagatctccaagcacatgaccccgccagccccttgcccaggcccagaacccaactggggcaagggccctccagagaccagaagcagcttagagttggacacggagctgagctggatttcaggagacctcctgccccctggcggccaggaggagcccccatccccacgggacctgaagaagtgctacagcgtggaggcccagagctgccagcgccggcctacgtcctggctggatgagcagaggagacactctatcgccgtcagctgcctggacagcggctcccaaccccacctgggcacagacccctctaaccttgggggccagcctcttggggggcctgggagccggcccaagaaaaaactcagcccgcctagtatcaccatagacccccccgagagccaaggtcctcggaccccgcccagccctggtatctgcctccggaggagggctccgtccagcgactccaaggatcccttggcctctggcccccctgacagcatggctgcctcgccctccccaaagaaagatgtgctgagtctctccggtttatcctctgacccagcagacctggacccctgagtcctgccccactttcccactcacctttctccactgggtgccaagtcctagctcctcctcctgggctatattcctgacaaaagttccatatagacaccaaggaggcggaggcgctcctccctgcctcagtggctctgggtacctgcaagcagaacttccaaagagagttaaaagcagcagccccggcaactctggctccaggcagaaggagaggcccggtgcagctgaggttcccgacaccagaagctgttgggagaaagcaatacgtttgtgcagaatctctatgtatattctattttattaaattaattgaatctagtatatgcgggatgtacgacattttgtgactgaagagacttgtttccttctacttttatgtgtctcagaatatttttgaggcgaaggcgtctgtctcttggctattttaacctaaaataacagtctagttatattccctcttcttgcaaagcacaagctgggaccgcgagcacattgcagccccaacggtggcccatcttcagcggagagcgagaaccattttggaaactgtaatgtaacttattttttcctttaacctcgtcatcattttctgtagggaaaaaaaaaagaaaaagaaaaaatgagattttacaagtgaaatggaacctttttatatatacatacatacatatctatctatctatctatatatatataaaataaagtaattttcct

SEQ ID NO: 2776 - DNA, 7563 bp, Homo sapiens
  source 1..7563: mol_type = unassigned DNA
agggaggaaaccgagagggagagcgagagcgcgcgagcgccggcgggctcgccgaggtctgtttccaaagtcgcccttgatggcggcggaggcaaggcggccgcggcgcggagcagccgacgcacgctagtgggtccgcccgccaccgccccttcctcggcgtccgctcccgcccttgccgtcccccgcgcggctccgcgcctcgggccccgggcgcagccagccctccagacgcccgcggtcccggcggcgtgtgctgctcttcctccgcccgcggtttccagcgccgctccttcccccgcttgggcagggagggggcattgatcttcgatcgcgaagatggctgctggctgcctgctggccttgactctgacacttttccaatctttgctcatcggcccctcgtcggaggagccgttcccttcggccgtcactatcaaatcatgggtggataagatgcaagaagaccttgtcacactggcaaaaacagcaagtggagtcaatcagcttgttgatatttatgagaaatatcaagatttgtatactgtggaaccaaataatgcacgccagctggtagaaattgcagccagggatattgagaaacttctgagcaacagatctaaagccctggtgcgcctggcattggaagcggagaaagttcaagcagctcaccagtggagagaagattttgcaagcaatgaagttgtctactacaatgcaaaggatgatctcgatcctgagaaaaatgacagtgagccaggcagccagaggataaaacctgttttcattgaagatgctaattttggacgacaaatatcttatcagcacgcagcagtccatattcctactgacatctatgagggctcaacaattgtgttaaatgaactcaactggacaagtgccttagatgaagttttcaaaaagaatcgcgaggaagacccttcattattgtggcaggtttttggcagtgccactggcctagctcgatattatccagcttcaccatgggttgataatagtagaactccaaataagattgacctttatgatgtacgcagaagaccatggtacatccaaggagctgcatctcctaaagacatgcttattctggtggatgtgagtggaagtgttagtggattgacacttaaactgatccgaacatctgtctccgaaatgttagaaaccctctcagatgatgatttcgtgaatgtagcttcatttaacagcaatgctcaggatgtaagctgttttcagcaccttgtccaagcaaatgtaagaaataaaaaagtgttgaaagacgcggtgaataatatcacagccaaaggaattacagattataagaagggctttagttttgcttttgaacagctgcttaattataatgtttccagagcaaactgcaataagattattatgctattcacggatggaggagaagagagagcccaggagatatttaacaaatacaataaagataaaaaagtacgtgtattcacgttttcagttggtcaacacaattatgacagaggacctattcagtggatggcctgtgaaaacaaaggttattattatgaaattccttccattggtgcaataagaatcaatactcaggaatatttggatgttttgggaagaccaatggttttagcaggagacaaagctaagcaagtccaatggacaaatgtgtacctggatgcattggaactgggacttgtcattactggaactcttccggtcttcaacataaccggccaatttgaaaataagacaaacttaaagaaccagctgattcttggtgtgatgggagtagatgtgtctttggaagatattaaaagactgacaccacgttttacactgtgccccaatgggtattactttgcaatcgatcctaatggttatgttttattacatccaaatcttcagccaaagaaccccaaatctcaggagccagtaacattggatttccttgatgcagagttagagaatgatattaaagtggagattcgaaataagatgattgatggggaaagtggagaaaaaacattcagaactctggttaaatctcaagatgagagatatattgacaaaggaaacaggacatacacatggacacctgtcaatggcacagattacagtttggccttggtattaccaacctacagtttttactatataaaagccaaactagaagagacaataactcaggccagatcaaaaaagggcaaaatgaaggattcggaaaccctgaagccagataattttgaagaatctggctatacattcatagcaccaagagattactgcaatgacctgaaaatatcggataataacactgaatttcttttaaatttcaacgagtttattgatagaaaaactccaaacaacccatcatgtaacgcggatttgattaatagagtcttgcttgatgcaggctttacaaatgaacttgtccaaaattactggagtaagcagaaaaatatcaagggagtgaaagcacgatttgttgtgactgatggtgggattaccagagtttatcccaaagaggctggagaaaattggcaagaaaacccagagacatatgaggacagcttctataaaaggagcctagataatgataactatgttttcactgctccctactttaacaaaagtggacctggtgcctatgaatcgggcattatggtaagcaaagctgtagaaatatatattcaagggaaacttcttaaacctgcagttgttggaattaaaattgatgtaaattcctggatagagaatttcaccaaaacctcaatcagagatccgtgtgctggtccagtttgtgactgcaaaagaaacagtgacgtaatggattgtgtgattctggatgatggtgggtttcttctgatggcaaatcatgatgattatactaatcagattggaagattttttggagagattgatcccagcttgatgagacacctggttaatatatcagtttatgcttttaacaaatcttatgattatcagtcagtatgtgagcccggtgctgcaccaaaacaaggagcaggacatcgctcagcatatgtgccatcagtagcagacatattacaaattggctggtgggccactgctgctgcctggtctattctacagcagtttctcttgagtttgacctttccacgactccttgaggcagttgagatggaggatgatgacttcacggcctccctgtccaagcagagctgcattactgaacaaacccagtatttcttcgataacgacagtaaatcattcagtggtgtattagactgtggaaactgttccagaatctttcatggagaaaagcttatgaacaccaacttaatattcataatggttgagagcaaagggacatgtccatgtgacacacgactgctcatacaagcggagcagacttctgacggtccaaatccttgtgacatggttaagcaacccagataccgaaaagggcctgatgtctgctttgataacaatgtcttggaggattatactgactgtggtggtgtttctggattaaatccctccctgtggtatatcattggaatccagtttctactactttggctggtatctggcagcacacaccgcctgttatgaccttctaaaaaccaaatctgcatagttaaactccagaccctgccaaaacatgagccctgccctcaattacagtaacgtagggtcagctataaaatcagacaaacattagctgggcctgttccatggcataacactaaggcgcagactcctaaggcacccactggctgcatgtcagggtgtcagatccttaaacgtgtgtgaatgctgcatcatctatgtgtaacatcaaagcaaaatcctatacgtgtcctctattggaaaatttgggagtttgttgttgcattgttggtgattacatgtgaaagggttccccatacaattgttaatgaaccataagaaatgtcttgatattgacctggaattttgacttgctgcaattttactaagaaaatctctaaggggaaagaaattatttttgccttcactttttcttctgtgaaaagttaattcctgctttaagtagcaattattgaaatatatagagaaagagagaattaacattggtctaaattgttgaaatataaataatggctaattttctatgaaaaatttgccatgaataaaatgccttatgaagaacggcttctttgccaaaaataaaacacaattgatgaccaattcaattttgatggggtaatgaattgatggtttgaaaatagtaactaagaaattattaaactaaaggtgcttgagggagaaattagaatatgtgacatatttcctcataaatgtaagcaagcccttaataaatgctttgatgtaatgttccttttgttcacagtacagttatgtagtgctagccagatatttaaaaatgctctaagaaaagcttgtcaggggggagggggaaatgtttttcttgtgataaatgaactttggtttaccaagggtattttgcatgatgctgctgctattttaacttttcagttgttttttctcttactgtagagtgtagtcattgaaaagttaactgagtgatattgttatgtaagaatctgaaccttgcagtgtaaatgcacttaagtcatctttaaaatgttgttaaactactctgaatatactgtgcaatgtaaatgctgaatgattggggttagataaatggtgaaatgagaattaatgaattttatacagattcatgctttcgcctgataacctatgtacagatattttaagtacataaatcagatttgacacatttattttttgaaaagtacatatatgttctcaatgaagattcatcctaggtttcctctttgttcgtttcaatagtagcacatacaatccaaaagttcctgctactgctgcttttgcccttccattttaaatggtatgatcgtttggccaaaatttccatgcaagttgataagggttttacaataatctgaacaaataggaaaccttgaatctctatgtatgcacatgaatacttgattgtgaataataaaagttgttttttatacagcctcattggtgaaaatggttagtgtagtaaatcagatatttcattatagactaatatggtagcagattatttatgcttttaaaaattattttctggagcaaacagtatttgaagaaaaggtaaaaactatgaatgtgtaattctaagaatagttaataattttactgaaggctgaacgtatgtagatattttttatgataaaatgcagtttttctttttttggaacatgccaattactggtatgtgtatatgctggaaattttcttacatatcctttttaagtcaaagttattaacattatccagcatgctttaatatgctccacatatcaaagatataaccaataatttaacgtagcttaaaagataacatttgttttgtttttagctttgcatacatttgtaattccctcccaccaccaatataccttaggtaccatttgtgtacatttcaagattttttttttcaataaaaaggtggggggaaatggaatcactttgccaactattgttctaagagttgacatcagttaccatttctaatgcattgttgtgattttgtagtgtcattcataactggtattgacattttagaaaacaccaaagtgatttaaaatatatgtggggaaaaaaacttctcactctagtaacaatgttttaatcatgttgtttgttaaatatttaaaagttattgttcaatttttgctagactatcttaaatcatgatagtgttgggaagggggtatcaaaatataaaattgttagtttgtgtatataaacaatgcacattaaaacaattgaattgcttccagcatacaacaaactaccttaaaattatgttcaaaatctattaaatatattttcatggctaatgtcgagtatatgttttcatcaattacattgttattgtattaatcgcggttaaacttggcatctcttggcaggatcctatttaatttctgttgccatcaaaatatatttatatgcatgagttttgctataaacctttattttctgctataaagttatatattatgacaaccataaatgcaattacaaattgggtaagaacaagctgaataaaagttgttcccatgactaatattagtcttcatgcttttagcatattttttaagacagtaacactcatcccatcaaattattacattacatttagtatttttctgagttacattgacaagaacttaaattatagcctgttattaatattgatttccaacgactgaacagtacaacagatcaataaaaaagtttatacactgctttaactaatttttgttatactcatgtggcttagtgtagttagtcactaaaacagagttcaagtgagcttggcaatggtgttgagtaacaagaaagaattttgcattaatgatttctttttattttcctcatttaaacaaccagcattactgccaaacaccaaccgtggtccatatttgtaacaggtttttaacatgacatagttagcaagtttgattgaagagatttttaggtcctgggcctataagattttagtatgatcttttttcatgtttctaatgcttgaggtgttactgcttaacttgggaaaaaaaaaaacaaaaaacagtgttcctgccatttgtaagttttcctataatattccttttattaactttaaaactggacttatcgggttcaaataggcagtatcccttttaagtgacctttgcaacccaagtgttacttgcttatttgatgctctcttgtattttaaatctcatttaaatctttgtctgtgaccaacaaagcttaagattttgtcttcatttaaaactctgaatctattccattgatcatgttagacgttcaaatgtttaatggtatagtctgacctagtgaaacaaaatggatgttgttactttttttaaagaatagaatgaaataactatttcacttgcccaaaattttaaatattttttcatctaaacttgtattgtttcccatagcagaatgtcaatattcacagtacatttctgtaaagagcaaaccaatataatgttttgagtgttgaaaaaaattccagatttttgaagaattagacaactcttcatctaccttatttctagttcacacagttatctcaaattccactgaaactaatgggatactgtcttgtgtagatgccagttgagtttataatgtgacctagtaaagctgtcttttttgttgtgttgtatgagtgtcggatcatgcttttaggaatacttttattaaaatggtgtgcattcatgcaaaaggccaactggcttttgtgaacaatagatcttttctcccctttattttgttctcttgacacttttgtgaaaattacctagcctgataaaaacattttgtaaaaatttgtataatactgttataaaatatttataatcccagaaaatgttgtgttaaatcttgtgcaaaaacagtatattcagaataaaagtttatcatttaaagtca

SEQ ID NO: 2777 - DNA, 413 bp, Homo sapiens
  source 1..413: mol_type = unassigned DNA
atcttatgattatcagtcagtatgtgagcccggtgctgcaccaaaacaaggagcaggacatcgctcagcatatgtggtcagtaatatccacggtctaatcaattctcaaggggtactcaagtgtcctcagtatcaagtagactactgaaatgaccttattattttattttatagccatcagtagcagacatattacaaattggctggtgggccactgctgctgcctggtctattctacagcagtttctcttgagtttgacctttccacgactccttgaggcagttgagatggaggatgatgacttcacggcctccctgtccaagcagagctgcattactgaacaaacccagtatttcttcgataacgacagtaaatcattcagtggtgtattagactgtggaaactgttccag

SEQ ID NO: 2778 - DNA, 526 bp, Homo sapiens
  source 1..526: mol_type = unassigned DNA
tccttttgtcttacgttttttttctataccaaacaccagccatctctggtagctttcccttatgtatacattcctctctacaagtgataccttcctgctttctgtgtcattgctgtcaattcatactccatgttcaaaatgcacctcagtcattatttcctatgagatgtcttccttaaacatccttcaagtacaaatttaatagatatttaaattattaaaacatagttgtgtatctattgatatatttcctttacttcctaaacttacttctctttgtatcaccaacacctaactttgttttttagaatatgttcaatagaacatttccttgttttgtcttctgtttcagcaagggagtgaaagcacgatttgttgtgactgatggtgggattaccagagtttatcccaaagattgttggaattaaaattgatgtaaattcctggatagagaatttcaccaaaacctcaatcagagatccgtgtgctggtccagtttgtgactgcaaaagaaacagtgacgtaa

SEQ ID NO: 2779 - DNA, 840 bp, Homo sapiens
  source 1..840: mol_type = unassigned DNA
ttaaaagactgacaccacgttttacactgtgccccaatgggtattactttgcaatcgatcctaatggttatgttttattacatccaaatcttcagccaaagcctattggtgtaggtataccaacaattaatttaagaaaaaggagacccaatatccaggagccagtaacattggatttccttgatgcagagttagagaatgatattaaagtggagattcgaaataagatgattgatggggaaagtggagaaaaaacattcagaactctggttaaatctcaagatgagagatatattgacaaaggaaacaggacatacacatggacacctgtcaatggcacagattacagtttggccttggtattaccaacctacagtttttactatataaaagccaaactagaagagacaataactcaggccagatattcggaaaccctgaagccagataattttgaagaatctggctatacattcatagcaccaagagattactgcaatgacctgaaaatatcggataataacactgaatttcttttaaatttcaacgagtttattgatagaaaaactccaaacaacccatcatgtaacgcggatttgattaatagagtcttgcttgatgcaggctttacaaatgaacttgtccaaaattactggagtaagcagaaaaatatcaagggagtgaaagcacgatttgttgtgactgatggtgggattaccagagtttatcccaaagaggctggagaaaattggcaagaaaacccagagacatatgaggacagcttctataaaaggagcctagataatgataactatgttttcactgctccctactttaaca

SEQ ID NO: 2780 - DNA, 418 bp, Homo sapiens
  source 1..418: mol_type = unassigned DNA
ataaacaggaatatttggatgttttgggaagaccaatggttttagcaggagacaaagctaagcaagtccaatggacaaatgtgtacctggatgcattggaactgggacttgtcattactggaactcttccggtcttcaacataaccggccaatttgaaaataagacaaacttaaagaaccagctgattcttggtgtgatgggagtagatgtgtctttggaagatattaaaagactgacaccacgttttacactgtgccccaatgggtattactttgcaatcgatcctaatggttatgttttattacatccaaatcttcagccaaaggtcagtatataatttgtttacagtgattagtgttttgtagaattaatgattaatgttcttaataggattgttgttttaaaatttaccgtata

SEQ ID NO: 2781 - DNA, 582 bp, Homo sapiens
  source 1..582: mol_type = unassigned DNA
ggtgaagggggtgggcctgaactgatccaggaaccagttcttagaatatatttttataatgtttccagagcaaactgcaataagattattatgctattcacggatggaggagaagagagagcccaggagatatttaacaaatacaataaagataaaaaagtacgtgtattcacgttttcagttggtcaacacaattatgacagaggacctattcagtggatggcctgtgaaaacaaaggttattattatgaaattccttccattggtgcaataagaatcaatactcaggaatatttggatgttttgggaagaccaatggttttagcaggagacaaagctaagcaagtccaatggacaaatgtgtacctggatgcattggaactgggacttgtcattactggaactcttccggtcttcaacataaccggccaatttgaaaataagacaaacttaaagaaccagctgattcttggtgtgatgggagtagatgtgtctttggaagatattaaaagactgacaccacgttttacactgtgccccaatgggtattactttgcaatcgatcctaatggttatgtttta

SEQ ID NO: 2782 - DNA, 419 bp, Homo sapiens
  source 1..419: mol_type = unassigned DNA
tataatgtttccagagcaaactgcaataagattattatgctattcacggatggaggagaagagagagcccaggagatatttaacaaatacaataaagataaaaaagtacgtgtattcacgttttcagttggtcaacacaattatgacagaggacctattcagtggatggcctgtgaaaacaaaggttattattatgaaattccttccattggtgcaataagaatcaatactcaggaatatttggatgttttgggaagaccaatggttttagcaggagacaaagctaagcaagtccaatggacaaatgtgtacctggatgcattggaactgggacttgtcattactggaactcttccggtcttcaacataaccggccaatttgaaaataagacaaacttaaaggttaaaagttaattgat

SEQ ID NO: 2783 - DNA, 594 bp, Homo sapiens
  source 1..594: mol_type = unassigned DNA
tttaacagcaatgctcaggatgtaagctgttttcagcaccttgtccaagcaaatgtaagaaataaaaaagtgttgaaagacgcggtgaataatatcacagccaaaggaattacagattataagaagggctttagttttgcttttgaacagctgcttaattataatgtttccagagcaaactgcaataagattattatgctattcacggatggaggagaagagagagcccaggagatatttaacaaatacaataaagataaaaaagtacgtgtattcacgttttcagttggtcaacacaattatgacagaggacctattcagtggatggcctgtgaaaacaaaggttattattatgaaattccttccattggtgcaataagaatcaatactcaggaatatttggatgttttgggaagaccaatggttttagcaggagacaaagctaagcaagtccaatggacaaatgtgtacctggatgcattggtaagaggttgagctattcagtcaaagactgtcataacaaaagcacacagatgatttctacttctttctagatgatgtctctgttttccttttcattaaaccctccccaaa

SEQ ID NO: 2784 - DNA, 1429 bp, Homo sapiens
  source 1..1429: mol_type = unassigned DNA
gcggcggaggcaaggcggccgcggcgcggagcagccgacgcacgctagtgggtccgcccgccaccgccccttcctcggcgtccgctcccgcccttgccgtcccccgcgcggctccgcgcctcgggccccgggcgcagccagccctccagacgcccgcggtcccggcggcgtgtgctgctcttcctccgcccgcggtttccagcgccgctccttcccccgcttgggcagggagggggcattgatcttcgatcgcgaagatggctgctggctgcctgctggccttgactctgacacttttccaatctttgctcatcggcccctcgtcggaggagccgttcccttcggccgtcactatcaaatcatgggtggataagatgcaagaagaccttgtcacactggcaaaaacagcaagtggagtcaatcagcttgttgatatttatgagaaatatcaagatttgtatactgtggaaccaaataatgcacgccagctggtagaaattgcagccagggatattgagaaacttctgagcaacagatctaaagccctggtgcgcctggcattggaagcggagaaagttcaagcagctcaccagtggagagaagattttgcaagcaatgaagttgtctactacaatgcaaaggatgatctcgatcctgagaaaaatgacagtgagccaggcagccagaggataaaacctgttttcattgaagatgctaattttggacgacaaatatcttatcagcacgcagcagtccatattcctactgacatctatgagggctcaacaattgtgttaaatgaactcaactggacaagtgccttagatgaagttttcaaaaagaatcgcgaggaagacccttcattattgtggcaggtttttggcagtgccactggcctagctcgatattatccagcttcaccatgggttgataatagtagaactccaaataagattgacctttatgatgtacgcagaagaccatggtacatccaaggagctgcatctcctaaagacatgcttattctggtggatgtgagtggaagtgttagtggattgacacttaaactgatccgaacatctgtctccgaaatgttagaaaccctctcagatgatgatttcgtgaatgtagcttcagatagtaaagagatttctccttctcccgaagagattttcaatgcagagtaattaaactattgtgtctctctggaggggaggatgagtgtgggccatcagaagcccctgtataagatcagggacttcctcatcttgggactcctggctggaaacccatctcactacctatgcaggtgacccctggctgtcctcctgtcatcctgtgggaattgaggtttgggcagcttgtgcaaacaaagatgttactctgctcctctgttgctatgagtaataaactctttgtctctgactca

SEQ ID NO: 2785 - DNA, 467 bp, Homo sapiens
  source 1..467: mol_type = unassigned DNA
cgaggaagacccttcattattgtggcaggtttttggcagtgccactggcctagctcgatattatccagcttcaccatgggttgataatagtagaactccaaataagattgacctttatgatgtacgcagaagaccatggtacatccaaggagctgcatctcctaaagacatgcttattctggtggatgtgagtggaagtgttagtggattgacacttaaactgatccgaacatctgtctccgaaatgttagaaaccctctcagatgatgatttcgtgaatgtagcttcatatgcggttcaaggagccaatatatgttggtttatatcaagtaaagagcaacgcgatggaatgatcctgccaacacgttatccctgcatggacagtgttagtaagctcacatctggtttgactcattcttcacaggcaaccctgtctcttagatggactggtagaattgcataggaat

SEQ ID NO: 2786 - DNA, 532 bp, Homo sapiens
  source 1..532: mol_type = unassigned DNA
atttgaaatgctatagtcctagctaagaagctgtatcacagcaaatagaaagaatagagtggctagggagactcgtgagtttggtattagaatgctagtttgatatagttatcattggaaaattatgcactataaatttgaggctatgaccaaattatgcatttatatatgtgtgtatatgtgatttatgagaaatatcaagatttgtatactgtggaaccaaataatgcacgccagctggtagaaattgcagccagggatattgagaaacttctgagcaacagatctaaagccctggtgcgcctggcattggaagcggagaaagttcaagcagctcaccagtggagagaagattttgcaagcaatgaagttgtctactacaatgcaaaggatgatctcgatcctgagaaaaatgacagtgagccaggcagccagaggataaaacctgttttcattgaagatgctaattttggacgacaaatatcttatcagcacgcagcagtccatattcctactgacatctatgagggct

SEQ ID NO: 2787 - DNA, 3858 bp, Homo sapiens
  source 1..3858: mol_type = unassigned DNA
cggcggaggcaaggcggccgcggcgcggagcagccgacgcacgctagtgggtccgcccgccaccgccccttcctcggcgtccgctcccgcccttgccgtcccccgcgcggctccgcgcctcgggccccgggcgcagccagccctccagacgcccgcggtcccggcggcgtgtgctgctcttcctccgcccgcggtttccagcgccgctccttcccccgcttgggcagggagggggcattgatcttcgatcgcgaagatggctgctggctgcctgctggccttgactctgacacttttccaatctttgctcatcggcccctcgtcggaggagccgttcccttcggccgtcactatcaaatcatgggtggataagatgcaagaagaccttgtcacactggcaaaaacagcaagtggagtcaatcagcttgttgatatttatgagaaatatcaagatttgtatactgtggaaccaaataatgcacgccagctggtagaaattgcagccagggatattgagaaacttctgagcaacagatctaaagccctggtgcgcctggcattggaagcggagaaagttcaagcagctcaccagtggagagaagattttgcaagcaatgaagttgtctactacaatgcaaaggatgatctcgatcctgagaaaaatgacagtgagccaggcagccagaggataaaacctgttttcattgaagatgctaattttggacgacaaatatcttatcagcacgcagcagtccatattcctactgacatctatgagggctcaacaattgtgttaaatgaactcaactggacaagtgccttagatgaagttttcaaaaagaatcgcgaggaagacccttcattattgtggcaggtttttggcagtgccactggcctagctcgatattatccagcttcaccatgggttgataatagtagaactccaaataagattgacctttatgatgtacgcagaagaccatggtacatccaaggagctgcatctcctaaagacatgcttattctggtggatgtgagtggaagtgttagtggattgacacttaaactgatccgaacatctgtctccgaaatgttagaaaccctctcagatgatgatttcgtgaatgtagcttcatttaacagcaatgctcaggatgtaagctgttttcagcaccttgtccaagcaaatgtaagaaataaaaaagtgttgaaagacgcggtgaataatatcacagccaaaggaattacagattataagaagggctttagttttgcttttgaacagctgcttaattataatgtttccagagcaaactgcaataagattattatgctattcacggatggaggagaagagagagcccaggagatatttaacaaatacaataaagataaaaaagtacgtgtattcacgttttcagttggtcaacacaattatgacagaggacctattcagtggatggcctgtgaaaacaaaggttattattatgaaattccttccattggtgcaataagaatcaatactcaggaatatttggatgttttgggaagaccaatggttttagcaggagacaaagctaagcaagtccaatggacaaatgtgtacctggatgcattggaactgggacttgtcattactggaactcttccggtcttcaacataaccggccaatttgaaaataagacaaacttaaagaaccagctgattcttggtgtgatgggagtagatgtgtctttggaagatattaaaagactgacaccacgttttacactgtgccccaatgggtattactttgcaatcgatcctaatggttatgttttattacatccaaatcttcagccaaagcctattggtgtaggtataccaacaattaatttaagaaaaaggagacccaatatccagaaccccaaatctcaggagccagtaacattggatttccttgatgcagagttagagaatgatattaaagtggagattcgaaataagatgattgatggggaaagtggagaaaaaacattcagaactctggttaaatctcaagatgagagatatattgacaaaggaaacaggacatacacatggacacctgtcaatggcacagattacagtttggccttggtattaccaacctacagtttttactatataaaagccaaactagaagagacaataactcaggccagatattcggaaaccctgaagccagataattttgaagaatctggctatacattcatagcaccaagagattactgcaatgacctgaaaatatcggataataacactgaatttcttttaaatttcaacgagtttattgatagaaaaactccaaacaacccatcatgtaacgcggatttgattaatagagtcttgcttgatgcaggctttacaaatgaacttgtccaaaattactggagtaagcagaaaaatatcaagggagtgaaagcacgatttgttgtgactgatggtgggattaccagagtttatcccaaagaggctggagaaaattggcaagaaaacccagagacatatgaggacagcttctataaaaggagcctagataatgataactatgttttcactgctccctactttaacaaaagtggacctggtgcctatgaatcgggcattatggtaagcaaagctgtagaaatatatattcaagggaaacttcttaaacctgcagttgttggaattaaaattgatgtaaattcctggatagagaatttcaccaaaacctcaatcagagatccgtgtgctggtccagtttgtgactgcaaaagaaacagtgacgtaatggattgtgtgattctggatgatggtgggtttcttctgatggcaaatcatgatgattatactaatcagattggaagattttttggagagattgatcccagcttgatgagacacctggttaatatatcagtttatgcttttaacaaatcttatgattatcagtcagtatgtgagcccggtgctgcaccaaaacaaggagcaggacatcgctcagcatatgtgccatcagtagcagacatattacaaattggctggtgggccactgctgctgcctggtctattctacagcagtttctcttgagtttgacctttccacgactccttgaggcagttgagatggaggatgatgacttcacggcctccctgtccaagcagagctgcattactgaacaaacccagtatttcttcgataacgacagtaaatcattcagtggtgtattagactgtggaaactgttccagaatctttcatggagaaaagcttatgaacaccaacttaatattcataatggttgagagcaaagggacatgtccatgtgacacacgactgctcatacaagcggagcagacttctgacggtccaaatccttgtgacatggttaagcaacccagataccgaaaagggcctgatgtctgctttgataacaatgtcttggaggattatactgactgtggtggtgtttctggattaaatccctccctgtggtatatcattggaatccagtttctactactttggctggtatctggcagcacacaccgcctgttatgaccttctaaaaaccaaatctgcatagttaaactccagaccctgccaaaacatgagccctgccctcaattacagtaacgtagggtcagctataaaatcagacaaacattagctgggcctgttccatggcataacactaaggcgcagactcctaaggcacccactggctgcatgtcagggtgtcagatccttaaacgtgtgtgaatgctgcatcatctatgtgtaacatcaaagcaaaatcctatacgtgtcctctattggaaaatttgggagtttgttgttgcattgttggt

SEQ ID NO: 2788 - DNA, 5329 bp, Homo sapiens
  source 1..5329: mol_type = unassigned DNA
atggcggtgccggctcggacctgcggcgcctctcggcccggcccagcgcggactgcgcgcccctggcccggctgcggcccccaccctggccccggcacccggcgcccgacgtccgggcccccgcgcccgctgtggctgctgctgccgcttctaccgctgctcgccgcccccggcgcctctgcctacagcttcccccagcagcacacgatgcagcactgggcccggcgtctggagcaggaggtcgacggcgtgatgcggatttttggaggcgtccagcagctccgtgagatttacaaggacaaccggaacctgttcgaggtacaggagaatgagcctcagaagttggtggagaaggtggcaggggacattgagagccttctggacaggaaggtgcaggccctgaagagactggctgatgctgcagagaacttccagaaagcacaccgctggcaggacaacatcaaggaggaagacatcgtgtactatgacgccaaggctgacgctgagctggacgaccctgagagtgaggatgtggaaagggggtctaaggccagcaccctaaggctggacttcatcgaggacccaaacttcaagaacaaggtcaactattcatacgcggctgtacagatccctacggacatctacaaaggctccactgtcatcctcaatgagctcaactggacagaggccctggagaatgtgttcatggaaaaccgcagacaagaccccacactgctgtggcaggtcttcggcagcgccacaggagtcactcgctactacccggccaccccgtggcgagcccccaagaagatcgacctgtacgatgtccgaaggagaccctggtatatccagggggcctcgtcacccaaagacatggtcatcatcgtggatgtgagtggcagtgtgagcggcctgaccctgaagctgatgaagacatctgtctgcgagatgctggacacgctgtctgatgatgactatgtgaatgtggcctcgttcaacgagaaggcacagcctgtgtcatgcttcacacacctggtgcaggccaatgtgcgcaacaagaaggtgttcaaggaagctgtgcagggcatggtggccaagggcaccacaggctacaaggccggctttgagtatgcctttgaccagctgcagaactccaacatcactcgggccaactgcaacaagatgatcatgatgttcacggatggtggtgaggaccgcgtgcaggacgtctttgagaagtacaattggccaaaccggacggtgcgcgtgtttactttctccgtggggcagcataactatgacgtcacaccgctgcagtggatggcctgtgccaacaaaggctactattttgagatcccttccatcggagccatccgcatcaacacacaggaatatctagatgtgttgggcaggcccatggtgctggcaggcaaggaggccaagcaggtgcagtggaccaacgtgtatgaggatgcactgggactggggttggtggtaacagggaccctccctgttttcaacctgacacaggatggccctggggaaaagaagaaccagctgatcctgggcgtgatgggcattgacgtggctctgaatgacatcaagaggctgacccccaactacacgcttggagccaacggctatgtgtttgccattgacctgaacggctacgtgttgctgcaccccaatctcaagccccagaccaccaacttccgggagcctgtgactctggacttcctggatgcggagctagaggatgagaacaaggaagagatccgtcggagcatgattgatggcaacaagggccacaagcagatcagaacgttggtcaagtccctggatgagaggtacatagatgaggtgacacggaactacacctgggtgcctataaggagcactaactacagcctggggctggtgctcccaccctacagcaccttctacctccaagccaatctcagtgaccagatcctgcaggtcaagttgccaatcagcaaactgaaggattttgagttcctgctccccagcagctttgagtctgaaggacacgttttcattgctcccagagagtactgcaaggacctgaatgcctcagacaacaacaccgagttcctgaaaaactttattgagctcatggagaaagtgactccagactccaagcagtgcaacaacttccttctgcacaacctgatcttggacacgggcatcacgcagcagctggtagagcgtgtgtggagggaccaggatctcaacacgtacagcctactggccgtgttcgctgccacagacggtggcatcacccgagtcttccccaacaaggcagctgaggactggacagagaaccctgagcccttcaatgccagcttctaccgccgcagcctggataaccacggttatgtcttcaagcccccacaccaggatgccctgttaaggccgctggagctggagaatgacactgtgggcatcctcgtcagcacagctgtggagctcagcctaggcaggcgcacactgaggccagcagtggtgggcgtcaagctggacctagaggcttgggctgagaagttcaaggtgctagccagcaaccgtacccaccaagaccagcctcagaagcagtgcggccccaacagccactgtgagatggactgcgaggttaacaatgaggacttactctgtgtcctcattgatgatggaggattcctggtgctgtcaaaccagaaccatcagtgggaccaggtgggcaggttcttcagtgaggtggatgccaacctgatgctggcactctacaataactccttctacacccgcaaggagtcctatgactatcaggcagcctgtgcccctcagccccctggcaacctgggtgctgcaccccggggtgtctttgtgcccaccgttgcagatttccttaacctggcctggtggacctctgctgccgcctggtccctgttccagcagcttctctacggcctcatctaccacagctggttccaagcagaccccgcggaggccgaggggagccccgagacgcgcgagagcagctgcgtcatgaaacagacccagtactacttcggctcggtaaacgcctcctacaacgccatcatcgactgcggaaactgctccaggctgttccacgcgcagagactgaccaacaccaatcttctctttgtggtggccgagaagccgctgtgcagccagtgcgaggctggccggctgctgcagaaggagacgcactgcccagcggacggcccggagcagtgtgagctagtgcagagaccgcgataccggagaggcccgcacatctgcttcgactacaacgcgacagaagatacctcagactgtggccgcggggcctccttcccgccgtcgctgggcgtcctggtctccctgcaactgctgctcctcctgggcctgccgccccggccgcagcctcaagtcctcgtccacgcctctcgccgcctctgagcaccctgccccaccccacctccactcccacctcacccggcctcttcgcctttcccaccctcctgccccacactccccgccttagagcctcgtccctccctcactgaaggacctgagctggccaggccctgagagtctggtctgcgccttgggatggggagtcccaaagcgggacgccgcaggtgtttggcacccaaatcacatctcacctccgaactgttcaagtgtccccagacccttcttgcctgctgggctccccccagtgggatgggacagggaggccacacgcactggtgccaaaaccaggcctctgctgccgcccttcctggaggctgcctatgttgggggggaccctgcctcagctgacccggcctctctgccccacccaagcccaaacttggtttctgtgagaatagtggaggaaggtgagatggccagtttgaagcctgtgcctcccagcttaaatcctagcaggagagaggctctggggcagcccccatgggctcctgcccctttcaggcctacagccacatccccaagcccaccaggtgtcaggatagtcacagtgataccagttcagacactaccccatatacacctggaacattgaggatggaaactggactcacattcgacataccccactgggcacacgcacaaacacacacactatggggtggggtgggtgtaggggcttacaaagccttacacagggcgaggggttggtgggagggttggcacctgcacactccatctcctgctcaccacctgcctctaatctgagctgcagcctggctggtcctcccatttctaaagctgaatgtcaaacagtgccaaatgctggggcagggggtgaagaaccctctgtcccacccctagccaccagtgtcctccaagtgccccctcacctctccaggtgctcattgtaaccatttctcactagtgtcaggcccccagtgggaccacatgccactgcctgcacctttcggcagaggaacccccaccagacatcaccctttgccttagcaggggtgactttgtctctcctggctgggccatccttccgccaatctggcccttacacactcaggcctgtgcccactccctatctccttcccacccctacacacacactccctgcttgcaggaggccaaactgtccctcccttgctgaacacacacacacacacacacacacaggtggggactgggcacagctcttcacaccattcattctggtcatttcccccaaaggcatcccagcctgggggccagtggggaactgagggcaaggggatatagtgatggggctcagatggactgggaggagggggagggtgatgcattaattaatggcttcgttaattaatgtcatgttgcttgtcgctttctcagtgtgtgtgtgtggtccatgcccactgctggtgccagggtgggtgtccatgtgcacccggcctggatgccagctgtgtccttcgggggcgtgcgtgtaactgtagtgtagtcaggtgctcaatggagaatataaacatatacagaaaaatatatattttaagtttaaaaaacagaaaaacagacaaaacaatccccatcaggtagctgtctaacccccagctgggtctaatccttctcattacccacccgacctggctgcccctcaccttgggctgggggactggggggccatttccttttctctgccctttttttgttgttctattttgtacagacaagttggaaaaacaacagcgacaaaaaagtcaagaaactttgtaaaatatcgtgtgtgtgattccttgtaaaatattttcaaatggtttattacagaagatcagttattaaataatgttcatattttcacttcaaa

SEQ ID NO: 2789 - DNA, 5304 bp, Homo sapiens
  source 1..5304: mol_type = unassigned DNA
gaaacatggcggtgccggctcggacctgcggcgcctctcggcccggcccagcgcggactgcgcgcccctggcccggctgcggcccccaccctggccccggcacccggcgcccgacgtccgggcccccgcgcccgctgtggctgctgctgccgcttctaccgctgctcgccgcccccggcgcctctgcctacagcttcccccagcagcacacgatgcagcactgggcccggcgtctggagcaggaggtcgacggcgtgatgcggatttttggaggcgtccagcagctccgtgagatttacaaggacaaccggaacctgttcgaggtacaggagaatgagcctcagaagttggtggagaaggtggcaggggacattgagagccttctggacaggaaggtgcaggccctgaagagactggctgatgctgcagagaacttccagaaagcacaccgctggcaggacaacatcaaggaggaagacatcgtgtactatgacgccaaggctgacgctgagctggacgaccctgagagtgaggatgtggaaagggggtctaaggccagcaccctaaggctggacttcatcgaggacccaaacttcaagaacaaggtcaactattcatacgcggctgtacagatccctacggacatctacaaaggctccactgtcatcctcaatgagctcaactggacagaggccctggagaatgtgttcatggaaaaccgcagacaagaccccacactgctgtggcaggtcttcggcagcgccacaggagtcactcgctactacccggccaccccgtggcgagcccccaagaagatcgacctgtacgatgtccgaaggagaccctggtatatccagggggcctcgtcacccaaagacatggtcatcatcgtggatgtgagtggcagtgtgagcggcctgaccctgaagctgatgaagacatctgtctgcgagatgctggacacgctgtctgatgatgactatgtgaatgtggcctcgttcaacgagaaggcacagcctgtgtcatgcttcacacacctggtgcaggccaatgtgcgcaacaagaaggtgttcaaggaagctgtgcagggcatggtggccaagggcaccacaggctacaaggccggctttgagtatgcctttgaccagctgcagaactccaacatcactcgggccaactgcaacaagatgatcatgatgttcacggatggtggtgaggaccgcgtgcaggacgtctttgagaagtacaattggccaaaccggacggtgcgcgtgtttactttctccgtggggcagcataactatgacgtcacaccgctgcagtggatggcctgtgccaacaaaggctactattttgagatcccttccatcggagccatccgcatcaacacacaggaatatctagatgtgttgggcaggcccatggtgctggcaggcaaggaggccaagcaggtgcagtggaccaacgtgtatgaggatgcactgggactggggttggtggtaacagggaccctccctgttttcaacctgacacaggatggccctggggaaaagaagaaccagctgatcctgggcgtgatgggcattgacgtggctctgaatgacatcaagaggctgacccccaactacacgcttggagccaacggctatgtgtttgccattgacctgaacggctacgtgttgctgcaccccaatctcaagccccagaccaccaacttccgggagcctgtgactctggacttcctggatgcggagctagaggatgagaacaaggaagagatccgtcggagcatgattgatggcaacaagggccacaagcagatcagaacgttggtcaagtccctggatgagaggtacatagatgaggtgacacggaactacacctgggtgcctataaggagcactaactacagcctggggctggtgctcccaccctacagcaccttctacctccaagccaatctcagtgaccagatcctgcaggtcaagtattttgagttcctgctccccagcagctttgagtctgaaggacacgttttcattgctcccagagagtactgcaaggacctgaatgcctcagacaacaacaccgagttcctgaaaaactttattgagctcatggagaaagtgactccagactccaagcagtgcaacaacttccttctgcacaacctgatcttggacacgggcatcacgcagcagctggtagagcgtgtgtggagggaccaggatctcaacacgtacagcctactggccgtgttcgctgccacagacggtggcatcacccgagtcttccccaacaaggcagctgaggactggacagagaaccctgagcccttcaatgccagcttctaccgccgcagcctggataaccacggttatgtcttcaagcccccacaccaggatgccctgttaaggccgctggagctggagaatgacactgtgggcatcctcgtcagcacagctgtggagctcagcctaggcaggcgcacactgaggccagcagtggtgggcgtcaagctggacctagaggcttgggctgagaagttcaaggtgctagccagcaaccgtacccaccaagaccagcctcagaagcagtgcggccccaacagccactgtgagatggactgcgaggttaacaatgaggacttactctgtgtcctcattgatgatggaggattcctggtgctgtcaaaccagaaccatcagtgggaccaggtgggcaggttcttcagtgaggtggatgccaacctgatgctggcactctacaataactccttctacacccgcaaggagtcctatgactatcaggcagcctgtgcccctcagccccctggcaacctgggtgctgcaccccggggtgtctttgtgcccaccgttgcagatttccttaacctggcctggtggacctctgctgccgcctggtccctgttccagcagcttctctacggcctcatctaccacagctggttccaagcagaccccgcggaggccgaggggagccccgagacgcgcgagagcagctgcgtcatgaaacagacccagtactacttcggctcggtaaacgcctcctacaacgccatcatcgactgcggaaactgctccaggctgttccacgcgcagagactgaccaacaccaatcttctctttgtggtggccgagaagccgctgtgcagccagtgcgaggctggccggctgctgcagaaggagacgcactcggacggcccggagcagtgtgagctagtgcagagaccgcgataccggagaggcccgcacatctgcttcgactacaacgcgacagaagatacctcagactgtggccgcggggcctccttcccgccgtcgctgggcgtcctggtctccctgcaactgctgctcctcctgggcctgccgccccggccgcagcctcaagtcctcgtccacgcctctcgccgcctctgagcaccctgccccaccccacctccactcccacctcacccggcctcttcgcctttcccaccctcctgccccacactccccgccttagagcctcgtccctccctcactgaaggacctgagctggccaggccctgagagtctggtctgcgccttgggatggggagtcccaaagcgggacgccgcaggtgtttggcacccaaatcacatctcacctccgaactgttcaagtgtccccagacccttcttgcctgctgggctccccccagtgggatgggacagggaggccacacgcactggtgccaaaaccaggcctctgctgccgcccttcctggaggctgcctatgttgggggggaccctgcctcagctgacccggcctctctgccccacccaagcccaaacttggtttctgtgagaatagtggaggaaggtgagatggccagtttgaagcctgtgcctcccagcttaaatcctagcaggagagaggctctggggcagcccccatgggctcctgcccctttcaggcctacagccacatccccaagcccaccaggtgtcaggatagtcacagtgataccagttcagacactaccccatatacacctggaacattgaggatggaaactggactcacattcgacataccccactgggcacacgcacaaacacacacactatggggtggggtgggtgtaggggcttacaaagccttacacagggcgaggggttggtgggagggttggcacctgcacactccatctcctgctcaccacctgcctctaatctgagctgcagcctggctggtcctcccatttctaaagctgaatgtcaaacagtgccaaatgctggggcagggggtgaagaaccctctgtcccacccctagccaccagtgtcctccaagtgccccctcacctctccaggtgctcattgtaaccatttctcactagtgtcaggcccccagtgggaccacatgccactgcctgcacctttcggcagaggaacccccaccagacatcaccctttgccttagcaggggtgactttgtctctcctggctgggccatccttccgccaatctggcccttacacactcaggcctgtgcccactccctatctccttcccacccctacacacacactccctgcttgcaggaggccaaactgtccctcccttgctgaacacacacacacacacacacacacaggtggggactgggcacagctcttcacaccattcattctggtcatttcccccaaaggcatcccagcctgggggccagtggggaactgagggcaaggggatatagtgatggggctcagatggactgggaggagggggagggtgatgcattaattaatggcttcgttaattaatgtcatgttgcttgtcgctttctcagtgtgtgtgtgtggtccatgcccactgctggtgccagggtgggtgtccatgtgcacccggcctggatgccagctgtgtccttcgggggcgtgcgtgtaactgtagtgtagtcaggtgctcaatggagaatataaacatatacagaaaaatatatattttaagtttaaaaaacagaaaaacagacaaaacaatccccatcaggtagctgtctaacccccagctgggtctaatccttctcattacccacccgacctggctgcccctcaccttgggctgggggactggggggccatttccttttctctgccctttttttgttgttctattttgtacagacaagttggaaaaacaacagcgacaaaaaagtcaagaaactttgtaaaatatcgtgtgtgtgattccttgtaaaatattttcaaatggtttattacagaagatcagttattaaataatgttcatattttcacttc

SEQ ID NO: 2790 - DNA, 5476 bp, Homo sapiens
  source 1..5476: mol_type = unassigned DNA
gcgcagcccgcagaggcgctgcggcccgtgcagccccggaggcccctcgcggagaaggcggcggcggaggagaggccgagttaccgcccgccgcccgcgcccccccaaccccgccgccgccgccgccgccgccactgccccccctccccgcggcgccgcatcttgaatggaaacatggcggtgccggctcggacctgcggcgcctctcggcccggcccagcgcggactgcgcgcccctggcccggctgcggcccccaccctggccccggcacccggcgcccgacgtccgggcccccgcgcccgctgtggctgctgctgccgcttctaccgctgctcgccgcccccggcgcctctgcctacagcttcccccagcagcacacgatgcagcactgggcccggcgtctggagcaggaggtcgacggcgtgatgcggatttttggaggcgtccagcagctccgtgagatttacaaggacaaccggaacctgttcgaggtacaggagaatgagcctcagaagttggtggagaaggtggcaggggacattgagagccttctggacaggaaggtgcaggccctgaagagactggctgatgctgcagagaacttccagaaagcacaccgctggcaggacaacatcaaggaggaagacatcgtgtactatgacgccaaggctgacgctgagctggacgaccctgagagtgaggatgtggaaagggggtctaaggccagcaccctaaggctggacttcatcgaggacccaaacttcaagaacaaggtcaactattcatacgcggctgtacagatccctacggacatctacaaaggctccactgtcatcctcaatgagctcaactggacagaggccctggagaatgtgttcatggaaaaccgcagacaagaccccacactgctgtggcaggtcttcggcagcgccacaggagtcactcgctactacccggccaccccgtggcgagcccccaagaagatcgacctgtacgatgtccgaaggagaccctggtatatccagggggcctcgtcacccaaagacatggtcatcatcgtggatgtgagtggcagtgtgagcggcctgaccctgaagctgatgaagacatctgtctgcgagatgctggacacgctgtctgatgatgactatgtgaatgtggcctcgttcaacgagaaggcacagcctgtgtcatgcttcacacacctggtgcaggccaatgtgcgcaacaagaaggtgttcaaggaagctgtgcagggcatggtggccaagggcaccacaggctacaaggccggctttgagtatgcctttgaccagctgcagaactccaacatcactcgggccaactgcaacaagatgatcatgatgttcacggatggtggtgaggaccgcgtgcaggacgtctttgagaagtacaattggccaaaccggacggtgcgcgtgtttactttctccgtggggcagcataactatgacgtcacaccgctgcagtggatggcctgtgccaacaaaggctactattttgagatcccttccatcggagccatccgcatcaacacacaggaatatctagatgtgttgggcaggcccatggtgctggcaggcaaggaggccaagcaggtgcagtggaccaacgtgtatgaggatgcactgggactggggttggtggtaacagggaccctccctgttttcaacctgacacaggatggccctggggaaaagaagaaccagctgatcctgggcgtgatgggcattgacgtggctctgaatgacatcaagaggctgacccccaactacacgcttggagccaacggctatgtgtttgccattgacctgaacggctacgtgttgctgcaccccaatctcaagccccagaccaccaacttccgggagcctgtgactctggacttcctggatgcggagctagaggatgagaacaaggaagagatccgtcggagcatgattgatggcaacaagggccacaagcagatcagaacgttggtcaagtccctggatgagaggtacatagatgaggtgacacggaactacacctgggtgcctataaggagcactaactacagcctggggctggtgctcccaccctacagcaccttctacctccaagccaatctcagtgaccagatcctgcaggtcaagtattttgagttcctgctccccagcagctttgagtctgaaggacacgttttcattgctcccagagagtactgcaaggacctgaatgcctcagacaacaacaccgagttcctgaaaaactttattgagctcatggagaaagtgactccagactccaagcagtgcaacaacttccttctgcacaacctgatcttggacacgggcatcacgcagcagctggtagagcgtgtgtggagggaccaggatctcaacacgtacagcctactggccgtgttcgctgccacagacggtggcatcacccgagtcttccccaacaaggcagctgaggactggacagagaaccctgagcccttcaatgccagcttctaccgccgcagcctggataaccacggttatgtcttcaagcccccacaccaggatgccctgttaaggccgctggagctggagaatgacactgtgggcatcctcgtcagcacagctgtggagctcagcctaggcaggcgcacactgaggccagcagtggtgggcgtcaagctggacctagaggcttgggctgagaagttcaaggtgctagccagcaaccgtacccaccaagaccagcctcagaagtgcggccccaacagccactgtgagatggactgcgaggttaacaatgaggacttactctgtgtcctcattgatgatggaggattcctggtgctgtcaaaccagaaccatcagtgggaccaggtgggcaggttcttcagtgaggtggatgccaacctgatgctggcactctacaataactccttctacacccgcaaggagtcctatgactatcaggcagcctgtgcccctcagccccctggcaacctgggtgctgcaccccggggtgtctttgtgcccaccgttgcagatttccttaacctggcctggtggacctctgctgccgcctggtccctgttccagcagcttctctacggcctcatctaccacagctggttccaagcagaccccgcggaggccgaggggagccccgagacgcgcgagagcagctgcgtcatgaaacagacccagtactacttcggctcggtaaacgcctcctacaacgccatcatcgactgcggaaactgctccaggctgttccacgcgcagagactgaccaacaccaatcttctctttgtggtggccgagaagccgctgtgcagccagtgcgaggctggccggctgctgcagaaggagacgcactgcccagcggacggcccggagcagtgtgagctagtgcagagaccgcgataccggagaggcccgcacatctgcttcgactacaacgcgacagaagatacctcagactgtggccgcggggcctccttcccgccgtcgctgggcgtcctggtctccctgcaactgctgctcctcctgggcctgccgccccggccgcagcctcaagtcctcgtccacgcctctcgccgcctctgagcaccctgccccaccccacctccactcccacctcacccggcctcttcgcctttcccaccctcctgccccacactccccgccttagagcctcgtccctccctcactgaaggacctgagctggccaggccctgagagtctggtctgcgccttgggatggggagtcccaaagcgggacgccgcaggtgtttggcacccaaatcacatctcacctccgaactgttcaagtgtccccagacccttcttgcctgctgggctccccccagtgggatgggacagggaggccacacgcactggtgccaaaaccaggcctctgctgccgcccttcctggaggctgcctatgttgggggggaccctgcctcagctgacccggcctctctgccccacccaagcccaaacttggtttctgtgagaatagtggaggaaggtgagatggccagtttgaagcctgtgcctcccagcttaaatcctagcaggagagaggctctggggcagcccccatgggctcctgcccctttcaggcctacagccacatccccaagcccaccaggtgtcaggatagtcacagtgataccagttcagacactaccccatatacacctggaacattgaggatggaaactggactcacattcgacataccccactgggcacacgcacaaacacacacactatggggtggggtgggtgtaggggcttacaaagccttacacagggcgaggggttggtgggagggttggcacctgcacactccatctcctgctcaccacctgcctctaatctgagctgcagcctggctggtcctcccatttctaaagctgaatgtcaaacagtgccaaatgctggggcagggggtgaagaaccctctgtcccacccctagccaccagtgtcctccaagtgccccctcacctctccaggtgctcattgtaaccatttctcactagtgtcaggcccccagtgggaccacatgccactgcctgcacctttcggcagaggaacccccaccagacatcaccctttgccttagcaggggtgactttgtctctcctggctgggccatccttccgccaatctggcccttacacactcaggcctgtgcccactccctatctccttcccacccctacacacacactccctgcttgcaggaggccaaactgtccctcccttgctgaacacacacacacacacacacacacaggtggggactgggcacagctcttcacaccattcattctggtcatttcccccaaaggcatcccagcctgggggccagtggggaactgagggcaaggggatatagtgatggggctcagatggactgggaggagggggagggtgatgcattaattaatggcttcgttaattaatgtcatgttgcttgtcgctttctcagtgtgtgtgtgtggtccatgcccactgctggtgccagggtgggtgtccatgtgcacccggcctggatgccagctgtgtccttcgggggcgtgcgtgtaactgtagtgtagtcaggtgctcaatggagaatataaacatatacagaaaaatatatattttaagtttaaaaaacagaaaaacagacaaaacaatccccatcaggtagctgtctaacccccagctgggtctaatccttctcattacccacccgacctggctgcccctcaccttgggctgggggactggggggccatttccttttctctgccctttttttgttgttctattttgtacagacaagttggaaaaacaacagcgacaaaaaagtcaagaaactttgtaaaatatcgtgtgtgtgattccttgtaaaatattttcaaatggtttattacagaagatcagttattaaataatgttcatattttcacttc

SEQ ID NO: 2791 - DNA, 5272 bp, Homo sapiens
  source 1..5272: mol_type = unassigned DNA
gcgaagcgagtggctgcagagggctgcatcctgccgtccccagccccccacaaccgtacagccgtgcccaggtttccgcttagggaaccaggaggtccaggccctttctgccagcagccgggcgtgcaagcccccgacagagagaaatcttaaagatagctagagccacgggggctgatgcagcactgggcccggcgtctggagcaggaggtcgacggcgtgatgcggatttttggaggcgtccagcagctccgtgagatttacaaggacaaccggaacctgttcgaggtacaggagaatgagcctcagaagttggtggagaaggtggcaggggacattgagagccttctggacaggaaggtgcaggccctgaagagactggctgatgctgcagagaacttccagaaagcacaccgctggcaggacaacatcaaggaggaagacatcgtgtactatgacgccaaggctgacgctgagctggacgaccctgagagtgaggatgtggaaagggggtctaaggccagcaccctaaggctggacttcatcgaggacccaaacttcaagaacaaggtcaactattcatacgcggctgtacagatccctacggacatctacaaaggctccactgtcatcctcaatgagctcaactggacagaggccctggagaatgtgttcatggaaaaccgcagacaagaccccacactgctgtggcaggtcttcggcagcgccacaggagtcactcgctactacccggccaccccgtggcgagcccccaagaagatcgacctgtacgatgtccgaaggagaccctggtatatccagggggcctcgtcacccaaagacatggtcatcatcgtggatgtgagtggcagtgtgagcggcctgaccctgaagctgatgaagacatctgtctgcgagatgctggacacgctgtctgatgatgactatgtgaatgtggcctcgttcaacgagaaggcacagcctgtgtcatgcttcacacacctggtgcaggccaatgtgcgcaacaagaaggtgttcaaggaagctgtgcagggcatggtggccaagggcaccacaggctacaaggccggctttgagtatgcctttgaccagctgcagaactccaacatcactcgggccaactgcaacaagatgatcatgatgttcacggatggtggtgaggaccgcgtgcaggacgtctttgagaagtacaattggccaaaccggacggtgcgcgtgtttactttctccgtggggcagcataactatgacgtcacaccgctgcagtggatggcctgtgccaacaaaggctactattttgagatcccttccatcggagccatccgcatcaacacacaggaatatctagatgtgttgggcaggcccatggtgctggcaggcaaggaggccaagcaggtgcagtggaccaacgtgtatgaggatgcactgggactggggttggtggtaacagggaccctccctgttttcaacctgacacaggatggccctggggaaaagaagaaccagctgatcctgggcgtgatgggcattgacgtggctctgaatgacatcaagaggctgacccccaactacacgcttggagccaacggctatgtgtttgccattgacctgaacggctacgtgttgctgcaccccaatctcaagccccagaccaccaacttccgggagcctgtgactctggacttcctggatgcggagctagaggatgagaacaaggaagagatccgtcggagcatgattgatggcaacaagggccacaagcagatcagaacgttggtcaagtccctggatgagaggtacatagatgaggtgacacggaactacacctgggtgcctataaggagcactaactacagcctggggctggtgctcccaccctacagcaccttctacctccaagccaatctcagtgaccagatcctgcaggtcaagtattttgagttcctgctccccagcagctttgagtctgaaggacacgttttcattgctcccagagagtactgcaaggacctgaatgcctcagacaacaacaccgagttcctgaaaaactttattgagctcatggagaaagtgactccagactccaagcagtgcaacaacttccttctgcacaacctgatcttggacacgggcatcacgcagcagctggtagagcgtgtgtggagggaccaggatctcaacacgtacagcctactggccgtgttcgctgccacagacggtggcatcacccgagtcttccccaacaaggcagctgaggactggacagagaaccctgagcccttcaatgccagcttctaccgccgcagcctggataaccacggttatgtcttcaagcccccacaccaggatgccctgttaaggccgctggagctggagaatgacactgtgggcatcctcgtcagcacagctgtggagctcagcctaggcaggcgcacactgaggccagcagtggtgggcgtcaagctggacctagaggcttgggctgagaagttcaaggtgctagccagcaaccgtacccaccaagaccagcctcagaagtgcggccccaacagccactgtgagatggactgcgaggttaacaatgaggacttactctgtgtcctcattgatgatggaggattcctggtgctgtcaaaccagaaccatcagtgggaccaggtgggcaggttcttcagtgaggtggatgccaacctgatgctggcactctacaataactccttctacacccgcaaggagtcctatgactatcaggcagcctgtgcccctcagccccctggcaacctgggtgctgcaccccggggtgtctttgtgcccaccgttgcagatttccttaacctggcctggtggacctctgctgccgcctggtccctgttccagcagcttctctacggcctcatctaccacagctggttccaagcagaccccgcggaggccgaggggagccccgagacgcgcgagagcagctgcgtcatgaaacagacccagtactacttcggctcggtaaacgcctcctacaacgccatcatcgactgcggaaactgctccaggctgttccacgcgcagagactgaccaacaccaatcttctctttgtggtggccgagaagccgctgtgcagccagtgcgaggctggccggctgctgcagaaggagacgcactgcccagcggacggcccggagcagtgtgagctagtgcagagaccgcgataccggagaggcccgcacatctgcttcgactacaacgcgacagaagatacctcagactgtggccgcggggcctccttcccgccgtcgctgggcgtcctggtctccctgcaactgctgctcctcctgggcctgccgccccggccgcagcctcaagtcctcgtccacgcctctcgccgcctctgagcaccctgccccaccccacctccactcccacctcacccggcctcttcgcctttcccaccctcctgccccacactccccgccttagagcctcgtccctccctcactgaaggacctgagctggccaggccctgagagtctggtctgcgccttgggatggggagtcccaaagcgggacgccgcaggtgtttggcacccaaatcacatctcacctccgaactgttcaagtgtccccagacccttcttgcctgctgggctccccccagtgggatgggacagggaggccacacgcactggtgccaaaaccaggcctctgctgccgcccttcctggaggctgcctatgttgggggggaccctgcctcagctgacccggcctctctgccccacccaagcccaaacttggtttctgtgagaatagtggaggaaggtgagatggccagtttgaagcctgtgcctcccagcttaaatcctagcaggagagaggctctggggcagcccccatgggctcctgcccctttcaggcctacagccacatccccaagcccaccaggtgtcaggatagtcacagtgataccagttcagacactaccccatatacacctggaacattgaggatggaaactggactcacattcgacataccccactgggcacacgcacaaacacacacactatggggtggggtgggtgtaggggcttacaaagccttacacagggcgaggggttggtgggagggttggcacctgcacactccatctcctgctcaccacctgcctctaatctgagctgcagcctggctggtcctcccatttctaaagctgaatgtcaaacagtgccaaatgctggggcagggggtgaagaaccctctgtcccacccctagccaccagtgtcctccaagtgccccctcacctctccaggtgctcattgtaaccatttctcactagtgtcaggcccccagtgggaccacatgccactgcctgcacctttcggcagaggaacccccaccagacatcaccctttgccttagcaggggtgactttgtctctcctggctgggccatccttccgccaatctggcccttacacactcaggcctgtgcccactccctatctccttcccacccctacacacacactccctgcttgcaggaggccaaactgtccctcccttgctgaacacacacacacacacacacacacaggtggggactgggcacagctcttcacaccattcattctggtcatttcccccaaaggcatcccagcctgggggccagtggggaactgagggcaaggggatatagtgatggggctcagatggactgggaggagggggagggtgatgcattaattaatggcttcgttaattaatgtcatgttgcttgtcgctttctcagtgtgtgtgtgtggtccatgcccactgctggtgccagggtgggtgtccatgtgcacccggcctggatgccagctgtgtccttcgggggcgtgcgtgtaactgtagtgtagtcaggtgctcaatggagaatataaacatatacagaaaaatatatattttaagtttaaaaaacagaaaaacagacaaaacaatccccatcaggtagctgtctaacccccagctgggtctaatccttctcattacccacccgacctggctgcccctcaccttgggctgggggactggggggccatttccttttctctgccctttttttgttgttctattttgtacagacaagttggaaaaacaacagcgacaaaaaagtcaagaaactttgtaaaatatcgtgtgtgtgattccttgtaaaatattttcaaatggtttattacagaagatcagttattaaataatgttcatattttcacttc

SEQ ID NO: 2792 - DNA, 2526 bp, Homo sapiens
  source 1..2526: mol_type = unassigned DNA
gaaggtgctccctggccgggagggctcagaagagaagtagggcatggcatcgtcctctgctgaccacctgcactcggctccccgtgcgctgcaggtccctgttccagcagcttctctacggcctcatctaccacagctggttccaagcagaccccgcggaggccgaggggagccccgagacgcgcgagagcagctgcgtcatgaaacagacccagtactacttcggctcggtaaacgcctcctacaacgccatcatcgactgcggaaactgctccaggctgttccacgcgcagagactgaccaacaccaatcttctctttgtggtggccgagaagccgctgtgcagccagtgcgaggctggccggctgctgcagaaggagacgcactgtatcctgcccccgccctccccgccgcccgctccccctctgccccgcgcgccccctccgtgccgccgccgccgtccgcctccttgactccccacccatgcccagcggacggcccggagcagtgtgagctagtgcagagaccgcgataccggagaggcccgcacatctgcttcgactacaacgcgacagaagatacctcagactgtggccgcggggcctccttcccgccgtcgctgggcgtcctggtctccctgcaactgctgctcctcctgggcctgccgccccggccgcagcctcaagtcctcgtccacgcctctcgccgcctctgagcaccctgccccaccccacctccactcccacctcacccggcctcttcgcctttcccaccctcctgccccacactccccgccttagagcctcgtccctccctcactgaaggacctgagctggccaggccctgagagtctggtctgcgccttgggatggggagtcccaaagcgggacgccgcaggtgtttggcacccaaatcacatctcacctccgaactgttcaagtgtccccagacccttcttgcctgctgggctccccccagtgggatgggacagggaggccacacgcactggtgccaaaaccaggcctctgctgccgcccttcctggaggctgcctatgttgggggggaccctgcctcagctgacccggcctctctgccccacccaagcccaaacttggtttctgtgagaatagtggaggaaggtgagatggccagtttgaagcctgtgcctcccagcttaaatcctagcaggagagaggctctggggcagcccccatgggctcctgcccctttcaggcctacagccacatccccaagcccaccaggtgtcaggatagtcacagtgataccagttcagacactaccccatatacacctggaacattgaggatggaaactggactcacattcgacataccccactgggcacacgcacaaacacacacactatggggtggggtgggtgtaggggcttacaaagccttacacagggcgaggggttggtgggagggttggcacctgcacactccatctcctgctcaccacctgcctctaatctgagctgcagcctggctggtcctcccatttctaaagctgaatgtcaaacagtgccaaatgctggggcagggggtgaagaaccctctgtcccacccctagccaccagtgtcctccaagtgccccctcacctctccaggtgctcattgtaaccatttctcactagtgtcaggcccccagtgggaccacatgccactgcctgcacctttcggcagaggaacccccaccagacatcaccctttgccttagcaggggtgactttgtctctcctggctgggccatccttccgccaatctggcccttacacactcaggcctgtgcccactccctatctccttcccacccctacacacacactccctgcttgcaggaggccaaactgtccctcccttgctgaacacacacacacacacacacacacaggtggggactgggcacagctcttcacaccattcattctggtcatttcccccaaaggcatcccagcctgggggccagtggggaactgagggcaaggggatatagtgatggggctcagatggactgggaggagggggagggtgatgcattaattaatggcttcgttaattaatgtcatgttgcttgtcgctttctcagtgtgtgtgtgtggtccatgcccactgctggtgccagggtgggtgtccatgtgcacccggcctggatgccagctgtgtccttcgggggcgtgcgtgtaactgtagtgtagtcaggtgctcaatggagaatataaacatatacagaaaaatatatattttaagtttaaaaaacagaaaaacagacaaaacaatccccatcaggtagctgtctaacccccagctgggtctaatccttctcattacccacccgacctggctgcccctcaccttgggctgggggactggggggccatttccttttctctgccctttttttgttgttctattttgtacagacaagttggaaaaacaacagcgacaaaaaagtcaagaaactttgtaaaatatcgtgtgtgtgattccttgtaaaatattttc

SEQ ID NO: 2793 - DNA, 5206 bp, Homo sapiens
  source 1..5206: mol_type = unassigned DNA
atggcggtgccggctcggacctgcggcgcctctcggcccggcccagcgcggactgcgcgcccctggcccggctgcggcccccaccctggccccggcacccggcgcccgacgtccgggcccccgcgcccgctgtggctgctgctgccgcttctaccgctgctcgccgcccccggcgcctctgcctacagcttcccccagcagcacacgatgcagcactgggcccggcgtctggagcaggaggtcgacggcgtgatgcggatttttggaggcgtccagcagctccgtgagatttacaaggacaaccggaacctgttcgaggtacaggagaatgagcctcagaagttggtggagaaggtggcaggggacattgagagccttctggacaggaaggtgcaggccctgaagagactggctgatgctgcagagaacttccagaaagcacaccgctggcaggacaacatcaaggaggaagacatcgtgtactatgacgccaaggctgacgctgagctggacgaccctgagagtgaggatgtggaaagggggtctaaggccagcaccctaaggctggacttcatcgaggacccaaacttcaagaacaaggtcaactattcatacgcggctgtacagatccctacggacatctacaaaggctccactgtcatcctcaatgagctcaactggacagaggccctggagaatgtgttcatggaaaaccgcagacaagaccccacactgctgtggcaggtcttcggcagcgccacaggagtcactcgctactacccggccaccccgtggcgagcccccaagaagatcgacctgtacgatgtccgaaggagaccctggtatatccagggggcctcgtcacccaaagacatggtcatcatcgtggatgtgagtggcagtgtgagcggcctgaccctgaagctgatgaagacatctgtctgcgagatgctggacacgctgtctgatgatgactatgtgaatgtggcctcgttcaacgagaaggcacagcctgtgtcatgcttcacacacctggtgcaggccaatgtgcgcaacaagaaggtgttcaaggaagctgtgcagggcatggtggccaagggcaccacaggctacaaggccggctttgagtatgcctttgaccagctgcagaactccaacatcactcgggccaactgcaacaagatgatcatgatgttcacggatggtggtgaggaccgcgtgcaggacgtctttgagaagtacaattggccaaaccggacggtgcgcgtgtttactttctccgtggggcagcataactatgacgtcacaccgctgcagtggatggcctgtgccaacaaaggctactattttgagatcccttccatcggagccatccgcatcaacacacaggaatatctagatgtgttgggcaggcccatggtgctggcaggcaaggaggccaagcaggtgcagtggaccaacgtgtatgaggatgcactgggactggggttggtggtaacagggaccctccctgttttcaacctgacacaggatggccctggggaaaagaagaaccagctgatcctgggcgtgatgggcattgacgtggctctgaatgacatcaagaggctgacccccaactacacgcttggagccaacggctatgtgtttgccattgacctgaacggctacgtgttgctgcaccccaatctcaagccccagaccaccaacttccgggagcctgtgactctggacttcctggatgcggagctagaggatgagaacaaggaagagatccgtcggagcatgattgatggcaacaagggccacaagcagatcagaacgttggtcaagtccctggatgagaggtacatagatgaggtgacacggaactacacctgggtgcctataaggagcactaactacagcctggggctggtgctcccaccctacagcaccttctacctccaagccaatctcagtgaccagatcctgcaggtcaagtattttgagttcctgctccccagcagctttgagtctgaaggacacgttttcattgctcccagagagtactgcaaggacctgaatgcctcagacaacaacaccgagttcctgaaaaactttattgagctcatggagaaagtgactccagactccaagcagtgcaacaacttccttctgcacaacctgatcttggacacgggcatcacgcagcagctggtagagcgtgtgtggagggaccaggatctcaacacgtacagcctactggccgtgttcgctgccacagacggtggcatcacccgagtcttccccaacaaggcagctgaggactggacagagaaccctgagcccttcaatgccagcttctaccgccgcagcctggataaccacggttatgtcttcaagcccccacaccaggatgccctgttaaggccgctggagctggagaatgacactgtgggcatcctcgtcagcacagctgtggagctcagcctaggcaggcgcacactgaggccagcagtggtgggcgtcaagctggacctagaggcttgggctgagaagttcaaggtgctagccagcaaccgtacccaccaagaccagcctcagaagtgcggccccaacagccactgtgagatggactgcgaggttaacaatgaggacttactctgtgtcctcattgatgatggaggattcctggtgctgtcaaaccagaaccatcagtgggaccaggtgggcaggttcttcagtgaggtggatgccaacctgatgctggcactctacaataactccttctacacccgcaaggagtcctatgactatcaggcagcctgtgcccctcagccccctggcaacctgggtgctgcaccccggggtgtctttgtgcccaccgttgcagatttccttaacctggcctggtggacctctgctgccgcctggtccctgttccagcagcttctctacggcctcatctaccacagctggttccaagcagaccccgcggaggccgaggggagccccgagacgcgcgagagcagctgcgtcatgaaacagacccagtactacttcggctcggtaaacgcctcctacaacgccatcatcgactgcggaaactgctccaggctgttccacgcgcagagactgaccaacaccaatcttctctttgtggtggccgagaagccgctgtgcagccagtgcgaggctggccggctgctgcagaaggagacgcactcggacggcccggagcagtgtgagctagtgcagagaccgcgataccggagaggcccgcacatctgcttcgactacaacgcgacagaagatacctcagactgtggccgcggggcctccttcccgccgtcgctgggcgtcctggtctccctgcaactgctgctcctcctgggcctgccgccccggccgcagcctcaagtcctcgtccacgcctctcgccgcctctgagcaccctgccccaccccacctccactcccacctcacccggcctcttcgcctttcccaccctcctgccccacactccccgccttagagcctcgtccctccctcactgaaggacctgagctggccaggccctgagagtctggtctgcgccttgggatggggagtcccaaagcgggacgccgcaggtgtttggcacccaaatcacatctcacctccgaactgttcaagtgtccccagacccttcttgcctgctgggctccccccagtgggatgggacagggaggccacacgcactggtgccaaaaccaggcctctgctgccgcccttcctggaggctgcctatgttgggggggaccctgcctcagctgacccggcctctctgccccacccaagcccaaacttggtttctgtgagaatagtggaggaaggtgagatggccagtttgaagcctgtgcctcccagcttaaatcctagcaggagagaggctctggggcagcccccatgggctcctgcccctttcaggcctacagccacatccccaagcccaccaggtgtcaggatagtcacagtgataccagttcagacactaccccatatacacctggaacattgaggatggaaactggactcacattcgacataccccactgggcacacgcacaaacacacacactatggggtggggtgggtgtaggggcttacaaagccttacacagggcgaggggttggtgggagggttggcacctgcacactccatctcctgctcaccacctgcctctaatctgagctgcagcctggctggtcctcccatttctaaagctgaatgtcaaacagtgccaaatgctggggcagggggtgaagaaccctctgtcccacccctagccaccagtgtcctccaagtgccccctcacctctccaggtgctcattgtaaccatttctcactagtgtcaggcccccagtgggaccacatgccactgcctgcacctttcggcagaggaacccccaccagacatcaccctttgccttagcaggggtgactttgtctctcctggctgggccatccttccgccaatctggcccttacacactcaggcctgtgcccactccctatctccttcccacccctacacacacactccctgcttgcaggaggccaaactgtccctcccttgctgaacacacacacacacacacacacacaggtggggactgggcacagctcttcacaccattcattctggtcatttcccccaaaggcatcccagcctgggggccagtggggaactgagggcaaggggatatagtgatggggctcagatggactgggaggagggggagggtgatgcattaattaatggcttcgttaattaatgtcatgttgcttgtcgctttctcagtgtgtgtgtgtggtccatgcccactgctggtgccagggtgggtgtccatgtgcacccggcctggatgccagctgtgtccttcgggggcgtgcgtgtaactgtagtgtagtcaggtgctcaatggagaatataaacatatacagaaaaatatatattttaagtttaaaaaacagaaaaacagacaaaacaatccccatcaggtagctgtctaacccccagctgggtctaatccttctcattacccacccgacctggctgcccctcaccttgggctgggggactggggggccatttccttttctctgccctttttttgttgttctattttgtacagacaagttggaaaaacaacagcgacaaaaaagtcaagaaactttgt

SEQ ID NO: 2794 - DNA, 3453 bp, Homo sapiens
  source 1..3453: mol_type = unassigned DNA
atggcggtgccggctcggacctgcggcgcctctcggcccggcccagcgcggactgcgcgcccctggcccggctgcggcccccaccctggccccggcacccggcgcccgacgtccgggcccccgcgcccgctgtggctgctgctgccgcttctaccgctgctcgccgcccccggcgcctctgcctacagcttcccccagcagcacacgatgcagcactgggcccggcgtctggagcaggaggtcgacggcgtgatgcggatttttggaggcgtccagcagctccgtgagatttacaaggacaaccggaacctgttcgaggtacaggagaatgagcctcagaagttggtggagaaggtggcaggggacattgagagccttctggacaggaaggtgcaggccctgaagagactggctgatgctgcagagaacttccagaaagcacaccgctggcaggacaacatcaaggaggaagacatcgtgtactatgacgccaaggctgacgctgagctggacgaccctgagagtgaggatgtggaaagggggtctaaggccagcaccctaaggctggacttcatcgaggacccaaacttcaagaacaaggtcaactattcatacgcggctgtacagatccctacggacatctacaaaggctccactgtcatcctcaatgagctcaactggacagaggccctggagaatgtgttcatggaaaaccgcagacaagaccccacactgctgtggcaggtcttcggcagcgccacaggagtcactcgctactacccggccaccccgtggcgagcccccaagaagatcgacctgtacgatgtccgaaggagaccctggtatatccagggggcctcgtcacccaaagacatggtcatcatcgtggatgtgagtggcagtgtgagcggcctgaccctgaagctgatgaagacatctgtctgcgagatgctggacacgctgtctgatgatgactatgtgaatgtggcctcgttcaacgagaaggcacagcctgtgtcatgcttcacacacctggtgcaggccaatgtgcgcaacaagaaggtgttcaaggaagctgtgcagggcatggtggccaagggcaccacaggctacaaggccggctttgagtatgcctttgaccagctgcagaactccaacatcactcgggccaactgcaacaagatgatcatgatgttcacggatggtggtgaggaccgcgtgcaggacgtctttgagaagtacaattggccaaaccggacggtgcgcgtgtttactttctccgtggggcagcataactatgacgtcacaccgctgcagtggatggcctgtgccaacaaaggctactattttgagatcccttccatcggagccatccgcatcaacacacaggaatatctagatgtgttgggcaggcccatggtgctggcaggcaaggaggccaagcaggtgcagtggaccaacgtgtatgaggatgcactgggactggggttggtggtaacagggaccctccctgttttcaacctgacacaggatggccctggggaaaagaagaaccagctgatcctgggcgtgatgggcattgacgtggctctgaatgacatcaagaggctgacccccaactacacgcttggagccaacggctatgtgtttgccattgacctgaacggctacgtgttgctgcaccccaatctcaagccccagaccaccaacttccgggagcctgtgactctggacttcctggatgcggagctagaggatgagaacaaggaagagatccgtcggagcatgattgatggcaacaagggccacaagcagatcagaacgttggtcaagtccctggatgagaggtacatagatgaggtgacacggaactacacctgggtgcctataaggagcactaactacagcctggggctggtgctcccaccctacagcaccttctacctccaagccaatctcagtgaccagatcctgcaggtcaagttgccaatcagcaaactgaaggattttgagttcctgctccccagcagctttgagtctgaaggacacgttttcattgctcccagagagtactgcaaggacctgaatgcctcagacaacaacaccgagttcctgaaaaactttattgagctcatggagaaagtgactccagactccaagcagtgcaacaacttccttctgcacaacctgatcttggacacgggcatcacgcagcagctggtagagcgtgtgtggagggaccaggatctcaacacgtacagcctactggccgtgttcgctgccacagacggtggcatcacccgagtcttccccaacaaggcagctgaggactggacagagaaccctgagcccttcaatgccagcttctaccgccgcagcctggataaccacggttatgtcttcaagcccccacaccaggatgccctgttaaggccgctggagctggagaatgacactgtgggcatcctcgtcagcacagctgtggagctcagcctaggcaggcgcacactgaggccagcagtggtgggcgtcaagctggacctagaggcttgggctgagaagttcaaggtgctagccagcaaccgtacccaccaagaccagcctcagaagtgcggccccaacagccactgtgagatggactgcgaggttaacaatgaggacttactctgtgtcctcattgatgatggaggattcctggtgctgtcaaaccagaaccatcagtgggaccaggtgggcaggttcttcagtgaggtggatgccaacctgatgctggcactctacaataactccttctacacccgcaaggagtcctatgactatcaggcagcctgtgcccctcagccccctggcaacctgggtgctgcaccccggggtgtctttgtgcccaccgttgcagatttccttaacctggcctggtggacctctgctgccgcctggtccctgttccagcagcttctctacggcctcatctaccacagctggttccaagcagaccccgcggaggccgaggggagccccgagacgcgcgagagcagctgcgtcatgaaacagacccagtactacttcggctcggtaaacgcctcctacaacgccatcatcgactgcggaaactgctccaggctgttccacgcgcagagactgaccaacaccaatcttctctttgtggtggccgagaagccgctgtgcagccagtgcgaggctggccggctgctgcagaaggagacgcactcggacggcccggagcagtgtgagctagtgcagagaccgcgataccggagaggcccgcacatctgcttcgactacaacgcgacagaagatacctcagactgtggccgcggggcctccttcccgccgtcgctgggcgtcctggtctccctgcaactgctgctcctcctgggcctgccgccccggccgcagcctcaagtcctcgtccacgcctctcgccgcctctga

SEQ ID NO: 2795 - DNA, 1030 bp, Homo sapiens
  source 1..1030: mol_type = unassigned DNA
agagcgcttggagccagcgctgcagggagatagcagcgcgcagcccgcagaggcgctgcggcccgtgcagccccggaggcccctcgcggagaaggcggcggcggaggagaggccgagttaccgcccgccgcccgcgcccccccaaccccgccgccgccgccgccgccgccactgccccccctccccgcggcgccgcatcttgaatggaaacatggcggtgccggctcggacctgcggcgcctctcggcccggcccagcgcggactgcgcgcccctggcccggctgcggcccccaccctggccccggcacccggcgcccgacgtccgggcccccgcgcccgctgtggctgctgctgccgcttctaccgctgctcgccgcccccggcgcctctgcctacagcttcccccagcagcacacgatgcagcactgggcccggcgtctggagcaggaggtcgacggcgtgatgcggatttttggaggcgtccagcagctccgtgagatttacaaggacaaccggaacctgttcgaggtacaggagaatgagcctcagaagttggtggagaaggtggcaggggacattgagagccttctggacaggaaggtgcaggccctgaagcagctcctgacattcccaactgggaagctctcagagatgggccattctccaagccccaaatgggctcagccctggccgaaggagggacaaggaagaatcagtccccaacatgacctcaagaaaatctggtgcagagtggccacctctgtaaatcagctgatgcctgcaccactgtaaccacagctgttgacaggctgcagggcagaagctaagcaggaagaggcccagagcagagggcaagtgagcacggcagtaagaagttgaaaaccattaattgtccgtccagaggaggcggatgcccacaacattctgggcaaaggagatggtgtgtgcaaaagcacggaggtgtgagaatatagcatagtagacattcatcattcctttctcatgcactggagtgtctgtgcagccagg

SEQ ID NO: 2796 - DNA, 3675 bp, Homo sapiens
  source 1..3675: mol_type = unassigned DNA
cggccgctctcgtcgccgccgcagcgggcgcgtcggagggagcccagcatggccgggccgggctcgccgcgccgcgcgtcccggggggcctcggcgcttctcgctgccgcgcttctctacgccgcgctgggggacgtggtgcgctcggagcagcagataccgctctccgtggtgaagctctgggcctcggcttttggtggggagataaaatccattgctgctaagtactccggttcccagcttctgcaaaagaaatacaaagagtatgagaaagacgttgccatagaagaaattgatggcctccaactggtaaagaagctggcaaagaacatggaagagatgtttcacaagaagtctgaggccgtcaggcgtctggtggaggctgcagaagaagcacacctgaaacatgaatttgatgcagacttacagtatgaatacttcaatgctgtgctgataaatgaaagggacaaagacgggaattttttggagctgggaaaggaattcatcttagccccaaatgaccattttaataatttgcctgtgaacatcagtctaagtgacgtccaagtaccaacgaacatgtacaacaaagaccctgcaattgtcaatggggtttattggtctgaatctctaaacaaagtttttgtagataactttgaccgtgacccatctctcatatggcagtactttggaagtgcaaagggcttttttaggcagtatccggggattaaatgggaaccagatgagaatggagtcattgccttcgactgcaggaaccgaaaatggtacatccaggcagcaacttctccgaaagacgtggtcattttagttgacgtcagtggcagcatgaaaggactccgtctgactatcgcgaagcaaacagtctcatccattttggatacacttggggatgatgacttcttcaacataattgcttataatgaggagcttcactatgtggaaccttgcctgaatggaactttggtgcaagccgacaggacaaacaaagagcacttcagggagcatctggacaaacttttcgccaaaggaattggaatgttggatatagctctgaatgaggccttcaacattctgagtgatttcaaccacacgggacaaggaagtatctgcagtcaggccatcatgctcataactgatggggcggtggacacctatgatacaatctttgcaaaatacaattggccagatcgaaaggttcgcatcttcacatacctcattggacgagaggctgcgtttgcagacaatctaaagtggatggcctgtgccaacaaaggattttttacccagatctccaccttggctgatgtgcaggagaatgtcatggaataccttcacgtgcttagccggcccaaagtcatcgaccaggagcatgatgtggtgtggaccgaagcttacattgacagcactctccctcaggcacaaaagctgactgatgatcagggccccgtcctgatgaccactgtagccatgcctgtgtttagtaagcagaacgaaaccagatcgaagggcattcttctgggagtggttggcacagatgtcccagtgaaagaacttctgaagaccatccccaaatacaagttagggattcacggttatgcctttgcaatcacaaataatggatatatcctgacgcatccggaactcaggctgctgtacgaagaaggaaaaaagcgaaggaaacctaactatagtagcgttgacctctctgaggtggagtgggaagaccgagatgacgtgttgagaaatgctatggtgaatcgaaagacggggaagttttccatggaggtgaagaagacagtggacaaagggaaacgggttttggtgatgacaaatgactactattatacagacatcaagggtactcctttcagtttaggtgtggcgctttccagaggtcatgggaaatatttcttccgagggaatgtaaccatcgaagaaggcctgcatgacttagaacatcccgatgtgtccttggcagatgaatggtcctactgcaacactgacctacaccctgagcaccgccatctgtctcagttagaagcgattaagctctacctaaaaggcaaagaacctctgctccagtgtgataaagaattgatccaagaagtcctttttgacgcggtggtgagtgcccccattgaagcgtattggaccagcctggccctcaacaaatctgaaaattctgacaagggcgtggaggttgccttcctcggcactcgcacgggcctctccagaatcaacctgtttgtcggggctgagcagctcaccaatcaggacttcctgaaagctggcgacaaggagaacatttttaacgcagaccatttccctctctggtaccgaagagccgctgagcagattccagggagcttcgtctactcgatcccattcagcactggaccagtcaataaaagcaatgtggtgacagcaagtacatccatccagctcctggatgaacggaaatctcctgtggtggcagctgtaggcattcagatgaaacttgaatttttccaaaggaagttctggactgccagcagacagtgtgcttccctggatggcaaatgctccatcagctgtgatgatgagactgtgaattgttacctcatagacaataatggatttattttggtgtctgaagactacacacagactggagacttttttggtgagatcgagggagctgtgatgaacaaattgctaacaatgggctcctttaaaagaattaccctttatgactaccaagccatgtgtagagccaacaaggaaagcagcgatggcgcccatggcctcctggatccttataatgccttcctctctgcagtaaaatggatcatgacagaacttgtcttgttcctggtggaatttaacctctgcagttggtggcactccgatatgacagctaaagcccagaaattgaaacagaccctggagccttgtgatactgaatatccagcattcgtctctgagcgcaccatcaaggagactacagggaatattgcttgtgaagactgctccaagtcctttgtcatccagcaaatcccaagcagcaacctgttcatggtggtggtggacagcagctgcctctgtgaatctgtggcccccatcaccatggcacccattgaaatcaggtataatgaatcccttaagtgtgaacgtctaaaggcccagaagatcagaaggcgcccagaatcttgtcatggcttccatcctgaggagaatgcaagggagtgtgggggtgcgccgagtctccaagcccagacagtcctccttctgctccctctgcttttgatgctcttctcaaggtgacactgactgagatgttctcttactgactgagatgttctcttggcatgctaaatcatggataaactgtgaaccaaaatatggtgcaacatacgagacatgaatatagtccaaccatcagcatctcatcatgattttaaactgtgcgtgatataaactcttaaagatatgttgacaaaaagttatctatcatctttttactttgccagtcatgcaaatgtgagtttgccacatgataatcacccttcatcagaaatgggaccgcaagtggtaggcagtgtcccttctgcttgaaacctattgaaaccaatttaaaactgtgtactttttaaataaagtatattaaaatcataa

SEQ ID NO: 2797 - DNA, 3557 bp, Homo sapiens
  source 1..3557: mol_type = unassigned DNA
gttgactgtgacacgggtgttacatatcttcctgtgccccttctccctgtagggtgaagctctgggcctcggcttttggtggggagataaaatccattgctgctaagtactccggttcccagcttctgcaaaagaaatacaaagagtatgagaaagacgttgccatagaagaaattgatggcctccaactggtaaagaagctggcaaagaacatggaagagatgtttcacaagaagtctgaggccgtcaggcgtctggtggaggctgcagaagaagcacacctgaaacatgaatttgatgcagacttacagtatgaatacttcaatgctgtgctgataaatgaaagggacaaagacgggaattttttggagctgggaaaggaattcatcttagccccaaatgaccattttaataatttgcctgtgaacatcagtctaagtgacgtccaagtaccaacgaacatgtacaacaaagaccctgcaattgtcaatggggtttattggtctgaatctctaaacaaagtttttgtagataactttgaccgtgacccatctctcatatggcagtactttggaagtgcaaagggcttttttaggcagtatccggggattaaatgggaaccagatgagaatggagtcattgccttcgactgcaggaaccgaaaatggtacatccaggcagcaacttctccgaaagacgtggtcattttagttgacgtcagtggcagcatgaaaggactccgtctgactatcgcgaagcaaacagtctcatccattttggatacacttggggatgatgacttcttcaacataattgcttataatgaggagcttcactatgtggaaccttgcctgaatggaactttggtgcaagccgacaggacaaacaaagagcacttcagggagcatctggacaaacttttcgccaaaggaattggaatgttggatatagctctgaatgaggccttcaacattctgagtgatttcaaccacacgggacaaggaagtatctgcagtcaggccatcatgctcataactgatggggcggtggacacctatgatacaatctttgcaaaatacaattggccagatcgaaaggttcgcatcttcacatacctcattggacgagaggctgcgtttgcagacaatctaaagtggatggcctgtgccaacaaaggattttttacccagatctccaccttggctgatgtgcaggagaatgtcatggaataccttcacgtgcttagccggcccaaagtcatcgaccaggagcatgatgtggtgtggaccgaagcttacattgacagcactctccctcaggcacaaaagctgactgatgatcagggccccgtcctgatgaccactgtagccatgcctgtgtttagtaagcagaacgaaaccagatcgaagggcattcttctgggagtggttggcacagatgtcccagtgaaagaacttctgaagaccatccccaaatacaagttagggattcacggttatgcctttgcaatcacaaataatggatatatcctgacgcatccggaactcaggctgctgtacgaagaaggaaaaaagcgaaggaaacctaactatagtagcgttgacctctctgaggtggagtgggaagaccgagatgacgtgttgagaaatgctatggtgaatcgaaagacggggaagttttccatggaggtgaagaagacagtggacaaagggaaacgggttttggtgatgacaaatgactactattatacagacatcaagggtactcctttcagtttaggtgtggcgctttccagaggtcatgggaaatatttcttccgagggaatgtaaccatcgaagaaggcctgcatgacttagaacatcccgatgtgtccttggcagatgaatggtcctactgcaacactgacctacaccctgagcaccgccatctgtctcagttagaagcgattaagctctacctaaaaggcaaagaacctctgctccagtgtgataaagaattgatccaagaagtcctttttgacgcggtggtgagtgcccccattgaagcgtattggaccagcctggccctcaacaaatctgaaaattctgacaagggcgtggaggttgccttcctcggcactcgcacgggcctctccagaatcaacctgtttgtcggggctgagcagctcaccaatcaggacttcctgaaagctggcgacaaggagaacatttttaacgcagaccatttccctctctggtaccgaagagccgctgagcagattccagggagcttcgtctactcgatcccattcagcactggaccagtcaataaaagcaatgtggtgacagcaagtacatccatccagctcctggatgaacggaaatctcctgtggtggcagctgtaggcattcagatgaaacttgaatttttccaaaggaagttctggactgccagcagacagtgtgcttccctggatggcaaatgctccatcagctgtgatgatgagactgtgaattgttacctcatagacaataatggatttattttggtgtctgaagactacacacagactggagacttttttggtgagatcgagggagctgtgatgaacaaattgctaacaatgggctcctttaaaagaattaccctttatgactaccaagccatgtgtagagccaacaaggaaagcagcgatggcgcccatggcctcctggatccttataatgccttcctctctgcagtaaaatggatcatgacagaacttgtcttgttcctggtggaatttaacctctgcagttggtggcactccgatatgacagctaaagcccagaaattgaaacagaccctggagccttgtgatactgaatatccagcattcgtctctgagcgcaccatcaaggagactacagggaatattgcttgtgaagactgctccaagtcctttgtcatccagcaaatcccaagcagcaacctgttcatggtggtggtggacagcagctgcctctgtgaatctgtggcccccatcaccatggcacccattgaaatcaggtataatgaatcccttaagtgtgaacgtctaaaggcccagaagatcagaaggcgcccagaatcttgtcatggcttccatcctgaggagaatgcaagggagtgtgggggtgcgccgagtctccaagcccagacagtcctccttctgctccctctgcttttgatgctcttctcaaggtgacactgactgagatgttctcttactgactgagatgttctcttggcatgctaaatcatggataaactgtgaaccaaaatatggtgcaacatacgagacatgaatatagtccaaccatcagcatctcatcatgattttaaactgtgcgtgatataaactcttaaagatatgttgacaaaaagttatctatcatctttttactttgccagtcatgcaaatgtgagtttgccacatgataatcacccttcatcagaaatgggaccgcaagtggtaggcagtgtcccttctgcttgaaacctattgaaaccaatttaaaactgtgtactttttaaataaagtatattaaaatcataa

SEQ ID NO: 2798 - DNA, 3477 bp, Homo sapiens
  source 1..3477: mol_type = unassigned DNA
gttgactgtgacacgggtgttacatatcttcctgtgccccttctccctgtagggtgaagctctgggcctcggcttttggtggggagataaaatccattgctgctaagtactccggttcccagcttctgcaaaagaaatacaaagagtatgagaaagacgttgccatagaagaaattgatggcctccaactggtaaagaagctggcaaagaacatggaagagatgtttcacaagaagtctgaggccgtcaggcgtctggtggaggctgcagaagaagcacacctgaaacatgaatttgatgcagacttacagtatgaatacttcaatgctgtgctgataaatgaaagggacaaagacgggaattttttggagctgggaaaggaattcatcttagccccaaatgaccattttaataatttgcctgtgaacatcagtctaagtgacgtccaagtaccaacgaacatgtacaacaaagaccctgcaattgtcaatggggtttattggtctgaatctctaaacaaagtttttgtagataactttgaccgtgacccatctctcatatggcagtactttggaagtgcaaagggcttttttaggcagtatccggggattaaatgggaaccagatgagaatggagtcattgccttcgactgcaggaaccgaaaatggtacatccaggcagcaacttctccgaaagacgtggtcattttagttgacgtcagtggcagcatgaaaggactccgtctgactatcgcgaagcaaacagtctcatccattttggatacacttggggatgatgacttcttcaacataattgcttataatgaggagcttcactatgtggaaccttgcctgaatggaactttggtgcaagccgacaggacaaacaaagagcacttcagggagcatctggacaaacttttcgccaaaggaattggaatgttggatatagctctgaatgaggccttcaacattctgagtgatttcaaccacacgggacaaggaagtatctgcagtcaggccatcatgctcataactgatggggcggtggacacctatgatacaatctttgcaaaatacaattggccagatcgaaaggttcgcatcttcacatacctcattggacgagaggctgcgtttgcagacaatctaaagtggatggcctgtgccaacaaaggattttttacccagatctccaccttggctgatgtgcaggagaatgtcatggaataccttcacgtgcttagccggcccaaagtcatcgaccaggagcatgatgtggtgtggaccgaagcttacattgacagcactctgactgatgatcagggccccgtcctgatgaccactgtagccatgcctgtgtttagtaagcagaacgaaaccagatcgaagggcattcttctgggagtggttggcacagatgtcccagtgaaagaacttctgaagaccatccccaaatacaagttagggattcacggttatgcctttgcaatcacaaataatggatatatcctgacgcatccggaactcaggctgctgtacgaagaaggaaaaaagcgaaggaaacctaactatagtagcgttgacctctctgaggtggagtgggaagaccgagatgacgtgttgagaaatgctatggtgaatcgaaagacggggaagttttccatggaggtgaagaagacagtggacaaagggtttaggtgtggcgctttccagaggtcatgggaaatatttcttccgagggaatgtaaccatcgaagaaggcctgcatgacttagaacatcccgatgtgtccttggcagatgaatggtcctactgcaacactgacctacaccctgagcaccgccatctgtctcagttagaagcgattaagctctacctaaaaggcaaagaacctctgctccagtgtgataaagaattgatccaagaagtcctttttgacgcggtggtgagtgcccccattgaagcgtattggaccagcctggccctcaacaaatctgaaaattctgacaagggcgtggaggttgccttcctcggcactcgcacgggcctctccagaatcaacctgtttgtcggggctgagcagctcaccaatcaggacttcctgaaagctggcgacaaggagaacatttttaacgcagaccatttccctctctggtaccgaagagccgctgagcagattccagggagcttcgtctactcgatcccattcagcactggaccagtcaataaaagcaatgtggtgacagcaagtacatccatccagctcctggatgaacggaaatctcctgtggtggcagctgtaggcattcagatgaaacttgaatttttccaaaggaagttctggactgccagcagacagtgtgcttccctggatggcaaatgctccatcagctgtgatgatgagactgtgaattgttacctcatagacaataatggatttattttggtgtctgaagactacacacagactggagacttttttggtgagatcgagggagctgtgatgaacaaattgctaacaatgggctcctttaaaagaattaccctttatgactaccaagccatgtgtagagccaacaaggaaagcagcgatggcgcccatggcctcctggatccttataatgccttcctctctgcagtaaaatggatcatgacagaacttgtcttgttcctggtggaatttaacctctgcagttggtggcactccgatatgacagctaaagcccagaaattgaaacagaccctggagccttgtgatactgaatatccagcattcgtctctgagcgcaccatcaaggagactacagggaatattgcttgtgaagactgctccaagtcctttgtcatccagcaaatcccaagcagcaacctgttcatggtggtggtggacagcagctgcctctgtgaatctgtggcccccatcaccatggcacccattgaaatcaggtataatgaatcccttaagtgtgaacgtctaaaggcccagaagatcagaaggcgcccagaatcttgtcatggcttccatcctgaggagaatgcaagggagtgtgggggtgcgccgagtctccaagcccagacagtcctccttctgctccctctgcttttgatgctcttctcaaggtgacactgactgagatgttctcttactgactgagatgttctcttggcatgctaaatcatggataaactgtgaaccaaaatatggtgcaacatacgagacatgaatatagtccaaccatcagcatctcatcatgattttaaactgtgcgtgatataaactcttaaagatatgttgacaaaaagttatctatcatctttttactttgccagtcatgcaaatgtgagtttgccacatgataatcacccttcatcagaaatgggaccgcaagtggtaggcagtgtcccttctgcttgaaacctattgaaaccaatttaaaactgtgtactttttaaataaagtatattaaaatcataa

SEQ ID NO: 2799 - DNA, 1972 bp, Homo sapiens
  source 1..1972: mol_type = unassigned DNA
gttacatatcttcctgtgccccttctccctgtagggtgaagctctgggcctcggcttttggtggggagataaaatccattgctgctaagtactccggttcccagcttctgcaaaagaaatacaaagagtatgagaaagacgttgccatagaagaaattgatggcctccaactggtaaagaagctggcaaagaacatggaagagatgtttcacaagaagtctgaggccgtcaggcgtctggtggaggctgcagaagaagcacacctgaaacatgaatttgatgcagacttacagtatgaatacttcaatgctgtgctgataaatgaaagggacaaagacgggaattttttggagctgggaaaggaattcatcttagccccaaatgaccattttaataatttgcctgtgaacatcagtctaagtgacgtccaagtaccaacgaacatgtacaacaaagaccctgcaattgtcaatggggtttattggtctgaatctctaaacaaagtttttgtagataactttgaccgtgacccatctctcatatggcagtactttggaagtgcaaagggcttttttaggcagtatccggggattaaatgggaaccagatgagaatggagtcattgccttcgactgcaggaaccgaaaatggtacatccaggcagcaacttctccgaaagacgtggtcattttagttgacgtcagtggcagcatgaaaggactccgtctgactatcgcgaagcaaacagtctcatccattttggatacacttggggatgatgacttcttcaacataattgcttataatgaggagcttcactatgtggaaccttgcctgaatggaactttggtgcaagccgacaggacaaacaaagagcacttcagggagcatctggacaaacttttcgccaaaggaattggaatgttggatatagctctgaatgaggccttcaacattctgagtgatttcaaccacacgggacaaggaagtatctgcagtcaggccatcatgctcataactgatggggcggtggacacctatgatacaatctttgcaaaatacaattggccagatcgaaaggttcgcatcttcacatacctcattggacgagaggctgcgtttgcagacaatctaaagtggatggcctgtgccaacaaaggattttttacccagatctccaccttggctgatgtgcaggagaatgtcatggaataccttcacgtgcttagccggcccaaagtcatcgaccaggagcatgatgtggtgtggaccgaagcttacattgacagcactctccctcaggcacaaaagctgactgatgatcagggccccgtcctgatgaccactgtagccatgcctgtgtttagtaagcagaacgaaaccagatcgaagggcattcttctgggagtggttggcacagatgtcccagtgaaagaacttctgaagaccatccccaaatacaagttagggattcacggttatgcctttgcaatcacaaataatggatatatcctgacgcatccggaactcaggctgctgtacgaagaaggaaaaaagcgaaggaaacctaactatagtagcgttgacctctctgaggtggagtgggaagaccgagatgacgtgttgagaaatgctatggtgaatcgaaagacggggaagttttccatggaggtgaagaagacagtggacaaagggtttaggtgtggcgctttccagaggtcatgggaaatatttcttccgagggaatgtaaccatcgaagaaggcctgcatgacttagaacatcccgatgtgtccttggcagatgaatggtcctactgcaacactgacctacaccctgagcaccgccatctgtctcagttagaagcgattaagctctacctaaaaggcaaagaacctctgctccagtgtgataaagaattgatccaagaagtcctttttgacgcggtggtgagtgcccccattgaagcgtatt

SEQ ID NO: 2800 - DNA, 559 bp, Homo sapiens
  source 1..559: mol_type = unassigned DNA
cccctatatttatctttaacctcaagtgaatgttgctgcctttgtagttcatgagcaatgtatactcttgaattccagctctgtgaaatcggtagaaaatgagaaatacaaagagtatgagaaagacgttgccatagaagaaattgatggcctccaactggtaaagaagctggcaaagaacatggaagagatgtttcacaagaagtctgaggccgtcaggcgtctggtggaggctgcagaagaagcacacctgaaacatgaatttgatgcagacttacagtatgaatacttcaatgctgtgctgataaatgaaagggacaaagacgggaattttttggagctgggaaaggaattcatcttagccccaaatgaccattttaataatttgcctgtgaacatcagtctaagtgacgtccaagtaccaacgaacatgtacaacaaagaccctgcaattgtcaatggggtttattggtctgaatctctaaacaaagtttttgtagataactttgaccgtgacccatctctcatatggcagtactttggaagtgcaaagggcttt

SEQ ID NO: 2801 - DNA, 1826 bp, Homo sapiens
  source 1..1826: mol_type = unassigned DNA
tatttaagcatctgtaggaacatgctgacagcctacttcaagtcctcctctcctttcagttttcaggaaactgtgtactgcctgacttcagtgtgggtccacctctggcatctttatagtagcagaacttattcgaaaaatacaaagagtatgagaaagacgttgccatagaagaaattgatggcctccaactggtaaagaagctggcaaagaacatggaagagatgtttcacaagaagtctgaggccgtcaggcgtctggtggaggctgcagaagaagcacacctgaaacatgaatttgatgcagacttacagaccctgcaattgtcaatggggtttattggtctgaatctctaaacaaagtttttgtagataactttgaccgtgacccatctctcatatggcagtactttggaagtgcaaagggcttttttaggcagtatccggggattaaatgggaaccagatgagaatggagtcattgccttcgactgcaggaaccgaaaatggtacatccaggcagcaacttctccgaaagacgtggtcattttagttgacgtcagtggcagcatgaaaggactccgtctgactatcgcgaagcaaacagtctcatccattttggatacacttggggatgatgacttcttcaacataattgcttataatgaggagcttcactatgtggaaccttgcctgaatggaactttggtgcaagccgacaggacaaacaaagagcacttcagggagcatctggacaaacttttcgccaaaggaattggaatgttggatatagctctgaatgaggccttcaacattctgagtgatttcaaccacacgggacaaggaagtatctgcagtcaggccatcatgctcataactgatggggcggtggacacctatgatacaatctttgcaaaatacaattggccagatcgaaaggttcgcatcttcacatacctcattggacgagaggctgcgtttgcagacaatctaaagtggatggcctgtgccaacaaaggattttttacccagatctccaccttggctgatgtgcaggagaatgtcatggaataccttcacgtgcttagccggcccaaagtcatcgaccaggagcatgatgtggtgtggaccgaagcttacattgacagcactctccctcaggcacaaaagctgactgatgatcagggccccgtcctgatgaccactgtagccatgcctgtgtttagtaagcagaacgaaaccagatcgaagggcattcttctgggagtggttggcacagatgtcccagtgaaagaacttctgaagaccatccccaaatacaagttagggattcacggttatgcctttgcaatcacaaataatggatatatcctgacgcatccggaactcaggctgctgtacgaagaaggaaaaaagcgaaggaaacctaactatagtagcgttgacctctctgaggtggagtgggaagaccgagatgacgtgttgagaaatgctatggtgaatcgaaagacggggaagttttccatggaggtgaagaagacagtggacaaagggaaacgggttttggtgatgacaaatgactactattatacagacatcaagggtactcctttcagtttaggtgtggcgctttccagaggtcatgggaaatatttcttccgagggaatgtaaccatcgaagaaggcctgcatgacttagaacatcccgatgtgtccttggcagatgaatggtcctactgcaacactgacctacaccctgagcaccgccatctgtctcagttagaagcgattaagctctacctaaaaggcaaagaacctctgctccagt

SEQ ID NO: 2802 - DNA, 495 bp, Homo sapiens
  source 1..495: mol_type = unassigned DNA
cacactcctgaaaaggggattgcacagaggcacaaagacctctggtgtttccagtccgggtagactggctgtcaccactggggcactggtgggtacctgtgagctgatgagtgggaccaaacggctctggccaccttggaccccattcctcccaggctttgtctctccctgagccctgcgcttgagaacattaaaagccatgccttggacccccttgttctgagtcctgccatgggccgtgaggacagccggccactcttcctggtgagcagattgtcactcggctccagctgcacgtccagctcttccgctgttttgctcacggtaaatgcgtcactggagaagggaaggtggatttttgcagttccacgtgcctggcacaaggatatcatttgaaatacaaagagtatgagaaagacgttgccatagaagaaattgatggcctccaactggtaaagaagctggcaaagaacatggaagagatgtttcacaaga

SEQ ID NO: 2803 - DNA, 760 bp, Homo sapiens
  source 1..760: mol_type = unassigned DNA
catagactggagacttttttggtgagatcgagggagctgtgatgaacaaattgctaacaatgggctcctttaaaagaattaccctttatgactaccaagccatgtgtagagccaacaaggaaagcagcgatggcgcccatggcctcctggatccttataatgccttcctctctgcagtaaaatggatcatgacagaacttgtcttgttcctggtggaatttaacctctgcagttggtggcactccgatatgacagctaaagcccagaaattgaaacagaccctggagccttgtgatactgaatatccagcattcgtctctgagcgcaccatcaaggagactacagggaatattgcttgtgaagactgctccaagtccactcactaccacggaaaccagtaaggggtatcagtggtaaggaaacctgggggagaaatattagagaaggaaaattacatcctttccactgttggagagagagagtagttaagagagttgtcattgccaaattttgacctctgaaatgcagagtagaaaaaagcaatccttggaaacatgccttaactacagtcaacataatgaatcccttaagtgtgaacgtctaaaggcccagaagatcagaaggcgcccagaatcttgtcatggcttccatcctgaggagaatgcaagggagtgtgggggtgcgccgagtctccaagcccagacagtcctccttctgctccctctgcttttgatgctcttctcaaggtgacactgactga

SEQ ID NO: 2804 - DNA, 740 bp, Homo sapiens
  source 1..740: mol_type = unassigned DNA
attcttctcttcagccttataatgccttcctctctgcagtaaaatggatcatgacagaacttgtcttgttcctggtggaatttaacctctgcagttggtggcactccgatatgacagctaaagcccagaaattgaaacagaccctggagccttgtgatactgaatatccagcattcgtctctgagcgcaccatcaaggagactacagggaatattgcttgtgaagactgctccaagtcctttgtcatccagcaaatcccaagcagcaacctgttcatggtggtggtggacagcagctgcctctgtgaatctgtggcccccatcaccatggcacccattgaaatcaggtatatccttttgtgtgcaggtccactcactaccacggaaaccagtaaggggtatcagtggtaaggaaacctgggggagaaatattagagaaggaaaattacatcctttccactgttggagagagagagtagttaagagagttgtcattgccaaattttgacctctgaaatgcagagtagaaaaaagcaatccttggaaacatgccttaactacagtcaacataatgaatcccttaagtgtgaacgtctaaaggcccagaagatcagaaggcgcccagaatcttgtcatggcttccatcctgaggagaatgcaagggagtgtgggggtgcgccgagtctccaagcccagacagtcctccttctgctccctctgcttttgatgctcttctcaagg

SEQ ID NO: 2805 - DNA, 3661 bp, Homo sapiens
  source 1..3661: mol_type = unassigned DNA
cacccgctcctttttctgctccccaagtgagccgcgcgctcgcccaccgcccgctccgcgcagctccccgcggccgctctcgtcgccgccgcagcgggcgcgtcggagggagcccagcatggccgggccgggctcgccgcgccgcgcgtcccggggggcctcggcgcttctcgctgccgcgcttctctacgccgcgctgggggacgtggtgcgctcggagcagcagataccgctctccgtggtgaagctctgggcctcggcttttggtggggagataaaatccattgctgctaagtactccggttcccagcttctgcaaaagaaatacaaagagtatgagaaagacgttgccatagaagaaattgatggcctccaactggtaaagaagctggcaaagaacatggaagagatgtttcacaagaagtctgaggccgtcaggcgtctggtggaggctgcagaagaagcacacctgaaacatgaatttgatgcagacttacagtatgaatacttcaatgctgtgctgataaatgaaagggacaaagacgggaattttttggagctgggaaaggaattcatcttagccccaaatgaccattttaataatttgcctgtgaacatcagtctaagtgacgtccaagtaccaacgaacatgtacaacaaagaccctgcaattgtcaatggggtttattggtctgaatctctaaacaaagtttttgtagataactttgaccgtgacccatctctcatatggcagtactttggaagtgcaaagggcttttttaggcagtatccggggattaaatgggaaccagatgagaatggagtcattgccttcgactgcaggaaccgaaaatggtacatccaggcagcaacttctccgaaagacgtggtcattttagttgacgtcagtggcagcatgaaaggactccgtctgactatcgcgaagcaaacagtctcatccattttggatacacttggggatgatgacttcttcaacataattgcttataatgaggagcttcactatgtggaaccttgcctgaatggaactttggtgcaagccgacaggacaaacaaagagcacttcagggagcatctggacaaacttttcgccaaaggaattggaatgttggatatagctctgaatgaggccttcaacattctgagtgatttcaaccacacgggacaaggaagtatctgcagtcaggccatcatgctcataactgatggggcggtggacacctatgatacaatctttgcaaaatacaattggccagatcgaaaggttcgcatcttcacatacctcattggacgagaggctgcgtttgcagacaatctaaagtggatggcctgtgccaacaaaggattttttacccagatctccaccttggctgatgtgcaggagaatgtcatggaataccttcacgtgcttagccggcccaaagtcatcgaccaggagcatgatgtggtgtggaccgaagcttacattgacagcactctccctcaggcacaaaagctgactgatgatcagggccccgtcctgatgaccactgtagccatgcctgtgtttagtaagcagaacgaaaccagatcgaagggcattcttctgggagtggttggcacagatgtcccagtgaaagaacttctgaagaccatccccaaatacaagttagggattcacggttatgcctttgcaatcacaaataatggatatatcctgacgcatccggaactcaggctgctgtacgaagaaggaaaaaagcgaaggaaacctaactatagtagcgttgacctctctgaggtggagtgggaagaccgagatgacgtgttgagaaatgctatggtgaatcgaaagacggggaagttttccatggaggtgaagaagacagtggacaaagggaaacgggttttggtgatgacaaatgactactattatacagacatcaagggtactcctttcagtttaggtgtggcgctttccagaggtcatgggaaatatttcttccgagggaatgtaaccatcgaagaaggcctgcatgacttagaacatcccgatgtgtccttggcagatgaatggtcctactgcaacactgacctacaccctgagcaccgccatctgtctcagttagaagcgattaagctctacctaaaaggcaaagaacctctgctccagtgtgataaagaattgatccaagaagtcctttttgacgcggtggtgagtgcccccattgaagcgtattggaccagcctggccctcaacaaatctgaaaattctgacaagggcgtggaggttgccttcctcggcactcgcacgggcctctccagaatcaacctgtttgtcggggctgagcagctcaccaatcaggacttcctgaaagctggcgacaaggagaacatttttaacgcagaccatttccctctctggtaccgaagagccgctgagcagattccagggagcttcgtctactcgatcccattcagcactggaccagtcaataaaagcaatgtggtgacagcaagtacatccatccagctcctggatgaacggaaatctcctgtggtggcagctgtaggcattcagatgaaacttgaatttttccaaaggaagttctggactgccagcagacagtgtgcttccctggatggcaaatgctccatcagctgtgatgatgagactgtgaattgttacctcatagacaataatggatttattttggtgtctgaagactacacacagactggagacttttttggtgagatcgagggagctgtgatgaacaaattgctaacaatgggctcctttaaaagaattaccctttatgactaccaagccatgtgtagagccaacaaggaaagcagcgatggcgcccatggcctcctggatccttataatgccttcctctctgcagtaaaatggatcatgacagaacttgtcttgttcctggtggaatttaacctctgcagttggtggcactccgatatgacagctaaagcccagaaattgaaacagaccctggagccttgtgatactgaatatccagcattcgtctctgagcgcaccatcaaggagactacagggaatattgcttgtgaagactgctccaagtcctttgtcatccagcaaatcccaagcagcaacctgttcatggtggtggtggacagcagctgcctctgtgaatctgtggcccccatcaccatggcacccattgaaatcaggtataatgaatcccttaagtgtgaacgtctaaaggcccagaagatcagaaggcgcccagaatcttgtcatggcttccatcctgaggagaatgcaagggagtgtgggggtgcgccgagtctccaagcccagacagtcctccttctgctccctctgcttttgatgctcttctcaaggtgacactgactgagatgttctcttactgactgagatgttctcttggcatgctaaatcatggataaactgtgaaccaaaatatggtgcaacatacgagacatgaatatagtccaaccatcagcatctcatcatgattttaaactgtgcgtgatataaactcttaaagatatgttgacaaaaagttatctatcatctttttactttgccagtcatgcaaatgtgagtttgccacatgataatcacccttcatcagaaatgggaccgcaagtg

SEQ ID NO: 2806 - DNA, 3296 bp, Homo sapiens
  source 1..3296: mol_type = unassigned DNA
gttgactgtgacacgggtgttacatatcttcctgtgccccttctccctgtagggtgaagctctgggcctcggcttttggtggggagataaaatccattgctgctaagtactccggttcccagcttctgcaaaagaaatacaaagagtatgagaaagacgttgccatagaagaaattgatggcctccaactggtaaagaagctggcaaagaacatggaagagatgtttcacaagaagtctgaggccgtcaggcgtctggtggaggctgcagaagaagcacacctgaaacatgaatttgatgcagacttacagtatgaatacttcaatgctgtgctgataaatgaaagggacaaagacgggaattttttggagctgggaaaggaattcatcttagccccaaatgaccattttaataatttgcctgtgaacatcagtctaagtgacgtccaagtaccaacgaacatgtacaacaaagaccctgcaattgtcaatggggtttattggtctgaatctctaaacaaagtttttgtagataactttgaccgtgacccatctctcatatggcagtactttggaagtgcaaagggcttttttaggcagtatccggggattaaatgggaaccagatgagaatggagtcattgccttcgactgcaggaaccgaaaatggtacatccaggcagcaacttctccgaaagacgtggtcattttagttgacgtcagtggcagcatgaaaggactccgtctgactatcgcgaagcaaacagtctcatccattttggatacacttggggatgatgacttcttcaacataattgcttataatgaggagcttcactatgtggaaccttgcctgaatggaactttggtgcaagccgacaggacaaacaaagagcacttcagggagcatctggacaaacttttcgccaaaggaattggaatgttggatatagctctgaatgaggccttcaacattctgagtgatttcaaccacacgggacaaggaagtatctgcagtcaggccatcatgctcataactgatggggcggtggacacctatgatacaatctttgcaaaatacaattggccagatcgaaaggttcgcatcttcacatacctcattggacgagaggctgcgtttgcagacaatctaaagtggatggcctgtgccaacaaaggattttttacccagatctccaccttggctgatgtgcaggagaatgtcatggaataccttcacgtgcttagccggcccaaagtcatcgaccaggagcatgatgtggtgtggaccgaagcttacattgacagcactctgactgatgatcagggccccgtcctgatgaccactgtagccatgcctgtgtttagtaagcagaacgaaaccagatcgaagggcattcttctgggagtggttggcacagatgtcccagtgaaagaacttctgaagaccatccccaaatacaagttagggattcacggttatgcctttgcaatcacaaataatggatatatcctgacgcatccggaactcaggctgctgtacgaagaaggaaaaaagcgaaggaaacctaactatagtagcgttgacctctctgaggtggagtgggaagaccgagatgacgtgttgagaaatgctatggtgaatcgaaagacggggaagttttccatggaggtgaagaagacagtggacaaagggtttaggtgtggcgctttccagaggtcatgggaaatatttcttccgagggaatgtaaccatcgaagaaggcctgcatgacttagaacatcccgatgtgtccttggcagatgaatggtcctactgcaacactgacctacaccctgagcaccgccatctgtctcagttagaagcgattaagctctacctaaaaggcaaagaacctctgctccagtgtgataaagaattgatccaagaagtcctttttgacgcggtggtgagtgcccccattgaagcgtattggaccagcctggccctcaacaaatctgaaaattctgacaagggcgtggaggttgccttcctcggcactcgcacgggcctctccagaatcaacctgtttgtcggggctgagcagctcaccaatcaggacttcctgaaagctggcgacaaggagaacatttttaacgcagaccatttccctctctggtaccgaagagccgctgagcagattccagggagcttcgtctactcgatcccattcagcactggaccagtcaataaaagcaatgtggtgacagcaagtacatccatccagctcctggatgaacggaaatctcctgtggtggcagctgtaggcattcagatgaaacttgaatttttccaaaggaagttctggactgccagcagacagtgtgcttccctggatggcaaatgctccatcagctgtgatgatgagactgtgaattgttacctcatagacaataatggatttattttggtgtctgaagactacacacagactggagacttttttggtgagatcgagggagctgtgatgaacaaattgctaacaatgggctcctttaaaagaattaccctttatgactaccaagccatgtgtagagccaacaaggaaagcagcgatggcgcccatggcctcctggatccttataatgccttcctctctgcagtaaaatggatcatgacagaacttgtcttgttcctggtggaatttaacctctgcagttggtggcactccgatatgacagctaaagcccagaaattgaaacagaccctggagccttgtgatactgaatatccagcattcgtctctgagcgcaccatcaaggagactacagggaatattgcttgtgaagactgctccaagtcctttgtcatccagcaaatcccaagcagcaacctgttcatggtggtggtggacagcagctgcctctgtgaatctgtggcccccatcaccatggcacccattgaaatcaggtataatgaatcccttaagtgtgaacgtctaaaggcccagaagatcagaaggcgcccagaatcttgtcatggcttccatcctgaggagaatgcaagggagtgtgggggtgcgccgagtctccaagcccagacagtcctccttctgctccctctgcttttgatgctcttctcaaggtgacactgactgagatgttctcttactgactgagatgttctcttggcatgctaaatcatggataaactgtgaaccaaaatatggtgcaacatacgagacatgaatatagtccaaccatcagcatctcatcatgattttaaactgtgcgtgatataaactcttaaagatatgtt

SEQ ID NO: 2807 - DNA, 3671 bp, Homo sapiens
  source 1..3671: mol_type = unassigned DNA
cggccgctctcgtcgccgccgcagcgggcgcgtcggagggagcccagcatggccgggccgggctcgccgcgccgcgcgtcccggggggcctcggcgcttctcgctgccgcgcttctctacgccgcgctgggggacgtggtgcgctcggagcagcagataccgctctccgtggtgaagctctgggcctcggcttttggtggggagataaaatccattgctgctaagtactccggttcccagcttctgcaaaagaaatacaaagagtatgagaaagacgttgccatagaagaaattgatggcctccaactggtaaagaagctggcaaagaacatggaagagatgtttcacaagaagtctgaggccgtcaggcgtctggtggaggctgcagaagaagcacacctgaaacatgaatttgatgcagacttacagtatgaatacttcaatgctgtgctgataaatgaaagggacaaagacgggaattttttggagctgggaaaggaattcatcttagccccaaatgaccattttaataatttgcctgtgaacatcagtctaagtgacgtccaagtaccaacgaacatgtacaacaaagaccctgcaattgtcaatggggtttattggtctgaatctctaaacaaagtttttgtagataactttgaccgtgacccatctctcatatggcagtactttggaagtgcaaagggcttttttaggcagtatccggggattaaatgggaaccagatgagaatggagtcattgccttcgactgcaggaaccgaaaatggtacatccaggcagcaacttctccgaaagacgtggtcattttagttgacgtcagtggcagcatgaaaggactccgtctgactatcgcgaagcaaacagtctcatccattttggatacacttggggatgatgacttcttcaacataattgcttataatgaggagcttcactatgtggaaccttgcctgaatggaactttggtgcaagccgacaggacaaacaaagagcacttcagggagcatctggacaaacttttcgccaaaggaattggaatgttggatatagctctgaatgaggccttcaacattctgagtgatttcaaccacacgggacaaggaagtatctgcagtcaggccatcatgctcataactgatggggcggtggacacctatgatacaatctttgcaaaatacaattggccagatcgaaaggttcgcatcttcacatacctcattggacgagaggctgcgtttgcagacaatctaaagtggatggcctgtgccaacaaaggattttttacccagatctccaccttggctgatgtgcaggagaatgtcatggaataccttcacgtgcttagccggcccaaagtcatcgaccaggagcatgatgtggtgtggaccgaagcttacattgacagcactctccctcaggcacaaaagctgactgatgatcagggccccgtcctgatgaccactgtagccatgcctgtgtttagtaagcagaacgaaaccagatcgaagggcattcttctgggagtggttggcacagatgtcccagtgaaagaacttctgaagaccatccccaaatacaagttagggattcacggttatgcctttgcaatcacaaataatggatatatcctgacgcatccggaactcaggctgctgtacgaagaaggaaaaaagcgaaggaaacctaactatagtagcgttgacctctctgaggtggagtgggaagaccgagatgacgtgttgagaaatgctatggtgaatcgaaagacggggaagttttccatggaggtgaagaagacagtggacaaagggaaacgggttttggtgatgacaaatgactactattatacagacatcaagggtactcctttcagtttaggtgtggcgctttccagaggtcatgggaaatatttcttccgagggaatgtaaccatcgaagaaggcctgcatgacttagaacatcccgatgtgtccttggcagatgaatggtcctactgcaacactgacctacaccctgagcaccgccatctgtctcagttagaagcgattaagctctacctaaaaggcaaagaacctctgctccagtgtgataaagaattgatccaagaagtcctttttgacgcggtggtgagtgcccccattgaagcgtattggaccagcctggccctcaacaaatctgaaaattctgacaagggcgtggaggttgccttcctcggcactcgcacgggcctctccagaatcaacctgtttgtcggggctgagcagctcaccaatcaggacttcctgaaagctggcgacaaggagaacatttttaacgcagaccatttccctctctggtaccgaagagccgctgagcagattccagggagcttcgtctactcgatcccattcagcactggaccagtcaataaaagcaatgtggtgacagcaagtacatccatccagctcctggatgaacggaaatctcctgtggtggcagctgtaggcattcagatgaaacttgaatttttccaaaggaagttctggactgccagcagacagtgtgcttccctggatggcaaatgctccatcagctgtgatgatgagactgtgaattgttacctcatagacaataatggatttattttggtgtctgaagactacacacagactggagacttttttggtgagatcgagggagctgtgatgaacaaattgctaacaatgggctcctttaaaagaattaccctttatgactaccaagccatgtgtagagccaacaaggaaagcagcgatggcgcccatggcctcctggatccttataatgccttcctctctgcagtaaaatggatcatgacagaacttgtcttgttcctggtggaatttaacctctgcagttggtggcactccgatatgacagctaaagcccagaaattgaaacagaccctggagccttgtgatactgaatatccagcattcgtctctgagcgcaccatcaaggagactacagggaatattgcttgtgaagactgctccaagtcctttgtcatccagcaaatcccaagcagcaacctgttcatggtggtggtggacagcagctgcctctgtgaatctgtggcccccatcaccatggcacccattgaaatcaggtataatgaatcccttaagtgtgaacgtctaaaggcccagaagatcagaaggcgcccagaatcttgtcatggcttccatcctgaggagaatgcaagggagtgtgggggtgcgccgagtctccaagcccagacagtcctccttctgctccctctgcttttgatgctcttctcaaggtgacactgactgagatgttctcttactgactgagatgttctcttggcatgctaaatcatggataaactgtgaaccaaaatatggtgcaacatacgagacatgaatatagtccaaccatcagcatctcatcatgattttaaactgtgcgtgatataaactcttaaagatatgttgacaaaaagttatctatcatctttttactttgccagtcatgcaaatgtgagtttgccacatgataatcacccttcatcagaaatgggaccgcaagtggtaggcagtgtcccttctgcttgaaacctattgaaaccaatttaaaactgtgtactttttaaataaagtatattaaaatc

SEQ ID NO: 2808 - DNA, 477 bp, Homo sapiens
  source 1..477: mol_type = unassigned DNA
aaataacataacttctttcctctgaatggtcgaagctgagcaacttggagggttcagccgactcctacaccagccgcccatctctggactcagacgtctccctggaggaggaccgggagagtgcccggcgtgaagtagagagccaggctcagcagcagctcgaaagggccaagcacaaacctgtggcatttgcggtgaggaccaatgtcagctactgtggcgtactggatgaggagtgcccagtccagggctctggagtcaactttgaggccaaagattttctgcacattaaagaggtgatcgacccccctacttccagaagcctctaacttcattttcttgctcttgctccagatcctaatgcttctgacttgaatcctcagtctaattccccaagctaatcagctcttctccttaacacacacctgtccacccctcatatctaagatctcatccccagggtctccatccttctga

SEQ ID NO: 2809 - DNA, 754 bp, Homo sapiens
  source 1..754: mol_type = unassigned DNA
agaaaggggcgggaggggtactgacccgaggagcggtcccgcgactctgtactccctgctgcccagtcccggccaggacgctgcccggcttagctggggcgcccctcgagaccaggatggagggttcagccgactcctacaccagccgcccatctctggactcagacgtctccctggaggaggaccgggagagtgcccggcgtgaagtagagagccaggctcagcagcagctcgaaagggccaagcacaaacctgtggcatttgcggtgaggaccaatgtcagctactgtggcgtactggatgaggagtgcccagtccagggctctggagtcaactttgaggccaaagattttctgcacattaaagagaagtacagcaatgactggtggatcgggcggctagtgaaagagggcggggacatcgccttcatccccagcccccagcgcctggagagcatccggctcaaacaggagcagaaggccaggagatctgggaacccttccagcctgagtgacattggcaaccgacgctcccctccgccatctctaggcggaacatgttcccccatatgacgtggtgccctccatgcggcctgtggtgctggtgggaccctctctgaaaggttatgaggtcacagacatgatgcagaaggctctcttcgacttcctcaaacacagatttgatggcaggatctccatcacccgagtcacagccgacctctccctggcaaagcgatctgtgctcaacaatccgg

SEQ ID NO: 2810 - DNA, 1814 bp, Homo sapiens
  source 1..1814: mol_type = unassigned DNA
actgacccgaggagcggtcccgcgactctgtactccctgctgcccagtcccggccaggacgctgcccggcttagctggggcgcccctcgagaccaggatggagggttcagccgactcctacaccagccgcccatctctggactcagacgtctccctggaggaggaccgggagagtgcccggcgtgaagtagagagccaggctcagcagcagctcgaaagggccaagcacaaacctgtggcatttgcggtgaggaccaatgtcagctactgtggcgtactggatgaggagtgcccagtccagggctctggagtcaactttgaggccaaagattttctgcacattaaagagaagtacagcaatgactggtggatcgggcggctagtgaaagagggcggggacatcgccttcatccccagcccccagcgcctggagagcatccggctcaaacaggagcagaaggccaggagatctgggaacccttccagcctgagtgacattggcaaccgacgctcccctccgccatctctagccaagcagaagcaaaagcaggcggaacatgttcccccatatgacgtggtgccctccatgcggcctgtggtgctggtgggaccctctctgaaaggttatgaggtcacagacatgatgcagaaggctctcttcgacttcctcaaacacagatttgatggcaggatctccatcacccgagtcacagccgacctctccctggcaaagcgatctgtgctcaacaatccgggcaagaggaccatcattgagcgctcctctgcccgctccagcattgcggaagtgcagagtgagatcgagcgcatatttgagctggccaaatccctgcagctagtagtgttggacgctgacaccatcaaccacccagcacagctggccaagacctcgctggcccccatcatcgtctttgtcaaagtgtcctcaccaaaggtactccagcgtctcattcgctcccgggggaagtcacagatgaagcacctgaccgtacagatgatggcatatgataagctggttcagtgcccaccggagtcatttgatgtgattctggatgagaaccagctggaggatgcctgtgagcacctggctgagtacctggaggtttactggcgggccacgcaccacccagcccctggccccggacttctgggtcctcccagtgccatccccggacttcagaaccagcagctgctgggggagcgtggcgaggagcactccccccttgagcgggacagcttgatgccctctgatgaggccagcgagagctcccgccaagcctggacaggatcttcacagcgtagctcccgccacctggaggaggactatgcagatgcctaccaggacctgtaccagcctcaccgccaacacacctcggggctgcctagtgctaacgggcatgacccccaagaccggcttctagcccaggactcagagcacaaccacagtgaccggaactggcagcgcaaccggccttggcccaaggatagctactgacagcctcctgctgccctaccctggcaggcacaggcgcagctggctggggggcccactccaggcagggtggcgttagactggcatcaggctggcactaggctcagcccccaaaaccccctgcccagccccagcttcagggctgcctgtggtcccaaggttctgggagaaacaggggaccccctcacctcctgggcagtgacccctactaggctcccattccaggtactagctgtgtgttctgcacccctggcaccttcctctcctcccacacaggaagctgccccactgggcagtgccctca

SEQ ID NO: 2811 - DNA, 929 bp, Homo sapiens
  source 1..929: mol_type = unassigned DNA
gtactccctgctgcccagtcccggccaggacgctgcccggcttagctggggcgcccctcgagaccaggatggagggttcagccgactcctacaccagccgcccatctctggactcagacgtctccctggaggaggaccgggagagtgcccggcgtgaagtagagagccaggctcagcagcagctcgaaagggccaagcacaaacctgtggcatttgcggtgaggaccaatgtcagctactgtggcgtactggatgaggagtgcccagtccagggctctggagtcaactttgaggccaaagattttctgcacattaaagagaagtacagcaatgactggtggatcgggcggctagtgaaagagggcggggacatcgccttcatccccagcccccagcgcctggagagcatccggctcaaacaggagcagaaggccaggagatctgggaacccttccagcctgagtgacattggcaaccgacgctcccctccgccatctctaggtagcctccccccaacccacccattttgggtaggtgggtagctaagacacagggaaagaggggatcctgcccaagtgaactgtgtgggaagggtttgtggagggattggaaggggtggggagaagccagtatctcccctggggacggggataccatgcccccagggacctttcccccttcaccaactttaatcttgtatttccttttccaaaaagccaagcagaagcaaaagcaggtgagtcaaggaagggacctgggctggggggatcatggcttatggctctggggacagtgttctaggcagtcattgttggagggcagaacagagaggggagggagcccagaacctctggatctgccctgacgccaaccaggcatgagacaggcaccagggccatggtttctactgacctcatgtccattctgca

SEQ ID NO: 2812 - DNA, 4029 bp, Homo sapiens
  source 1..4029: mol_type = unassigned DNA
gtcgcttcgcctcgcccttccccttcgcggagctgagacccgctgcaccagaacccaggagaggggggagacggcagagactccgcgggcgcggggcgatcccagctgggctctctccacagggatgccgatccctctggagacacagagccgagccggggacgggtggatgggcgccttgacgcttgggcgggcgagcagagcaccagcactcttgcttttcggtcctttcccccgccgaggtcggggtcgcagccgccgccggaggatgggcggccggcgcacggagcagggccgggagggagcagaagcttccgccaagagctcaggagctggggcagccctggagctcttcctgcccttctgcccgcggcggcggaaactccagagtccctactctttctcgggaggactttagggaagaagcagagcggcaggggaagccgaggagcgagggtgcgacgtggggatggaaggacagtgggaggcacacggaaaaacagaacgaggaccttagacaggagagacggaagtggagagaggctgggctgaaaggcagggagagccagagactgacagaggcggcgagaaaggaagggagagggagggagggaggagggaggagaaagagggagggaaccaggggagagggaagggagcaggcggcggagcccggcgggcgtggggcgaggccaggcgtgcaggcgggagcagcgtgcagagcagcggccgggttttgctcccgcctcggagcccctggcccgggggagggggagaggccgctagcctggtctatgtctttttctgactccagtgcaaccttcctgctgaacgaggcccctgaaagaaggaattgaagagaaaggatgaaagagggggatacaaggaatactgcgtaactgggtgagggcacaaaagtgggcagtgtctgggaacttccaatacagaagaatccagtatatgaccaaaccccagttggtgctggactcaggagaggagacagtcccttcagccacaggggctgcaacaaagttgtttgtcaaacccagcatgaggaaggtgctgggcagggctgctctgggccacccacagtagacagactaaagatgtcagtctgaagatgcagctcttctttgtcttgccaagataacaccgataagtgacccagggttcagccgactcctacaccagccgcccatctctggactcagacgtctccctggaggaggaccgggagagtgcccggcgtgaagtagagagccaggctcagcagcagctcgaaagggccaagcacaaacctgtggcatttgcggtgaggaccaatgtcagctactgtggcgtactggatgaggagtgcccagtccagggctctggagtcaactttgaggccaaagattttctgcacattaaagagaagtacagcaatgactggtggatcgggcggctagtgaaagagggcggggacatcgccttcatccccagcccccagcgcctggagagcatccggctcaaacaggagcagaaggccaggagatctgggaacccttccagcctgagtgacattggcaaccgacgctcccctccgccatctctaggtagcctccccccaacccacccattttgggtaggtgggtagctaagacacagggaaagaggggatcctgcccaagtgaactgtgtgggaagggtttgtggagggattggaaggggtggggagaagccagtatctcccctggggacggggataccatgcccccagggacctttcccccttcaccaactttaatcttgtatttccttttccaaaaagccaagcagaagcaaaagcaggtgagtcaaggaagggacctgggctggggggatcatggcttatggctctggggacagtgttctaggcagtcattgttggagggcagaacagagaggggagggagcccagaacctctggatctgccctgacgccaaccaggcatgagacaggcaccagggccatggtttctactgacctcatgtccattctgcaggcggaacatgttcccccatatgacgtggtgccctccatgcggcctgtggtgctggtgggaccctctctgaaaggttatgaggtcacagacatgatgcagaaggctctcttcgacttcctcaaacacagatttgatggcaggatctccatcacccgagtcacagccgacctctccctggcaaagcgatctgtgctcaacaatccgggcaagaggaccatcattgagcgctcctctgcccgctccagcattgcggaagtgcagagtgagatcgagcgcatatttgagctggccaaatccctgcagctagtagtgttggacgctgacaccatcaaccacccagcacagctggccaagacctcgctggcccccatcatcgtctttgtcaaagtgtcctcaccaaaggtactccagcgtctcattcgctcccgggggaagtcacagatgaagcacctgaccgtacagatgatggcatatgataagctggttcagtgcccaccggagtcatttgatgtgattctggatgagaaccagctggaggatgcctgtgagcacctggctgagtacctggaggtttactggcgggccacgcaccacccagcccctggccccggacttctgggtcctcccagtgccatccccggacttcagaaccagcagctgctgggggagcgtggcgaggagcactccccccttgagcgggacagcttgatgccctctgatgaggccagcgagagctcccgccaagcctggacaggatcttcacagcgtagctcccgccacctggaggaggactatgcagatgcctaccaggacctgtaccagcctcaccgccaacacacctcggggctgcctagtgctaacgggcatgacccccaagaccggcttctagcccaggactcagagcacaaccacagtgaccggaactggcagcgcaaccggccttggcccaaggatagctactgacagcctcctgctgccctaccctggcaggcacaggcgcagctggctggggggcccactccaggcagggtggcgttagactggcatcaggctggcactaggctcagcccccaaaaccccctgcccagccccagcttcagggctgcctgtggtcccaaggttctgggagaaacaggggaccccctcacctcctgggcagtgacccctactaggctcccattccaggtactagctgtgtgttctgcacccctggcaccttcctctcctcccacacaggaagctgccccactgggcagtgccctcaggccaggatccccttagcagggtccttcccaccagactcagggaagggatgccccattaaagtgacaaaagggtggggtgtgggcaccatggcatgaggaagaaacaaggtccctgagcaggcacaagtcctgacagtcaagggactgctttggcatccagggcctccagtcacctcactgccatacattagaaatgagacaatcaaagcccccccagggtggcacacccatctgtttgctggggtgtggcagccacatccaagactggagcagcaggctggccacgctcgggccagagagagctcacagctgaagctcttggagggaagggctctcctcaccctgccaggaagcttcttaacatgtgacaggaccagggaccaggagcatggtgaagccaagtggcagatgggagccaacctggatgggggtttggggaaggagggcatgtgtagcagagaacttaggggggcctccttgcctttctcattcttttgccctgcatcctgtcatttctgttcttgtccctcatacatctttggagaaccgggctccagactttgttccctgactcatagctgccgcttgttaggttagggttagatggggagagacagggcacagaggacctgtctccccggctactcttgccttatggctctagtgtgtgacctacagagcatgctccacaagcccctgcctcacctcactgtcatcactaataaacatcatgcacagtc

SEQ ID NO: 2813 - DNA, 1872 bp, Homo sapiens
  source 1..1872: mol_type = unassigned DNA
aggcgtgcaggcgggagcagcgtgcagagcagcggccgggttttgctcccgcctcggagcccctggcccgggggagggggagaggccgctagcctggtctatgtctttttctgactccagtgcaaccttcctgctgaacgagggttcagccgactcctacaccagccgcccatctctggactcagacgtctccctggaggaggaccgggagagtgcccggcgtgaagtagagagccaggctcagcagcagctcgaaagggccaagcacaaacctgtggcatttgcggtgaggaccaatgtcagctactgtggcgtactggatgaggagtgcccagtccagggctctggagtcaactttgaggccaaagattttctgcacattaaagagaagtacagcaatgactggtggatcgggcggctagtgaaagagggcggggacatcgccttcatccccagcccccagcgcctggagagcatccggctcaaacaggagcagaaggccaggagatctgggaacccttccagcctgagtgacattggcaaccgacgctcccctccgccatctctagccaagcagaagcaaaagcaggcggaacatgttcccccatatgacgtggtgccctccatgcggcctgtggtgctggtgggaccctctctgaaaggttatgaggtcacagacatgatgcagaaggctctcttcgacttcctcaaacacagatttgatggcaggatctccatcacccgagtcacagccgacctctccctggcaaagcgatctgtgctcaacaatccgggcaagaggaccatcattgagcgctcctctgcccgctccagcattgcggaagtgcagagtgagatcgagcgcatatttgagctggccaaatccctgcagctagtagtgttggacgctgacaccatcaaccacccagcacagctggccaagacctcgctggcccccatcatcgtctttgtcaaagtgtcctcaccaaaggtactccagcgtctcattcgctcccgggggaagtcacagatgaagcacctgaccgtacagatgatggcatatgataagctggttcagtgcccaccggagtcatttgatgtgattctggatgagaaccagctggaggatgcctgtgagcacctggctgagtacctggaggtttactggcgggccacgcaccacccagcccctggccccggacttctgggtcctcccagtgccatccccggacttcagaaccagcagctgctgggggagcgtggcgaggagcactccccccttgagcgggacagcttgatgccctctgatgaggccagcgagagctcccgccaagcctggacaggatcttcacagcgtagctcccgccacctggaggaggactatgcagatgcctaccaggacctgtaccagcctcaccgccaacacacctcggggctgcctagtgctaacgggcatgacccccaagaccggcttctagcccaggactcagagcacaaccacagtgaccggaactggcagcgcaaccggccttggcccaaggatagctactgacagcctcctgctgccctaccctggcaggcacaggcgcagctggctggggggcccactccaggcagggtggcgttagactggcatcaggctggcactaggctcagcccccaaaaccccctgcccagccccagcttcagggctgcctgtggtcccaaggttctgggagaaacaggggaccccctcacctcctgggcagtgacccctactaggctcccattccaggtactagctgtgtgttctgcacccctggcaccttcctctcctcccacacaggaagctgccccactgggcagtgccctcaggccaggatccccttagca

SEQ ID NO: 2814 - DNA, 581 bp, Homo sapiens
  source 1..581: mol_type = unassigned DNA
gtgcaggcgggagcagcgtgcagagcagcggccgggttttgctcccgcctcggagcccctggcccgggggagggggagaggccgctagcctggtctatgtctttttctgactccagtgcaaccttcctgctgaacgagggttcagccgactcctacaccagccgcccatctctggactcagacgtctccctggaggaggaccgggagagtgcccggcgtgaagtagagagccaggctcagcagcagctcgaaagggccaagcacaaacctgtggcatttgcggtgaggaccaatgtcagctactgtggcgtactggatgaggagtgcccagtccagggctctggagtcaactttgaggccaaagattttctgcacattaaagaggagatctgggaacccttccagcctgagtgacattggcaaccgacgctcccctccgccatctctaggcggaacatgttcccccatatgacgtggtgccctccatgcggcctgtggtgctggtgggaccctctctgaaaggttatgaggtcacagacatgatgcagaaggctctcttcgacttcctcaaacacagattt

SEQ ID NO: 2815 - DNA, 544 bp, Homo sapiens
  source 1..544: mol_type = unassigned DNA
ggagcagcgtgcagagcagcggccgggttttgctcccgcctcggagcccctggcccgggggagggggagaggccgctagcctggtctatgtctttttctgactccagtgcaaccttcctgctgaacgagggttcagccgactcctacaccagccgcccatctctggactcagacgtctccctggaggaggaccgggagagtgcccggcgtgaagtagagagccaggctcagcagcagctcgaaagggccaagcacaaacctgtggcatttgcggtgaggaccaatgtcagctactgtggcgtactggatgaggagtgcccagtccagggctctggagtcaactttgaggccaaagattttctgcacattaaagaggtgatcgacccccctacttccagaagcctctaacttcattttcttgctcttgctccagatcctaatgcttctgacttgaatcctcagtctaattccccaagctaatcagctcttctccttaacacacacctgtccacccctcatatctaagatctcatccccagggtct

SEQ ID NO: 2816 - DNA, 677 bp, Homo sapiens
  source 1..677: mol_type = unassigned DNA
agcagcgtgcagagcagcggccgggttttgctcccgcctcggagcccctggcccgggggagggggagaggccgctagcctggtctatgtctttttctgactccagtgcaaccttcctgctgaacgagagccatctcccaggagaagagcaccttgagggtcttactctttgacacctctccaggcccctgaaagaaggaattgaagagaaaggatgaaagagggggatacaaggaatactgcgtaactggggttcagccgactcctacaccagccgcccatctctggactcagacgtctccctggaggaggaccgggagagtgcccggcgtgaagtagagagccaggctcagcagcagctcgaaagggccaagcacaaacctgtggcatttgcggtgaggaccaatgtcagctactgtggcgtactggatgaggagtgcccagtccagggctctggagtcaactttgaggccaaagattttctgcacattaaagagaagtacagcaatgactggtggatcgggcggctagtgaaagagggcggggacatcgccttcatccccagcccccagcgcctggagagcatccggctcaaacaggagcagaaggccaggagatctgggaacccttccagcctgagtgacattggcaaccgacgctcccctccgccatctctag

SEQ ID NO: 2817 - DNA, 557 bp, Homo sapiens
  source 1..557: mol_type = unassigned DNA
agagcagcggccgggttttgctcccgcctcggagcccctggcccgggggagggggagaggccgctagcctggtctatgtctttttctgactccagtgcaaccttcctgctgaacgagagccatctcccaggagaagagcaccttgagggtcttactctttgacacctctccaggcccctgaaagaaggaattgaagagaaaggatgaaagagggggatacaaggaatactgcgtaactgggtgagggcacaaaagtgggcagtgtctgggaacttccaatacagaagaatccagtatatgaccaaaccccagttggtgctggactcaggagaggagacagtcccttcagccacaggggctgcaacaaagttgtttgtcaaacccagcatgaggaaggtgctgggcagggctgctctgggccacccacagtagacagactaaagatgtcagtctgaagatgcagctcttctttgtcttgccaagataacaccgataagtgacccaggtgggaagccacttggtttgggtgggctttctctctcccatgcacagtgctt

SEQ ID NO: 2818 - DNA, 746 bp, Homo sapiens
  source 1..746: mol_type = unassigned DNA
cggatgccttggcactgtctggcacaatccttggcagggaagtggggaagggaacccccatcctggcaggactaagacaaaatctatccgtgcaacagggttcagccgactcctacaccagccgcccatctctggactcagacgtctccctggaggaggaccgggagagtgcccggcgtgaagtagagagccaggctcagcagcagctcgaaagggccaagcacaaacctgtggcatttgcggtgaggaccaatgtcagctactgtggcgtactggatgaggagtgcccagtccagggctctggagtcaactttgaggccaaagattttctgcacattaaagagaagtacagcaatgactggtggatcgggcggctagtgaaagagggcggggacatcgccttcatccccagcccccagcgcctggagagcatccggctcaaacaggagcagaaggccaggagatctgggaacccttccagcctgagtgacattggcaaccgacgctcccctccgccatctctagccaagcagaagcaaaagcaggcggaacatgttcccccatatgacgtggtgccctccatgcggcctgtggtgctggtgggaccctctctgaaaggttatgaggtcacagacatgatgcagaaggctctcttcgacttcctcaaacacagatttgatggcaggatctccatcacccgagtcacagccgacctctccctggcaaagcgatctgtgctcaacaat

SEQ ID NO: 2819 - DNA, 564 bp, Homo sapiens
  source 1..564: mol_type = unassigned DNA
cctttgtttcccggcggagtagttcctgggttgccgagcgtctctgtctccgcatctctcctcgccccgcctcctccctgcctggatccgccctgcccgcagcctctcctccccttcctccccgccgccacggccccggttcagccgactcctacaccagccgcccatctctggactcagacgtctccctggaggaggaccgggagagtgcccggcgtgaagtagagagccaggctcagcagcagctcgaaagggccaagcacaaacctgtggcatttgcggtgaggaccaatgtcagctactgtggcgtactggatgaggagtgcccagtccagggctctggagtcaactttgaggccaaagattttctgcacattaaagagaagtacagcaatgactggtggatcgggcggctagtgaaagagggcggggacatcgccttcatccccagcccccagcgcctggagagcatccggctcaaacaggagcagaaggccaggagatctgggaacccttccagcctgagtgacattggcaaccgacgctcccctccgccatctctag

SEQ ID NO: 2820 - DNA, 549 bp, Homo sapiens
  source 1..549: mol_type = unassigned DNA
agttcctgggttgccgagcgtctctgtctccgcatctctcctcgccccgcctcctccctgcctggatccgccctgcccgcagcctctcctccccttcctccccgccgccacggccccgcaagagaggagctgcagcctgcccacacactcactaggcaaggggggcaccaccagggcactgtgccaactcctggcagctccaaagtactgaaactctggctattttggcgtagcagggtacaggaaagggttcagccgactcctacaccagccgcccatctctggactcagacgtctccctggaggaggaccgggagagtgcccggcgtgaagtagagagccaggctcagcagcagctcgaaagggccaagcacaaacctgtggcatttgcggtgaggaccaatgtcagctactgtggcgtactggatgaggagtgcccagtccagggctctggagtcaactttgaggccaaagattttctgcacattaaagagaagtacagcaatgactggtggatcgggcggctagtgaaagagggcggggacatcg

SEQ ID NO: 2821 - DNA, 904 bp, Homo sapiens
  source 1..904: mol_type = unassigned DNA
gcagcctctcctccccttcctccccgccgccacggccccgtaggtgctcggggacccaccttccacctagcacggggttcagccgactcctacaccagccgcccatctctggactcagacgtctccctggaggaggaccgggagagtgcccggcgtgaagtagagagccaggctcagcagcagctcgaaagggccaagcacaaacctgtggcatttgcggtgaggaccaatgtcagctactgtggcgtactggatgaggagtgcccagtccagggctctggagtcaactttgaggccaaagattttctgcacattaaagagaagtacagcaatgactggtggatcgggcggctagtgaaagagggcggggacatcgccttcatccccagcccccagcgcctggagagcatccggctcaaacaggagcagaaggccaggagatctgggaacccttccagcctgagtgacattggcaaccgacgctcccctccgccatctctaggcggaacatgttcccccatatgacgtggtgccctccatgcggcctgtggtgctggtgggaccctctctgaaaggttatgaggtcacagacatgatgcagaaggctctcttcgacttcctcaaacacagatttgatggcaggatctccatcacccgagtcacagccgacctctccctggcaaagcgatctgtgctcaacaatccgggcaagaggaccatcattgagcgctcctctgcccgctccagcattgcggaagtgcagagtgagatcgagcgcatatttgagctggccaaatccctgcagctagtagtgttggacgctgacaccatcaaccacccagcacagctggccaagacctcgctggcccccatcatcgtctttgtcaaagtgtcctcaccaaag

SEQ ID NO: 2822 - DNA, 2237 bp, Homo sapiens
  source 1..2237: mol_type = unassigned DNA
tccccgccgccacggccccgtaggtgctcggggacccaccttccacctagcacgggttcgttcccctctcccggcctggcccgggctccccggtggccgccgccccctcgccgcccccgccttctcccggggagggggtcaggtgggcgggcactattgttgtaggagccggcgccagattcctcagccgcgctcggggtgggaccggctgggtttgggggggtggggtggggggagcggtgatctgagctccgagcagctggtcttcgcggctcgctccctccttcgcgctctctcgctccctgccgccgcccgcagggctgcggggctcggtggcatctcccgggcgcggcccgcagtccttgcccctgcctccgggccgctcccgcccccggcgccgctcgctcccccgacccggactcccccatgtatgacgactcctacgtgcccgggtttgaggactcggaggcgggttcagccgactcctacaccagccgcccatctctggactcagacgtctccctggaggaggaccgggagagtgcccggcgtgaagtagagagccaggctcagcagcagctcgaaagggccaagcacaaacctgtggcatttgcggtgaggaccaatgtcagctactgtggcgtactggatgaggagtgcccagtccagggctctggagtcaactttgaggccaaagattttctgcacattaaagagaagtacagcaatgactggtggatcgggcggctagtgaaagagggcggggacatcgccttcatccccagcccccagcgcctggagagcatccggctcaaacaggagcagaaggccaggagatctgggaacccttccagcctgagtgacattggcaaccgacgctcccctccgccatctctagccaagcagaagcaaaagcaggtcacagacatgatgcagaaggctctcttcgacttcctcaaacacagatttgatggcaggatctccatcacccgagtcacagccgacctctccctggcaaagcgatctgtgctcaacaatccgggcaagaggaccatcattgagcgctcctctgcccgctccagcattgcggaagtgcagagtgagatcgagcgcatatttgagctggccaaatccctgcagctagtagtgttggacgctgacaccatcaaccacccagcacagctggccaagacctcgctggcccccatcatcgtctttgtcaaagtgtcctcaccaaaggtactccagcgtctcattcgctcccgggggaagtcacagatgaagcacctgaccgtacagatgatggcatatgataagctggttcagtgcccaccggagtcatttgatgtgattctggatgagaaccagctggaggatgcctgtgagcacctggctgagtacctggaggtttactggcgggccacgcaccacccagcccctggccccggacttctgggtcctcccagtgccatccccggacttcagaaccagcagctgctgggggagcgtggcgaggagcactccccccttgagcgggacagcttgatgccctctgatgaggccagcgagagctcccgccaagcctggacaggatcttcacagcgtagctcccgccacctggaggaggactatgcagatgcctaccaggacctgtaccagcctcaccgccaacacacctcggggctgcctagtgctaacgggcatgacccccaagaccggcttctagcccaggactcagagcacaaccacagtgaccggaactggcagcgcaaccggccttggcccaaggatagctactgacagcctcctgctgccctaccctggcaggcacaggcgcagctggctggggggcccactccaggcagggtggcgttagactggcatcaggctggcactaggctcagcccccaaaaccccctgcccagccccagcttcagggctgcctgtggtcccaaggttctgggagaaacaggggaccccctcacctcctgggcagtgacccctactaggctcccattccaggtactagctgtgtgttctgcacccctggcaccttcctctcctcccacacaggaagctgccccactgggcagtgccctcaggccaggatccccttagcagggtccttcccaccagactcagggaagggatgccccattaaagtgacaaaagggtggggtgtgggcaccatggcatgaggaagaaacaaggtccctgagcaggcacaagtcctgaca

SEQ ID NO: 2823 - DNA, 2696 bp, Homo sapiens
  source 1..2696: mol_type = unassigned DNA
gtggggggagcggtgatctgagctccgagcagctggtcttcgcggctcgctccctccttcgcgctctctcgctccctgccgccgcccgcagggctgcggggctcggtggcatctcccgggcgcggcccgcagtccttgcccctgcctccgggccgctcccgcccccggcgccgctcgctcccccgacccggactcccccatgtatgacgactcctacgtgcccgggtttgaggactcggaggcgggttcagccgactcctacaccagccgcccatctctggactcagacgtctccctggaggaggaccgggagagtgcccggcgtgaagtagagagccaggctcagcagcagctcgaaagggccaagcacaaacctgtggcatttgcggtgaggaccaatgtcagctactgtggcgtactggatgaggagtgcccagtccagggctctggagtcaactttgaggccaaagattttctgcacattaaagagaagtacagcaatgactggtggatcgggcggctagtgaaagagggcggggacatcgccttcatccccagcccccagcgcctggagagcatccggctcaaacaggagcagaaggccaggagatctgggaacccttccagcctgagtgacattggcaaccgacgctcccctccgccatctctagccaagcagaagcaaaagcaggcggaacatgttcccccatatgacgtggtgccctccatgcggcctgtggtgctggtgggaccctctctgaaaggttatgaggtcacagacatgatgcagaaggctctcttcgacttcctcaaacacagatttgatggcaggatctccatcacccgagtcacagccgacctctccctggcaaagcgatctgtgctcaacaatccgggcaagaggaccatcattgagcgctcctctgcccgctccagcattgcggaagtgcagagtgagatcgagcgcatatttgagctggccaaatccctgcagctagtagtgttggacgctgacaccatcaaccacccagcacagctggccaagacctcgctggcccccatcatcgtctttgtcaaagtgtcctcaccaaaggtactccagcgtctcattcgctcccgggggaagtcacagatgaagcacctgaccgtacagatgatggcatatgataagctggttcagtgcccaccggagtcatttgatgtgattctggatgagaaccagctggaggatgcctgtgagcacctggctgagtacctggaggtttactggcgggccacgcaccacccagcccctggccccggacttctgggtcctcccagtgccatccccggacttcagaaccagcagctgctgggggagcgtggcgaggagcactccccccttgagcgggacagcttgatgccctctgatgaggccagcgagagctcccgccaagcctggacaggatcttcacagcgtagctcccgccacctggaggaggactatgcagatgcctaccaggacctgtaccagcctcaccgccaacacacctcggggctgcctagtgctaacgggcatgacccccaagaccggcttctagcccaggactcagagcacaaccacagtgaccggaactggcagcgcaaccggccttggcccaaggatagctactgacagcctcctgctgccctaccctggcaggcacaggcgcagctggctggggggcccactccaggcagggtggcgttagactggcatcaggctggcactaggctcagcccccaaaaccccctgcccagccccagcttcagggctgcctgtggtcccaaggttctgggagaaacaggggaccccctcacctcctgggcagtgacccctactaggctcccattccaggtactagctgtgtgttctgcacccctggcaccttcctctcctcccacacaggaagctgccccactgggcagtgccctcaggccaggatccccttagcagggtccttcccaccagactcagggaagggatgccccattaaagtgacaaaagggtggggtgtgggcaccatggcatgaggaagaaacaaggtccctgagcaggcacaagtcctgacagtcaagggactgctttggcatccagggcctccagtcacctcactgccatacattagaaatgagacaatcaaagcccccccagggtggcacacccatctgtttgctggggtgtggcagccacatccaagactggagcagcaggctggccacgctcgggccagagagagctcacagctgaagctcttggagggaagggctctcctcaccctgccaggaagcttcttaacatgtgacaggaccagggaccaggagcatggtgaagccaagtggcagatgggagccaacctggatgggggtttggggaaggagggcatgtgtagcagagaacttaggggggcctccttgcctttctcattcttttgccctgcatcctgtcatttctgttcttgtccctcatacatctttggagaaccgggctccagactttgttccctgactcatagctgccgcttgttaggttagggttagatggggagagacagggcacagaggacctgtctccccggctactcttgccttatggctctagtgtgtgacctacagagcatgctccacaagcccctgcctcacctcactgtcatcactaataaacatcatgcacagtc

SEQ ID NO: 2824 - DNA, 576 bp, Homo sapiens
  source 1..576: mol_type = unassigned DNA
cttcgcgctctctcgctccctgccgccgcccgcagggctgcggggctcggtggcatctcccgggcgcggcccgcagtccttgcccctgcctccgggccgctcccgcccccggcgccgctcgctcccccgacccggactcccccatgtatgacgactcctacgtgcccgggtttgaggactcggaggcgggttcagccgactcctacaccagccgcccatctctggactcagacgtctccctggaggaggaccgggagagtgcccggcgtgaagtagagagccaggctcagcagcagctcgaaagggccaagcacaaacctgtggcatttgcggtgaggaccaatgtcagctactgtggcgtactggatgaggagtgcccagtccagggctctggagtcaactttgaggccaaagattttctgcacattaaagagtacagcaatgactggtggatcgggcggctagtgaaagagggcggggacatcgccttcatccccagcccccagcgcctggagagcatccggctcaaacaggagcagaaggccaggagatctgggaacccttccagcctgagtg

SEQ ID NO: 2825 - DNA, 586 bp, Homo sapiens
  source 1..586: mol_type = unassigned DNA
gctctctcgctccctgccgccgcccgcagggctgcggggctcggtggcatctcccgggcgcggcccgcagtccttgcccctgcctccgggccgctcccgcccccggcgccgctcgctcccccgacccggactcccccatgtatgacgactcctacgtgcccgggtttgaggactcggaggcgggttcagccgactcctacaccagccgcccatctctggactcagacgtctccctggaggaggaccgggagagtgcccggcgtgaagtagagagccaggctcagcagcagctcgaaagggccaagcacaaacctgtggcatttgcggtgaggaccaatgtcagctactgtggcgtactggatgaggagtgcccagtccagggctctggagtcaactttgaggccaaagattttctgcacattaaagaggtgatcgacccccctacttccagaagcctctaacttcattttcttgctcttgctccagatcctaatgcttctgacttgaatcctcagtctaattccccaagctaatcagctcttctccttaacacacacctgtccacccctcatatctaagatctcat

SEQ ID NO: 2826 - DNA, 2395 bp, Homo sapiens
  source 1..2395: mol_type = unassigned DNA
tcccccgacccggactcccccatgtatgacgactcctacgtgcccgggtttgaggactcggaggcgggttcagccgactcctacaccagccgcccatctctggactcagacgtctccctggaggaggaccgggagagtgcccggcgtgaagtagagagccaggctcagcagcagctcgaaagggccaagaagtacagcaatgactggtggatcgggcggctagtgaaagagggcggggacatcgccttcatccccagcccccagcgcctggagagcatccggctcaaacaggagcagaaggccaggagatctgggaacccttccagcctgagtgacattggcaaccgacgctcccctccgccatctctagccaagcagaagcaaaagcaggcggaacatgttcccccatatgacgtggtgccctccatgcggcctgtggtgctggtgggaccctctctgaaaggttatgaggtcacagacatgatgcagaaggctctcttcgacttcctcaaacacagatttgatggcaggatctccatcacccgagtcacagccgacctctccctggcaaagcgatctgtgctcaacaatccgggcaagaggaccatcattgagcgctcctctgcccgctccagcattgcggaagtgcagagtgagatcgagcgcatatttgagctggccaaatccctgcagctagtagtgttggacgctgacaccatcaaccacccagcacagctggccaagacctcgctggcccccatcatcgtctttgtcaaagtgtcctcaccaaaggtactccagcgtctcattcgctcccgggggaagtcacagatgaagcacctgaccgtacagatgatggcatatgataagctggttcagtgcccaccggagtcatttgatgtgattctggatgagaaccagctggaggatgcctgtgagcacctggctgagtacctggaggtttactggcgggccacgcaccacccagcccctggccccggacttctgggtcctcccagtgccatccccggacttcagaaccagcagctgctgggggagcgtggcgaggagcactccccccttgagcgggacagcttgatgccctctgatgaggccagcgagagctcccgccaagcctggacaggatcttcacagcgtagctcccgccacctggaggaggactatgcagatgcctaccaggacctgtaccagcctcaccgccaacacacctcggggctgcctagtgctaacgggcatgacccccaagaccggcttctagcccaggactcagagcacaaccacagtgaccggaactggcagcgcaaccggccttggcccaaggatagctactgacagcctcctgctgccctaccctggcaggcacaggcgcagctggctggggggcccactccaggcagggtggcgttagactggcatcaggctggcactaggctcagcccccaaaaccccctgcccagccccagcttcagggctgcctgtggtcccaaggttctgggagaaacaggggaccccctcacctcctgggcagtgacccctactaggctcccattccaggtactagctgtgtgttctgcacccctggcaccttcctctcctcccacacaggaagctgccccactgggcagtgccctcaggccaggatccccttagcagggtccttcccaccagactcagggaagggatgccccattaaagtgacaaaagggtggggtgtgggcaccatggcatgaggaagaaacaaggtccctgagcaggcacaagtcctgacagtcaagggactgctttggcatccagggcctccagtcacctcactgccatacattagaaatgagacaatcaaagcccccccagggtggcacacccatctgtttgctggggtgtggcagccacatccaagactggagcagcaggctggccacgctcgggccagagagagctcacagctgaagctcttggagggaagggctctcctcaccctgccaggaagcttcttaacatgtgacaggaccagggaccaggagcatggtgaagccaagtggcagatgggagccaacctggatgggggtttggggaaggagggcatgtgtagcagagaacttaggggggcctccttgcctttctcattcttttgccctgcatcctgtcatttctgttcttgtccctcatacatctttggagaaccgggctccagactttgttccctgactcatagctgccgcttgttaggttagggttagatggggagagacagggcacagaggacctgtctccccggctactcttgccttatggctctagtgtgtgacctacagagcatgctccacaagcccctgcctcacctcactgtcatcactaataaacatcatgcacagtc

SEQ ID NO: 2827 - DNA, 2825 bp, Homo sapiens
  source 1..2825: mol_type = unassigned DNA
tcccccgacccggactcccccatgtatgacgactcctacgtgcccgggtttgaggactcggaggcgccccctgctgaggcttcctctgcagcgggcatcctgagctcttgcccagcatggagggcctggaggtgaggccagaggagctgagggcctggggatggagaggaagcgctttgctcagagaaacaggcaaccgataaatatttaattctcctctttgcttttatctcctgacccactgagacaaatcagctcattaagcagtgattcccggagctcagacagcagggagagtgcctggaaagatggggcaagaatgcggagcagcttctcagccccttggagctgacaactttccctcaaatgtcctggttcagccgactcctacaccagccgcccatctctggactcagacgtctccctggaggaggaccgggagagtgcccggcgtgaagtagagagccaggctcagcagcagctcgaaagggccaagcacaaacctgtggcatttgcggtgaggaccaatgtcagctactgtggcgtactggatgaggagtgcccagtccagggctctggagtcaactttgaggccaaagattttctgcacattaaagagaagtacagcaatgactggtggatcgggcggctagtgaaagagggcggggacatcgccttcatccccagcccccagcgcctggagagcatccggctcaaacaggagcagaaggccaggagatctgggaacccttccagcctgagtgacattggcaaccgacgctcccctccgccatctctagccaagcagaagcaaaagcaggcggaacatgttcccccatatgacgtggtgccctccatgcggcctgtggtgctggtgggaccctctctgaaaggttatgaggtcacagacatgatgcagaaggctctcttcgacttcctcaaacacagatttgatggcaggatctccatcacccgagtcacagccgacctctccctggcaaagcgatctgtgctcaacaatccgggcaagaggaccatcattgagcgctcctctgcccgctccagcattgcggaagtgcagagtgagatcgagcgcatatttgagctggccaaatccctgcagctagtagtgttggacgctgacaccatcaaccacccagcacagctggccaagacctcgctggcccccatcatcgtctttgtcaaagtgtcctcaccaaaggtactccagcgtctcattcgctcccgggggaagtcacagatgaagcacctgaccgtacagatgatggcatatgataagctggttcagtgcccaccggagtcatttgatgtgattctggatgagaaccagctggaggatgcctgtgagcacctggctgagtacctggaggtttactggcgggccacgcaccacccagcccctggccccggacttctgggtcctcccagtgccatccccggacttcagaaccagcagctgctgggggagcgtggcgaggagcactccccccttgagcgggacagcttgatgccctctgatgaggccagcgagagctcccgccaagcctggacaggatcttcacagcgtagctcccgccacctggaggaggactatgcagatgcctaccaggacctgtaccagcctcaccgccaacacacctcggggctgcctagtgctaacgggcatgacccccaagaccggcttctagcccaggactcagagcacaaccacagtgaccggaactggcagcgcaaccggccttggcccaaggatagctactgacagcctcctgctgccctaccctggcaggcacaggcgcagctggctggggggcccactccaggcagggtggcgttagactggcatcaggctggcactaggctcagcccccaaaaccccctgcccagccccagcttcagggctgcctgtggtcccaaggttctgggagaaacaggggaccccctcacctcctgggcagtgacccctactaggctcccattccaggtactagctgtgtgttctgcacccctggcaccttcctctcctcccacacaggaagctgccccactgggcagtgccctcaggccaggatccccttagcagggtccttcccaccagactcagggaagggatgccccattaaagtgacaaaagggtggggtgtgggcaccatggcatgaggaagaaacaaggtccctgagcaggcacaagtcctgacagtcaagggactgctttggcatccagggcctccagtcacctcactgccatacattagaaatgagacaatcaaagcccccccagggtggcacacccatctgtttgctggggtgtggcagccacatccaagactggagcagcaggctggccacgctcgggccagagagagctcacagctgaagctcttggagggaagggctctcctcaccctgccaggaagcttcttaacatgtgacaggaccagggaccaggagcatggtgaagccaagtggcagatgggagccaacctggatgggggtttggggaaggagggcatgtgtagcagagaacttaggggggcctccttgcctttctcattcttttgccctgcatcctgtcatttctgttcttgtccctcatacatctttggagaaccgggctccagactttgttccctgactcatagctgccgcttgttaggttagggttagatggggagagacagggcacagaggacctgtctccccggctactcttgccttatggctctagtgtgtgacctacagagcatgctccacaagcccctgcctcacctcactgtcatcactaataaacatcatgcacagtc

SEQ ID NO: 2828 - DNA, 1712 bp, Homo sapiens
  source 1..1712: mol_type = unassigned DNA
taattctcctctttgcttttatctcctgacccactgagacaaatcagctcattaagcagtgattcccggagctcagacagcagggagagtgcctggaaagatggggcaagaatgcggagcagcttctcagccccttggagctgacaactttccctcaaatgtcctgtaagaaggcctccttaggagtggaccactagatggcttggaaggggccccaataggttggagcacccctgggtcggaaagaggagttcatgttcaagtcttctcccatcacttactgccaggcccaggatagatgaatgctgatgttcagaataggcaactgtccttttctgggactggtctccttctgggcccaattctccatggggcctctggggctaattacattgccgctagatcagatcattttcaaggctctggtggacacctctttctgacagttgaagggacagctggtatagcccagggtgccaaggtgagcttgaaaacaaacctctctgtggggctggatggccctaggaggttcttcccatccctggtgagaaggcaagggctattgcaaggagcagactgacatgtggatggtgttggagggcagcctgctgacccattgctccctcccatctctctctggctctgatcaccctcccccacttccctttctcttgcctggctccttgctctccctgaggccccctctgaagcagtaggagggagatcaggctctaaataaatccaacggctcatctccctcctctccttcccccgtgccaggcaagagaggagctgcagcctgcccacacactcactaggcaaggggggcaccaccagggcactgtgccaactcctggcagctccaaagtactgaaactctggctattttggcgtagcagggtacaggaaaggtaagaccctagatcatgcttggcagggcagccctggcctccccaagtaatactggagcactagagatgagtgagcctggaggacttgggagtaatggagagggggttccattctgagcacaactcattaaatatttaggaagagatcctgtgattcccatcccagggtgagaggtcaggtaagccagatgcctcaggcgttatgattactaaattaggccgccagcggtgcctcacacctgtaatcccagcactttgggtggccgaggtagatcacttgaggtcaggagttggagaccagcctggccaatatggtgaaaccctgtgtctactaaaaatataaaaattagcccagcatggtggcacatgcctgtagtcccaactactcaggaggctggggcagtagaattgcttgaacccgggaggcagaggttgcagtgagccgacatcgcaccattacattccagcctgggcatcacagtgaaactccatctcaaaaaaaaaaaaaaaattactaaattaaaccaggcatagagactcatgcctataatcccaatgctttgggaggctaaggtaggaagatggcttaagcccaggagtttgagaccagcctaggcaacatagcaagatcctgtctctacaaaaaactagtaggcatggtagcgcatgcctgtagtcgtagctactcaggagacaggaggatcgcttgagcccaggagttcaagcctgcagtgagctacgattgtgccactacactccagcctgggtgacagagcaagacctgtctctaagtaaataaat

SEQ ID NO: 2829 - DNA, 424 bp, Homo sapiens
  source 1..424: mol_type = unassigned DNA
cagcagctcgaaagggccaagcacaaacctgtggcatttgcggtgaggaccaatgtcagctactgtggcgtactggatgaggagtgcccagtccagggctctggagtcaactttgaggccaaagattttctgcacattaaagagaacttaggggggcctccttgcctttctcattcttttgccctgcatcctgtcatttctgttcttgtccctcatacatctttggagaaccgggctccagactttgttccctgactcatagctgccgcttgttaggttagggttagatggggagagacagggcacagaggacctgtctccccggctactcttgccttatggctctagtgtgtgacctacagagcatgctccacaagcccctgcctcacctcactgtcatcactaataaacatcatgcacagtc

SEQ ID NO: 2830 - DNA, 730 bp, Homo sapiens
  source 1..730: mol_type = unassigned DNA
caaagattttctgcacattaaagagaagtacagcaatgactggtggatcgggcggctagtgaaagagggcggggacatcgccttcatccccagcccccagcgcctggagagcatccggctcaaacaggagcagaaggccaggagatctgggaacccttccagcctgagtgacattggcaaccgacgctcccctccgccatctctaggcggaacatgttcccccatatgacgtggtgccctccatgcggcctgtggtgctggtgggaccctctctgaaaggttatgaggtcacagacatgatgcagaaggctctcttcgacttcctcaaacacagatttgatggcaggatctccatcacccgagtcacagccgacctctccctggcaaagcgatctgtgctcaacaatccgggcaagaggaccatcattgagcgctcctctgcccgctccagcattggcttcgatgaatgcccttttcctccaattccttcctgtccaccattcgggagccctcaaagcctgctggagtgagcagtgggcagagctcctggtgagcactgctgctgcctccctccatagcggaagtgcagagtgagatcgagcgcatatttgagctggccaaatccctgcagctagtagtgttggacgctgacaccatcaaccacccagcacagctggccaagacctcgctggcccccatcatcgtctttgtcaaagtgtcctcaccaaag

SEQ ID NO: 2831 - DNA, 927 bp, Homo sapiens
  source 1..927: mol_type = unassigned DNA
acaggcaccagggccatggtttctactgacctcatgtccattctgcaggcggaacatgttcccccatatgacgtggtgccctccatgcggcctgtggtgctggtgggaccctctctgaaaggttatgaggtcacagacatgatgcagaaggctctcttcgacttcctcaaacacagatttgatggcaggatctccatcacccgagtcacagccgacctctccctggcaaagcgatctgtgctcaacaatccgggcaagaggaccatcattgagcgctcctctgcccgctccagcattgctagtagtgttggacgctgacaccatcaaccacccagcacagctggccaagacctcgctggcccccatcatcgtctttgtcaaagtgtcctcaccaaaggtactccagcgtctcattcgctcccgggggaagtcacagatgaagcacctgaccgtacagatgatggcatatgataagctggttcagtgcccaccggagtcatttgatgtgattctggatgagaaccagctggaggatgcctgtgagcacctggctgagtacctggaggtttactggcgggccacgcaccacccagcccctggccccggacttctgggtcctcccagtgccatccccggacttcagaaccagcagctgctgggggagcgtggcgaggagcactccccccttgagcgggacagcttgatgccctctgatgaggccagcgagagctcccgccaagcctggacaggatcttcacagcgtagctcccgccacctggaggaggactatgcagatgcctaccaggacctgtaccagcctcaccgccaacacacctcggggctgcctagtgctaacgggcatgacccccaagaccggcttctagcccaggactcagagcacaaccacagtgaccggaactggcagcg

SEQ ID NO: 2832 - DNA, 8378 bp, Homo sapiens
  source 1..8378: mol_type = unassigned DNA
acacacacacacacacccgctcggttcttcccattcccgccacactgcaccagcttccgtccccaagtcctgattcatgaaccgtgccacctttgtctcattttaaactgtgcagactattttaatcttgccacccccatcccagatttccccctcccttcatcctctggaagctctgatgtaaagcgcttgctaggtgggagagcgcttctcccaatccgctcgggtaggcgagtttccgagaagccccctccccgggaccccgccgcgagcgcgggggaagcgcctcggtccctttaaggtgccgcgctctccgaagtgcgggcagggagcctgggcgccggcgcgggtcctggagccgggtggggaagtcctgcgccctccccctccgtccgcagcccagcctcgggggccagccccctccgcccaccgcacacgggctggccatgcggcggctctgaacgatgtcctcctcctcctacgccaagaacgggaccgcggacgggccgcactcccccacctcgcaggtggcccgaggcaccacaacccggaggagcaggttgaaaagatccgatggcagcaccacttcgaccagcttcatcctcagacagggttcagcggattcctacacaagcaggccgtctgactccgatgtctctttggaagaggaccgggaagcaattcgacaggagagagaacagcaagcagctatccagcttgagagagcaaagtccaaacctgtagcatttgccgtgaagacaaatgtgagctactgcggcgccctggacgaggatgtgcctgttccaagcacagctatctcctttgatgctaaagactttctacatattaaagagaaatataacaatgattggtggataggaaggctggtgaaagagggctgtgaaattggcttcattccaagtccactcagattggagaacatacggatccagcaagaacaaaaaagaggacgttttcacggagggaaatcaagtggaaattcttcttcaagtcttggagaaatggtatctgggacattccgagcaactcccacatcaacagcaaaacagaagcaaaaagtgacggagcacattcctccttacgatgttgtaccgtcaatgcgtccggtggtgttagtggggccgtcactgaaaggttacgaggtaacagacatgatgcagaaagccctctttgatttcctgaagcacaggtttgatgggaggatttcaataacgagagtgacagctgacatttctcttgctaagaggtctgtcctaaataatcccagcaagagagcaataattgaacgttcgaacacccggtccagcttagcggaagtacaaagtgaaattgaaagaatctttgagttggcaagatctttgcaactggttgttcttgatgcagacaccatcaatcacccagcacaacttataaagacttccttagcaccaattattgttcatgtaaaagtctcatctccaaaggttttacagcggttgattaaatctagaggaaagtcacaaagtaaacacttgaatgttcaactggtggcagctgataaacttgcacaatgccccccagaaatgtttgatgttatattggatgaaaatcagcttgaggatgcatgtgaacatctaggggagtacctggaggcgtactggcgtgccacccacacaaccagtagcacacccatgaccccgctgctgggaaggaatttgggctccacggcactctcaccatatcccacagcaatttctgggttacagagtcagcgaatgaggcacagcaaccactccacagagaactctccaattgaaagacgaagtctaatgacctctgatgaaaattatcacaatgaaagggctcggaagagtaggaaccgcttgtcttccagttctcagcatagccgagatcattaccctcttgtggaagaagattaccctgactcataccaggacacttacaaaccccataggaaccgaggatcacctgggggatatagccatgactcccgacataggctttgagtctaatgaaacaaaaaatattcatctgttgacaatttgccatagcagtgctaggataaaccaatcatcttaacttggctaacatagcacagtatttactgtgctaatgggctgctgtcattttatgctaagtaaggggcaaaaaaaaaaattacattatgcccttgagtctagatggatattagatgcccgatcatatagatatttttaagtgcaacatttacatgataacagtacattttgttttcttcatagatttagacacatcaatttgtaatttagggtacttacaaggcacatataaaataatttcccatgctggaaattccaaatgaccagttccagttggaaccaatttataaaccaattcctgttggaatttgggtgaattgactagaaagtctacttgagcatgttgtaatcaactgaaaaatctggggggaaaaaaaaaaaactaataagaaaatcgaaataccaatagaagccaaatccagctttggtatttatttgctggaagctaaatttacacttaaagttggagtgtataaacattttaatatatgttaatgttgccagaatgacttttcagacttaccaaatgtattgatagtgccaaaaaaaaaatctcagaaatcttaatgcagaaattatatagtctcctcagattttaatatttttatttctttcctggcacagctgttgtattcaaagtgttttgctttttgtttggtcagtactgttagctcatttgaagttggcaaaaacaaatacaaacaagcaaaaaacctcaaatttttttcagcagtgagagagaatagtaaagagaggcccaagcatagctggttatgtgaaatataaaatggggtgttgttctccctttaatcaatctgagcacaactacatacatccaggaatctgaagtcagatagtaaggatgtggtaccaatcctcccgagtgcaatgctaaacacttccaggtgggaattcatctatttcacttaacacaaacgcagggtctgtatttcctgccaacaagattgagtatctttccattgcttctctcagtctctgtctttgaatatctgaatgttctggcccttcaacaaattctttaaatcatgctaaggaatttcgttttatgtggacacactcaactttgatattcaggagatgtttttacaaaatgactaattgaaaaaagttgaaacaaatgattttaaaagcttgcagtaaaaaataaactcatagattcagcaaatatttgttgactaaaattatagcatttttaatgcagaaaattataaagaatttggagattgagctgccttatttctaatgaacactcctcttcatcttattaagtcttcacagtttttccagtggctataattatggaattggtgacctatgttttatattatcaaggaagccttagattcactctgatctaagaaattattgaaattgaccctttttacacaaatgtctttaaaaaaaaaaacttatttctaaatgtccatagtgcatgcattttctaaaaccccaataagtccagccataaaagttcttttctgctagtacatgtcatgaagcctatttttgaaaataatgataattaattttatagtatcttcttttctccccaagcctttcagtattcaggcactcaaagcatgcaccagttcagtaatcttcttgaccatggaaataagttccacattactgatgagttatatatatatcttgaaccccattacaacctcaccacatccccctgcatttatgttcagtgtttgtaccccattatgaacctgtttagctgataatgaggatacctataattctgtaagtcatttcaaatatttgatacaattaaaaaatatgggcttagtaaattttaaaagttaacatgtgatactggcttgtgagattcttctgtcatctagtgaagcttataaaactttcagttaagacattttaaaagagttatatccattaggcactttaataaacatataacctgccattactgaatactttgttagaacacagaagagcatcttccagcaaacaaaaatatatttattacatgtacagcacatacttgcatgagaaagaaaacattagccaaaacatttttctatatgctttactggtttcttgtttatgcgcattaaagtatttaattgcaaagagtgcaccaaggtgtacaaatttagactagacagctgttcagctttttctgtagtagcattagcagtttggtcatttaactactttaagatacttacattttatggcaggtagctgtaacagcatttaaatatatttcctagtcatcaagattaccatcttctttcaactttttaaaagtcacttgtttttaaaggtttttcaaagccttgtttttagtcttccatgtcatgccgataaagagagtctcattcaatatctgtgcacaaaaccaatctatcaattaccatcagatgtccatacctgttttgctttgcattcttattcaaaagctgacaatcttggaaagggtataatgtatattttattgatggatatatttaaatgtttactttaatttggaatattctttccccttctttctgtaataagtttatcttcctcaaataaggggatatacatcttattttttttaaagacttaagagtttattgtgtaaatgatacttaaaatctagatatatactaaatgaaaagttttatttttgccaagcacaccaagcacctttgaaaaatacatactccatactttgtttttaattaatttcatttaaagatagcaaatgattataagcaagagaaacaagtcttttactgttttgaggctgttttaacttacagtataagccacatactagaattctgtaatttcagtcacagacatataataatgtggactcatgtgacaatgtggaaatgtagttctggaaaaaaacgaatgcaatttgtcaatcctgatgttaattctcaagggtataatgtcactctaatattataaccaacaacattatcttgtttaatatttaaagcaacacttagaaatgtttataaatgatgattctctcttatctttatacagttctattggagagaaggttgaaattgttcacaatttagatgatggtctttcctaataagagtcttaattttgtgactatataagtcattgcagttagtctttaatgaaatgaattttattaatgtaaaacaaattctgagacaattatttgtttcctttaaataatctgctatttaattattattgtcgttgtttgcaaaatgtatttttggaatgttaacctcttttcatacctgcatacttgaacttgtcttttgtgtgggggccttaaaattcataataggaagtggaggcagtgaaaggaagtaagaaaaggaaattatgctaaaagatggtttgcaaatttaaattctttaaatgaacatatcacaaaatgttgttaagacccaggatgtccgttaagaatgtgtcttggcaaccttaatttgcatgttagtatatattttcttagttacacagttttattttggtatttgcttaaaaaatgtaataccattgtagaaattaccctatgtactgatatatttactacctcttctctagagaagacaatctgtctttaaagggaaaaacactggtcaataagtagtgatcaaaattatcactattctggctaaccttgctgcaaagctaaatacatagattattaaaatatgccttccctttagattttaaactgtttccaaaatgctgtttggcaccctttcatttcttccacgttagtgaagttttctttgaattggttcacagtttatcatgaggcaaggttaatttaacaaataagtcatcatagggaacaaaacaaactgcaagggaattgcctttgtgtgcaacttgttataatatctagttctaagtctaaaggagtaaaagtccaaagactttatgtttaagagcagctggtttgcaaattcacattttgttggtccttgacttccacagagcatgacttagccatttactgggtaaggatatgcataatcttggactcccatgtaattggaataaacttcatatcaatgtttcaaataaatgctatgtaccccttattccttttacatttctgcctttgtcttttatgacaatgttgcatgttgtgtttttttaaattatataaaactcatccttgaatgactgtatgaatgaaaaatttataggaaattatgtaataaaatctgttttattagtttctcatacctttaaatactgtcaatactataactgttagtaagttacttactcaagctgtgtctatggggcagagaacagtcctcttctttaaaataatcatgatcaaaccagtcaagtcaatccaattagctgttagacagacaataaggataaccttctttttgacttaagcagtcaagttagtcaaaatagaaaaattggcttatatgggcacccagaactacagcattcaaaaattacttttaaaagtttcttcttttattaaaatggactttcttaaataaaatacatcctctgatagcagctatctctttttacttgtaatgattaattctaaatgcttcatgtaattgagggacattatgagaagactagaaagtatctcatcagataatcctaagggctgtaacttctacttgccataaacaaagtataattaagagtgagtagcaattggtttggggagtcgtagttatatatgaaactttcttttgtttctcatgatgtatgtaaaatgtttgcagaaggatggtagaaaatgttactaatgaatttagagtggtttgggagaatacactgatacttcctcatttgaaaattataaggagttacaaggggaactaagaaccagaagtggctggcctctagcttttcaatacctgataagtgttcttggttatgttttgaacacttaaatttctcaacaaatggctatgtctatatttatgtaggggccacccttgccctacttgcatgccactttgacttttaactgaaatcagtgtgaattctgtatgcataagggatgtaataaagaggcgggatcattaacgctatatcgttgcatactatttttcatatgccttacaatattttctgggatgttattaaaatgaaagcattttattgccaaaataaatctatgttgttacttataatctgcattagcagtagaaaaataatgtagcaaaaacatattgtacagtacaaaattataaaatatatattttgccaataatataaaaatagattgaggagaaagaagcacatttgttatagcacaaacttataacaaaatccaccgttaaatttggcagtcatattttttaaaagtatgtcgatttagttctaagttttgtcagatttacttcatctaccatctttttaacttgctgcttgatacttttccagcaatttatttcatagccttgcaatctgtggatgtaatttcttttgttttattcccttccataaaatttattaaattttattttgtgataacactcataccatattttctcctcttatttcttctctttcaataacaacagcagaaagtcacagcaagtgagctcatagggctcctctgaattttggacatgtgtgagatttttgtatttttcacagcctcgagtcagaatgatcaataaagatgtcccaaccacaaaaaattatattagttagggattctttaatttgttttgtactgaatactactttgaaacataagttaaagccattagctgtgtttttgtagggatggtgggaaggaataaaaaataaatgtattaacataaaacatactaaaacagaaatatggcaaaatgatgtaaaaagatttttcctactattctgagggctgttgaaatcccaggctattgctatatctccattgacaaagtgggataaaaaatgcctttgtcaaataattttttttctttctttaaattttagttatttattttaataatttgtccccttttatttttcttatctaggtatgtgtagcattctacaaggcatgctgggtaaaatatactatgcaaatgtgtacagtgctgcatgttttgttctccctctgctttagtggctttaaagaaaaaaacgtggtgttatttttgtgaataaaaacattaacaaagaaaatgcagagtgcatgcatagagtatcctcatttctatggatttgttttatggaatttaaatgtgtacaaaacaactgcattactttttttcttttatataataaatgaaaaaaacactgaaacca

SEQ ID NO: 2833 - DNA, 7658 bp, Homo sapiens
  source 1..7658: mol_type = unassigned DNA
gtattgggaaggcagataaaatgccaggtctggactgcctctggggataacctcaccctgtgggatgtgaatgaatagcatcttgcctggtaaatccacaggaattgataaggcaggcgcagttctcccaaacaggccttttctctttaagctgtagctgtggtttctgcagcaattttgtttttgccttgaaagaggtgctctggattatcacacctccatgtatgacaatttgtacctgcatggaattgaagactcggaggctgaagaataatgtgatgtgttacccaagatggtgtgaacagagcttcaagccaatggagaagactaggcctaaatagctgacctggtgaagtgacacataaagccacacctggagtgccacctcctcagcagtctttctcagtgccaatgcatttatggctggttcagcggattcctacacaagcaggccgtctgactccgatgtctctttggaagaggaccgggaagcaattcgacaggagagagaacagcaagcagctatccagcttgagagagcaaagtccaaacctgtagcatttgccgtgaagacaaatgtgagctactgcggcgccctggacgaggatgtgcctgttccaagcacagctatctcctttgatgctaaagactttctacatattaaagagaaatataacaatgattggtggataggaaggctggtgaaagagggctgtgaaattggcttcattccaagtccactcagattggagaacatacggatccagcaagaacaaaaaagaggacgttttcacggagggaaatcaagtggaaattcttcttcaagtcttggagaaatggtatctgggacattccgagcaactcccacatcaacagcaaaacagaagcaaaaagtggaaatgtttgatgttatattggatgaaaatcagcttgaggatgcatgtgaacatctaggggagtacctggaggcgtactggcgtgccacccacacaaccagtagcacacccatgaccccgctgctgggaaggaatttgggctccacggcactctcaccatatcccacagcaatttctgggttacagagtcagcgaatgaggcacagcaaccactccacagagaactctccaattgaaagacgaagtctaatgacctctgatgaaaattatcacaatgaaagggctcggaagagtaggaaccgcttgtcttccagttctcagcatagccgagatcattaccctcttgtggaagaagattaccctgactcataccaggacacttacaaaccccataggaaccgaggatcacctgggggatatagccatgactcccgacataggctttgagtctaatgaaacaaaaaatattcatctgttgacaatttgccatagcagtgctaggataaaccaatcatcttaacttggctaacatagcacagtatttactgtgctaatgggctgctgtcattttatgctaagtaaggggcaaaaaaaaaaattacattatgcccttgagtctagatggatattagatgcccgatcatatagatatttttaagtgcaacatttacatgataacagtacattttgttttcttcatagatttagacacatcaatttgtaatttagggtacttacaaggcacatataaaataatttcccatgctggaaattccaaatgaccagttccagttggaaccaatttataaaccaattcctgttggaatttgggtgaattgactagaaagtctacttgagcatgttgtaatcaactgaaaaatctggggggaaaaaaaaaaaactaataagaaaatcgaaataccaatagaagccaaatccagctttggtatttatttgctggaagctaaatttacacttaaagttggagtgtataaacattttaatatatgttaatgttgccagaatgacttttcagacttaccaaatgtattgatagtgccaaaaaaaaaatctcagaaatcttaatgcagaaattatatagtctcctcagattttaatatttttatttctttcctggcacagctgttgtattcaaagtgttttgctttttgtttggtcagtactgttagctcatttgaagttggcaaaaacaaatacaaacaagcaaaaaacctcaaatttttttcagcagtgagagagaatagtaaagagaggcccaagcatagctggttatgtgaaatataaaatggggtgttgttctccctttaatcaatctgagcacaactacatacatccaggaatctgaagtcagatagtaaggatgtggtaccaatcctcccgagtgcaatgctaaacacttccaggtgggaattcatctatttcacttaacacaaacgcagggtctgtatttcctgccaacaagattgagtatctttccattgcttctctcagtctctgtctttgaatatctgaatgttctggcccttcaacaaattctttaaatcatgctaaggaatttcgttttatgtggacacactcaactttgatattcaggagatgtttttacaaaatgactaattgaaaaaagttgaaacaaatgattttaaaagcttgcagtaaaaaataaactcatagattcagcaaatatttgttgactaaaattatagcatttttaatgcagaaaattataaagaatttggagattgagctgccttatttctaatgaacactcctcttcatcttattaagtcttcacagtttttccagtggctataattatggaattggtgacctatgttttatattatcaaggaagccttagattcactctgatctaagaaattattgaaattgaccctttttacacaaatgtctttaaaaaaaaaaacttatttctaaatgtccatagtgcatgcattttctaaaaccccaataagtccagccataaaagttcttttctgctagtacatgtcatgaagcctatttttgaaaataatgataattaattttatagtatcttcttttctccccaagcctttcagtattcaggcactcaaagcatgcaccagttcagtaatcttcttgaccatggaaataagttccacattactgatgagttatatatatatcttgaaccccattacaacctcaccacatccccctgcatttatgttcagtgtttgtaccccattatgaacctgtttagctgataatgaggatacctataattctgtaagtcatttcaaatatttgatacaattaaaaaatatgggcttagtaaattttaaaagttaacatgtgatactggcttgtgagattcttctgtcatctagtgaagcttataaaactttcagttaagacattttaaaagagttatatccattaggcactttaataaacatataacctgccattactgaatactttgttagaacacagaagagcatcttccagcaaacaaaaatatatttattacatgtacagcacatacttgcatgagaaagaaaacattagccaaaacatttttctatatgctttactggtttcttgtttatgcgcattaaagtatttaattgcaaagagtgcaccaaggtgtacaaatttagactagacagctgttcagctttttctgtagtagcattagcagtttggtcatttaactactttaagatacttacattttatggcaggtagctgtaacagcatttaaatatatttcctagtcatcaagattaccatcttctttcaactttttaaaagtcacttgtttttaaaggtttttcaaagccttgtttttagtcttccatgtcatgccgataaagagagtctcattcaatatctgtgcacaaaaccaatctatcaattaccatcagatgtccatacctgttttgctttgcattcttattcaaaagctgacaatcttggaaagggtataatgtatattttattgatggatatatttaaatgtttactttaatttggaatattctttccccttctttctgtaataagtttatcttcctcaaataaggggatatacatcttattttttttaaagacttaagagtttattgtgtaaatgatacttaaaatctagatatatactaaatgaaaagttttatttttgccaagcacaccaagcacctttgaaaaatacatactccatactttgtttttaattaatttcatttaaagatagcaaatgattataagcaagagaaacaagtcttttactgttttgaggctgttttaacttacagtataagccacatactagaattctgtaatttcagtcacagacatataataatgtggactcatgtgacaatgtggaaatgtagttctggaaaaaaacgaatgcaatttgtcaatcctgatgttaattctcaagggtataatgtcactctaatattataaccaacaacattatcttgtttaatatttaaagcaacacttagaaatgtttataaatgatgattctctcttatctttatacagttctattggagagaaggttgaaattgttcacaatttagatgatggtctttcctaataagagtcttaattttgtgactatataagtcattgcagttagtctttaatgaaatgaattttattaatgtaaaacaaattctgagacaattatttgtttcctttaaataatctgctatttaattattattgtcgttgtttgcaaaatgtatttttggaatgttaacctcttttcatacctgcatacttgaacttgtcttttgtgtgggggccttaaaattcataataggaagtggaggcagtgaaaggaagtaagaaaaggaaattatgctaaaagatggtttgcaaatttaaattctttaaatgaacatatcacaaaatgttgttaagacccaggatgtccgttaagaatgtgtcttggcaaccttaatttgcatgttagtatatattttcttagttacacagttttattttggtatttgcttaaaaaatgtaataccattgtagaaattaccctatgtactgatatatttactacctcttctctagagaagacaatctgtctttaaagggaaaaacactggtcaataagtagtgatcaaaattatcactattctggctaaccttgctgcaaagctaaatacatagattattaaaatatgccttccctttagattttaaactgtttccaaaatgctgtttggcaccctttcatttcttccacgttagtgaagttttctttgaattggttcacagtttatcatgaggcaaggttaatttaacaaataagtcatcatagggaacaaaacaaactgcaagggaattgcctttgtgtgcaacttgttataatatctagttctaagtctaaaggagtaaaagtccaaagactttatgtttaagagcagctggtttgcaaattcacattttgttggtccttgacttccacagagcatgacttagccatttactgggtaaggatatgcataatcttggactcccatgtaattggaataaacttcatatcaatgtttcaaataaatgctatgtaccccttattccttttacatttctgcctttgtcttttatgacaatgttgcatgttgtgtttttttaaattatataaaactcatccttgaatgactgtatgaatgaaaaatttataggaaattatgtaataaaatctgttttattagtttctcatacctttaaatactgtcaatactataactgttagtaagttacttactcaagctgtgtctatggggcagagaacagtcctcttctttaaaataatcatgatcaaaccagtcaagtcaatccaattagctgttagacagacaataaggataaccttctttttgacttaagcagtcaagttagtcaaaatagaaaaattggcttatatgggcacccagaactacagcattcaaaaattacttttaaaagtttcttcttttattaaaatggactttcttaaataaaatacatcctctgatagcagctatctctttttacttgtaatgattaattctaaatgcttcatgtaattgagggacattatgagaagactagaaagtatctcatcagataatcctaagggctgtaacttctacttgccataaacaaagtataattaagagtgagtagcaattggtttggggagtcgtagttatatatgaaactttcttttgtttctcatgatgtatgtaaaatgtttgcagaaggatggtagaaaatgttactaatgaatttagagtggtttgggagaatacactgatacttcctcatttgaaaattataaggagttacaaggggaactaagaaccagaagtggctggcctctagcttttcaatacctgataagtgttcttggttatgttttgaacacttaaatttctcaacaaatggctatgtctatatttatgtaggggccacccttgccctacttgcatgccactttgacttttaactgaaatcagtgtgaattctgtatgcataagggatgtaataaagaggcgggatcattaacgctatatcgttgcatactatttttcatatgccttacaatattttctgggatgttattaaaatgaaagcattttattgccaaaataaatctatgttgttacttataatctgcattagcagtagaaaaataatgtagcaaaaacatattgtacagtacaaaattataaaatatatattttgccaataatataaaaatagattgaggagaaagaagcacatttgttatagcacaaacttataacaaaatccaccgttaaatttggcagtcatattttttaaaagtatgtcgatttagttctaagttttgtcagatttacttcatctaccatctttttaacttgctgcttgatacttttccagcaatttatttcatagccttgcaatctgtggatgtaatttcttttgttttattcccttccataaaatttattaaattttattttgtgataacactcataccatattttctcctcttatttcttctctttcaataacaacagcagaaagtcacagcaagtgagctcatagggctcctctgaattttggacatgtgtgagatttttgtatttttcacagcctcgagtcagaatgatcaataaagatgtcccaaccacaaaaaattatattagttagggattctttaatttgttttgtactgaatactactttgaaacataagttaaagccattagctgtgtttttgtagggatggtgggaaggaataaaaaataaatgtattaacataaaacatactaaaacagaaatatggcaaaatgatgtaaaaagatttttcctactattctgagggctgttgaaatcccaggctattgctatatctccattgacaaagtgggataaaaaatgcctttgtcaaataattttttttctttctttaaattttagttatttattttaataatttgtccccttttatttttcttatctaggtatgtgtagcattctacaaggcatgctgggtaaaatatactatgcaaatgtgtacagtgctgcatgttttgttctccctctgctttagtggctttaaagaaaaaaacgtggtgttatttttgtgaataaaaacattaacaaagaaaatgcagagtgcatgcatagagtatcctcatttctatggatttgttttatggaatttaaatgtgtacaaaacaactgcattactttttt

SEQ ID NO: 2834 - DNA, 7706 bp, Homo sapiens
  source 1..7706: mol_type = unassigned DNA
gtattgggaaggcagataaaatgccaggtctggactgcctctggggataacctcaccctgtgggatgtgaatgaatagcatcttgcctggtaaatccacaggaattgataaggcaggcgcagttctcccaaacaggccttttctctttaagctgtagctgtggtttctgcagcaattttgtttttgccttgaaagaggtgctctggattatcacacctccatgtatgacaatttgtacctgcatggaattgaagactcggaggctggttcagcggattcctacacaagcaggccgtctgactccgatgtctctttggaagaggaccgggaagcaattcgacaggagagagaacagcaagcagctatccagcttgagagagcaaagtccaaacctgtagcatttgccgtgaagacaaatgtgagctactgcggcgccctggacgaggatgtgcctgttccaagcacagctatctcctttgatgctaaagactttctacatattaaagagaaatataacaatgattggtggataggaaggctggtgaaagagggctgtgaaattggcttcattccaagtccactcagattggagaacatacggatccagcaagaacaaaaaagaggacgttttcacggagggaaatcaagtggaaattcttcttcaagtcttggagaaatggtatctgggacattccgagcaactcccacatcaacagcaaaacagaagcaaaaagtgacggagcacattcctccttacgatgttgtaccgtcaatgcgtccggtggtgttagtggggccgtcactgaaaggttacgaggtaacagacatgatgcagaaagccctctttgatttcctgaagcacaggtttgatgggaggatttcaataacgagagtgacagctgacatttctcttgctaagaggtctgtcctaaataatcccagcaagagagcaataattgaacgttcgaacacccggtccagcttagcggaagtacaaagtgaaattgaaagaatctttgagttggcaagatctttgcaactggttgttcttgatgcagacaccatcaatcacccagcacaacttataaagacttccttagcaccaattattgttcatgtaaaagtctcatctccaaagagtcagcgaatgaggcacagcaaccactccacagagaactctccaattgaaagacgaagtctaatgacctctgatgaaaattatcacaatgaaagggctcggaagagtaggaaccgcttgtcttccagttctcagcatagccgagatcattaccctcttgtggaagaagattaccctgactcataccaggacacttacaaaccccataggaaccgaggatcacctgggggatatagccatgactcccgacataggctttgagtctaatgaaacaaaaaatattcatctgttgacaatttgccatagcagtgctaggataaaccaatcatcttaacttggctaacatagcacagtatttactgtgctaatgggctgctgtcattttatgctaagtaaggggcaaaaaaaaaaattacattatgcccttgagtctagatggatattagatgcccgatcatatagatatttttaagtgcaacatttacatgataacagtacattttgttttcttcatagatttagacacatcaatttgtaatttagggtacttacaaggcacatataaaataatttcccatgctggaaattccaaatgaccagttccagttggaaccaatttataaaccaattcctgttggaatttgggtgaattgactagaaagtctacttgagcatgttgtaatcaactgaaaaatctggggggaaaaaaaaaaaactaataagaaaatcgaaataccaatagaagccaaatccagctttggtatttatttgctggaagctaaatttacacttaaagttggagtgtataaacattttaatatatgttaatgttgccagaatgacttttcagacttaccaaatgtattgatagtgccaaaaaaaaaatctcagaaatcttaatgcagaaattatatagtctcctcagattttaatatttttatttctttcctggcacagctgttgtattcaaagtgttttgctttttgtttggtcagtactgttagctcatttgaagttggcaaaaacaaatacaaacaagcaaaaaacctcaaatttttttcagcagtgagagagaatagtaaagagaggcccaagcatagctggttatgtgaaatataaaatggggtgttgttctccctttaatcaatctgagcacaactacatacatccaggaatctgaagtcagatagtaaggatgtggtaccaatcctcccgagtgcaatgctaaacacttccaggtgggaattcatctatttcacttaacacaaacgcagggtctgtatttcctgccaacaagattgagtatctttccattgcttctctcagtctctgtctttgaatatctgaatgttctggcccttcaacaaattctttaaatcatgctaaggaatttcgttttatgtggacacactcaactttgatattcaggagatgtttttacaaaatgactaattgaaaaaagttgaaacaaatgattttaaaagcttgcagtaaaaaataaactcatagattcagcaaatatttgttgactaaaattatagcatttttaatgcagaaaattataaagaatttggagattgagctgccttatttctaatgaacactcctcttcatcttattaagtcttcacagtttttccagtggctataattatggaattggtgacctatgttttatattatcaaggaagccttagattcactctgatctaagaaattattgaaattgaccctttttacacaaatgtctttaaaaaaaaaaacttatttctaaatgtccatagtgcatgcattttctaaaaccccaataagtccagccataaaagttcttttctgctagtacatgtcatgaagcctatttttgaaaataatgataattaattttatagtatcttcttttctccccaagcctttcagtattcaggcactcaaagcatgcaccagttcagtaatcttcttgaccatggaaataagttccacattactgatgagttatatatatatcttgaaccccattacaacctcaccacatccccctgcatttatgttcagtgtttgtaccccattatgaacctgtttagctgataatgaggatacctataattctgtaagtcatttcaaatatttgatacaattaaaaaatatgggcttagtaaattttaaaagttaacatgtgatactggcttgtgagattcttctgtcatctagtgaagcttataaaactttcagttaagacattttaaaagagttatatccattaggcactttaataaacatataacctgccattactgaatactttgttagaacacagaagagcatcttccagcaaacaaaaatatatttattacatgtacagcacatacttgcatgagaaagaaaacattagccaaaacatttttctatatgctttactggtttcttgtttatgcgcattaaagtatttaattgcaaagagtgcaccaaggtgtacaaatttagactagacagctgttcagctttttctgtagtagcattagcagtttggtcatttaactactttaagatacttacattttatggcaggtagctgtaacagcatttaaatatatttcctagtcatcaagattaccatcttctttcaactttttaaaagtcacttgtttttaaaggtttttcaaagccttgtttttagtcttccatgtcatgccgataaagagagtctcattcaatatctgtgcacaaaaccaatctatcaattaccatcagatgtccatacctgttttgctttgcattcttattcaaaagctgacaatcttggaaagggtataatgtatattttattgatggatatatttaaatgtttactttaatttggaatattctttccccttctttctgtaataagtttatcttcctcaaataaggggatatacatcttattttttttaaagacttaagagtttattgtgtaaatgatacttaaaatctagatatatactaaatgaaaagttttatttttgccaagcacaccaagcacctttgaaaaatacatactccatactttgtttttaattaatttcatttaaagatagcaaatgattataagcaagagaaacaagtcttttactgttttgaggctgttttaacttacagtataagccacatactagaattctgtaatttcagtcacagacatataataatgtggactcatgtgacaatgtggaaatgtagttctggaaaaaaacgaatgcaatttgtcaatcctgatgttaattctcaagggtataatgtcactctaatattataaccaacaacattatcttgtttaatatttaaagcaacacttagaaatgtttataaatgatgattctctcttatctttatacagttctattggagagaaggttgaaattgttcacaatttagatgatggtctttcctaataagagtcttaattttgtgactatataagtcattgcagttagtctttaatgaaatgaattttattaatgtaaaacaaattctgagacaattatttgtttcctttaaataatctgctatttaattattattgtcgttgtttgcaaaatgtatttttggaatgttaacctcttttcatacctgcatacttgaacttgtcttttgtgtgggggccttaaaattcataataggaagtggaggcagtgaaaggaagtaagaaaaggaaattatgctaaaagatggtttgcaaatttaaattctttaaatgaacatatcacaaaatgttgttaagacccaggatgtccgttaagaatgtgtcttggcaaccttaatttgcatgttagtatatattttcttagttacacagttttattttggtatttgcttaaaaaatgtaataccattgtagaaattaccctatgtactgatatatttactacctcttctctagagaagacaatctgtctttaaagggaaaaacactggtcaataagtagtgatcaaaattatcactattctggctaaccttgctgcaaagctaaatacatagattattaaaatatgccttccctttagattttaaactgtttccaaaatgctgtttggcaccctttcatttcttccacgttagtgaagttttctttgaattggttcacagtttatcatgaggcaaggttaatttaacaaataagtcatcatagggaacaaaacaaactgcaagggaattgcctttgtgtgcaacttgttataatatctagttctaagtctaaaggagtaaaagtccaaagactttatgtttaagagcagctggtttgcaaattcacattttgttggtccttgacttccacagagcatgacttagccatttactgggtaaggatatgcataatcttggactcccatgtaattggaataaacttcatatcaatgtttcaaataaatgctatgtaccccttattccttttacatttctgcctttgtcttttatgacaatgttgcatgttgtgtttttttaaattatataaaactcatccttgaatgactgtatgaatgaaaaatttataggaaattatgtaataaaatctgttttattagtttctcatacctttaaatactgtcaatactataactgttagtaagttacttactcaagctgtgtctatggggcagagaacagtcctcttctttaaaataatcatgatcaaaccagtcaagtcaatccaattagctgttagacagacaataaggataaccttctttttgacttaagcagtcaagttagtcaaaatagaaaaattggcttatatgggcacccagaactacagcattcaaaaattacttttaaaagtttcttcttttattaaaatggactttcttaaataaaatacatcctctgatagcagctatctctttttacttgtaatgattaattctaaatgcttcatgtaattgagggacattatgagaagactagaaagtatctcatcagataatcctaagggctgtaacttctacttgccataaacaaagtataattaagagtgagtagcaattggtttggggagtcgtagttatatatgaaactttcttttgtttctcatgatgtatgtaaaatgtttgcagaaggatggtagaaaatgttactaatgaatttagagtggtttgggagaatacactgatacttcctcatttgaaaattataaggagttacaaggggaactaagaaccagaagtggctggcctctagcttttcaatacctgataagtgttcttggttatgttttgaacacttaaatttctcaacaaatggctatgtctatatttatgtaggggccacccttgccctacttgcatgccactttgacttttaactgaaatcagtgtgaattctgtatgcataagggatgtaataaagaggcgggatcattaacgctatatcgttgcatactatttttcatatgccttacaatattttctgggatgttattaaaatgaaagcattttattgccaaaataaatctatgttgttacttataatctgcattagcagtagaaaaataatgtagcaaaaacatattgtacagtacaaaattataaaatatatattttgccaataatataaaaatagattgaggagaaagaagcacatttgttatagcacaaacttataacaaaatccaccgttaaatttggcagtcatattttttaaaagtatgtcgatttagttctaagttttgtcagatttacttcatctaccatctttttaacttgctgcttgatacttttccagcaatttatttcatagccttgcaatctgtggatgtaatttcttttgttttattcccttccataaaatttattaaattttattttgtgataacactcataccatattttctcctcttatttcttctctttcaataacaacagcagaaagtcacagcaagtgagctcatagggctcctctgaattttggacatgtgtgagatttttgtatttttcacagcctcgagtcagaatgatcaataaagatgtcccaaccacaaaaaattatattagttagggattctttaatttgttttgtactgaatactactttgaaacataagttaaagccattagctgtgtttttgtagggatggtgggaaggaataaaaaataaatgtattaacataaaacatactaaaacagaaatatggcaaaatgatgtaaaaagatttttcctactattctgagggctgttgaaatcccaggctattgctatatctccattgacaaagtgggataaaaaatgcctttgtcaaataattttttttctttctttaaattttagttatttattttaataatttgtccccttttatttttcttatctaggtatgtgtagcattctacaaggcatgctgggtaaaatatactatgcaaatgtgtacagtgctgcatgttttgttctccctctgctttagtggctttaaagaaaaaaacgtggtgttatttttgtgaataaaaacattaacaaagaaaatgcagagtgcatgcatagagtatcctcatttctatggatttgttttatggaatttaaatgtgtacaaaacaactgcatt

SEQ ID NO: 2835 - DNA, 7854 bp, Homo sapiens
  source 1..7854: mol_type = unassigned DNA
gctttttgtgctctgtattgggaaggcagataaaatgccaggtctggactgcctctggggataacctcaccctgtgggatgtgaatgaatagcatcttgcctggtaaatccacaggaattgataaggcaggcgcagttctcccaaacaggccttttctctttaagctgtagctgtggtttctgcagcaattttgtttttgccttgaaagaggtgctctggattatcacacctccatgtatgacaatttgtacctgcatggaattgaagactcggaggctggttcagcggattcctacacaagcaggccgtctgactccgatgtctctttggaagaggaccgggaagcaattcgacaggagagagaacagcaagcagctatccagcttgagagagcaaagtccaaacctgtagcatttgccgtgaagacaaatgtgagctactgcggcgccctggacgaggatgtgcctgttccaagcacagctatctcctttgatgctaaagactttctacatattaaagagaaatataacaatgattggtggataggaaggctggtgaaagagggctgtgaaattggcttcattccaagtccactcagattggagaacatacggatccagcaagaacaaaaaagaggacgttttcacggagggaaatcaagtggaaattcttcttcaagtcttggagaaatggtatctgggacattccgagcaactcccacatcaacagcaaaacagaagcaaaaagtggatttcaataacgagagtgacagctgacatttctcttgctaagaggtctgtcctaaataatcccagcaagagagcaataattgaacgttcgaacacccggtccagcttagcggaagtacaaagtgaaattgaaagaatctttgagttggcaagatctttgcaactggttgttcttgatgcagacaccatcaatcacccagcacaacttataaagacttccttagcaccaattattgttcatgtaaaagtctcatctccaaaggttttacagcggttgattaaatctagaggaaagtcacaaagtaaacacttgaatgttcaactggtggcagctgataaacttgcacaatgccccccagaaatgtttgatgttatattggatgaaaatcagcttgaggatgcatgtgaacatctaggggagtacctggaggcgtactggcgtgccacccacacaaccagtagcacacccatgaccccgctgctgggaaggaatttgggctccacggcactctcaccatatcccacagcaatttctgggttacagagtcagcgaatgaggcacagcaaccactccacagagaactctccaattgaaagacgaagtctaatgacctctgatgaaaattatcacaatgaaagggctcggaagagtaggaaccgcttgtcttccagttctcagcatagccgagatcattaccctcttgtggaagaagattaccctgactcataccaggacacttacaaaccccataggaaccgaggatcacctgggggatatagccatgactcccgacataggctttgagtctaatgaaacaaaaaatattcatctgttgacaatttgccatagcagtgctaggataaaccaatcatcttaacttggctaacatagcacagtatttactgtgctaatgggctgctgtcattttatgctaagtaaggggcaaaaaaaaaaattacattatgcccttgagtctagatggatattagatgcccgatcatatagatatttttaagtgcaacatttacatgataacagtacattttgttttcttcatagatttagacacatcaatttgtaatttagggtacttacaaggcacatataaaataatttcccatgctggaaattccaaatgaccagttccagttggaaccaatttataaaccaattcctgttggaatttgggtgaattgactagaaagtctacttgagcatgttgtaatcaactgaaaaatctggggggaaaaaaaaaaaactaataagaaaatcgaaataccaatagaagccaaatccagctttggtatttatttgctggaagctaaatttacacttaaagttggagtgtataaacattttaatatatgttaatgttgccagaatgacttttcagacttaccaaatgtattgatagtgccaaaaaaaaaatctcagaaatcttaatgcagaaattatatagtctcctcagattttaatatttttatttctttcctggcacagctgttgtattcaaagtgttttgctttttgtttggtcagtactgttagctcatttgaagttggcaaaaacaaatacaaacaagcaaaaaacctcaaatttttttcagcagtgagagagaatagtaaagagaggcccaagcatagctggttatgtgaaatataaaatggggtgttgttctccctttaatcaatctgagcacaactacatacatccaggaatctgaagtcagatagtaaggatgtggtaccaatcctcccgagtgcaatgctaaacacttccaggtgggaattcatctatttcacttaacacaaacgcagggtctgtatttcctgccaacaagattgagtatctttccattgcttctctcagtctctgtctttgaatatctgaatgttctggcccttcaacaaattctttaaatcatgctaaggaatttcgttttatgtggacacactcaactttgatattcaggagatgtttttacaaaatgactaattgaaaaaagttgaaacaaatgattttaaaagcttgcagtaaaaaataaactcatagattcagcaaatatttgttgactaaaattatagcatttttaatgcagaaaattataaagaatttggagattgagctgccttatttctaatgaacactcctcttcatcttattaagtcttcacagtttttccagtggctataattatggaattggtgacctatgttttatattatcaaggaagccttagattcactctgatctaagaaattattgaaattgaccctttttacacaaatgtctttaaaaaaaaaaacttatttctaaatgtccatagtgcatgcattttctaaaaccccaataagtccagccataaaagttcttttctgctagtacatgtcatgaagcctatttttgaaaataatgataattaattttatagtatcttcttttctccccaagcctttcagtattcaggcactcaaagcatgcaccagttcagtaatcttcttgaccatggaaataagttccacattactgatgagttatatatatatcttgaaccccattacaacctcaccacatccccctgcatttatgttcagtgtttgtaccccattatgaacctgtttagctgataatgaggatacctataattctgtaagtcatttcaaatatttgatacaattaaaaaatatgggcttagtaaattttaaaagttaacatgtgatactggcttgtgagattcttctgtcatctagtgaagcttataaaactttcagttaagacattttaaaagagttatatccattaggcactttaataaacatataacctgccattactgaatactttgttagaacacagaagagcatcttccagcaaacaaaaatatatttattacatgtacagcacatacttgcatgagaaagaaaacattagccaaaacatttttctatatgctttactggtttcttgtttatgcgcattaaagtatttaattgcaaagagtgcaccaaggtgtacaaatttagactagacagctgttcagctttttctgtagtagcattagcagtttggtcatttaactactttaagatacttacattttatggcaggtagctgtaacagcatttaaatatatttcctagtcatcaagattaccatcttctttcaactttttaaaagtcacttgtttttaaaggtttttcaaagccttgtttttagtcttccatgtcatgccgataaagagagtctcattcaatatctgtgcacaaaaccaatctatcaattaccatcagatgtccatacctgttttgctttgcattcttattcaaaagctgacaatcttggaaagggtataatgtatattttattgatggatatatttaaatgtttactttaatttggaatattctttccccttctttctgtaataagtttatcttcctcaaataaggggatatacatcttattttttttaaagacttaagagtttattgtgtaaatgatacttaaaatctagatatatactaaatgaaaagttttatttttgccaagcacaccaagcacctttgaaaaatacatactccatactttgtttttaattaatttcatttaaagatagcaaatgattataagcaagagaaacaagtcttttactgttttgaggctgttttaacttacagtataagccacatactagaattctgtaatttcagtcacagacatataataatgtggactcatgtgacaatgtggaaatgtagttctggaaaaaaacgaatgcaatttgtcaatcctgatgttaattctcaagggtataatgtcactctaatattataaccaacaacattatcttgtttaatatttaaagcaacacttagaaatgtttataaatgatgattctctcttatctttatacagttctattggagagaaggttgaaattgttcacaatttagatgatggtctttcctaataagagtcttaattttgtgactatataagtcattgcagttagtctttaatgaaatgaattttattaatgtaaaacaaattctgagacaattatttgtttcctttaaataatctgctatttaattattattgtcgttgtttgcaaaatgtatttttggaatgttaacctcttttcatacctgcatacttgaacttgtcttttgtgtgggggccttaaaattcataataggaagtggaggcagtgaaaggaagtaagaaaaggaaattatgctaaaagatggtttgcaaatttaaattctttaaatgaacatatcacaaaatgttgttaagacccaggatgtccgttaagaatgtgtcttggcaaccttaatttgcatgttagtatatattttcttagttacacagttttattttggtatttgcttaaaaaatgtaataccattgtagaaattaccctatgtactgatatatttactacctcttctctagagaagacaatctgtctttaaagggaaaaacactggtcaataagtagtgatcaaaattatcactattctggctaaccttgctgcaaagctaaatacatagattattaaaatatgccttccctttagattttaaactgtttccaaaatgctgtttggcaccctttcatttcttccacgttagtgaagttttctttgaattggttcacagtttatcatgaggcaaggttaatttaacaaataagtcatcatagggaacaaaacaaactgcaagggaattgcctttgtgtgcaacttgttataatatctagttctaagtctaaaggagtaaaagtccaaagactttatgtttaagagcagctggtttgcaaattcacattttgttggtccttgacttccacagagcatgacttagccatttactgggtaaggatatgcataatcttggactcccatgtaattggaataaacttcatatcaatgtttcaaataaatgctatgtaccccttattccttttacatttctgcctttgtcttttatgacaatgttgcatgttgtgtttttttaaattatataaaactcatccttgaatgactgtatgaatgaaaaatttataggaaattatgtaataaaatctgttttattagtttctcatacctttaaatactgtcaatactataactgttagtaagttacttactcaagctgtgtctatggggcagagaacagtcctcttctttaaaataatcatgatcaaaccagtcaagtcaatccaattagctgttagacagacaataaggataaccttctttttgacttaagcagtcaagttagtcaaaatagaaaaattggcttatatgggcacccagaactacagcattcaaaaattacttttaaaagtttcttcttttattaaaatggactttcttaaataaaatacatcctctgatagcagctatctctttttacttgtaatgattaattctaaatgcttcatgtaattgagggacattatgagaagactagaaagtatctcatcagataatcctaagggctgtaacttctacttgccataaacaaagtataattaagagtgagtagcaattggtttggggagtcgtagttatatatgaaactttcttttgtttctcatgatgtatgtaaaatgtttgcagaaggatggtagaaaatgttactaatgaatttagagtggtttgggagaatacactgatacttcctcatttgaaaattataaggagttacaaggggaactaagaaccagaagtggctggcctctagcttttcaatacctgataagtgttcttggttatgttttgaacacttaaatttctcaacaaatggctatgtctatatttatgtaggggccacccttgccctacttgcatgccactttgacttttaactgaaatcagtgtgaattctgtatgcataagggatgtaataaagaggcgggatcattaacgctatatcgttgcatactatttttcatatgccttacaatattttctgggatgttattaaaatgaaagcattttattgccaaaataaatctatgttgttacttataatctgcattagcagtagaaaaataatgtagcaaaaacatattgtacagtacaaaattataaaatatatattttgccaataatataaaaatagattgaggagaaagaagcacatttgttatagcacaaacttataacaaaatccaccgttaaatttggcagtcatattttttaaaagtatgtcgatttagttctaagttttgtcagatttacttcatctaccatctttttaacttgctgcttgatacttttccagcaatttatttcatagccttgcaatctgtggatgtaatttcttttgttttattcccttccataaaatttattaaattttattttgtgataacactcataccatattttctcctcttatttcttctctttcaataacaacagcagaaagtcacagcaagtgagctcatagggctcctctgaattttggacatgtgtgagatttttgtatttttcacagcctcgagtcagaatgatcaataaagatgtcccaaccacaaaaaattatattagttagggattctttaatttgttttgtactgaatactactttgaaacataagttaaagccattagctgtgtttttgtagggatggtgggaaggaataaaaaataaatgtattaacataaaacatactaaaacagaaatatggcaaaatgatgtaaaaagatttttcctactattctgagggctgttgaaatcccaggctattgctatatctccattgacaaagtgggataaaaaatgcctttgtcaaataattttttttctttctttaaattttagttatttattttaataatttgtccccttttatttttcttatctaggtatgtgtagcattctacaaggcatgctgggtaaaatatactatgcaaatgtgtacagtgctgcatgttttgttctccctctgctttagtggctttaaagaaaaaaacgtggtgttatttttgtgaataaaaacattaacaaagaaaatgcagagtgcatgcatagagtatcctcatttctatggatttgttttatggaatttaaatgtgtacaaaaca

SEQ ID NO: 2836 - DNA, 7748 bp, Homo sapiens
  source 1..7748: mol_type = unassigned DNA
agtagttgatggcgggtagtgctaggtactgcagtgctgtactcctggtgactcagtggtggccagcaggctgagatcctccgggctgtgcacatctgtggaggaagaataatgtgatgtgttacccaagatggtgtgaacagagcttcaagccaatggagaagactaggcctaaatagctgacctggtgaagtgacacataaagccacacctggagtgccacctcctcagcagtctttctcagtgccaatgcatttatggctggttcagcggattcctacacaagcaggccgtctgactccgatgtctctttggaagaggaccgggaagcaattcgacaggagagagaacagcaagcagctatccagcttgagagagcaaagtccaaacctgtagcatttgccgtgaagacaaatgtgagctactgcggcgccctggacgaggatgtgcctgttccaagcacagctatctcctttgatgctaaagactttctacatattaaagagaaatataacaatgattggtggataggaaggctggtgaaagagggctgtgaaattggcttcattccaagtccactcagattggagaacatacggatccagcaagaacaaaaaagaggacgttttcacggagggaaatcaagtggaaattcttcttcaagtcttggagaaatggtatctgggacattccgagcaactcccacatcaacagcaaaacagaagcaaaaagtgacggagcacattcctccttacgatgttgtaccgtcaatgcgtccggtggtgttagtggggccgtcactgaaaggttacgaggtaacagacatgatgcagaaagccctctttgatttcctgaagcacaggtttgatgggaggatttcaataacgagagtgacagctgacatttctcttgctaagaggtctgtcctaaataatcccagcaagagagcaataattgaacgttcgaacacccggtccagcttagcggaagtacaaagtgaaattgaaagaatctttgagttggcaagatctttgcaactggttgttcttgatgcagacaccatcaatcacccagcacaacttataaagacttccttagcaccaattattgttcatgtaaaagtctcatctccaaaggttttacagcggttgattaaatctagaggaaagtcacaaagtaaacacttgaatgttcaactggtggcagctgataaacttgcacaatgccccccaagtcagcgaatgaggcacagcaaccactccacagagaactctccaattgaaagacgaagtctaatgacctctgatgaaaattatcacaatgaaagggctcggaagagtaggaaccgcttgtcttccagttctcagcatagccgagatcattaccctcttgtggaagaagattaccctgactcataccaggacacttacaaaccccataggaaccgaggatcacctgggggatatagccatgactcccgacataggctttgagtctaatgaaacaaaaaatattcatctgttgacaatttgccatagcagtgctaggataaaccaatcatcttaacttggctaacatagcacagtatttactgtgctaatgggctgctgtcattttatgctaagtaaggggcaaaaaaaaaaattacattatgcccttgagtctagatggatattagatgcccgatcatatagatatttttaagtgcaacatttacatgataacagtacattttgttttcttcatagatttagacacatcaatttgtaatttagggtacttacaaggcacatataaaataatttcccatgctggaaattccaaatgaccagttccagttggaaccaatttataaaccaattcctgttggaatttgggtgaattgactagaaagtctacttgagcatgttgtaatcaactgaaaaatctggggggaaaaaaaaaaaactaataagaaaatcgaaataccaatagaagccaaatccagctttggtatttatttgctggaagctaaatttacacttaaagttggagtgtataaacattttaatatatgttaatgttgccagaatgacttttcagacttaccaaatgtattgatagtgccaaaaaaaaaatctcagaaatcttaatgcagaaattatatagtctcctcagattttaatatttttatttctttcctggcacagctgttgtattcaaagtgttttgctttttgtttggtcagtactgttagctcatttgaagttggcaaaaacaaatacaaacaagcaaaaaacctcaaatttttttcagcagtgagagagaatagtaaagagaggcccaagcatagctggttatgtgaaatataaaatggggtgttgttctccctttaatcaatctgagcacaactacatacatccaggaatctgaagtcagatagtaaggatgtggtaccaatcctcccgagtgcaatgctaaacacttccaggtgggaattcatctatttcacttaacacaaacgcagggtctgtatttcctgccaacaagattgagtatctttccattgcttctctcagtctctgtctttgaatatctgaatgttctggcccttcaacaaattctttaaatcatgctaaggaatttcgttttatgtggacacactcaactttgatattcaggagatgtttttacaaaatgactaattgaaaaaagttgaaacaaatgattttaaaagcttgcagtaaaaaataaactcatagattcagcaaatatttgttgactaaaattatagcatttttaatgcagaaaattataaagaatttggagattgagctgccttatttctaatgaacactcctcttcatcttattaagtcttcacagtttttccagtggctataattatggaattggtgacctatgttttatattatcaaggaagccttagattcactctgatctaagaaattattgaaattgaccctttttacacaaatgtctttaaaaaaaaaaacttatttctaaatgtccatagtgcatgcattttctaaaaccccaataagtccagccataaaagttcttttctgctagtacatgtcatgaagcctatttttgaaaataatgataattaattttatagtatcttcttttctccccaagcctttcagtattcaggcactcaaagcatgcaccagttcagtaatcttcttgaccatggaaataagttccacattactgatgagttatatatatatcttgaaccccattacaacctcaccacatccccctgcatttatgttcagtgtttgtaccccattatgaacctgtttagctgataatgaggatacctataattctgtaagtcatttcaaatatttgatacaattaaaaaatatgggcttagtaaattttaaaagttaacatgtgatactggcttgtgagattcttctgtcatctagtgaagcttataaaactttcagttaagacattttaaaagagttatatccattaggcactttaataaacatataacctgccattactgaatactttgttagaacacagaagagcatcttccagcaaacaaaaatatatttattacatgtacagcacatacttgcatgagaaagaaaacattagccaaaacatttttctatatgctttactggtttcttgtttatgcgcattaaagtatttaattgcaaagagtgcaccaaggtgtacaaatttagactagacagctgttcagctttttctgtagtagcattagcagtttggtcatttaactactttaagatacttacattttatggcaggtagctgtaacagcatttaaatatatttcctagtcatcaagattaccatcttctttcaactttttaaaagtcacttgtttttaaaggtttttcaaagccttgtttttagtcttccatgtcatgccgataaagagagtctcattcaatatctgtgcacaaaaccaatctatcaattaccatcagatgtccatacctgttttgctttgcattcttattcaaaagctgacaatcttggaaagggtataatgtatattttattgatggatatatttaaatgtttactttaatttggaatattctttccccttctttctgtaataagtttatcttcctcaaataaggggatatacatcttattttttttaaagacttaagagtttattgtgtaaatgatacttaaaatctagatatatactaaatgaaaagttttatttttgccaagcacaccaagcacctttgaaaaatacatactccatactttgtttttaattaatttcatttaaagatagcaaatgattataagcaagagaaacaagtcttttactgttttgaggctgttttaacttacagtataagccacatactagaattctgtaatttcagtcacagacatataataatgtggactcatgtgacaatgtggaaatgtagttctggaaaaaaacgaatgcaatttgtcaatcctgatgttaattctcaagggtataatgtcactctaatattataaccaacaacattatcttgtttaatatttaaagcaacacttagaaatgtttataaatgatgattctctcttatctttatacagttctattggagagaaggttgaaattgttcacaatttagatgatggtctttcctaataagagtcttaattttgtgactatataagtcattgcagttagtctttaatgaaatgaattttattaatgtaaaacaaattctgagacaattatttgtttcctttaaataatctgctatttaattattattgtcgttgtttgcaaaatgtatttttggaatgttaacctcttttcatacctgcatacttgaacttgtcttttgtgtgggggccttaaaattcataataggaagtggaggcagtgaaaggaagtaagaaaaggaaattatgctaaaagatggtttgcaaatttaaattctttaaatgaacatatcacaaaatgttgttaagacccaggatgtccgttaagaatgtgtcttggcaaccttaatttgcatgttagtatatattttcttagttacacagttttattttggtatttgcttaaaaaatgtaataccattgtagaaattaccctatgtactgatatatttactacctcttctctagagaagacaatctgtctttaaagggaaaaacactggtcaataagtagtgatcaaaattatcactattctggctaaccttgctgcaaagctaaatacatagattattaaaatatgccttccctttagattttaaactgtttccaaaatgctgtttggcaccctttcatttcttccacgttagtgaagttttctttgaattggttcacagtttatcatgaggcaaggttaatttaacaaataagtcatcatagggaacaaaacaaactgcaagggaattgcctttgtgtgcaacttgttataatatctagttctaagtctaaaggagtaaaagtccaaagactttatgtttaagagcagctggtttgcaaattcacattttgttggtccttgacttccacagagcatgacttagccatttactgggtaaggatatgcataatcttggactcccatgtaattggaataaacttcatatcaatgtttcaaataaatgctatgtaccccttattccttttacatttctgcctttgtcttttatgacaatgttgcatgttgtgtttttttaaattatataaaactcatccttgaatgactgtatgaatgaaaaatttataggaaattatgtaataaaatctgttttattagtttctcatacctttaaatactgtcaatactataactgttagtaagttacttactcaagctgtgtctatggggcagagaacagtcctcttctttaaaataatcatgatcaaaccagtcaagtcaatccaattagctgttagacagacaataaggataaccttctttttgacttaagcagtcaagttagtcaaaatagaaaaattggcttatatgggcacccagaactacagcattcaaaaattacttttaaaagtttcttcttttattaaaatggactttcttaaataaaatacatcctctgatagcagctatctctttttacttgtaatgattaattctaaatgcttcatgtaattgagggacattatgagaagactagaaagtatctcatcagataatcctaagggctgtaacttctacttgccataaacaaagtataattaagagtgagtagcaattggtttggggagtcgtagttatatatgaaactttcttttgtttctcatgatgtatgtaaaatgtttgcagaaggatggtagaaaatgttactaatgaatttagagtggtttgggagaatacactgatacttcctcatttgaaaattataaggagttacaaggggaactaagaaccagaagtggctggcctctagcttttcaatacctgataagtgttcttggttatgttttgaacacttaaatttctcaacaaatggctatgtctatatttatgtaggggccacccttgccctacttgcatgccactttgacttttaactgaaatcagtgtgaattctgtatgcataagggatgtaataaagaggcgggatcattaacgctatatcgttgcatactatttttcatatgccttacaatattttctgggatgttattaaaatgaaagcattttattgccaaaataaatctatgttgttacttataatctgcattagcagtagaaaaataatgtagcaaaaacatattgtacagtacaaaattataaaatatatattttgccaataatataaaaatagattgaggagaaagaagcacatttgttatagcacaaacttataacaaaatccaccgttaaatttggcagtcatattttttaaaagtatgtcgatttagttctaagttttgtcagatttacttcatctaccatctttttaacttgctgcttgatacttttccagcaatttatttcatagccttgcaatctgtggatgtaatttcttttgttttattcccttccataaaatttattaaattttattttgtgataacactcataccatattttctcctcttatttcttctctttcaataacaacagcagaaagtcacagcaagtgagctcatagggctcctctgaattttggacatgtgtgagatttttgtatttttcacagcctcgagtcagaatgatcaataaagatgtcccaaccacaaaaaattatattagttagggattctttaatttgttttgtactgaatactactttgaaacataagttaaagccattagctgtgtttttgtagggatggtgggaaggaataaaaaataaatgtattaacataaaacatactaaaacagaaatatggcaaaatgatgtaaaaagatttttcctactattctgagggctgttgaaatcccaggctattgctatatctccattgacaaagtgggataaaaaatgcctttgtcaaataattttttttctttctttaaattttagttatttattttaataatttgtccccttttatttttcttatctaggtatgtgtagcattctacaaggcatgctgggtaaaatatactatgcaaatgtgtacagtgctgcatgttttgttctccctctgctttagtggctttaaagaaaaaaacgtggtgttatttttgtgaataaaaacattaacaaagaaaatgcagagtgcatgcatagagtatcctc

SEQ ID NO: 2837 - DNA, 8188 bp, Homo sapiens
  source 1..8188: mol_type = unassigned DNA
ctgactgaagcagggaagccgagccaatcagaggccgctttcctagctcagtcaccagtctgtggttgaggaagggttttgctttttgtgctctgtattgggaaggcagataaaatgccaggtctggactgcctctggggataacctcaccctgtgggatgtgaatgaatagcatcttgcctggtaaatccacaggaattgataaggcaggcgcagttctcccaaacaggccttttctctttaagctgtagctgtggtttctgcagcaattttgtttttgccttgaaagaggtgctctggattatcacacctccatgtatgacaatttgtacctgcatggaattgaagactcggaggctgaagaataatgtgatgtgttacccaagatggtgtgaacagagcttcaagccaatggagaagactaggcctaaatagctgacctggtgaagtgacacataaagccacacctggagtgccacctcctcagcagtctttctcagtgccaatgcatttatggctggttcagcggattcctacacaagcaggccgtctgactccgatgtctctttggaagaggaccgggaagcaattcgacaggagagagaacagcaagcagctatccagcttgagagagcaaagtccaaacctgtagcatttgccgtgaagacaaatgtgagctactgcggcgccctggacgaggatgtgcctgttccaagcacagctatctcctttgatgctaaagactttctacatattaaagagaaatataacaatgattggtggataggaaggctggtgaaagagggctgtgaaattggcttcattccaagtccactcagattggagaacatacggatccagcaagaacaaaaaagaggacgttttcacggagggaaatcaagtggaaattcttcttcaagtcttggagaaatggtatctgggacattccgagcaactcccacatcaacagcaaaacagaagcaaaaagtgacggagcacattcctccttacgatgttgtaccgtcaatgcgtccggtggtgttagtggggccgtcactgaaaggttacgaggtaacagacatgatgcagaaagccctctttgatttcctgaagcacaggtttgatgggaggatttcaataacgagagtgacagctgacatttctcttgctaagaggtctgtcctaaataatcccagcaagagagcaataattgaacgttcgaacacccggtccagcttagcggaagtacaaagtgaaattgaaagaatctttgagttggcaagatctttgcaactggttgttcttgatgcagacaccatcaatcacccagcacaacttataaagacttccttagcaccaattattgttcatgtaaaagtctcatctccaaaggttttacagcggttgattaaatctagaggaaagtcacaaagtaaacacttgaatgttcaactggtggcagctgataaacttgcacaatgccccccagaaatgtttgatgttatattggatgaaaatcagcttgaggatgcatgtgaacatctaggggagtacctggaggcgtactggcgtgccacccacacaaccagtagcacacccatgaccccgctgctgggaaggaatttgggctccacggcactctcaccatatcccacagcaatttctgggttacagagtcagcgaatgaggcacagcaaccactccacagagaactctccaattgaaagacgaagtctaatgacctctgatgaaaattatcacaatgaaagggctcggaagagtaggaaccgcttgtcttccagttctcagcatagccgagatcattaccctcttgtggaagaagattaccctgactcataccaggacacttacaaaccccataggaaccgaggatcacctgggggatatagccatgactcccgacataggctttgagtctaatgaaacaaaaaatattcatctgttgacaatttgccatagcagtgctaggataaaccaatcatcttaacttggctaacatagcacagtatttactgtgctaatgggctgctgtcattttatgctaagtaaggggcaaaaaaaaaaattacattatgcccttgagtctagatggatattagatgcccgatcatatagatatttttaagtgcaacatttacatgataacagtacattttgttttcttcatagatttagacacatcaatttgtaatttagggtacttacaaggcacatataaaataatttcccatgctggaaattccaaatgaccagttccagttggaaccaatttataaaccaattcctgttggaatttgggtgaattgactagaaagtctacttgagcatgttgtaatcaactgaaaaatctggggggaaaaaaaaaaaactaataagaaaatcgaaataccaatagaagccaaatccagctttggtatttatttgctggaagctaaatttacacttaaagttggagtgtataaacattttaatatatgttaatgttgccagaatgacttttcagacttaccaaatgtattgatagtgccaaaaaaaaaatctcagaaatcttaatgcagaaattatatagtctcctcagattttaatatttttatttctttcctggcacagctgttgtattcaaagtgttttgctttttgtttggtcagtactgttagctcatttgaagttggcaaaaacaaatacaaacaagcaaaaaacctcaaatttttttcagcagtgagagagaatagtaaagagaggcccaagcatagctggttatgtgaaatataaaatggggtgttgttctccctttaatcaatctgagcacaactacatacatccaggaatctgaagtcagatagtaaggatgtggtaccaatcctcccgagtgcaatgctaaacacttccaggtgggaattcatctatttcacttaacacaaacgcagggtctgtatttcctgccaacaagattgagtatctttccattgcttctctcagtctctgtctttgaatatctgaatgttctggcccttcaacaaattctttaaatcatgctaaggaatttcgttttatgtggacacactcaactttgatattcaggagatgtttttacaaaatgactaattgaaaaaagttgaaacaaatgattttaaaagcttgcagtaaaaaataaactcatagattcagcaaatatttgttgactaaaattatagcatttttaatgcagaaaattataaagaatttggagattgagctgccttatttctaatgaacactcctcttcatcttattaagtcttcacagtttttccagtggctataattatggaattggtgacctatgttttatattatcaaggaagccttagattcactctgatctaagaaattattgaaattgaccctttttacacaaatgtctttaaaaaaaaaaacttatttctaaatgtccatagtgcatgcattttctaaaaccccaataagtccagccataaaagttcttttctgctagtacatgtcatgaagcctatttttgaaaataatgataattaattttatagtatcttcttttctccccaagcctttcagtattcaggcactcaaagcatgcaccagttcagtaatcttcttgaccatggaaataagttccacattactgatgagttatatatatatcttgaaccccattacaacctcaccacatccccctgcatttatgttcagtgtttgtaccccattatgaacctgtttagctgataatgaggatacctataattctgtaagtcatttcaaatatttgatacaattaaaaaatatgggcttagtaaattttaaaagttaacatgtgatactggcttgtgagattcttctgtcatctagtgaagcttataaaactttcagttaagacattttaaaagagttatatccattaggcactttaataaacatataacctgccattactgaatactttgttagaacacagaagagcatcttccagcaaacaaaaatatatttattacatgtacagcacatacttgcatgagaaagaaaacattagccaaaacatttttctatatgctttactggtttcttgtttatgcgcattaaagtatttaattgcaaagagtgcaccaaggtgtacaaatttagactagacagctgttcagctttttctgtagtagcattagcagtttggtcatttaactactttaagatacttacattttatggcaggtagctgtaacagcatttaaatatatttcctagtcatcaagattaccatcttctttcaactttttaaaagtcacttgtttttaaaggtttttcaaagccttgtttttagtcttccatgtcatgccgataaagagagtctcattcaatatctgtgcacaaaaccaatctatcaattaccatcagatgtccatacctgttttgctttgcattcttattcaaaagctgacaatcttggaaagggtataatgtatattttattgatggatatatttaaatgtttactttaatttggaatattctttccccttctttctgtaataagtttatcttcctcaaataaggggatatacatcttattttttttaaagacttaagagtttattgtgtaaatgatacttaaaatctagatatatactaaatgaaaagttttatttttgccaagcacaccaagcacctttgaaaaatacatactccatactttgtttttaattaatttcatttaaagatagcaaatgattataagcaagagaaacaagtcttttactgttttgaggctgttttaacttacagtataagccacatactagaattctgtaatttcagtcacagacatataataatgtggactcatgtgacaatgtggaaatgtagttctggaaaaaaacgaatgcaatttgtcaatcctgatgttaattctcaagggtataatgtcactctaatattataaccaacaacattatcttgtttaatatttaaagcaacacttagaaatgtttataaatgatgattctctcttatctttatacagttctattggagagaaggttgaaattgttcacaatttagatgatggtctttcctaataagagtcttaattttgtgactatataagtcattgcagttagtctttaatgaaatgaattttattaatgtaaaacaaattctgagacaattatttgtttcctttaaataatctgctatttaattattattgtcgttgtttgcaaaatgtatttttggaatgttaacctcttttcatacctgcatacttgaacttgtcttttgtgtgggggccttaaaattcataataggaagtggaggcagtgaaaggaagtaagaaaaggaaattatgctaaaagatggtttgcaaatttaaattctttaaatgaacatatcacaaaatgttgttaagacccaggatgtccgttaagaatgtgtcttggcaaccttaatttgcatgttagtatatattttcttagttacacagttttattttggtatttgcttaaaaaatgtaataccattgtagaaattaccctatgtactgatatatttactacctcttctctagagaagacaatctgtctttaaagggaaaaacactggtcaataagtagtgatcaaaattatcactattctggctaaccttgctgcaaagctaaatacatagattattaaaatatgccttccctttagattttaaactgtttccaaaatgctgtttggcaccctttcatttcttccacgttagtgaagttttctttgaattggttcacagtttatcatgaggcaaggttaatttaacaaataagtcatcatagggaacaaaacaaactgcaagggaattgcctttgtgtgcaacttgttataatatctagttctaagtctaaaggagtaaaagtccaaagactttatgtttaagagcagctggtttgcaaattcacattttgttggtccttgacttccacagagcatgacttagccatttactgggtaaggatatgcataatcttggactcccatgtaattggaataaacttcatatcaatgtttcaaataaatgctatgtaccccttattccttttacatttctgcctttgtcttttatgacaatgttgcatgttgtgtttttttaaattatataaaactcatccttgaatgactgtatgaatgaaaaatttataggaaattatgtaataaaatctgttttattagtttctcatacctttaaatactgtcaatactataactgttagtaagttacttactcaagctgtgtctatggggcagagaacagtcctcttctttaaaataatcatgatcaaaccagtcaagtcaatccaattagctgttagacagacaataaggataaccttctttttgacttaagcagtcaagttagtcaaaatagaaaaattggcttatatgggcacccagaactacagcattcaaaaattacttttaaaagtttcttcttttattaaaatggactttcttaaataaaatacatcctctgatagcagctatctctttttacttgtaatgattaattctaaatgcttcatgtaattgagggacattatgagaagactagaaagtatctcatcagataatcctaagggctgtaacttctacttgccataaacaaagtataattaagagtgagtagcaattggtttggggagtcgtagttatatatgaaactttcttttgtttctcatgatgtatgtaaaatgtttgcagaaggatggtagaaaatgttactaatgaatttagagtggtttgggagaatacactgatacttcctcatttgaaaattataaggagttacaaggggaactaagaaccagaagtggctggcctctagcttttcaatacctgataagtgttcttggttatgttttgaacacttaaatttctcaacaaatggctatgtctatatttatgtaggggccacccttgccctacttgcatgccactttgacttttaactgaaatcagtgtgaattctgtatgcataagggatgtaataaagaggcgggatcattaacgctatatcgttgcatactatttttcatatgccttacaatattttctgggatgttattaaaatgaaagcattttattgccaaaataaatctatgttgttacttataatctgcattagcagtagaaaaataatgtagcaaaaacatattgtacagtacaaaattataaaatatatattttgccaataatataaaaatagattgaggagaaagaagcacatttgttatagcacaaacttataacaaaatccaccgttaaatttggcagtcatattttttaaaagtatgtcgatttagttctaagttttgtcagatttacttcatctaccatctttttaacttgctgcttgatacttttccagcaatttatttcatagccttgcaatctgtggatgtaatttcttttgttttattcccttccataaaatttattaaattttattttgtgataacactcataccatattttctcctcttatttcttctctttcaataacaacagcagaaagtcacagcaagtgagctcatagggctcctctgaattttggacatgtgtgagatttttgtatttttcacagcctcgagtcagaatgatcaataaagatgtcccaaccacaaaaaattatattagttagggattctttaatttgttttgtactgaatactactttgaaacataagttaaagccattagctgtgtttttgtagggatggtgggaaggaataaaaaataaatgtattaacataaaacatactaaaacagaaatatggcaaaatgatgtaaaaagatttttcctactattctgagggctgttgaaatcccaggctattgctatatctccattgacaaagtgggataaaaaatgcctttgtcaaataattttttttctttctttaaattttagttatttattttaataatttgtccccttttatttttcttatctaggtatgtgtagcattctacaaggcatgctgggtaaaatatactatgcaaatgtgtacagtgctgcatgttttgttctccctctgctttagtggctttaaagaaaaaaacgtggtgttatttttgtgaataaaaacattaacaaagaaaatgcagagtgcatgcatagagtatcc

SEQ ID NO: 2838 - DNA, 7409 bp, Homo sapiens
  source 1..7409: mol_type = unassigned DNA
gctctccgaagtgcgggcagggagcctgggcgccggcgcgggtcctggagccgggtggggaagtcctgcgccctccccctccgtccgcagcccagcctcgggggccagccccctccgcccaccgcacacgggctggccatgcggcggctctgaacgatgtcctcctcctcctacgccaagaacgggaccgcggacgggccgcactcccccacctcgcaggtggcccgaggcaccacaacccggaggagcaggttgaaaagatccgatggcagcaccacttcgaccagcttcatcctcagacagggttcagcggattcctacacaagcaggccgtctgactccgatgtctctttggaagaggaccgggaagcaattcgacaggagagagaacagcaagcagctatccagcttgagagagcaaagtccaaacctgtagcatttgccgtgaagacaaatgtgagctactgcggcgccctggacgaggatgtgcctgttccaagcacagctatctcctttgatgctaaagactttctacatattaaagagaaatataacaatgattggtggataggaaggctggtgaaagagggctgtgaaattggcttcattccaagtccactcagattggagaacatacggatccagcaagaacaaaaaagaggacgttttcacggagggaaatcaagtggaaattcttcttcaagtcttggagaaatggtatctgggacattccgagcaactcccacatcaacagcaaaacagaagcaaaaagtgacggagcacattcctccttacgatgttgtaccgtcaatgcgtccggtggtgttagtggggccgtcactgaaaggttacgaggtaacagacatgatgcagaaagccctctttgatttcctgaagcacaggtttgatgggagagtcagcgaatgaggcacagcaaccactccacagagaactctccaattgaaagacgaagtctaatgacctctgatgaaaattatcacaatgaaagggctcggaagagtaggaaccgcttgtcttccagttctcagcatagccgagatcattaccctcttgtggaagaagattaccctgactcataccaggacacttacaaaccccataggaaccgaggatcacctgggggatatagccatgactcccgacataggctttgagtctaatgaaacaaaaaatattcatctgttgacaatttgccatagcagtgctaggataaaccaatcatcttaacttggctaacatagcacagtatttactgtgctaatgggctgctgtcattttatgctaagtaaggggcaaaaaaaaaaattacattatgcccttgagtctagatggatattagatgcccgatcatatagatatttttaagtgcaacatttacatgataacagtacattttgttttcttcatagatttagacacatcaatttgtaatttagggtacttacaaggcacatataaaataatttcccatgctggaaattccaaatgaccagttccagttggaaccaatttataaaccaattcctgttggaatttgggtgaattgactagaaagtctacttgagcatgttgtaatcaactgaaaaatctggggggaaaaaaaaaaaactaataagaaaatcgaaataccaatagaagccaaatccagctttggtatttatttgctggaagctaaatttacacttaaagttggagtgtataaacattttaatatatgttaatgttgccagaatgacttttcagacttaccaaatgtattgatagtgccaaaaaaaaaatctcagaaatcttaatgcagaaattatatagtctcctcagattttaatatttttatttctttcctggcacagctgttgtattcaaagtgttttgctttttgtttggtcagtactgttagctcatttgaagttggcaaaaacaaatacaaacaagcaaaaaacctcaaatttttttcagcagtgagagagaatagtaaagagaggcccaagcatagctggttatgtgaaatataaaatggggtgttgttctccctttaatcaatctgagcacaactacatacatccaggaatctgaagtcagatagtaaggatgtggtaccaatcctcccgagtgcaatgctaaacacttccaggtgggaattcatctatttcacttaacacaaacgcagggtctgtatttcctgccaacaagattgagtatctttccattgcttctctcagtctctgtctttgaatatctgaatgttctggcccttcaacaaattctttaaatcatgctaaggaatttcgttttatgtggacacactcaactttgatattcaggagatgtttttacaaaatgactaattgaaaaaagttgaaacaaatgattttaaaagcttgcagtaaaaaataaactcatagattcagcaaatatttgttgactaaaattatagcatttttaatgcagaaaattataaagaatttggagattgagctgccttatttctaatgaacactcctcttcatcttattaagtcttcacagtttttccagtggctataattatggaattggtgacctatgttttatattatcaaggaagccttagattcactctgatctaagaaattattgaaattgaccctttttacacaaatgtctttaaaaaaaaaaacttatttctaaatgtccatagtgcatgcattttctaaaaccccaataagtccagccataaaagttcttttctgctagtacatgtcatgaagcctatttttgaaaataatgataattaattttatagtatcttcttttctccccaagcctttcagtattcaggcactcaaagcatgcaccagttcagtaatcttcttgaccatggaaataagttccacattactgatgagttatatatatatcttgaaccccattacaacctcaccacatccccctgcatttatgttcagtgtttgtaccccattatgaacctgtttagctgataatgaggatacctataattctgtaagtcatttcaaatatttgatacaattaaaaaatatgggcttagtaaattttaaaagttaacatgtgatactggcttgtgagattcttctgtcatctagtgaagcttataaaactttcagttaagacattttaaaagagttatatccattaggcactttaataaacatataacctgccattactgaatactttgttagaacacagaagagcatcttccagcaaacaaaaatatatttattacatgtacagcacatacttgcatgagaaagaaaacattagccaaaacatttttctatatgctttactggtttcttgtttatgcgcattaaagtatttaattgcaaagagtgcaccaaggtgtacaaatttagactagacagctgttcagctttttctgtagtagcattagcagtttggtcatttaactactttaagatacttacattttatggcaggtagctgtaacagcatttaaatatatttcctagtcatcaagattaccatcttctttcaactttttaaaagtcacttgtttttaaaggtttttcaaagccttgtttttagtcttccatgtcatgccgataaagagagtctcattcaatatctgtgcacaaaaccaatctatcaattaccatcagatgtccatacctgttttgctttgcattcttattcaaaagctgacaatcttggaaagggtataatgtatattttattgatggatatatttaaatgtttactttaatttggaatattctttccccttctttctgtaataagtttatcttcctcaaataaggggatatacatcttattttttttaaagacttaagagtttattgtgtaaatgatacttaaaatctagatatatactaaatgaaaagttttatttttgccaagcacaccaagcacctttgaaaaatacatactccatactttgtttttaattaatttcatttaaagatagcaaatgattataagcaagagaaacaagtcttttactgttttgaggctgttttaacttacagtataagccacatactagaattctgtaatttcagtcacagacatataataatgtggactcatgtgacaatgtggaaatgtagttctggaaaaaaacgaatgcaatttgtcaatcctgatgttaattctcaagggtataatgtcactctaatattataaccaacaacattatcttgtttaatatttaaagcaacacttagaaatgtttataaatgatgattctctcttatctttatacagttctattggagagaaggttgaaattgttcacaatttagatgatggtctttcctaataagagtcttaattttgtgactatataagtcattgcagttagtctttaatgaaatgaattttattaatgtaaaacaaattctgagacaattatttgtttcctttaaataatctgctatttaattattattgtcgttgtttgcaaaatgtatttttggaatgttaacctcttttcatacctgcatacttgaacttgtcttttgtgtgggggccttaaaattcataataggaagtggaggcagtgaaaggaagtaagaaaaggaaattatgctaaaagatggtttgcaaatttaaattctttaaatgaacatatcacaaaatgttgttaagacccaggatgtccgttaagaatgtgtcttggcaaccttaatttgcatgttagtatatattttcttagttacacagttttattttggtatttgcttaaaaaatgtaataccattgtagaaattaccctatgtactgatatatttactacctcttctctagagaagacaatctgtctttaaagggaaaaacactggtcaataagtagtgatcaaaattatcactattctggctaaccttgctgcaaagctaaatacatagattattaaaatatgccttccctttagattttaaactgtttccaaaatgctgtttggcaccctttcatttcttccacgttagtgaagttttctttgaattggttcacagtttatcatgaggcaaggttaatttaacaaataagtcatcatagggaacaaaacaaactgcaagggaattgcctttgtgtgcaacttgttataatatctagttctaagtctaaaggagtaaaagtccaaagactttatgtttaagagcagctggtttgcaaattcacattttgttggtccttgacttccacagagcatgacttagccatttactgggtaaggatatgcataatcttggactcccatgtaattggaataaacttcatatcaatgtttcaaataaatgctatgtaccccttattccttttacatttctgcctttgtcttttatgacaatgttgcatgttgtgtttttttaaattatataaaactcatccttgaatgactgtatgaatgaaaaatttataggaaattatgtaataaaatctgttttattagtttctcatacctttaaatactgtcaatactataactgttagtaagttacttactcaagctgtgtctatggggcagagaacagtcctcttctttaaaataatcatgatcaaaccagtcaagtcaatccaattagctgttagacagacaataaggataaccttctttttgacttaagcagtcaagttagtcaaaatagaaaaattggcttatatgggcacccagaactacagcattcaaaaattacttttaaaagtttcttcttttattaaaatggactttcttaaataaaatacatcctctgatagcagctatctctttttacttgtaatgattaattctaaatgcttcatgtaattgagggacattatgagaagactagaaagtatctcatcagataatcctaagggctgtaacttctacttgccataaacaaagtataattaagagtgagtagcaattggtttggggagtcgtagttatatatgaaactttcttttgtttctcatgatgtatgtaaaatgtttgcagaaggatggtagaaaatgttactaatgaatttagagtggtttgggagaatacactgatacttcctcatttgaaaattataaggagttacaaggggaactaagaaccagaagtggctggcctctagcttttcaatacctgataagtgttcttggttatgttttgaacacttaaatttctcaacaaatggctatgtctatatttatgtaggggccacccttgccctacttgcatgccactttgacttttaactgaaatcagtgtgaattctgtatgcataagggatgtaataaagaggcgggatcattaacgctatatcgttgcatactatttttcatatgccttacaatattttctgggatgttattaaaatgaaagcattttattgccaaaataaatctatgttgttacttataatctgcattagcagtagaaaaataatgtagcaaaaacatattgtacagtacaaaattataaaatatatattttgccaataatataaaaatagattgaggagaaagaagcacatttgttatagcacaaacttataacaaaatccaccgttaaatttggcagtcatattttttaaaagtatgtcgatttagttctaagttttgtcagatttacttcatctaccatctttttaacttgctgcttgatacttttccagcaatttatttcatagccttgcaatctgtggatgtaatttcttttgttttattcccttccataaaatttattaaattttattttgtgataacactcataccatattttctcctcttatttcttctctttcaataacaacagcagaaagtcacagcaagtgagctcatagggctcctctgaattttggacatgtgtgagatttttgtatttttcacagcctcgagtcagaatgatcaataaagatgtcccaaccacaaaaaattatattagttagggattctttaatttgttttgtactgaatactactttgaaacataagttaaagccattagctgtgtttttgtagggatggtgggaaggaataaaaaataaatgtattaacataaaacatactaaaacagaaatatggcaaaatgatgtaaaaagatttttcctactattctgagggctgttgaaatcccaggctattgctatatctccattgacaaagtgggataaaaaatgcctttgtcaaataattttttttctttctttaaattttagttatttattttaataatttgtccccttttatttttcttatctaggtatgtgtagcattctacaaggcatgctgggtaaaatatactatgcaaatgtgtacagtgctgcatgttttgttctccctctgctttagtggctttaaagaaaaaaacgtggtgttatttttgtgaataaaaacattaacaaagaaaatgcaga

SEQ ID NO: 2839 - DNA, 7654 bp, Homo sapiens
  source 1..7654: mol_type = unassigned DNA
gccttttctctttaagctgtagctgtggtttctgcagcaattttgtttttgccttgaaagaggtgctctggattatcacacctccatgtatgacaatttgtacctgcatggaattgaagactcggaggctggttcagcggattcctacacaagcaggccgtctgactccgatgtctctttggaagaggaccgggaagcaattcgacaggagagagaacagcaagcagctatccagcttgagagagcaaagaaatataacaatgattggtggataggaaggctggtgaaagagggctgtgaaattggcttcattccaagtccactcagattggagaacatacggatccagcaagaacaaaaaagaggacgttttcacggagggaaatcaagtggaaattcttcttcaagtcttggagaaatggtatctgggacattccgagcaactcccacatcaacagcaaaacagaagcaaaaagtgacggagcacattcctccttacgatgttgtaccgtcaatgcgtccggtggtgttagtggggccgtcactgaaaggttacgaggtaacagacatgatgcagaaagccctctttgatttcctgaagcacaggtttgatgggaggatttcaataacgagagtgacagctgacatttctcttgctaagaggtctgtcctaaataatcccagcaagagagcaataattgaacgttcgaacacccggtccagcttagcggaagtacaaagtgaaattgaaagaatctttgagttggcaagatctttgcaactggttgttcttgatgcagacaccatcaatcacccagcacaacttataaagacttccttagcaccaattattgttcatgtaaaagtctcatctccaaaggttcatgtcttcttctatcaggttttacagcggttgattaaatctagaggaaagtcacaaagtaaacacttgaatgttcaactggtggcagctgataaacttgcacaatgccccccagaaatgtttgatgttatattggatgaaaatcagcttgaggatgcatgtgaacatctaggggagtacctggaggcgtactggcgtgccacccacacaaccagtagcacacccatgaccccgctgctgggaaggaatttgggctccacggcactctcaccatatcccacagcaatttctgggttacagagtcagcgaatgaggcacagcaaccactccacagagaactctccaattgaaagacgaagtctaatgacctctgatgaaaattatcacaatgaaagggctcggaagagtaggaaccgcttgtcttccagttctcagcatagccgagatcattaccctcttgtggaagaagattaccctgactcataccaggacacttacaaaccccataggaaccgaggatcacctgggggatatagccatgactcccgacataggctttgagtctaatgaaacaaaaaatattcatctgttgacaatttgccatagcagtgctaggataaaccaatcatcttaacttggctaacatagcacagtatttactgtgctaatgggctgctgtcattttatgctaagtaaggggcaaaaaaaaaaattacattatgcccttgagtctagatggatattagatgcccgatcatatagatatttttaagtgcaacatttacatgataacagtacattttgttttcttcatagatttagacacatcaatttgtaatttagggtacttacaaggcacatataaaataatttcccatgctggaaattccaaatgaccagttccagttggaaccaatttataaaccaattcctgttggaatttgggtgaattgactagaaagtctacttgagcatgttgtaatcaactgaaaaatctggggggaaaaaaaaaaaactaataagaaaatcgaaataccaatagaagccaaatccagctttggtatttatttgctggaagctaaatttacacttaaagttggagtgtataaacattttaatatatgttaatgttgccagaatgacttttcagacttaccaaatgtattgatagtgccaaaaaaaaaatctcagaaatcttaatgcagaaattatatagtctcctcagattttaatatttttatttctttcctggcacagctgttgtattcaaagtgttttgctttttgtttggtcagtactgttagctcatttgaagttggcaaaaacaaatacaaacaagcaaaaaacctcaaatttttttcagcagtgagagagaatagtaaagagaggcccaagcatagctggttatgtgaaatataaaatggggtgttgttctccctttaatcaatctgagcacaactacatacatccaggaatctgaagtcagatagtaaggatgtggtaccaatcctcccgagtgcaatgctaaacacttccaggtgggaattcatctatttcacttaacacaaacgcagggtctgtatttcctgccaacaagattgagtatctttccattgcttctctcagtctctgtctttgaatatctgaatgttctggcccttcaacaaattctttaaatcatgctaaggaatttcgttttatgtggacacactcaactttgatattcaggagatgtttttacaaaatgactaattgaaaaaagttgaaacaaatgattttaaaagcttgcagtaaaaaataaactcatagattcagcaaatatttgttgactaaaattatagcatttttaatgcagaaaattataaagaatttggagattgagctgccttatttctaatgaacactcctcttcatcttattaagtcttcacagtttttccagtggctataattatggaattggtgacctatgttttatattatcaaggaagccttagattcactctgatctaagaaattattgaaattgaccctttttacacaaatgtctttaaaaaaaaaaacttatttctaaatgtccatagtgcatgcattttctaaaaccccaataagtccagccataaaagttcttttctgctagtacatgtcatgaagcctatttttgaaaataatgataattaattttatagtatcttcttttctccccaagcctttcagtattcaggcactcaaagcatgcaccagttcagtaatcttcttgaccatggaaataagttccacattactgatgagttatatatatatcttgaaccccattacaacctcaccacatccccctgcatttatgttcagtgtttgtaccccattatgaacctgtttagctgataatgaggatacctataattctgtaagtcatttcaaatatttgatacaattaaaaaatatgggcttagtaaattttaaaagttaacatgtgatactggcttgtgagattcttctgtcatctagtgaagcttataaaactttcagttaagacattttaaaagagttatatccattaggcactttaataaacatataacctgccattactgaatactttgttagaacacagaagagcatcttccagcaaacaaaaatatatttattacatgtacagcacatacttgcatgagaaagaaaacattagccaaaacatttttctatatgctttactggtttcttgtttatgcgcattaaagtatttaattgcaaagagtgcaccaaggtgtacaaatttagactagacagctgttcagctttttctgtagtagcattagcagtttggtcatttaactactttaagatacttacattttatggcaggtagctgtaacagcatttaaatatatttcctagtcatcaagattaccatcttctttcaactttttaaaagtcacttgtttttaaaggtttttcaaagccttgtttttagtcttccatgtcatgccgataaagagagtctcattcaatatctgtgcacaaaaccaatctatcaattaccatcagatgtccatacctgttttgctttgcattcttattcaaaagctgacaatcttggaaagggtataatgtatattttattgatggatatatttaaatgtttactttaatttggaatattctttccccttctttctgtaataagtttatcttcctcaaataaggggatatacatcttattttttttaaagacttaagagtttattgtgtaaatgatacttaaaatctagatatatactaaatgaaaagttttatttttgccaagcacaccaagcacctttgaaaaatacatactccatactttgtttttaattaatttcatttaaagatagcaaatgattataagcaagagaaacaagtcttttactgttttgaggctgttttaacttacagtataagccacatactagaattctgtaatttcagtcacagacatataataatgtggactcatgtgacaatgtggaaatgtagttctggaaaaaaacgaatgcaatttgtcaatcctgatgttaattctcaagggtataatgtcactctaatattataaccaacaacattatcttgtttaatatttaaagcaacacttagaaatgtttataaatgatgattctctcttatctttatacagttctattggagagaaggttgaaattgttcacaatttagatgatggtctttcctaataagagtcttaattttgtgactatataagtcattgcagttagtctttaatgaaatgaattttattaatgtaaaacaaattctgagacaattatttgtttcctttaaataatctgctatttaattattattgtcgttgtttgcaaaatgtatttttggaatgttaacctcttttcatacctgcatacttgaacttgtcttttgtgtgggggccttaaaattcataataggaagtggaggcagtgaaaggaagtaagaaaaggaaattatgctaaaagatggtttgcaaatttaaattctttaaatgaacatatcacaaaatgttgttaagacccaggatgtccgttaagaatgtgtcttggcaaccttaatttgcatgttagtatatattttcttagttacacagttttattttggtatttgcttaaaaaatgtaataccattgtagaaattaccctatgtactgatatatttactacctcttctctagagaagacaatctgtctttaaagggaaaaacactggtcaataagtagtgatcaaaattatcactattctggctaaccttgctgcaaagctaaatacatagattattaaaatatgccttccctttagattttaaactgtttccaaaatgctgtttggcaccctttcatttcttccacgttagtgaagttttctttgaattggttcacagtttatcatgaggcaaggttaatttaacaaataagtcatcatagggaacaaaacaaactgcaagggaattgcctttgtgtgcaacttgttataatatctagttctaagtctaaaggagtaaaagtccaaagactttatgtttaagagcagctggtttgcaaattcacattttgttggtccttgacttccacagagcatgacttagccatttactgggtaaggatatgcataatcttggactcccatgtaattggaataaacttcatatcaatgtttcaaataaatgctatgtaccccttattccttttacatttctgcctttgtcttttatgacaatgttgcatgttgtgtttttttaaattatataaaactcatccttgaatgactgtatgaatgaaaaatttataggaaattatgtaataaaatctgttttattagtttctcatacctttaaatactgtcaatactataactgttagtaagttacttactcaagctgtgtctatggggcagagaacagtcctcttctttaaaataatcatgatcaaaccagtcaagtcaatccaattagctgttagacagacaataaggataaccttctttttgacttaagcagtcaagttagtcaaaatagaaaaattggcttatatgggcacccagaactacagcattcaaaaattacttttaaaagtttcttcttttattaaaatggactttcttaaataaaatacatcctctgatagcagctatctctttttacttgtaatgattaattctaaatgcttcatgtaattgagggacattatgagaagactagaaagtatctcatcagataatcctaagggctgtaacttctacttgccataaacaaagtataattaagagtgagtagcaattggtttggggagtcgtagttatatatgaaactttcttttgtttctcatgatgtatgtaaaatgtttgcagaaggatggtagaaaatgttactaatgaatttagagtggtttgggagaatacactgatacttcctcatttgaaaattataaggagttacaaggggaactaagaaccagaagtggctggcctctagcttttcaatacctgataagtgttcttggttatgttttgaacacttaaatttctcaacaaatggctatgtctatatttatgtaggggccacccttgccctacttgcatgccactttgacttttaactgaaatcagtgtgaattctgtatgcataagggatgtaataaagaggcgggatcattaacgctatatcgttgcatactatttttcatatgccttacaatattttctgggatgttattaaaatgaaagcattttattgccaaaataaatctatgttgttacttataatctgcattagcagtagaaaaataatgtagcaaaaacatattgtacagtacaaaattataaaatatatattttgccaataatataaaaatagattgaggagaaagaagcacatttgttatagcacaaacttataacaaaatccaccgttaaatttggcagtcatattttttaaaagtatgtcgatttagttctaagttttgtcagatttacttcatctaccatctttttaacttgctgcttgatacttttccagcaatttatttcatagccttgcaatctgtggatgtaatttcttttgttttattcccttccataaaatttattaaattttattttgtgataacactcataccatattttctcctcttatttcttctctttcaataacaacagcagaaagtcacagcaagtgagctcatagggctcctctgaattttggacatgtgtgagatttttgtatttttcacagcctcgagtcagaatgatcaataaagatgtcccaaccacaaaaaattatattagttagggattctttaatttgttttgtactgaatactactttgaaacataagttaaagccattagctgtgtttttgtagggatggtgggaaggaataaaaaataaatgtattaacataaaacatactaaaacagaaatatggcaaaatgatgtaaaaagatttttcctactattctgagggctgttgaaatcccaggctattgctatatctccattgacaaagtgggataaaaaatgcctttgtcaaataattttttttctttctttaaattttagttatttattttaataatttgtccccttttatttttcttatctaggtatgtgtagcattctacaaggcatgctgggtaaaatatactatgcaaatgtgtacagtgctgcatgttttgttctccctctgctttagtggctttaaagaaaaaaacgtggtgttatttttgtgaataa

SEQ ID NO: 2840 - DNA, 7808 bp, Homo sapiens
  source 1..7808: mol_type = unassigned DNA
acataaatcaggggaagagagagatgttcggaggggtgaactgactctgaatgctcatttgagtttatttgtttttataaggaagaataatgtgatgtgttacccaagatggtgtgaacagagcttcaagccaatggagaagactaggcctaaatagctgacctggtgaagtgacacataaagccacacctggagtgccacctcctcagcagtctttctcagtgccaatgcatttatggctggttcagcggattcctacacaagcaggccgtctgactccgatgtctctttggaagaggaccgggaagcaattcgacaggagagagaacagcaagcagctatccagcttgagagagcaaagtccaaacctgtagcatttgccgtgaagacaaatgtgagctactgcggcgccctggacgaggatgtgcctgttccaagcacagctatctcctttgatgctaaagactttctacatattaaagagaaatataacaatgattggtggataggaaggctggtgaaagagggctgtgaaattggcttcattccaagtccactcagattggagaacatacggatccagcaagaacaaaaaagaggacgttttcacggagggaaatcaagtggaaattcttcttcaagtcttggagaaatggtatctgggacattccgagcaactcccacatcaacagcaaaacagaagcaaaaagtgacggagcacattcctccttacgatgttgtaccgtcaatgcgtccggtggtgttagtggggccgtcactgaaaggttacgaggtaacagacatgatgcagaaagccctctttgatttcctgaagcacaggtttgatgggaggatttcaataacgagagtgacagctgacatttctcttgctaagaggtctgtcctaaataatcccagcaagagagcaataattgaacgttcgaacacccggtccagcttagcggaagtacaaagtgaaattgaaagaatctttgagttggcaagatctttgcaactggttgttcttgatgcagacaccatcaatcacccagcacaacttataaagacttccttagcaccaattattgttcatgtaaaagtctcatctccaaaggttttacagcggttgattaaatctagaggaaagtcacaaagtaaacacttgaatgttcaactggtggcagctgataaacttgcacaatgccccccagaaatgtttgatgttatattggatgaaaatcagcttgaggatgcatgtgaacatctaggggagtacctggaggcgtactggcgtgccacccacacaaccagtagcacacccatgaccccgctgctgggaaggaatttgggctccacggcactctcaccatatcccacagcaatttctgggttacagagtcagcgaatgaggcacagcaaccactccacagagaactctccaattgaaagacgaagtctaatgacctctgatgaaaattatcacaatgaaagggctcggaagagtaggaaccgcttgtcttccagttctcagcatagccgagatcattaccctcttgtggaagaagattaccctgactcataccaggacacttacaaaccccataggaaccgaggatcacctgggggatatagccatgactcccgacataggctttgagtctaatgaaacaaaaaatattcatctgttgacaatttgccatagcagtgctaggataaaccaatcatcttaacttggctaacatagcacagtatttactgtgctaatgggctgctgtcattttatgctaagtaaggggcaaaaaaaaaaattacattatgcccttgagtctagatggatattagatgcccgatcatatagatatttttaagtgcaacatttacatgataacagtacattttgttttcttcatagatttagacacatcaatttgtaatttagggtacttacaaggcacatataaaataatttcccatgctggaaattccaaatgaccagttccagttggaaccaatttataaaccaattcctgttggaatttgggtgaattgactagaaagtctacttgagcatgttgtaatcaactgaaaaatctggggggaaaaaaaaaaaactaataagaaaatcgaaataccaatagaagccaaatccagctttggtatttatttgctggaagctaaatttacacttaaagttggagtgtataaacattttaatatatgttaatgttgccagaatgacttttcagacttaccaaatgtattgatagtgccaaaaaaaaaatctcagaaatcttaatgcagaaattatatagtctcctcagattttaatatttttatttctttcctggcacagctgttgtattcaaagtgttttgctttttgtttggtcagtactgttagctcatttgaagttggcaaaaacaaatacaaacaagcaaaaaacctcaaatttttttcagcagtgagagagaatagtaaagagaggcccaagcatagctggttatgtgaaatataaaatggggtgttgttctccctttaatcaatctgagcacaactacatacatccaggaatctgaagtcagatagtaaggatgtggtaccaatcctcccgagtgcaatgctaaacacttccaggtgggaattcatctatttcacttaacacaaacgcagggtctgtatttcctgccaacaagattgagtatctttccattgcttctctcagtctctgtctttgaatatctgaatgttctggcccttcaacaaattctttaaatcatgctaaggaatttcgttttatgtggacacactcaactttgatattcaggagatgtttttacaaaatgactaattgaaaaaagttgaaacaaatgattttaaaagcttgcagtaaaaaataaactcatagattcagcaaatatttgttgactaaaattatagcatttttaatgcagaaaattataaagaatttggagattgagctgccttatttctaatgaacactcctcttcatcttattaagtcttcacagtttttccagtggctataattatggaattggtgacctatgttttatattatcaaggaagccttagattcactctgatctaagaaattattgaaattgaccctttttacacaaatgtctttaaaaaaaaaaacttatttctaaatgtccatagtgcatgcattttctaaaaccccaataagtccagccataaaagttcttttctgctagtacatgtcatgaagcctatttttgaaaataatgataattaattttatagtatcttcttttctccccaagcctttcagtattcaggcactcaaagcatgcaccagttcagtaatcttcttgaccatggaaataagttccacattactgatgagttatatatatatcttgaaccccattacaacctcaccacatccccctgcatttatgttcagtgtttgtaccccattatgaacctgtttagctgataatgaggatacctataattctgtaagtcatttcaaatatttgatacaattaaaaaatatgggcttagtaaattttaaaagttaacatgtgatactggcttgtgagattcttctgtcatctagtgaagcttataaaactttcagttaagacattttaaaagagttatatccattaggcactttaataaacatataacctgccattactgaatactttgttagaacacagaagagcatcttccagcaaacaaaaatatatttattacatgtacagcacatacttgcatgagaaagaaaacattagccaaaacatttttctatatgctttactggtttcttgtttatgcgcattaaagtatttaattgcaaagagtgcaccaaggtgtacaaatttagactagacagctgttcagctttttctgtagtagcattagcagtttggtcatttaactactttaagatacttacattttatggcaggtagctgtaacagcatttaaatatatttcctagtcatcaagattaccatcttctttcaactttttaaaagtcacttgtttttaaaggtttttcaaagccttgtttttagtcttccatgtcatgccgataaagagagtctcattcaatatctgtgcacaaaaccaatctatcaattaccatcagatgtccatacctgttttgctttgcattcttattcaaaagctgacaatcttggaaagggtataatgtatattttattgatggatatatttaaatgtttactttaatttggaatattctttccccttctttctgtaataagtttatcttcctcaaataaggggatatacatcttattttttttaaagacttaagagtttattgtgtaaatgatacttaaaatctagatatatactaaatgaaaagttttatttttgccaagcacaccaagcacctttgaaaaatacatactccatactttgtttttaattaatttcatttaaagatagcaaatgattataagcaagagaaacaagtcttttactgttttgaggctgttttaacttacagtataagccacatactagaattctgtaatttcagtcacagacatataataatgtggactcatgtgacaatgtggaaatgtagttctggaaaaaaacgaatgcaatttgtcaatcctgatgttaattctcaagggtataatgtcactctaatattataaccaacaacattatcttgtttaatatttaaagcaacacttagaaatgtttataaatgatgattctctcttatctttatacagttctattggagagaaggttgaaattgttcacaatttagatgatggtctttcctaataagagtcttaattttgtgactatataagtcattgcagttagtctttaatgaaatgaattttattaatgtaaaacaaattctgagacaattatttgtttcctttaaataatctgctatttaattattattgtcgttgtttgcaaaatgtatttttggaatgttaacctcttttcatacctgcatacttgaacttgtcttttgtgtgggggccttaaaattcataataggaagtggaggcagtgaaaggaagtaagaaaaggaaattatgctaaaagatggtttgcaaatttaaattctttaaatgaacatatcacaaaatgttgttaagacccaggatgtccgttaagaatgtgtcttggcaaccttaatttgcatgttagtatatattttcttagttacacagttttattttggtatttgcttaaaaaatgtaataccattgtagaaattaccctatgtactgatatatttactacctcttctctagagaagacaatctgtctttaaagggaaaaacactggtcaataagtagtgatcaaaattatcactattctggctaaccttgctgcaaagctaaatacatagattattaaaatatgccttccctttagattttaaactgtttccaaaatgctgtttggcaccctttcatttcttccacgttagtgaagttttctttgaattggttcacagtttatcatgaggcaaggttaatttaacaaataagtcatcatagggaacaaaacaaactgcaagggaattgcctttgtgtgcaacttgttataatatctagttctaagtctaaaggagtaaaagtccaaagactttatgtttaagagcagctggtttgcaaattcacattttgttggtccttgacttccacagagcatgacttagccatttactgggtaaggatatgcataatcttggactcccatgtaattggaataaacttcatatcaatgtttcaaataaatgctatgtaccccttattccttttacatttctgcctttgtcttttatgacaatgttgcatgttgtgtttttttaaattatataaaactcatccttgaatgactgtatgaatgaaaaatttataggaaattatgtaataaaatctgttttattagtttctcatacctttaaatactgtcaatactataactgttagtaagttacttactcaagctgtgtctatggggcagagaacagtcctcttctttaaaataatcatgatcaaaccagtcaagtcaatccaattagctgttagacagacaataaggataaccttctttttgacttaagcagtcaagttagtcaaaatagaaaaattggcttatatgggcacccagaactacagcattcaaaaattacttttaaaagtttcttcttttattaaaatggactttcttaaataaaatacatcctctgatagcagctatctctttttacttgtaatgattaattctaaatgcttcatgtaattgagggacattatgagaagactagaaagtatctcatcagataatcctaagggctgtaacttctacttgccataaacaaagtataattaagagtgagtagcaattggtttggggagtcgtagttatatatgaaactttcttttgtttctcatgatgtatgtaaaatgtttgcagaaggatggtagaaaatgttactaatgaatttagagtggtttgggagaatacactgatacttcctcatttgaaaattataaggagttacaaggggaactaagaaccagaagtggctggcctctagcttttcaatacctgataagtgttcttggttatgttttgaacacttaaatttctcaacaaatggctatgtctatatttatgtaggggccacccttgccctacttgcatgccactttgacttttaactgaaatcagtgtgaattctgtatgcataagggatgtaataaagaggcgggatcattaacgctatatcgttgcatactatttttcatatgccttacaatattttctgggatgttattaaaatgaaagcattttattgccaaaataaatctatgttgttacttataatctgcattagcagtagaaaaataatgtagcaaaaacatattgtacagtacaaaattataaaatatatattttgccaataatataaaaatagattgaggagaaagaagcacatttgttatagcacaaacttataacaaaatccaccgttaaatttggcagtcatattttttaaaagtatgtcgatttagttctaagttttgtcagatttacttcatctaccatctttttaacttgctgcttgatacttttccagcaatttatttcatagccttgcaatctgtggatgtaatttcttttgttttattcccttccataaaatttattaaattttattttgtgataacactcataccatattttctcctcttatttcttctctttcaataacaacagcagaaagtcacagcaagtgagctcatagggctcctctgaattttggacatgtgtgagatttttgtatttttcacagcctcgagtcagaatgatcaataaagatgtcccaaccacaaaaaattatattagttagggattctttaatttgttttgtactgaatactactttgaaacataagttaaagccattagctgtgtttttgtagggatggtgggaaggaataaaaaataaatgtattaacataaaacatactaaaacagaaatatggcaaaatgatgtaaaaagatttttcctactattctgagggctgttgaaatcccaggctattgctatatctccattgacaaagtgggataaaaaatgcctttgtcaaataattttttttctttctttaaattttagttatttattttaataatttgtccccttttatttttcttatctaggtatgtgtagcattctacaaggcatgctgggtaaaatatactatgcaaatgtgtacagtgctgcatgtttt

SEQ ID NO: 2841 - DNA, 8595 bp, Homo sapiens
  source 1..8595: mol_type = unassigned DNA
attgggaaggcagataaaatgccaggtctggactgcctctggggataacctcaccctgtgggatgtgaatgaatagcatcttgcctggtaaatccacaggaattgataaggcaggcgcagttctcccaaacaggccttttctctttaagctgtagctgtggtttctgcagcaattttgtttttgccttgaaagaggtgctctggattatcacacctccatgtatgacaatttgtacctgcatggaattgaagactcggaggctggttcagcggattcctacacaagcaggccgtctgactccgatgtctctttggaagaggaccgggaagcaattcgacaggagagagaacagcaagcagctatccagcttgagagagcaaagtccaaacctgtagcatttgccgtgaagacaaatgtgagctactgcggcgccctggacgaggatgtgcctgttccaagcacagctatctcctttgatgctaaagactttctacatattaaagagaaatataacaatgattggtggataggaaggctggtgaaagagggctgtgaaattggcttcattccaagtccactcagattggagaacatacggatccagcaagaacaaaaaagaggacgttttcacggagggaaatcaagtggaaattcttcttcaagtcttggagaaatggtatctgggacattccgagcaactcccacatcaacaggtgagggttgtagttaaactctttttcatacactgtattccttttaaaaatatttgaacacacatgcaagtagttttgctaatttggaaacaatttgaaggcttaatttaaagattctctaattaatatttcatttctcatttgttttctatggtaatttgatttcatttaaaatggtattaaaaattcatgtcattagaatataattttgaaaaatcttatttacccctcagtgttaataactgtccattgtgtaaattgatattcaaaaaattcattattttacctaaggaacggacagagtttaagatggtgaaggccaataaaaaaaggaaaaaaatgatgcagactctcaagaaaatgctgttttcagtctccatgtggaatttcaggatgtattagtacagcccgagctggaagggttgaagcagagagtaaggcagggcccaaaggagggagggcctcgtttacatttggacagcagacagccaagccctggaattaatggtaatgaagagatattggtggcctaatagggaattgtggtacatttggaaacgatggagttattcatgtaggaatttttcttctaccacattccctgattcctatcggctaatttcattctggcctagaactgctgttgcattagggcatccagtgtcctagttaccaattccaattgtattaccaatttggaatggcaagtccaaggccctattctggcctaccaaaactggaggcaactggattggttctggagtggttctaagtgtctgggtccttgttcatgtgaagccctcttatctacaggacactgaaccaaaccaggtttctgagttgtacccaactagactggagctgcttggatgtccacagaatcgctttaaatcagttattgagtatattttgcttcgttcccatttgttggacattcaggacattgaacactttagctattacaaacaggaaagaacaggaataactcattataaatttatctgaggaataactggttataaatgtatttgaaatttagaagcaagatagtaggaaaaatgtgccaatattctagaaaatgggcaaaaatgcccaagggactgcagaattatgagttaacaaatataaaaataactattgattgaggtgatagtcatttttgcccaagtggttattctgtttccttttatgaaattgcatttgtctaccttgttcccagcaacactgtgctgtgtccagcacgggaacaacccatggtgattggctggcccggaacttccagtgttgctctcaactcctgtacccaattcccacccagtgagaaatcaggatataaggtcatttgtaccagggaggaagctgtctgtttttcatacatcttcaaaattgacgtgtccagaatgaaatcataaggcaggttctccaaagtgggcgataggaaggtggtgaagataattacagggacaaatgggtacattcttccatcttttaaactcatgtactgtcatttgcagagtttacatattttgatatggctctcgttattgtcttttagcaaaacagaagcaaaaagtggtaagttgtgtttcctttttaaatctactgttaaggttcctatatatacatgcctgcaatgctccatttcagtgacccaagtggctataaaataagggaagagcctcctcggtggggactttgataatcatttgtcgttcaacctgagaattatgaaattatgaatgttgtggctgtggagaggcatgctcaacctcaccttgtcacgcgtgtcgaatcatctttttcagacggagcacattcctccttacgatgttgtaccgtcaatgcgtccggtggtgttagtggggccgtcactgaaaggttacgagcggaagtacaaagtgaaattgaaagaatctttgagttggcaagatctttgcaactggttgttcttgatgcagacaccatcaatcacccagcacaacttataaagacttccttagcaccaattattgttcatgtaaaagtctcatctccaaaggttttacagcggttgattaaatctagaggaaagtcacaaagtaaacacttgaatgttcaactggtggcagctgataaacttgcacaatgccccccagaaatgtttgatgttatattggatgaaaatcagcttgaggatgcatgtgaacatctaggggagtacctggaggcgtactggcgtgccacccacacaaccagtagcacacccatgaccccgctgctgggaaggaatttgggctccacggcactctcaccatatcccacagcaatttctgggttacagagtcagcgaatgaggcacagcaaccactccacagagaactctccaattgaaagacgaagtctaatgacctctgatgaaaattatcacaatgaaagggctcggaagagtaggaaccgcttgtcttccagttctcagcatagccgagatcattaccctcttgtggaagaagattaccctgactcataccaggacacttacaaaccccataggaaccgaggatcacctgggggatatagccatgactcccgacataggctttgagtctaatgaaacaaaaaatattcatctgttgacaatttgccatagcagtgctaggataaaccaatcatcttaacttggctaacatagcacagtatttactgtgctaatgggctgctgtcattttatgctaagtaaggggcaaaaaaaaaaattacattatgcccttgagtctagatggatattagatgcccgatcatatagatatttttaagtgcaacatttacatgataacagtacattttgttttcttcatagatttagacacatcaatttgtaatttagggtacttacaaggcacatataaaataatttcccatgctggaaattccaaatgaccagttccagttggaaccaatttataaaccaattcctgttggaatttgggtgaattgactagaaagtctacttgagcatgttgtaatcaactgaaaaatctggggggaaaaaaaaaaaactaataagaaaatcgaaataccaatagaagccaaatccagctttggtatttatttgctggaagctaaatttacacttaaagttggagtgtataaacattttaatatatgttaatgttgccagaatgacttttcagacttaccaaatgtattgatagtgccaaaaaaaaaatctcagaaatcttaatgcagaaattatatagtctcctcagattttaatatttttatttctttcctggcacagctgttgtattcaaagtgttttgctttttgtttggtcagtactgttagctcatttgaagttggcaaaaacaaatacaaacaagcaaaaaacctcaaatttttttcagcagtgagagagaatagtaaagagaggcccaagcatagctggttatgtgaaatataaaatggggtgttgttctccctttaatcaatctgagcacaactacatacatccaggaatctgaagtcagatagtaaggatgtggtaccaatcctcccgagtgcaatgctaaacacttccaggtgggaattcatctatttcacttaacacaaacgcagggtctgtatttcctgccaacaagattgagtatctttccattgcttctctcagtctctgtctttgaatatctgaatgttctggcccttcaacaaattctttaaatcatgctaaggaatttcgttttatgtggacacactcaactttgatattcaggagatgtttttacaaaatgactaattgaaaaaagttgaaacaaatgattttaaaagcttgcagtaaaaaataaactcatagattcagcaaatatttgttgactaaaattatagcatttttaatgcagaaaattataaagaatttggagattgagctgccttatttctaatgaacactcctcttcatcttattaagtcttcacagtttttccagtggctataattatggaattggtgacctatgttttatattatcaaggaagccttagattcactctgatctaagaaattattgaaattgaccctttttacacaaatgtctttaaaaaaaaaaacttatttctaaatgtccatagtgcatgcattttctaaaaccccaataagtccagccataaaagttcttttctgctagtacatgtcatgaagcctatttttgaaaataatgataattaattttatagtatcttcttttctccccaagcctttcagtattcaggcactcaaagcatgcaccagttcagtaatcttcttgaccatggaaataagttccacattactgatgagttatatatatatcttgaaccccattacaacctcaccacatccccctgcatttatgttcagtgtttgtaccccattatgaacctgtttagctgataatgaggatacctataattctgtaagtcatttcaaatatttgatacaattaaaaaatatgggcttagtaaattttaaaagttaacatgtgatactggcttgtgagattcttctgtcatctagtgaagcttataaaactttcagttaagacattttaaaagagttatatccattaggcactttaataaacatataacctgccattactgaatactttgttagaacacagaagagcatcttccagcaaacaaaaatatatttattacatgtacagcacatacttgcatgagaaagaaaacattagccaaaacatttttctatatgctttactggtttcttgtttatgcgcattaaagtatttaattgcaaagagtgcaccaaggtgtacaaatttagactagacagctgttcagctttttctgtagtagcattagcagtttggtcatttaactactttaagatacttacattttatggcaggtagctgtaacagcatttaaatatatttcctagtcatcaagattaccatcttctttcaactttttaaaagtcacttgtttttaaaggtttttcaaagccttgtttttagtcttccatgtcatgccgataaagagagtctcattcaatatctgtgcacaaaaccaatctatcaattaccatcagatgtccatacctgttttgctttgcattcttattcaaaagctgacaatcttggaaagggtataatgtatattttattgatggatatatttaaatgtttactttaatttggaatattctttccccttctttctgtaataagtttatcttcctcaaataaggggatatacatcttattttttttaaagacttaagagtttattgtgtaaatgatacttaaaatctagatatatactaaatgaaaagttttatttttgccaagcacaccaagcacctttgaaaaatacatactccatactttgtttttaattaatttcatttaaagatagcaaatgattataagcaagagaaacaagtcttttactgttttgaggctgttttaacttacagtataagccacatactagaattctgtaatttcagtcacagacatataataatgtggactcatgtgacaatgtggaaatgtagttctggaaaaaaacgaatgcaatttgtcaatcctgatgttaattctcaagggtataatgtcactctaatattataaccaacaacattatcttgtttaatatttaaagcaacacttagaaatgtttataaatgatgattctctcttatctttatacagttctattggagagaaggttgaaattgttcacaatttagatgatggtctttcctaataagagtcttaattttgtgactatataagtcattgcagttagtctttaatgaaatgaattttattaatgtaaaacaaattctgagacaattatttgtttcctttaaataatctgctatttaattattattgtcgttgtttgcaaaatgtatttttggaatgttaacctcttttcatacctgcatacttgaacttgtcttttgtgtgggggccttaaaattcataataggaagtggaggcagtgaaaggaagtaagaaaaggaaattatgctaaaagatggtttgcaaatttaaattctttaaatgaacatatcacaaaatgttgttaagacccaggatgtccgttaagaatgtgtcttggcaaccttaatttgcatgttagtatatattttcttagttacacagttttattttggtatttgcttaaaaaatgtaataccattgtagaaattaccctatgtactgatatatttactacctcttctctagagaagacaatctgtctttaaagggaaaaacactggtcaataagtagtgatcaaaattatcactattctggctaaccttgctgcaaagctaaatacatagattattaaaatatgccttccctttagattttaaactgtttccaaaatgctgtttggcaccctttcatttcttccacgttagtgaagttttctttgaattggttcacagtttatcatgaggcaaggttaatttaacaaataagtcatcatagggaacaaaacaaactgcaagggaattgcctttgtgtgcaacttgttataatatctagttctaagtctaaaggagtaaaagtccaaagactttatgtttaagagcagctggtttgcaaattcacattttgttggtccttgacttccacagagcatgacttagccatttactgggtaaggatatgcataatcttggactcccatgtaattggaataaacttcatatcaatgtttcaaataaatgctatgtaccccttattccttttacatttctgcctttgtcttttatgacaatgttgcatgttgtgtttttttaaattatataaaactcatccttgaatgactgtatgaatgaaaaatttataggaaattatgtaataaaatctgttttattagtttctcatacctttaaatactgtcaatactataactgttagtaagttacttactcaagctgtgtctatggggcagagaacagtcctcttctttaaaataatcatgatcaaaccagtcaagtcaatccaattagctgttagacagacaataaggataaccttctttttgacttaagcagtcaagttagtcaaaatagaaaaattggcttatatgggcacccagaactacagcattcaaaaattacttttaaaagtttcttcttttattaaaatggactttcttaaataaaatacatcctctgatagcagctatctctttttacttgtaatgattaattctaaatgcttcatgtaattgagggacattatgagaagactagaaagtatctcatcagataatcctaagggctgtaacttctacttgccataaacaaagtataattaagagtgagtagcaattggtttggggagtcgtagttatatatgaaactttcttttgtttctcatgatgtatgtaaaatgtttgcagaaggatggtagaaaatgttactaatgaatttagagtggtttgggagaatacactgatacttcctcatttgaaaattataaggagttacaaggggaactaagaaccagaagtggctggcctctagcttttcaatacctgataagtgttcttggttatgttttgaacacttaaatttctcaacaaatggctatgtctatatttatgtaggggccacccttgccctacttgcatgccactttgacttttaactgaaatcagtgtgaattctgtatgcataagggatgtaataaagaggcgggatcattaacgctatatcgttgcatactatttttcatatgccttacaatattttctgggatgttattaaaatgaaagcattttattgccaaaataaatctatgttgttacttataatctgcattagcagtagaaaaataatgtagcaaaaacatattgtacagtacaaaattataa

SEQ ID NO: 2842 - DNA, 5757 bp, Homo sapiens
  source 1..5757: mol_type = unassigned DNA
gctttttgtgctctgtattgggaaggcagataaaatgccaggtctggactgcctctggggataacctcaccctgtgggatgtgaatgaatagcatcttgcctggtaaatccacaggaattgataaggcaggcgcagttctcccaaacaggccttttctctttaagctgtagctgtggtttctgcagcaattttgtttttgccttgaaagaggtgctctggattatcacacctccatgtatgacaatttgtacctgcatggaattgaagactcggaggctggttcagcggattcctacacaagcaggccgtctgactccgatgtctctttggaagaggaccgggaagcaattcgacaggagagagaacagcaagcagctatccagcttgagagagcaaagtccaaacctgtagcatttgccgtgaagacaaatgtgagctactgcggcgccctggacgaggatgtgcctgttccaagcacagctatctcctttgatgctaaagactttctacatattaaagagaaatataacaatgattggtggataggaaggctggtgaaagagggctgtgaaattggcttcattccaagtccactcagattggagaacatacggatccagcaagaacaaaaaagaggacgttttcacggagggatttcaataacgagagtgacagctgacatttctcttgctaagaggtctgtcctaaataatcccagcaagagagcaataattgaacgttcgaacacccggtccagcttagcggaagtacaaagtgaaattgaaagaatctttgagttggcaagatctttgcaactggttgttcttgatgcagacaccatcaatcacccagcacaacttataaagacttccttagcaccaattattgttcatgtaaaagtctcatctccaaaggttttacagcggttgattaaatctagaggaaagtcacaaagtaaacacttgaatgttcaactggtggcagctgataaacttgcacaatgccccccagaaatgtttgatgttatattggatgaaaatcagcttgaggatgcatgtgaacatctaggggagtacctggaggcgtactggcgtgccacccacacaaccagtagcacacccatgaccccgctgctgggaaggaatttgggctccacggcactctcaccatatcccacagcaatttctgggttacagagtcagcgaatgaggcacagcaaccactccacagagaactctccaattgaaagacgaagtctaatgacctctgatgaaaattatcacaatgaaagggctcggaagagtaggaaccgcttgtcttccagttctcagcatagccgagatcattaccctcttgtggaagaagattaccctgactcataccaggacacttacaaaccccataggaaccgaggatcacctgggggatatagccatgactcccgacataggctttgagtctaatgaaacaaaaaatattcatctgttgacaatttgccatagcagtgctaggataaaccaatcatcttaacttggctaacatagcacagtatttactgtgctaatgggctgctgtcattttatgctaagtaaggggcaaaaaaaaaaattacattatgcccttgagtctagatggatattagatgcccgatcatatagatatttttaagtgcaacatttacatgataacagtacattttgttttcttcatagatttagacacatcaatttgtaatttagggtacttacaaggcacatataaaataatttcccatgctggaaattccaaatgaccagttccagttggaaccaatttataaaccaattcctgttggaatttgggtgaattgactagaaagtctacttgagcatgttgtaatcaactgaaaaatctggggggaaaaaaaaaaaactaataagaaaatcgaaataccaatagaagccaaatccagctttggtatttatttgctggaagctaaatttacacttaaagttggagtgtataaacattttaatatatgttaatgttgccagaatgacttttcagacttaccaaatgtattgatagtgccaaaaaaaaaatctcagaaatcttaatgcagaaattatatagtctcctcagattttaatatttttatttctttcctggcacagctgttgtattcaaagtgttttgctttttgtttggtcagtactgttagctcatttgaagttggcaaaaacaaatacaaacaagcaaaaaacctcaaatttttttcagcagtgagagagaatagtaaagagaggcccaagcatagctggttatgtgaaatataaaatggggtgttgttctccctttaatcaatctgagcacaactacatacatccaggaatctgaagtcagatagtaaggatgtggtaccaatcctcccgagtgcaatgctaaacacttccaggtgggaattcatctatttcacttaacacaaacgcagggtctgtatttcctgccaacaagattgagtatctttccattgcttctctcagtctctgtctttgaatatctgaatgttctggcccttcaacaaattctttaaatcatgctaaggaatttcgttttatgtggacacactcaactttgatattcaggagatgtttttacaaaatgactaattgaaaaaagttgaaacaaatgattttaaaagcttgcagtaaaaaataaactcatagattcagcaaatatttgttgactaaaattatagcatttttaatgcagaaaattataaagaatttggagattgagctgccttatttctaatgaacactcctcttcatcttattaagtcttcacagtttttccagtggctataattatggaattggtgacctatgttttatattatcaaggaagccttagattcactctgatctaagaaattattgaaattgaccctttttacacaaatgtctttaaaaaaaaaaacttatttctaaatgtccatagtgcatgcattttctaaaaccccaataagtccagccataaaagttcttttctgctagtacatgtcatgaagcctatttttgaaaataatgataattaattttatagtatcttcttttctccccaagcctttcagtattcaggcactcaaagcatgcaccagttcagtaatcttcttgaccatggaaataagttccacattactgatgagttatatatatatcttgaaccccattacaacctcaccacatccccctgcatttatgttcagtgtttgtaccccattatgaacctgtttagctgataatgaggatacctataattctgtaagtcatttcaaatatttgatacaattaaaaaatatgggcttagtaaattttaaaagttaacatgtgatactggcttgtgagattcttctgtcatctagtgaagcttataaaactttcagttaagacattttaaaagagttatatccattaggcactttaataaacatataacctgccattactgaatactttgttagaacacagaagagcatcttccagcaaacaaaaatatatttattacatgtacagcacatacttgcatgagaaagaaaacattagccaaaacatttttctatatgctttactggtttcttgtttatgcgcattaaagtatttaattgcaaagagtgcaccaaggtgtacaaatttagactagacagctgttcagctttttctgtagtagcattagcagtttggtcatttaactactttaagatacttacattttatggcaggtagctgtaacagcatttaaatatatttcctagtcatcaagattaccatcttctttcaactttttaaaagtcacttgtttttaaaggtttttcaaagccttgtttttagtcttccatgtcatgccgataaagagagtctcattcaatatctgtgcacaaaaccaatctatcaattaccatcagatgtccatacctgttttgctttgcattcttattcaaaagctgacaatcttggaaagggtataatgtatattttattgatggatatatttaaatgtttactttaatttggaatattctttccccttctttctgtaataagtttatcttcctcaaataaggggatatacatcttattttttttaaagacttaagagtttattgtgtaaatgatacttaaaatctagatatatactaaatgaaaagttttatttttgccaagcacaccaagcacctttgaaaaatacatactccatactttgtttttaattaatttcatttaaagatagcaaatgattataagcaagagaaacaagtcttttactgttttgaggctgttttaacttacagtataagccacatactagaattctgtaatttcagtcacagacatataataatgtggactcatgtgacaatgtggaaatgtagttctggaaaaaaacgaatgcaatttgtcaatcctgatgttaattctcaagggtataatgtcactctaatattataaccaacaacattatcttgtttaatatttaaagcaacacttagaaatgtttataaatgatgattctctcttatctttatacagttctattggagagaaggttgaaattgttcacaatttagatgatggtctttcctaataagagtcttaattttgtgactatataagtcattgcagttagtctttaatgaaatgaattttattaatgtaaaacaaattctgagacaattatttgtttcctttaaataatctgctatttaattattattgtcgttgtttgcaaaatgtatttttggaatgttaacctcttttcatacctgcatacttgaacttgtcttttgtgtgggggccttaaaattcataataggaagtggaggcagtgaaaggaagtaagaaaaggaaattatgctaaaagatggtttgcaaatttaaattctttaaatgaacatatcacaaaatgttgttaagacccaggatgtccgttaagaatgtgtcttggcaaccttaatttgcatgttagtatatattttcttagttacacagttttattttggtatttgcttaaaaaatgtaataccattgtagaaattaccctatgtactgatatatttactacctcttctctagagaagacaatctgtctttaaagggaaaaacactggtcaataagtagtgatcaaaattatcactattctggctaaccttgctgcaaagctaaatacatagattattaaaatatgccttccctttagattttaaactgtttccaaaatgctgtttggcaccctttcatttcttccacgttagtgaagttttctttgaattggttcacagtttatcatgaggcaaggttaatttaacaaataagtcatcatagggaacaaaacaaactgcaagggaattgcctttgtgtgcaacttgttataatatctagttctaagtctaaaggagtaaaagtccaaagactttatgtttaagagcagctggtttgcaaattcacattttgttggtccttgacttccacagagcatgacttagccatttactgggtaaggatatgcataatcttggactcccatgtaattggaataaacttcatatcaatgtttcaaataaatgctatgtaccccttattccttttacatttctgcctttgtcttttatgacaatgttgcatgttgtgtttttttaaattatataaaactcatccttgaatgactgtatgaatgaaaaatttataggaaattatgtaataaaatctgttttattagt

SEQ ID NO: 2843 - DNA, 3567 bp, Homo sapiens
  source 1..3567: mol_type = unassigned DNA
gcaagagagcaataattgaacgttcgaacacccggtccagcttagcggaagtacaaagtgaaattgaaagaatctttgagttggcaagatctttgcaactggttgttcttgatgcagacaccatcaatcacccagcacaacttataaagacttccttagcaccaattattgttcatgtaaaagtctcatctccaaaggttttacagcggttgattaaatctagaggaaagtcacaaagtaaacacttgaatgttcaactggtggcagctgataaacttgcacaatgccccccatcagcgaatgaggcacagcaaccactccacagagaactctccaattgaaagacgaagtctaatgacctctgatgaaaattatcacaatgaaagggctcggaagagtaggaaccgcttgtcttccagttctcagcatagccgagatcattaccctcttgtggaagaagattaccctgactcataccaggacacttacaaaccccataggaaccgaggatcacctgggggatatagccatgactcccgacataggctttgagtctaatgaaacaaaaaatattcatctgttgacaatttgccatagcagtgctaggataaaccaatcatcttaacttggctaacatagcacagtatttactgtgctaatgggctgctgtcattttatgctaagtaaggggcaaaaaaaaaaattacattatgcccttgagtctagatggatattagatgcccgatcatatagatatttttaagtgcaacatttacatgataacagtacattttgttttcttcatagatttagacacatcaatttgtaatttagggtacttacaaggcacatataaaataatttcccatgctggaaattccaaatgaccagttccagttggaaccaatttataaaccaattcctgttggaatttgggtgaattgactagaaagtctacttgagcatgttgtaatcaactgaaaaatctggggggaaaaaaaaaaaactaataagaaaatcgaaataccaatagaagccaaatccagctttggtatttatttgctggaagctaaatttacacttaaagttggagtgtataaacattttaatatatgttaatgttgccagaatgacttttcagacttaccaaatgtattgatagtgccaaaaaaaaaatctcagaaatcttaatgcagaaattatatagtctcctcagattttaatatttttatttctttcctggcacagctgttgtattcaaagtgttttgctttttgtttggtcagtactgttagctcatttgaagttggcaaaaacaaatacaaacaagcaaaaaacctcaaatttttttcagcagtgagagagaatagtaaagagaggcccaagcatagctggttatgtgaaatataaaatggggtgttgttctccctttaatcaatctgagcacaactacatacatccaggaatctgaagtcagatagtaaggatgtggtaccaatcctcccgagtgcaatgctaaacacttccaggtgggaattcatctatttcacttaacacaaacgcagggtctgtatttcctgccaacaagattgagtatctttccattgcttctctcagtctctgtctttgaatatctgaatgttctggcccttcaacaaattctttaaatcatgctaaggaatttcgttttatgtggacacactcaactttgatattcaggagatgtttttacaaaatgactaattgaaaaaagttgaaacaaatgattttaaaagcttgcagtaaaaaataaactcatagattcagcaaatatttgttgactaaaattatagcatttttaatgcagaaaattataaagaatttggagattgagctgccttatttctaatgaacactcctcttcatcttattaagtcttcacagtttttccagtggctataattatggaattggtgacctatgttttatattatcaaggaagccttagattcactctgatctaagaaattattgaaattgaccctttttacacaaatgtctttaaaaaaaaaaacttatttctaaatgtccatagtgcatgcattttctaaaaccccaataagtccagccataaaagttcttttctgctagtacatgtcatgaagcctatttttgaaaataatgataattaattttatagtatcttcttttctccccaagcctttcagtattcaggcactcaaagcatgcaccagttcagtaatcttcttgaccatggaaataagttccacattactgatgagttatatatatatcttgaaccccattacaacctcaccacatccccctgcatttatgttcagtgtttgtaccccattatgaacctgtttagctgataatgaggatacctataattctgtaagtcatttcaaatatttgatacaattaaaaaatatgggcttagtaaattttaaaagttaacatgtgatactggcttgtgagattcttctgtcatctagtgaagcttataaaactttcagttaagacattttaaaagagttatatccattaggcactttaataaacatataacctgccattactgaatactttgttagaacacagaagagcatcttccagcaaacaaaaatatatttattacatgtacagcacatacttgcatgagaaagaaaacattagccaaaacatttttctatatgctttactggtttcttgtttatgcgcattaaagtatttaattgcaaagagtgcaccaaggtgtacaaatttagactagacagctgttcagctttttctgtagtagcattagcagtttggtcatttaactactttaagatacttacattttatggcaggtagctgtaacagcatttaaatatatttcctagtcatcaagattaccatcttctttcaactttttaaaagtcacttgtttttaaaggtttttcaaagccttgtttttagtcttccatgtcatgccgataaagagagtctcattcaatatctgtgcacaaaaccaatctatcaattaccatcagatgtccatacctgttttgctttgcattcttattcaaaagctgacaatcttggaaagggtataatgtatattttattgatggatatatttaaatgtttactttaatttggaatattctttccccttctttctgtaataagtttatcttcctcaaataaggggatatacatcttattttttttaaagacttaagagtttattgtgtaaatgatacttaaaatctagatatatactaaatgaaaagttttatttttgccaagcacaccaagcacctttgaaaaatacatactccatactttgtttttaattaatttcatttaaagatagcaaatgattataagcaagagaaacaagtcttttactgttttgaggctgttttaacttacagtataagccacatactagaattctgtaatttcagtcacagacatataataatgtggactcatgtgacaatgtggaaatgtagttctggaaaaaaacgaatgcaatttgtcaatcctgatgttaattctcaagggtataatgtc

SEQ ID NO: 2844 - DNA, 4615 bp, Homo sapiens
  source 1..4615: mol_type = unassigned DNA
gtcccgggagtcggcggccccgctccccccacccctcctccacgtccctttctcctcccgctcctcctctttctcctccttctcttcctcctcctcctcaccctccttcgggtctctgcgctcccgctccggagcccgcagcctcccccagcggatgccggggactcggaccccgcaccctgagagtctttgttaatggatgtggtggcccgaggcaccacaacccggaggagcaggttgaaaagatccgatggcagcaccacttcgaccagcttcatcctcagacagggttcagcggattcctacacaagcaggccgtctgactccgatgtctctttggaagaggaccgggaagcaattcgacaggagagagaacagcaagcagctatccagcttgagagagcaaagtccaaacctgtagcatttgccgtgaagacaaatgtgagctactgcggcgccctggacgaggatgtgcctgttccaagcacagctatctcctttgatgctaaagactttctacatattaaagagaaatataacaatgattggtggataggaaggctggtgaaagagggctgtgaaattggcttcattccaagtccactcagattggagaacatacggatccagcaagaacaaaaaagaggacgttttcacggagggaaatcaagtggaaattcttcttcaagtcttggagaaatggtatctgggacattccgagcaactcccacatcaacagcaaaacagaagcaaaaagtgacggagcacattcctccttacgatgttgtaccgtcaatgcgtccggtggtgttagtggggccgtcactgaaaggttacgaggtaacagacatgatgcagaaagccctctttgatttcctgaagcacaggtttgatgggaggatttcaataacgagagtgacagctgacatttctcttgctaagaggtctgtcctaaataatcccagcaagagagcaataattgaacgttcgaacacccggtccagcttagcggaagtacaaagtgaaattgaaagaatctttgagttggcaagatctttgcaactggttgttcttgatgcagacaccatcaatcacccagcacaacttataaagacttccttagcaccaattattgttcatgtaaaagtctcatctccaaaggttttacagcggttgattaaatctagaggaaagtcacaaagtaaacacttgaatgttcaactggtggcagctgataaacttgcacaatgccccccagaaatgtttgatgttatattggatgaaaatcagcttgaggatgcatgtgaacatctaggggagtacctggaggcgtactggcgtgccacccacacaaccagtagcacacccatgaccccgctgctgggaaggaatttgggctccacggcactctcaccatatcccacagcaatttctgggttacagagtcagcgaatgaggcacagcaaccactccacagagaactctccaattgaaagacgaagtctaatgacctctgatgaaaattatcacaatgaaagggctcggaagagtaggaaccgcttgtcttccagttctcagcatagccgagatcattaccctcttgtggaagaagattaccctgactcataccaggacacttacaaaccccataggaaccgaggatcacctgggggatatagccatgactcccgacataggctttgagtctaatgaaacaaaaaatattcatctgttgacaatttgccatagcagtgctaggataaaccaatcatcttaacttggctaacatagcacagtatttactgtgctaatgggctgctgtcattttatgctaagtaaggggcaaaaaaaaaaattacattatgcccttgagtctagatggatattagatgcccgatcatatagatatttttaagtgcaacatttacatgataacagtacattttgttttcttcatagatttagacacatcaatttgtaatttagggtacttacaaggcacatataaaataatttcccatgctggaaattccaaatgaccagttccagttggaaccaatttataaaccaattcctgttggaatttgggtgaattgactagaaagtctacttgagcatgttgtaatcaactgaaaaatctggggggaaaaaaaaaaaactaataagaaaatcgaaataccaatagaagccaaatccagctttggtatttatttgctggaagctaaatttacacttaaagttggagtgtataaacattttaatatatgttaatgttgccagaatgacttttcagacttaccaaatgtattgatagtgccaaaaaaaaaatctcagaaatcttaatgcagaaattatatagtctcctcagattttaatatttttatttctttcctggcacagctgttgtattcaaagtgttttgctttttgtttggtcagtactgttagctcatttgaagttggcaaaaacaaatacaaacaagcaaaaaacctcaaatttttttcagcagtgagagagaatagtaaagagaggcccaagcatagctggttatgtgaaatataaaatggggtgttgttctccctttaatcaatctgagcacaactacatacatccaggaatctgaagtcagatagtaaggatgtggtaccaatcctcccgagtgcaatgctaaacacttccaggtgggaattcatctatttcacttaacacaaacgcagggtctgtatttcctgccaacaagattgagtatctttccattgcttctctcagtctctgtctttgaatatctgaatgttctggcccttcaacaaattctttaaatcatgctaaggaatttcgttttatgtggacacactcaactttgatattcaggagatgtttttacaaaatgactaattgaaaaaagttgaaacaaatgattttaaaagcttgcagtaaaaaataaactcatagattcagcaaatatttgttgactaaaattatagcatttttaatgcagaaaattataaagaatttggagattgagctgccttatttctaatgaacactcctcttcatcttattaagtcttcacagtttttccagtggctataattatggaattggtgacctatgttttatattatcaaggaagccttagattcactctgatctaagaaattattgaaattgaccctttttacacaaatgtctttaaaaaaaaaaacttatttctaaatgtccatagtgcatgcattttctaaaaccccaataagtccagccataaaagttcttttctgctagtacatgtcatgaagcctatttttgaaaataatgataattaattttatagtatcttcttttctccccaagcctttcagtattcaggcactcaaagcatgcaccagttcagtaatcttcttgaccatggaaataagttccacattactgatgagttatatatatatcttgaaccccattacaacctcaccacatccccctgcatttatgttcagtgtttgtaccccattatgaacctgtttagctgataatgaggatacctataattctgtaagtcatttcaaatatttgatacaattaaaaaatatgggcttagtaaattttaaaagttaacatgtgatactggcttgtgagattcttctgtcatctagtgaagcttataaaactttcagttaagacattttaaaagagttatatccattaggcactttaataaacatataacctgccattactgaatactttgttagaacacagaagagcatcttccagcaaacaaaaatatatttattacatgtacagcacatacttgcatgagaaagaaaacattagccaaaacatttttctatatgctttactggtttcttgtttatgcgcattaaagtatttaattgcaaagagtgcaccaaggtgtacaaatttagactagacagctgttcagctttttctgtagtagcattagcagtttggtcatttaactactttaagatacttacattttatggcaggtagctgtaacagcatttaaatatatttcctagtcatcaagattaccatcttctttcaactttttaaaagtcacttgtttttaaaggtttttcaaagccttgtttttagtcttccatgtcatgccgataaagagagtctcattcaatatctgtgcacaaaaccaatctatcaattaccatcagatgtccatacctgttttgctttgcattcttattcaaaagctgacaatcttggaaagggtataatgtatattttattgatggatatatttaaatgtttactttaatttggaatattctttccccttctttctgtaataagtttatcttcctcaaataaggggatatacatcttattttttttaaagacttaagagtttattgtgtaaatgatacttaaaatctagatatatactaaatgaaaagttttatttttgccaagcacaccaagcacctttgaaaaatacatactccatactttgtttttaattaatttcatttaaagatagcaaatgattataagcaagagaaacaagtcttttactgttttgaggctgttttaacttacagtataagccacatactagaattctgtaatttcagtcaca

SEQ ID NO: 2845 - DNA, 4688 bp, Homo sapiens
  source 1..4688: mol_type = unassigned DNA
gggttttgctttttgtgctctgtattgggaaggcagataaaatgccaggtctggactgcctctggggataacctcaccctgtgggatgtgaatgaatagcatcttgcctggtaaatccacaggaattgataaggcaggcgcagttctcccaaacaggccttttctctttaagctgtagctgtggtttctgcagcaattttgtttttgccttgaaagaggtgctctggattatcacacctccatgtatgacaatttgtacctgcatggaattgaagactcggaggctgaagaataatgtgatgtgttacccaagatggtgtgaacagagcttcaagccaatggagaagactaggcctaaatagctgacctggtgaagtgacacataaagccacacctggagtgccacctcctcagcagtctttctcagtgccaatgcatttatggctggttcagcggattcctacacaagcaggccgtctgactccgatgtctctttggaagaggaccgggaagcaattcgacaggagagagaacagcaagcagctatccagcttgagagagcaaagtccaaacctgtagcatttgccgtgaagacaaatgtgagctactgcggcgccctggacgaggatgtgcctgttccaagcacagctatctcctttgatgctaaagactttctacatattaaagagaaatataacaatgattggtggataggaaggctggtgaaagagggctgtgaaattggcttcattccaagtccactcagattggagaacatacggatccagcaagaacaaaaaagaggacgttttcacggagggaaatcaagtggaaattcttcttcaagtcttggagaaatggtatctgggacattccgagcaactcccacatcaacagcaaaacagaagcaaaaagtgacggagcacattcctccttacgatgttgtaccgtcaatgcgtccggtggtgttagtggggccgtcactgaaaggttacgaggatttcaataacgagagtgacagctgacatttctcttgctaagaggtctgtcctaaataatcccagcaagagagcaataattgaacgttcgaacacccggtccagcttagcggaagtacaaagtgaaattgaaagaatctttgagttggcaagatctttgcaactggttgttcttgatgcagacaccatcaatcacccagcacaacttataaagacttccttagcaccaattattgttcatgtaaaagtctcatctccaaaggttttacagcggttgattaaatctagaggaaagtcacaaagtaaacacttgaatgttcaactggtggcagctgataaacttgcacaatgccccccagaaatgtttgatgttatattggatgaaaatcagcttgaggatgcatgtgaacatctaggggagtacctggaggcgtactggcgtgccacccacacaaccagtagcacacccatgaccccgctgctgggaaggaatttgggctccacggcactctcaccatatcccacagcaatttctgggttacagagtcagcgaatgaggcacagcaaccactccacagagaactctccaattgaaagacgaagtctaatgacctctgatgaaaattatcacaatgaaagggctcggaagagtaggaaccgcttgtcttccagttctcagcatagccgagatcattaccctcttgtggaagaagattaccctgactcataccaggacacttacaaaccccataggaaccgaggatcacctgggggatatagccatgactcccgacataggctttgagtctaatgaaacaaaaaatattcatctgttgacaatttgccatagcagtgctaggataaaccaatcatcttaacttggctaacatagcacagtatttactgtgctaatgggctgctgtcattttatgctaagtaaggggcaaaaaaaaaaattacattatgcccttgagtctagatggatattagatgcccgatcatatagatatttttaagtgcaacatttacatgataacagtacattttgttttcttcatagatttagacacatcaatttgtaatttagggtacttacaaggcacatataaaataatttcccatgctggaaattccaaatgaccagttccagttggaaccaatttataaaccaattcctgttggaatttgggtgaattgactagaaagtctacttgagcatgttgtaatcaactgaaaaatctggggggaaaaaaaaaaaactaataagaaaatcgaaataccaatagaagccaaatccagctttggtatttatttgctggaagctaaatttacacttaaagttggagtgtataaacattttaatatatgttaatgttgccagaatgacttttcagacttaccaaatgtattgatagtgccaaaaaaaaaatctcagaaatcttaatgcagaaattatatagtctcctcagattttaatatttttatttctttcctggcacagctgttgtattcaaagtgttttgctttttgtttggtcagtactgttagctcatttgaagttggcaaaaacaaatacaaacaagcaaaaaacctcaaatttttttcagcagtgagagagaatagtaaagagaggcccaagcatagctggttatgtgaaatataaaatggggtgttgttctccctttaatcaatctgagcacaactacatacatccaggaatctgaagtcagatagtaaggatgtggtaccaatcctcccgagtgcaatgctaaacacttccaggtgggaattcatctatttcacttaacacaaacgcagggtctgtatttcctgccaacaagattgagtatctttccattgcttctctcagtctctgtctttgaatatctgaatgttctggcccttcaacaaattctttaaatcatgctaaggaatttcgttttatgtggacacactcaactttgatattcaggagatgtttttacaaaatgactaattgaaaaaagttgaaacaaatgattttaaaagcttgcagtaaaaaataaactcatagattcagcaaatatttgttgactaaaattatagcatttttaatgcagaaaattataaagaatttggagattgagctgccttatttctaatgaacactcctcttcatcttattaagtcttcacagtttttccagtggctataattatggaattggtgacctatgttttatattatcaaggaagccttagattcactctgatctaagaaattattgaaattgaccctttttacacaaatgtctttaaaaaaaaaaacttatttctaaatgtccatagtgcatgcattttctaaaaccccaataagtccagccataaaagttcttttctgctagtacatgtcatgaagcctatttttgaaaataatgataattaattttatagtatcttcttttctccccaagcctttcagtattcaggcactcaaagcatgcaccagttcagtaatcttcttgaccatggaaataagttccacattactgatgagttatatatatatcttgaaccccattacaacctcaccacatccccctgcatttatgttcagtgtttgtaccccattatgaacctgtttagctgataatgaggatacctataattctgtaagtcatttcaaatatttgatacaattaaaaaatatgggcttagtaaattttaaaagttaacatgtgatactggcttgtgagattcttctgtcatctagtgaagcttataaaactttcagttaagacattttaaaagagttatatccattaggcactttaataaacatataacctgccattactgaatactttgttagaacacagaagagcatcttccagcaaacaaaaatatatttattacatgtacagcacatacttgcatgagaaagaaaacattagccaaaacatttttctatatgctttactggtttcttgtttatgcgcattaaagtatttaattgcaaagagtgcaccaaggtgtacaaatttagactagacagctgttcagctttttctgtagtagcattagcagtttggtcatttaactactttaagatacttacattttatggcaggtagctgtaacagcatttaaatatatttcctagtcatcaagattaccatcttctttcaactttttaaaagtcacttgtttttaaaggtttttcaaagccttgtttttagtcttccatgtcatgccgataaagagagtctcattcaatatctgtgcacaaaaccaatctatcaattaccatcagatgtccatacctgttttgctttgcattcttattcaaaagctgacaatcttggaaagggtataatgtatattttattgatggatatatttaaatgtttactttaatttggaatattctttccccttctttctgtaataagtttatcttcctcaaataaggggatatacatcttattttttttaaagacttaagagtttattgtgtaaatgatacttaaaatctagatatatactaaatgaaaagttttatttttgccaagcacaccaagcacctttgaaaaatacatactccatactttgtttttaattaatttcatttaaagatagcaaatgattataagcaagagaaacaagtcttttactgttttgaggctgttttaacttacagtataagccacat

SEQ ID NO: 2846 - DNA, 4024 bp, Homo sapiens
  source 1..4024: mol_type = unassigned DNA
gctttttgtgctctgtattgggaaggcagataaaatgccaggtctggactgcctctggggataacctcaccctgtgggatgtgaatgaatagcatcttgcctggtaaatccacaggaattgataaggcaggcgcagttctcccaaacaggccttttctctttaagctgtagctgtggtttctgcagcaattttgtttttgccttgaaagaggtgctctggattatcacacctccatgtatgacaatttgtacctgcatggaattgaagactcggaggctgaagaataatgtgatgtgttacccaagatggtgtgaacagagcttcaagccaatggagaagactaggcctaaatagctgacctggtgaagtgacacataaagccacacctggagtgccacctcctcagcagtctttctcagtgccaatgcatttatggctggttcagcggattcctacacaagcaggccgtctgactccgatgtctctttggaagaggaccgggaagcaattcgacaggagagagaacagcaagcagctatccagcttgagagagcaaagtccaaacctgtagcatttgccgtgaagacaaatgtgagctactgcggcgccctggacgaggatgtgcctgttccaagcacagctatctcctttgatgctaaagactttctacatattaaagagaaatataacaatgattggtggataggaaggctggtgaaagagggctgtgaaattggcttcattccaagtccactcagattggagaacatacggatccagcaagaacaaaaaagaggacgttttcacggagggaaatgtttgatgttatattggatgaaaatcagcttgaggatgcatgtgaacatctaggggagtacctggaggcgtactggcgtgccacccacacaaccagtagcacacccatgaccccgctgctgggaaggaatttgggctccacggcactctcaccatatcccacagcaatttctgggttacagagtcagcgaatgaggcacagcaaccactccacagagaactctccaattgaaagacgaagtctaatgacctctgatgaaaattatcacaatgaaagggctcggaagagtaggaaccgcttgtcttccagttctcagcatagccgagatcattaccctcttgtggaagaagattaccctgactcataccaggacacttacaaaccccataggaaccgaggatcacctgggggatatagccatgactcccgacataggctttgagtctaatgaaacaaaaaatattcatctgttgacaatttgccatagcagtgctaggataaaccaatcatcttaacttggctaacatagcacagtatttactgtgctaatgggctgctgtcattttatgctaagtaaggggcaaaaaaaaaaattacattatgcccttgagtctagatggatattagatgcccgatcatatagatatttttaagtgcaacatttacatgataacagtacattttgttttcttcatagatttagacacatcaatttgtaatttagggtacttacaaggcacatataaaataatttcccatgctggaaattccaaatgaccagttccagttggaaccaatttataaaccaattcctgttggaatttgggtgaattgactagaaagtctacttgagcatgttgtaatcaactgaaaaatctggggggaaaaaaaaaaaactaataagaaaatcgaaataccaatagaagccaaatccagctttggtatttatttgctggaagctaaatttacacttaaagttggagtgtataaacattttaatatatgttaatgttgccagaatgacttttcagacttaccaaatgtattgatagtgccaaaaaaaaaatctcagaaatcttaatgcagaaattatatagtctcctcagattttaatatttttatttctttcctggcacagctgttgtattcaaagtgttttgctttttgtttggtcagtactgttagctcatttgaagttggcaaaaacaaatacaaacaagcaaaaaacctcaaatttttttcagcagtgagagagaatagtaaagagaggcccaagcatagctggttatgtgaaatataaaatggggtgttgttctccctttaatcaatctgagcacaactacatacatccaggaatctgaagtcagatagtaaggatgtggtaccaatcctcccgagtgcaatgctaaacacttccaggtgggaattcatctatttcacttaacacaaacgcagggtctgtatttcctgccaacaagattgagtatctttccattgcttctctcagtctctgtctttgaatatctgaatgttctggcccttcaacaaattctttaaatcatgctaaggaatttcgttttatgtggacacactcaactttgatattcaggagatgtttttacaaaatgactaattgaaaaaagttgaaacaaatgattttaaaagcttgcagtaaaaaataaactcatagattcagcaaatatttgttgactaaaattatagcatttttaatgcagaaaattataaagaatttggagattgagctgccttatttctaatgaacactcctcttcatcttattaagtcttcacagtttttccagtggctataattatggaattggtgacctatgttttatattatcaaggaagccttagattcactctgatctaagaaattattgaaattgaccctttttacacaaatgtctttaaaaaaaaaaacttatttctaaatgtccatagtgcatgcattttctaaaaccccaataagtccagccataaaagttcttttctgctagtacatgtcatgaagcctatttttgaaaataatgataattaattttatagtatcttcttttctccccaagcctttcagtattcaggcactcaaagcatgcaccagttcagtaatcttcttgaccatggaaataagttccacattactgatgagttatatatatatcttgaaccccattacaacctcaccacatccccctgcatttatgttcagtgtttgtaccccattatgaacctgtttagctgataatgaggatacctataattctgtaagtcatttcaaatatttgatacaattaaaaaatatgggcttagtaaattttaaaagttaacatgtgatactggcttgtgagattcttctgtcatctagtgaagcttataaaactttcagttaagacattttaaaagagttatatccattaggcactttaataaacatataacctgccattactgaatactttgttagaacacagaagagcatcttccagcaaacaaaaatatatttattacatgtacagcacatacttgcatgagaaagaaaacattagccaaaacatttttctatatgctttactggtttcttgtttatgcgcattaaagtatttaattgcaaagagtgcaccaaggtgtacaaatttagactagacagctgttcagctttttctgtagtagcattagcagtttggtcatttaactactttaagatacttacattttatggcaggtagctgtaacagcatttaaatatatttcctagtcatcaagattaccatcttctttcaactttttaaaagtcacttgtttttaaaggtttttcaaagccttgtttttagtcttccatgtcatgccgataaagagagtctcattcaatatctgtgcacaaaaccaatctatcaattaccatcagatgtccatacctgttttgctttgcattcttattcaaaagctgacaatcttggaaagggtataatgtatattttattgatggatatatttaaatgtttactttaatttggaatattctttccccttctttctgtaataagtttatcttcctcaaataaggggatatacatcttattttttttaaagacttaagagtttattgtgtaaatgatacttaaaatctagatatatactaaatgaaaagttttatttttgccaagcacaccaagcacctttgaa

SEQ ID NO: 2847 - DNA, 4484 bp, Homo sapiens
  source 1..4484: mol_type = unassigned DNA
ggggataacctcaccctgtgggatgtgaatgaatagcatcttgcctggtaaatccacaggaattgataaggcaggcgcagttctcccaaacaggccttttctctttaagctgtagctgtggtttctgcagcaattttgtttttgccttgaaagaggtgctctggattatcacacctccatgtatgacaatttgtacctgcatggaattgaagactcggaggctgaagaataatgtgatgtgttacccaagatggtgtgaacagagcttcaagccaatggagaagactaggcctaaatagctgacctggtgaagtgacacataaagccacacctggagtgccacctcctcagcagtctttctcagtgccaatgcatttatggctgtttattacacaaaccgagggatgttcttatggggatccatggacgcagcagagaaagttaccaaaaacctaccacccagaaatagtcattgttaatatattgctacacaccctttcagatgatcaatccacatatatgtaaatagggttcagcggattcctacacaagcaggccgtctgactccgatgtctctttggaagaggaccgggaagcaattcgacaggagagagaacagcaagcagctatccagcttgagagagcaaagtccaaacctgtagcatttgccgtgaagacaaatgtgagctactgcggcgccctggacgaggatgtgcctgttccaagcacagctatctcctttgatgctaaagactttctacatattaaagagaaatataacaatgattggtggataggaaggctggtgaaagagggctgtgaaattggcttcattccaagtccactcagattggagaacatacggatccagcaagaacaaaaaagaggacgttttcacggagggaaatcaagtggaaattcttcttcaagtcttggagaaatggtatctgggacattccgagcaactcccacatcaacagcaaaacagaagcaaaaagtgacggagcacattcctccttacgatgttgtaccgtcaatgcgtccggtggtgttagtggggccgtcactgaaaggttacgagcggaagtacaaagtgaaattgaaagaatctttgagttggcaagatctttgcaactggttgttcttgatgcagacaccatcaatcacccagcacaacttataaagacttccttagcaccaattattgttcatgtaaaagtctcatctccaaaggttttacagcggttgattaaatctagaggaaagtcacaaagtaaacacttgaatgttcaactggtggcagctgataaacttgcacaatgccccccagaaatgtttgatgttatattggatgaaaatcagcttgaggatgcatgtgaacatctaggggagtacctggaggcgtactggcgtgccacccacacaaccagtagcacacccatgaccccgctgctgggaaggaatttgggctccacggcactctcaccatatcccacagcaatttctgggttacagagtcagcgaatgaggcacagcaaccactccacagagaactctccaattgaaagacgaagtctaatgacctctgatgaaaattatcacaatgaaagggctcggaagagtaggaaccgcttgtcttccagttctcagcatagccgagatcattaccctcttgtggaagaagattaccctgactcataccaggacacttacaaaccccataggaaccgaggatcacctgggggatatagccatgactcccgacataggctttgagtctaatgaaacaaaaaatattcatctgttgacaatttgccatagcagtgctaggataaaccaatcatcttaacttggctaacatagcacagtatttactgtgctaatgggctgctgtcattttatgctaagtaaggggcaaaaaaaaaaattacattatgcccttgagtctagatggatattagatgcccgatcatatagatatttttaagtgcaacatttacatgataacagtacattttgttttcttcatagatttagacacatcaatttgtaatttagggtacttacaaggcacatataaaataatttcccatgctggaaattccaaatgaccagttccagttggaaccaatttataaaccaattcctgttggaatttgggtgaattgactagaaagtctacttgagcatgttgtaatcaactgaaaaatctggggggaaaaaaaaaaaactaataagaaaatcgaaataccaatagaagccaaatccagctttggtatttatttgctggaagctaaatttacacttaaagttggagtgtataaacattttaatatatgttaatgttgccagaatgacttttcagacttaccaaatgtattgatagtgccaaaaaaaaaatctcagaaatcttaatgcagaaattatatagtctcctcagattttaatatttttatttctttcctggcacagctgttgtattcaaagtgttttgctttttgtttggtcagtactgttagctcatttgaagttggcaaaaacaaatacaaacaagcaaaaaacctcaaatttttttcagcagtgagagagaatagtaaagagaggcccaagcatagctggttatgtgaaatataaaatggggtgttgttctccctttaatcaatctgagcacaactacatacatccaggaatctgaagtcagatagtaaggatgtggtaccaatcctcccgagtgcaatgctaaacacttccaggtgggaattcatctatttcacttaacacaaacgcagggtctgtatttcctgccaacaagattgagtatctttccattgcttctctcagtctctgtctttgaatatctgaatgttctggcccttcaacaaattctttaaatcatgctaaggaatttcgttttatgtggacacactcaactttgatattcaggagatgtttttacaaaatgactaattgaaaaaagttgaaacaaatgattttaaaagcttgcagtaaaaaataaactcatagattcagcaaatatttgttgactaaaattatagcatttttaatgcagaaaattataaagaatttggagattgagctgccttatttctaatgaacactcctcttcatcttattaagtcttcacagtttttccagtggctataattatggaattggtgacctatgttttatattatcaaggaagccttagattcactctgatctaagaaattattgaaattgaccctttttacacaaatgtctttaaaaaaaaaaacttatttctaaatgtccatagtgcatgcattttctaaaaccccaataagtccagccataaaagttcttttctgctagtacatgtcatgaagcctatttttgaaaataatgataattaattttatagtatcttcttttctccccaagcctttcagtattcaggcactcaaagcatgcaccagttcagtaatcttcttgaccatggaaataagttccacattactgatgagttatatatatatcttgaaccccattacaacctcaccacatccccctgcatttatgttcagtgtttgtaccccattatgaacctgtttagctgataatgaggatacctataattctgtaagtcatttcaaatatttgatacaattaaaaaatatgggcttagtaaattttaaaagttaacatgtgatactggcttgtgagattcttctgtcatctagtgaagcttataaaactttcagttaagacattttaaaagagttatatccattaggcactttaataaacatataacctgccattactgaatactttgttagaacacagaagagcatcttccagcaaacaaaaatatatttattacatgtacagcacatacttgcatgagaaagaaaacattagccaaaacatttttctatatgctttactggtttcttgtttatgcgcattaaagtatttaattgcaaagagtgcaccaaggtgtacaaatttagactagacagctgttcagctttttctgtagtagcattagcagtttggtcatttaactactttaagatacttacattttatggcaggtagctgtaacagcatttaaatatatttcctagtcatcaagattaccatcttctttcaactttttaaaagtcacttgtttttaaaggtttttcaaagccttgtttttagtcttccatgtcatgccgataaagagagtctcattcaatatctgtgcacaaaaccaatctatcaattaccatcagatgtccatacctgttttgctttgcattcttattcaaaagctgacaatcttggaaagggtataatgtatattttattgatggatatatttaaatgtttactttaatttggaatattctttccccttctttctgtaataagtttatcttcctcaaataaggggatatacatcttattttttttaaagacttaagagtttattgtgtaaatgatacttaaaatct

SEQ ID NO: 2848 - DNA, 4232 bp, Homo sapiens
  source 1..4232: mol_type = unassigned DNA
ctcctccacgtccctttctcctcccgctcctcctctttctcctccttctcttcctcctcctcctcaccctccttcgggtctctgcgctcccgctccggagcccgcagcctcccccagcggatgccggggactcggaccccgcaccctgagagtctttgttaatggatgtggtggcccgaggcaccacaacccggaggagcaggttgaaaagatccgatggcagcaccacttcgaccagcttcatcctcagacagggttcagcggattcctacacaagcaggccgtctgactccgatgtctctttggaagaggaccgggaagcaattcgacaggagagagaacagcaagcagctatccagcttgagagagcaaagaaatataacaatgattggtggataggaaggctggtgaaagagggctgtgaaattggcttcattccaagtccactcagattggagaacatacggatccagcaagaacaaaaaagaggacgttttcacggagggaaatcaagtggaaattcttcttcaagtcttggagaaatggtatctgggacattccgagcaactcccacatcaacagcaaaacagaagcaaaaagtgacggagcacattcctccttacgatgttgtaccgtcaatgcgtccggtggtgttagtggggccgtcactgaaaggttacgaggtaacagacatgatgcagaaagccctctttgatttcctgaagcacaggtttgatgggaggatttcaataacgagagtgacagctgacatttctcttgctaagaggtctgtcctaaataatcccagcaagagagcaataattgaacgttcgaacacccggtccagcttagcggaagtacaaagtgaaattgaaagaatctttgagttggcaagatctttgcaactggttgttcttgatgcagacaccatcaatcacccagcacaacttataaagacttccttagcaccaattattgttcatgtaaaagtctcatctccaaaggttttacagcggttgattaaatctagaggaaagtcacaaagtaaacacttgaatgttcaactggtggcagctgataaacttgcacaatgccccccagaaatgtttgatgttatattggatgaaaatcagcttgaggatgcatgtgaacatctaggggagtacctggaggcgtactggcgtgccacccacacaaccagtagcacacccatgaccccgctgctgggaaggaatttgggctccacggcactctcaccatatcccacagcaatttctgggttacagagtcagcgaatgaggcacagcaaccactccacagagaactctccaattgaaagacgaagtctaatgacctctgatgaaaattatcacaatgaaagggctcggaagagtaggaaccgcttgtcttccagttctcagcatagccgagatcattaccctcttgtggaagaagattaccctgactcataccaggacacttacaaaccccataggaaccgaggatcacctgggggatatagccatgactcccgacataggctttgagtctaatgaaacaaaaaatattcatctgttgacaatttgccatagcagtgctaggataaaccaatcatcttaacttggctaacatagcacagtatttactgtgctaatgggctgctgtcattttatgctaagtaaggggcaaaaaaaaaaattacattatgcccttgagtctagatggatattagatgcccgatcatatagatatttttaagtgcaacatttacatgataacagtacattttgttttcttcatagatttagacacatcaatttgtaatttagggtacttacaaggcacatataaaataatttcccatgctggaaattccaaatgaccagttccagttggaaccaatttataaaccaattcctgttggaatttgggtgaattgactagaaagtctacttgagcatgttgtaatcaactgaaaaatctggggggaaaaaaaaaaaactaataagaaaatcgaaataccaatagaagccaaatccagctttggtatttatttgctggaagctaaatttacacttaaagttggagtgtataaacattttaatatatgttaatgttgccagaatgacttttcagacttaccaaatgtattgatagtgccaaaaaaaaaatctcagaaatcttaatgcagaaattatatagtctcctcagattttaatatttttatttctttcctggcacagctgttgtattcaaagtgttttgctttttgtttggtcagtactgttagctcatttgaagttggcaaaaacaaatacaaacaagcaaaaaacctcaaatttttttcagcagtgagagagaatagtaaagagaggcccaagcatagctggttatgtgaaatataaaatggggtgttgttctccctttaatcaatctgagcacaactacatacatccaggaatctgaagtcagatagtaaggatgtggtaccaatcctcccgagtgcaatgctaaacacttccaggtgggaattcatctatttcacttaacacaaacgcagggtctgtatttcctgccaacaagattgagtatctttccattgcttctctcagtctctgtctttgaatatctgaatgttctggcccttcaacaaattctttaaatcatgctaaggaatttcgttttatgtggacacactcaactttgatattcaggagatgtttttacaaaatgactaattgaaaaaagttgaaacaaatgattttaaaagcttgcagtaaaaaataaactcatagattcagcaaatatttgttgactaaaattatagcatttttaatgcagaaaattataaagaatttggagattgagctgccttatttctaatgaacactcctcttcatcttattaagtcttcacagtttttccagtggctataattatggaattggtgacctatgttttatattatcaaggaagccttagattcactctgatctaagaaattattgaaattgaccctttttacacaaatgtctttaaaaaaaaaaacttatttctaaatgtccatagtgcatgcattttctaaaaccccaataagtccagccataaaagttcttttctgctagtacatgtcatgaagcctatttttgaaaataatgataattaattttatagtatcttcttttctccccaagcctttcagtattcaggcactcaaagcatgcaccagttcagtaatcttcttgaccatggaaataagttccacattactgatgagttatatatatatcttgaaccccattacaacctcaccacatccccctgcatttatgttcagtgtttgtaccccattatgaacctgtttagctgataatgaggatacctataattctgtaagtcatttcaaatatttgatacaattaaaaaatatgggcttagtaaattttaaaagttaacatgtgatactggcttgtgagattcttctgtcatctagtgaagcttataaaactttcagttaagacattttaaaagagttatatccattaggcactttaataaacatataacctgccattactgaatactttgttagaacacagaagagcatcttccagcaaacaaaaatatatttattacatgtacagcacatacttgcatgagaaagaaaacattagccaaaacatttttctatatgctttactggtttcttgtttatgcgcattaaagtatttaattgcaaagagtgcaccaaggtgtacaaatttagactagacagctgttcagctttttctgtagtagcattagcagtttggtcatttaactactttaagatacttacattttatggcaggtagctgtaacagcatttaaatatatttcctagtcatcaagattaccatcttctttcaactttttaaaagtcacttgtttttaaaggtttttcaaagccttgtttttagtcttccatgtcatgccgataaagagagtctcattcaatatctgtgcacaaaaccaatctatcaattaccatcagatgtccatacctgttttgctttgcattcttattcaaaagctgacaatcttggaaagggtataatgtatattttattgatggatatatttaaatgtttactttaatttggaatattctttccccttctttctgtaataagtttatcttcctcaaataaggggatatacatcttattttttttaaagacttaagagtttat

SEQ ID NO: 2849 - DNA, 3787 bp, Homo sapiens
  source 1..3787: mol_type = unassigned DNA
gcagcctcccccagcggatgccggggactcggaccccgcaccctgagagtctttgttaatggatgtggtggcccgaggcaccacaacccggaggagcaggttgaaaagatccgatggcagcaccacttcgaccagcttcatcctcagacagggttcagcggattcctacacaagcaggccgtctgactccgatgtctctttggaagaggaccgggaagcaattcgacaggagagagaacagcaagcagctatccagcttgagagagcaaagtccaaacctgtagcatttgccgtgaagacaaatgtgagctactgcggcgccctggacgaggatgtgcctgttccaagcacagctatctcctttgatgctaaagactttctacatattaaagagaaatataacaatgattggtggataggaaggctggtgaaagagggctgtgaaattggcttcattccaagtccactcagattggagaacatacggatccagcaagaacaaaaaagaggacgttttcacggagggaaatcaagtggaaattcttcttcaagtcttggagaaatggtatctgggacattccgagcaactcccacatcaacagcaaaacagaagcaaaaagtgacggagcacattcctccttacgatgttgtaccgtcaatgcgtccggtggtgttagtggggccgtcactgaaaggttacgaggaaatgtttgatgttatattggatgaaaatcagcttgaggatgcatgtgaacatctaggggagtacctggaggcgtactggcgtgccacccacacaaccagtagcacacccatgaccccgctgctgggaaggaatttgggctccacggcactctcaccatatcccacagcaatttctgggttacagagtcagcgaatgaggcacagcaaccactccacagagaactctccaattgaaagacgaagtctaatgacctctgatgaaaattatcacaatgaaagggctcggaagagtaggaaccgcttgtcttccagttctcagcatagccgagatcattaccctcttgtggaagaagattaccctgactcataccaggacacttacaaaccccataggaaccgaggatcacctgggggatatagccatgactcccgacataggctttgagtctaatgaaacaaaaaatattcatctgttgacaatttgccatagcagtgctaggataaaccaatcatcttaacttggctaacatagcacagtatttactgtgctaatgggctgctgtcattttatgctaagtaaggggcaaaaaaaaaaattacattatgcccttgagtctagatggatattagatgcccgatcatatagatatttttaagtgcaacatttacatgataacagtacattttgttttcttcatagatttagacacatcaatttgtaatttagggtacttacaaggcacatataaaataatttcccatgctggaaattccaaatgaccagttccagttggaaccaatttataaaccaattcctgttggaatttgggtgaattgactagaaagtctacttgagcatgttgtaatcaactgaaaaatctggggggaaaaaaaaaaaactaataagaaaatcgaaataccaatagaagccaaatccagctttggtatttatttgctggaagctaaatttacacttaaagttggagtgtataaacattttaatatatgttaatgttgccagaatgacttttcagacttaccaaatgtattgatagtgccaaaaaaaaaatctcagaaatcttaatgcagaaattatatagtctcctcagattttaatatttttatttctttcctggcacagctgttgtattcaaagtgttttgctttttgtttggtcagtactgttagctcatttgaagttggcaaaaacaaatacaaacaagcaaaaaacctcaaatttttttcagcagtgagagagaatagtaaagagaggcccaagcatagctggttatgtgaaatataaaatggggtgttgttctccctttaatcaatctgagcacaactacatacatccaggaatctgaagtcagatagtaaggatgtggtaccaatcctcccgagtgcaatgctaaacacttccaggtgggaattcatctatttcacttaacacaaacgcagggtctgtatttcctgccaacaagattgagtatctttccattgcttctctcagtctctgtctttgaatatctgaatgttctggcccttcaacaaattctttaaatcatgctaaggaatttcgttttatgtggacacactcaactttgatattcaggagatgtttttacaaaatgactaattgaaaaaagttgaaacaaatgattttaaaagcttgcagtaaaaaataaactcatagattcagcaaatatttgttgactaaaattatagcatttttaatgcagaaaattataaagaatttggagattgagctgccttatttctaatgaacactcctcttcatcttattaagtcttcacagtttttccagtggctataattatggaattggtgacctatgttttatattatcaaggaagccttagattcactctgatctaagaaattattgaaattgaccctttttacacaaatgtctttaaaaaaaaaaacttatttctaaatgtccatagtgcatgcattttctaaaaccccaataagtccagccataaaagttcttttctgctagtacatgtcatgaagcctatttttgaaaataatgataattaattttatagtatcttcttttctccccaagcctttcagtattcaggcactcaaagcatgcaccagttcagtaatcttcttgaccatggaaataagttccacattactgatgagttatatatatatcttgaaccccattacaacctcaccacatccccctgcatttatgttcagtgtttgtaccccattatgaacctgtttagctgataatgaggatacctataattctgtaagtcatttcaaatatttgatacaattaaaaaatatgggcttagtaaattttaaaagttaacatgtgatactggcttgtgagattcttctgtcatctagtgaagcttataaaactttcagttaagacattttaaaagagttatatccattaggcactttaataaacatataacctgccattactgaatactttgttagaacacagaagagcatcttccagcaaacaaaaatatatttattacatgtacagcacatacttgcatgagaaagaaaacattagccaaaacatttttctatatgctttactggtttcttgtttatgcgcattaaagtatttaattgcaaagagtgcaccaaggtgtacaaatttagactagacagctgttcagctttttctgtagtagcattagcagtttggtcatttaactactttaagatacttacattttatggcaggtagctgtaacagcatttaaatatatttcctagtcatcaagattaccatcttctttcaactttttaaaagtcacttgtttttaaaggtttttcaaagccttgtttttagtcttccatgtcatgccgataaagagagtctcattcaatatctgtgcacaaaaccaatctatcaattaccatcagatgtccatacctgttttgctttgcattcttattcaaaagctgacaatcttggaaagggtataatgtatattttattgatggatatatttaaatgtttactttaatttggaatattctttccccttctttctgtaataagtttatcttcctc

SEQ ID NO: 2850 - DNA, 4061 bp, Homo sapiens
  source 1..4061: mol_type = unassigned DNA
tgctttttgtgctctgtattgggaaggcagataaaatgccaggtctggactgcctctggggataacctcaccctgtgggatgtgaatgaatagcatcttgcctggtaaatccacaggaattgataaggcaggcgcagttctcccaaacaggccttttctctttaagctgtagctgtggtttctgcagcaattttgtttttgccttgaaagaggtgctctggattatcacacctccatgtatgacaatttgtacctgcatggaattgaagactcggaggctggttcagcggattcctacacaagcaggccgtctgactccgatgtctctttggaagaggaccgggaagcaattcgacaggagagagaacagcaagcagctatccagcttgagagagcaaagtccaaacctgtagcatttgccgtgaagacaaatgtgagctactgcggcgccctggacgaggatgtgcctgttccaagcacagctatctcctttgatgctaaagactttctacatattaaagagaaatataacaatgattggtggataggaaggctggtgaaagagggctgtgaaattggcttcattccaagtccactcagattggagaacatacggatccagcaagaacaaaaaagaggacgttttcacggagggaaatcaagtggaaattcttcttcaagtcttggagaaatggtatctgggacattccgagcaactcccacatcaacagcaaaacagaagcaaaaagtgacggagcacattcctccttacgatgttgtaccgtcaatgcgtccggtggtgttagtggggccgtcactgaaaggttacgaggtaacagacatgatgcagaaagccctctttgatttcctgaagcacaggtttgatgggaggatttcaataacgagagtgacagctgacatttctcttgctaagaggtctgtcctaaataatcccagcaagagagcaataattgaacgttcgaacacccggtccagcttagcggaagtacaaagtgaaattgaaagaatctttgagttggcaagatctttgcaactggttgttcttgatgcagacaccatcaatcacccagcacaacttataaagacttccttagcaccaattattgttcatgtaaaagtctcatctccaaaggttttacagcggttgattaaatctagaggaaagtcacaaagtaaacacttgaatgttcaactggtggcagctgataaacttgcacaatgccccccaagtcagcgaatgaggcacagcaaccactccacagagaactctccaattgaaagacgaagtctaatgacctctgatgaaaattatcacaatgaaagggctcggaagagtaggaaccgcttgtcttccagttctcagcatagccgagatcattaccctcttgtggaagaagattaccctgactcataccaggacacttacaaaccccataggaaccgaggatcacctgggggatatagccatgactcccgacataggctttgagtctaatgaaacaaaaaatattcatctgttgacaatttgccatagcagtgctaggataaaccaatcatcttaacttggctaacatagcacagtatttactgtgctaatgggctgctgtcattttatgctaagtaaggggcaaaaaaaaaaattacattatgcccttgagtctagatggatattagatgcccgatcatatagatatttttaagtgcaacatttacatgataacagtacattttgttttcttcatagatttagacacatcaatttgtaatttagggtacttacaaggcacatataaaataatttcccatgctggaaattccaaatgaccagttccagttggaaccaatttataaaccaattcctgttggaatttgggtgaattgactagaaagtctacttgagcatgttgtaatcaactgaaaaatctggggggaaaaaaaaaaaactaataagaaaatcgaaataccaatagaagccaaatccagctttggtatttatttgctggaagctaaatttacacttaaagttggagtgtataaacattttaatatatgttaatgttgccagaatgacttttcagacttaccaaatgtattgatagtgccaaaaaaaaaatctcagaaatcttaatgcagaaattatatagtctcctcagattttaatatttttatttctttcctggcacagctgttgtattcaaagtgttttgctttttgtttggtcagtactgttagctcatttgaagttggcaaaaacaaatacaaacaagcaaaaaacctcaaatttttttcagcagtgagagagaatagtaaagagaggcccaagcatagctggttatgtgaaatataaaatggggtgttgttctccctttaatcaatctgagcacaactacatacatccaggaatctgaagtcagatagtaaggatgtggtaccaatcctcccgagtgcaatgctaaacacttccaggtgggaattcatctatttcacttaacacaaacgcagggtctgtatttcctgccaacaagattgagtatctttccattgcttctctcagtctctgtctttgaatatctgaatgttctggcccttcaacaaattctttaaatcatgctaaggaatttcgttttatgtggacacactcaactttgatattcaggagatgtttttacaaaatgactaattgaaaaaagttgaaacaaatgattttaaaagcttgcagtaaaaaataaactcatagattcagcaaatatttgttgactaaaattatagcatttttaatgcagaaaattataaagaatttggagattgagctgccttatttctaatgaacactcctcttcatcttattaagtcttcacagtttttccagtggctataattatggaattggtgacctatgttttatattatcaaggaagccttagattcactctgatctaagaaattattgaaattgaccctttttacacaaatgtctttaaaaaaaaaaacttatttctaaatgtccatagtgcatgcattttctaaaaccccaataagtccagccataaaagttcttttctgctagtacatgtcatgaagcctatttttgaaaataatgataattaattttatagtatcttcttttctccccaagcctttcagtattcaggcactcaaagcatgcaccagttcagtaatcttcttgaccatggaaataagttccacattactgatgagttatatatatatcttgaaccccattacaacctcaccacatccccctgcatttatgttcagtgtttgtaccccattatgaacctgtttagctgataatgaggatacctataattctgtaagtcatttcaaatatttgatacaattaaaaaatatgggcttagtaaattttaaaagttaacatgtgatactggcttgtgagattcttctgtcatctagtgaagcttataaaactttcagttaagacattttaaaagagttatatccattaggcactttaataaacatataacctgccattactgaatactttgttagaacacagaagagcatcttccagcaaacaaaaatatatttattacatgtacagcacatacttgcatgagaaagaaaacattagccaaaacatttttctatatgctttactggtttcttgtttatgcgcattaaagtatttaattgcaaagagtgcaccaaggtgtacaaatttagactagacagctgttcagctttttctgtagtagcattagcagtttggtcatttaactactttaagatacttacattttatggcaggtagctgtaacagcatttaaatatatttcctagtcatcaagattaccatcttctttcaactttttaaaagtcacttgtttttaaaggtttttcaaagccttgtttttagtcttccatgtcatgccgataaagagagtctcattcaatatctgtgcacaaaaccaatctatcaattaccatcagatgtccatacctgttttgctttgcattcttattcaaaagctgacaatcttggaaagggtataatg

SEQ ID NO: 2851 - DNA, 4143 bp, Homo sapiens
  source 1..4143: mol_type = unassigned DNA
agtcaccagtctgtggttgaggaagggttttgctttttgtgctctgtattgggaaggcagataaaatgccaggtctggactgcctctggggataacctcaccctgtgggatgtgaatgaatagcatcttgcctggtaaatccacaggaattgataaggcaggcgcagttctcccaaacaggccttttctctttaagctgtagctgtggtttctgcagcaattttgtttttgccttgaaagaggtgctctggattatcacacctccatgtatgacaatttgtacctgcatggaattgaagactcggaggctgaagaataatgtgatgtgttacccaagatggtgtgaacagagcttcaagccaatggagaagactaggcctaaatagctgacctggtgaagtgacacataaagccacacctggagtgccacctcctcagcagtctttctcagtgccaatgcatttatggctggttcagcggattcctacacaagcaggccgtctgactccgatgtctctttggaagaggaccgggaagcaattcgacaggagagagaacagcaagcagctatccagcttgagagagcaaagtccaaacctgtagcatttgccgtgaagacaaatgtgagctactgcggcgccctggacgaggatgtgcctgttccaagcacagctatctcctttgatgctaaagactttctacatattaaagagaaatataacaatgattggtggataggaaggctggtgaaagagggctgtgaaattggcttcattccaagtccactcagattggagaacatacggatccagcaagaacaaaaaagaggacgttttcacggagggaaatcaagtggaaattcttcttcaagtcttggagaaatggtatctgggacattccgagcaactcccacatcaacagcaaaacagaagcaaaaagtgacggagcacattcctccttacgatgttgtaccgtcaatgcgtccggtggtgttagtggggccgtcactgaaaggttacgaggtaacagacatgatgcagaaagccctctttgatttcctgaagcacaggtttgatgggaggatttcaataacgagagtgacagctgacatttctcttgctaagaggtctgtcctaaataatcccagcaagagagcaataattgaacgttcgaacacccggtccagcttagcggaagtacaaagtgaaattgaaagaatctttgagttggcaagatctttgcaactggttgttcttgatgcagacaccatcaatcacccagcacaacttataaagacttccttagcaccaattattgttcatgtaaaagtctcatctccaaaggttttacagcggttgattaaatctagaggaaagtcacaaagtaaacacttgaatgttcaactggtggcagctgataaacttgcacaatgccccccaagtcagcgaatgaggcacagcaaccactccacagagaactctccaattgaaagacgaagtctaatgacctctgatgaaaattatcacaatgaaagggctcggaagagtaggaaccgcttgtcttccagttctcagcatagccgagatcattaccctcttgtggaagaagattaccctgactcataccaggacacttacaaaccccataggaaccgaggatcacctgggggatatagccatgactcccgacataggctttgagtctaatgaaacaaaaaatattcatctgttgacaatttgccatagcagtgctaggataaaccaatcatcttaacttggctaacatagcacagtatttactgtgctaatgggctgctgtcattttatgctaagtaaggggcaaaaaaaaaaattacattatgcccttgagtctagatggatattagatgcccgatcatatagatatttttaagtgcaacatttacatgataacagtacattttgttttcttcatagatttagacacatcaatttgtaatttagggtacttacaaggcacatataaaataatttcccatgctggaaattccaaatgaccagttccagttggaaccaatttataaaccaattcctgttggaatttgggtgaattgactagaaagtctacttgagcatgttgtaatcaactgaaaaatctggggggaaaaaaaaaaaactaataagaaaatcgaaataccaatagaagccaaatccagctttggtatttatttgctggaagctaaatttacacttaaagttggagtgtataaacattttaatatatgttaatgttgccagaatgacttttcagacttaccaaatgtattgatagtgccaaaaaaaaaatctcagaaatcttaatgcagaaattatatagtctcctcagattttaatatttttatttctttcctggcacagctgttgtattcaaagtgttttgctttttgtttggtcagtactgttagctcatttgaagttggcaaaaacaaatacaaacaagcaaaaaacctcaaatttttttcagcagtgagagagaatagtaaagagaggcccaagcatagctggttatgtgaaatataaaatggggtgttgttctccctttaatcaatctgagcacaactacatacatccaggaatctgaagtcagatagtaaggatgtggtaccaatcctcccgagtgcaatgctaaacacttccaggtgggaattcatctatttcacttaacacaaacgcagggtctgtatttcctgccaacaagattgagtatctttccattgcttctctcagtctctgtctttgaatatctgaatgttctggcccttcaacaaattctttaaatcatgctaaggaatttcgttttatgtggacacactcaactttgatattcaggagatgtttttacaaaatgactaattgaaaaaagttgaaacaaatgattttaaaagcttgcagtaaaaaataaactcatagattcagcaaatatttgttgactaaaattatagcatttttaatgcagaaaattataaagaatttggagattgagctgccttatttctaatgaacactcctcttcatcttattaagtcttcacagtttttccagtggctataattatggaattggtgacctatgttttatattatcaaggaagccttagattcactctgatctaagaaattattgaaattgaccctttttacacaaatgtctttaaaaaaaaaaacttatttctaaatgtccatagtgcatgcattttctaaaaccccaataagtccagccataaaagttcttttctgctagtacatgtcatgaagcctatttttgaaaataatgataattaattttatagtatcttcttttctccccaagcctttcagtattcaggcactcaaagcatgcaccagttcagtaatcttcttgaccatggaaataagttccacattactgatgagttatatatatatcttgaaccccattacaacctcaccacatccccctgcatttatgttcagtgtttgtaccccattatgaacctgtttagctgataatgaggatacctataattctgtaagtcatttcaaatatttgatacaattaaaaaatatgggcttagtaaattttaaaagttaacatgtgatactggcttgtgagattcttctgtcatctagtgaagcttataaaactttcagttaagacattttaaaagagttatatccattaggcactttaataaacatataacctgccattactgaatactttgttagaacacagaagagcatcttccagcaaacaaaaatatatttattacatgtacagcacatacttgcatgagaaagaaaacattagccaaaacatttttctatatgctttactggtttcttgtttatgcgcattaaagtatttaattgcaaagagtgcaccaaggtgtacaaatttagactagacagctgttcagctttttctgtagtagcattagcagtttggtcatttaactactttaagatacttacattttatggcaggtagctgtaacagcatttaaatatatttcctagtcatcaagattaccatcttctttcaactttttaaaagtcacttgtttttaaaggtttttcaaagccttgtttttagtcttccatgtcatgccgataaagagagtctc

SEQ ID NO: 2852 - DNA, 4020 bp, Homo sapiens
  source 1..4020: mol_type = unassigned DNA
gctggaactacaggcatgtgccactgtgcctggctagtttttgtattttagtagagacggaggttcaccttgttggccaggctggtcttgaactcctgacctcaaatgatccacccatgtcggcctcccaaagtgctgggattacaggcatgagccaccatgccaggccctgctttattcttctcttgcatgaccgaaggatactttctaacgtagaaaatcctggcacaatactcacattactttcaactagagtgccttatgactgcccaccgtatgcattcaaagtcttatgcaaatatgctgaagaatcttatgcatgcagaaaaaataaaaccattttttcacattcttataaatgaagtatccctttgggcctgtggagaatcacgtgtgtatcacaaaagaatgcagcttagccacagactggtagattgtctttgataatcaaaatgaagagggtttcccagctttgactggcatcattaaatgccagagcaaagcatttgtagttcctgaaggtcttgttcaagagcaaatcaactatgaattgtggcaaattgtattgctacttcctagaaagagcatggtttatttatatgtcttgattccttcctggtgtggtgtatattataaagggaattcagcaaggcaggccataatggaggaagaacatttttactggagtaggtttttttgtgtgtgaaacagtttaaaccttcctccattctgctctgcttgcattctgatactagccagagcctgtttaaaatacttgtggccaatgtttgttatactgtggttcccctgtagcatgtaaattggttattaagtactgtggttataaatcacttggagagccccataacatttttactggcttgttctgttctgtgttcctattcataggatttcaataacgagagtgacagctgacatttctcttgctaagaggtctgtcctaaataatcccagcaagagagcaataattgaacgttcgaacacccggtccagcttagcggaagtacaaagtgaaattgaaagaatctttgagttggcaagatctttgcaactggttgttcttgatgcagacaccatcaatcacccagcacaacttataaagacttccttagcaccaattattgttcatgtaaaagtctcatctccaaaggttttacagcggttgattaaatctagaggaaagtcacaaagtaaacacttgaatgttcaactggtggcagctgataaacttgcacaatgccccccagaaatgtttgatgttatattggatgaaaatcagcttgaggatgcatgtgaacatctaggggagtacctggaggcgtactggcgtgccacccacacaaccagtagcacacccatgaccccgctgctgggaaggaatttgggctccacggcactctcaccatatcccacagcaatttctgggttacagagtcagcgaatgaggcacagcaaccactccacagagaactctccaattgaaagacgaagtctaatgacctctgatgaaaattatcacaatgaaagggctcggaagagtaggaaccgcttgtcttccagttctcagcatagccgagatcattaccctcttgtggaagaagattaccctgactcataccaggacacttacaaaccccataggaaccgaggatcacctgggggatatagccatgactcccgacataggctttgagtctaatgaaacaaaaaatattcatctgttgacaatttgccatagcagtgctaggataaaccaatcatcttaacttggctaacatagcacagtatttactgtgctaatgggctgctgtcattttatgctaagtaaggggcaaaaaaaaaaattacattatgcccttgagtctagatggatattagatgcccgatcatatagatatttttaagtgcaacatttacatgataacagtacattttgttttcttcatagatttagacacatcaatttgtaatttagggtacttacaaggcacatataaaataatttcccatgctggaaattccaaatgaccagttccagttggaaccaatttataaaccaattcctgttggaatttgggtgaattgactagaaagtctacttgagcatgttgtaatcaactgaaaaatctggggggaaaaaaaaaaaactaataagaaaatcgaaataccaatagaagccaaatccagctttggtatttatttgctggaagctaaatttacacttaaagttggagtgtataaacattttaatatatgttaatgttgccagaatgacttttcagacttaccaaatgtattgatagtgccaaaaaaaaaatctcagaaatcttaatgcagaaattatatagtctcctcagattttaatatttttatttctttcctggcacagctgttgtattcaaagtgttttgctttttgtttggtcagtactgttagctcatttgaagttggcaaaaacaaatacaaacaagcaaaaaacctcaaatttttttcagcagtgagagagaatagtaaagagaggcccaagcatagctggttatgtgaaatataaaatggggtgttgttctccctttaatcaatctgagcacaactacatacatccaggaatctgaagtcagatagtaaggatgtggtaccaatcctcccgagtgcaatgctaaacacttccaggtgggaattcatctatttcacttaacacaaacgcagggtctgtatttcctgccaacaagattgagtatctttccattgcttctctcagtctctgtctttgaatatctgaatgttctggcccttcaacaaattctttaaatcatgctaaggaatttcgttttatgtggacacactcaactttgatattcaggagatgtttttacaaaatgactaattgaaaaaagttgaaacaaatgattttaaaagcttgcagtaaaaaataaactcatagattcagcaaatatttgttgactaaaattatagcatttttaatgcagaaaattataaagaatttggagattgagctgccttatttctaatgaacactcctcttcatcttattaagtcttcacagtttttccagtggctataattatggaattggtgacctatgttttatattatcaaggaagccttagattcactctgatctaagaaattattgaaattgaccctttttacacaaatgtctttaaaaaaaaaaacttatttctaaatgtccatagtgcatgcattttctaaaaccccaataagtccagccataaaagttcttttctgctagtacatgtcatgaagcctatttttgaaaataatgataattaattttatagtatcttcttttctccccaagcctttcagtattcaggcactcaaagcatgcaccagttcagtaatcttcttgaccatggaaataagttccacattactgatgagttatatatatatcttgaaccccattacaacctcaccacatccccctgcatttatgttcagtgtttgtaccccattatgaacctgtttagctgataatgaggatacctataattctgtaagtcatttcaaatatttgatacaattaaaaaatatgggcttagtaaattttaaaagttaacatgtgatactggcttgtgagattcttctgtcatctagtgaagcttataaaactttcagttaagacattttaaaagagttatatccattaggcactttaataaacatataacctgccattactgaatactttgttagaacacagaagagcatcttccagcaaacaaaaatatatttattacatgtacagcacatacttgcatgagaaagaaaacattagccaaaacatttttctatatgctttactggtttcttgtttatgcgcattaaagtatttaattgcaaagagtgcaccaaggtgtacaaatttagactagacagctgttcagctttttctgtagtagcattagcagtttggtcatttaactactttaagatacttacattttatggcaggta

SEQ ID NO: 2853 - DNA, 3877 bp, Homo sapiens
  source 1..3877: mol_type = unassigned DNA
gttttgctttttgtgctctgtattgggaaggcagataaaatgccaggtctggactgcctctggggataacctcaccctgtgggatgtgaatgaatagcatcttgcctggtaaatccacaggaattgataaggcaggcgcagttctcccaaacaggccttttctctttaagctgtagctgtggtttctgcagcaattttgtttttgccttgaaagaggtgctctggattatcacacctccatgtatgacaatttgtacctgcatggaattgaagactcggaggctgaagaataatgtgatgtgttacccaagatggtgtgaacagagcttcaagccaatggagaagactaggcctaaatagctgacctggtgaagtgacacataaagccacacctggagtgccacctcctcagcagtctttctcagtgccaatgcatttatggctggttcagcggattcctacacaagcaggccgtctgactccgatgtctctttggaagaggaccgggaagcaattcgacaggagagagaacagcaagcagctatccagcttgagagagcaaagtccaaacctgtagcatttgccgtgaagacaaatgtgagctactgcggcgccctggacgaggatgtgcctgttccaagcacagctatctcctttgatgctaaagactttctacatattaaagagaaatataacaatgattggtggataggaaggctggtgaaagagggctgtgaaattggcttcattccaagtccactcagattggagaacatacggatccagcaagaacaaaaaagaggacgttttcacggagggaaatcaagtggaaattcttcttcaagtcttggagaaatggtatctgggacattccgagcaactcccacatcaacagcaaaacagaagcaaaaagtgacggagcacattcctccttacgatgttgtaccgtcaatgcgtccggtggtgttagtggggccgtcactgaaaggttacgagcggaagtacaaagtgaaattgaaagaatctttgagttggcaagatctttgcaactggttgttcttgatgcagacaccatcaatcacccagcacaacttataaagacttccttagcaccaattattgttcatgtaaaagtctcatctccaaaggttttacagcggttgattaaatctagaggaaagtcacaaagtaaacacttgaatgttcaactggtggcagctgataaacttgcacaatgccccccagaaatgtttgatgttatattggatgaaaatcagcttgaggatgcatgtgaacatctaggggagtacctggaggcgtactggcgtgccacccacacaaccagtagcacacccatgaccccgctgctgggaaggaatttgggctccacggcactctcaccatatcccacagcaatttctgggttacagagtcagcgaatgaggcacagcaaccactccacagagaactctccaattgaaagacgaagtctaatgacctctgatgaaaattatcacaatgaaagggctcggaagagtaggaaccgcttgtcttccagttctcagcatagccgagatcattaccctcttgtggaagaagattaccctgactcataccaggacacttacaaaccccataggaaccgaggatcacctgggggatatagccatgactcccgacataggctttgagtctaatgaaacaaaaaatattcatctgttgacaatttgccatagcagtgctaggataaaccaatcatcttaacttggctaacatagcacagtatttactgtgctaatgggctgctgtcattttatgctaagtaaggggcaaaaaaaaaaattacattatgcccttgagtctagatggatattagatgcccgatcatatagatatttttaagtgcaacatttacatgataacagtacattttgttttcttcatagatttagacacatcaatttgtaatttagggtacttacaaggcacatataaaataatttcccatgctggaaattccaaatgaccagttccagttggaaccaatttataaaccaattcctgttggaatttgggtgaattgactagaaagtctacttgagcatgttgtaatcaactgaaaaatctggggggaaaaaaaaaaaactaataagaaaatcgaaataccaatagaagccaaatccagctttggtatttatttgctggaagctaaatttacacttaaagttggagtgtataaacattttaatatatgttaatgttgccagaatgacttttcagacttaccaaatgtattgatagtgccaaaaaaaaaatctcagaaatcttaatgcagaaattatatagtctcctcagattttaatatttttatttctttcctggcacagctgttgtattcaaagtgttttgctttttgtttggtcagtactgttagctcatttgaagttggcaaaaacaaatacaaacaagcaaaaaacctcaaatttttttcagcagtgagagagaatagtaaagagaggcccaagcatagctggttatgtgaaatataaaatggggtgttgttctccctttaatcaatctgagcacaactacatacatccaggaatctgaagtcagatagtaaggatgtggtaccaatcctcccgagtgcaatgctaaacacttccaggtgggaattcatctatttcacttaacacaaacgcagggtctgtatttcctgccaacaagattgagtatctttccattgcttctctcagtctctgtctttgaatatctgaatgttctggcccttcaacaaattctttaaatcatgctaaggaatttcgttttatgtggacacactcaactttgatattcaggagatgtttttacaaaatgactaattgaaaaaagttgaaacaaatgattttaaaagcttgcagtaaaaaataaactcatagattcagcaaatatttgttgactaaaattatagcatttttaatgcagaaaattataaagaatttggagattgagctgccttatttctaatgaacactcctcttcatcttattaagtcttcacagtttttccagtggctataattatggaattggtgacctatgttttatattatcaaggaagccttagattcactctgatctaagaaattattgaaattgaccctttttacacaaatgtctttaaaaaaaaaaacttatttctaaatgtccatagtgcatgcattttctaaaaccccaataagtccagccataaaagttcttttctgctagtacatgtcatgaagcctatttttgaaaataatgataattaattttatagtatcttcttttctccccaagcctttcagtattcaggcactcaaagcatgcaccagttcagtaatcttcttgaccatggaaataagttccacattactgatgagttatatatatatcttgaaccccattacaacctcaccacatccccctgcatttatgttcagtgtttgtaccccattatgaacctgtttagctgataatgaggatacctataattctgtaagtcatttcaaatatttgatacaattaaaaaatatgggcttagtaaattttaaaagttaacatgtgatactggcttgtgagattcttctgtcatctagtgaagcttataaaactttcagttaagacattttaaaagagttatatccattaggcactttaataaacatataacctgccattactgaatactttgttagaacacagaagagcatcttccagcaaacaaaaatatatttattacatgtacagcacatacttgcatgagaaagaaaacattagccaaaacatttttctatatgctttactggtttcttgtttatgcgcattaaagtatttaa

SEQ ID NO: 2854 - DNA, 3800 bp, Homo sapiens
  source 1..3800: mol_type = unassigned DNA
gggaaggcagataaaatgccaggtctggactgcctctggggataacctcaccctgtgggatgtgaatgaatagcatcttgcctggtaaatccacaggaattgataaggcaggcgcagttctcccaaacaggccttttctctttaagctgtagctgtggtttctgcagcaattttgtttttgccttgaaagaggtgctctggattatcacacctccatgtatgacaatttgtacctgcatggaattgaagactcggaggctgaagaataatgtgatgtgttacccaagatggtgtgaacagagcttcaagccaatggagaagactaggcctaaatagctgacctggtgaagtgacacataaagccacacctggagtgccacctcctcagcagtctttctcagtgccaatgcatttatggctggttcagcggattcctacacaagcaggccgtctgactccgatgtctctttggaagaggaccgggaagcaattcgacaggagagagaacagcaagcagctatccagcttgagagagcaaagtccaaacctgtagcatttgccgtgaagacaaatgtgagctactgcggcgccctggacgaggatgtgcctgttccaagcacagctatctcctttgatgctaaagactttctacatattaaagagaaatataacaatgattggtggataggaaggctggtgaaagagggctgtgaaattggcttcattccaagtccactcagattggagaacatacggatccagcaagaacaaaaaagaggacgttttcacggagggctttttgtggcatctcttgtctcctggtatttgggtgaagacagcttcaggaaatcaagtggaaattcttcttcaagtcttggagaaatggtatctgggacattccgagcaactcccacatcaacagcaaaacagaagcaaaaagtgacggagcacattcctccttacgatgttgtaccgtcaatgcgtccggtggtgttagtggggccgtcactgaaaggttacgaggtaacagacatgatgcagaaagccctctttgatttcctgaagcacaggtttgatgggaggatttcaataacgagagtgacagctgacatttctcttgctaagaggtctgtcctaaataatcccagcaagagagcaataattgaacgttcgaacacccggtccagcttagcggaagtacaaagtgaaattgaaagaatctttgagttggcaagatctttgcaactggttgttcttgatgcagacaccatcaatcacccagcacaacttataaagacttccttagcaccaattattgttcatgtaaaagtctcatctccaaaggttttacagcggttgattaaatctagaggaaagtcacaaagtaaacacttgaatgttcaactggtggcagctgataaacttgcacaatgccccccagaaatgtttgatgttatattggatgaaaatcagcttgaggatgcatgtgaacatctaggggagtacctggaggcgtactggcgtgccacccacacaaccagtagcacacccatgaccccgctgctgggaaggaatttgggctccacggcactctcaccatatcccacagcaatttctgggttacagagtcagcgaatgaggcacagcaaccactccacagagaactctccaattgaaagacgaagtctaatgacctctgatgaaaattatcacaatgaaagggctcggaagagtaggaaccgcttgtcttccagttctcagcatagccgagatcattaccctcttgtggaagaagattaccctgactcataccaggacacttacaaaccccataggaaccgaggatcacctgggggatatagccatgactcccgacataggctttgagtctaatgaaacaaaaaatattcatctgttgacaatttgccatagcagtgctaggataaaccaatcatcttaacttggctaacatagcacagtatttactgtgctaatgggctgctgtcattttatgctaagtaaggggcaaaaaaaaaaattacattatgcccttgagtctagatggatattagatgcccgatcatatagatatttttaagtgcaacatttacatgataacagtacattttgttttcttcatagatttagacacatcaatttgtaatttagggtacttacaaggcacatataaaataatttcccatgctggaaattccaaatgaccagttccagttggaaccaatttataaaccaattcctgttggaatttgggtgaattgactagaaagtctacttgagcatgttgtaatcaactgaaaaatctggggggaaaaaaaaaaaactaataagaaaatcgaaataccaatagaagccaaatccagctttggtatttatttgctggaagctaaatttacacttaaagttggagtgtataaacattttaatatatgttaatgttgccagaatgacttttcagacttaccaaatgtattgatagtgccaaaaaaaaaatctcagaaatcttaatgcagaaattatatagtctcctcagattttaatatttttatttctttcctggcacagctgttgtattcaaagtgttttgctttttgtttggtcagtactgttagctcatttgaagttggcaaaaacaaatacaaacaagcaaaaaacctcaaatttttttcagcagtgagagagaatagtaaagagaggcccaagcatagctggttatgtgaaatataaaatggggtgttgttctccctttaatcaatctgagcacaactacatacatccaggaatctgaagtcagatagtaaggatgtggtaccaatcctcccgagtgcaatgctaaacacttccaggtgggaattcatctatttcacttaacacaaacgcagggtctgtatttcctgccaacaagattgagtatctttccattgcttctctcagtctctgtctttgaatatctgaatgttctggcccttcaacaaattctttaaatcatgctaaggaatttcgttttatgtggacacactcaactttgatattcaggagatgtttttacaaaatgactaattgaaaaaagttgaaacaaatgattttaaaagcttgcagtaaaaaataaactcatagattcagcaaatatttgttgactaaaattatagcatttttaatgcagaaaattataaagaatttggagattgagctgccttatttctaatgaacactcctcttcatcttattaagtcttcacagtttttccagtggctataattatggaattggtgacctatgttttatattatcaaggaagccttagattcactctgatctaagaaattattgaaattgaccctttttacacaaatgtctttaaaaaaaaaaacttatttctaaatgtccatagtgcatgcattttctaaaaccccaataagtccagccataaaagttcttttctgctagtacatgtcatgaagcctatttttgaaaataatgataattaattttatagtatcttcttttctccccaagcctttcagtattcaggcactcaaagcatgcaccagttcagtaatcttcttgaccatggaaataagttccacattactgatgagttatatatatatcttgaaccccattacaacctcaccacatccccctgcatttatgttcagtgtttgtaccccattatgaacctgtttagctgataatgaggatacctataattctgtaagtcatttcaaatatttgatacaattaaaaaatatgggcttagtaaattttaaaagttaacatgt

SEQ ID NO: 2855 - DNA, 3038 bp, Homo sapiens
  source 1..3038: mol_type = unassigned DNA
agctcagtcaccagtctgtggttgaggaagggttttgctttttgtgctctgtattgggaaggcagataaaatgccaggtctggactgcctctggggataacctcaccctgtgggatgtgaatgaatagcatcttgcctggtaaatccacaggaattgataaggcaggcgcagttctcccaaacaggccttttctctttaagctgtagctgtggtttctgcagcaattttgtttttgccttgaaagaggtgctctggattatcacacctccatgtatgacaatttgtacctgcatggaattgaagactcggaggctggttcagcggattcctacacaagcaggccgtctgactccgatgtctctttggaagaggaccgggaagcaattcgacaggagagagaacagcaagcagctatccagcttgagagagcaaagtccaaacctgtagcatttgccgtgaagacaaatgtgagctactgcggcgccctggacgaggatgtgcctgttccaagcacagctatctcctttgatgctaaagactttctacatattaaagagaaatataacaatgattggtggataggaaggctggtgaaagagggctgtgaaattggcttcattccaagtccactcagattggagaacatacggatccagcaagaacaaaaaagaggacgttttcacggagggaaatgtttgatgttatattggatgaaaatcagcttgaggatgcatgtgaacatctaggggagtacctggaggcgtactggcgtgccacccacacaaccagtagcacacccatgaccccgctgctgggaaggaatttgggctccacggcactctcaccatatcccacagcaatttctgggttacagagtcagcgaatgaggcacagcaaccactccacagagaactctccaattgaaagacgaagtctaatgacctctgatgaaaattatcacaatgaaagggctcggaagagtaggaaccgcttgtcttccagttctcagcatagccgagatcattaccctcttgtggaagaagattaccctgactcataccaggacacttacaaaccccataggaaccgaggatcacctgggggatatagccatgactcccgacataggctttgagtctaatgaaacaaaaaatattcatctgttgacaatttgccatagcagtgctaggataaaccaatcatcttaacttggctaacatagcacagtatttactgtgctaatgggctgctgtcattttatgctaagtaaggggcaaaaaaaaaaattacattatgcccttgagtctagatggatattagatgcccgatcatatagatatttttaagtgcaacatttacatgataacagtacattttgttttcttcatagatttagacacatcaatttgtaatttagggtacttacaaggcacatataaaataatttcccatgctggaaattccaaatgaccagttccagttggaaccaatttataaaccaattcctgttggaatttgggtgaattgactagaaagtctacttgagcatgttgtaatcaactgaaaaatctggggggaaaaaaaaaaaactaataagaaaatcgaaataccaatagaagccaaatccagctttggtatttatttgctggaagctaaatttacacttaaagttggagtgtataaacattttaatatatgttaatgttgccagaatgacttttcagacttaccaaatgtattgatagtgccaaaaaaaaaatctcagaaatcttaatgcagaaattatatagtctcctcagattttaatatttttatttctttcctggcacagctgttgtattcaaagtgttttgctttttgtttggtcagtactgttagctcatttgaagttggcaaaaacaaatacaaacaagcaaaaaacctcaaatttttttcagcagtgagagagaatagtaaagagaggcccaagcatagctggttatgtgaaatataaaatggggtgttgttctccctttaatcaatctgagcacaactacatacatccaggaatctgaagtcagatagtaaggatgtggtaccaatcctcccgagtgcaatgctaaacacttccaggtgggaattcatctatttcacttaacacaaacgcagggtctgtatttcctgccaacaagattgagtatctttccattgcttctctcagtctctgtctttgaatatctgaatgttctggcccttcaacaaattctttaaatcatgctaaggaatttcgttttatgtggacacactcaactttgatattcaggagatgtttttacaaaatgactaattgaaaaaagttgaaacaaatgattttaaaagcttgcagtaaaaaataaactcatagattcagcaaatatttgttgactaaaattatagcatttttaatgcagaaaattataaagaatttggagattgagctgccttatttctaatgaacactcctcttcatcttattaagtcttcacagtttttccagtggctataattatggaattggtgacctatgttttatattatcaaggaagccttagattcactctgatctaagaaattattgaaattgaccctttttacacaaatgtctttaaaaaaaaaaacttatttctaaatgtccatagtgcatgcattttctaaaaccccaataagtccagccataaaagttcttttctgctagtacatgtcatgaagcctatttttgaaaataatgataattaattttatagtatcttcttttctccccaagcctttcagtattcaggcactcaaagcatgcaccagttcagtaatcttcttgaccatggaaataagttccacattactgatgagttatatatatatcttgaaccccattacaacctcaccacatccccctgcatttatgttcagtgtttgtaccccattatgaacctgtttagctgataatgaggatacctataattctgtaagtcatttcaaatatttgatacaattaaaaaatatgggcttagtaaattttaaa

SEQ ID NO: 2856 - DNA, 3485 bp, Homo sapiens
  source 1..3485: mol_type = unassigned DNA
ggcagataaaatgccaggtctggactgcctctggggataacctcaccctgtgggatgtgaatgaatagcatcttgcctggtaaatccacaggaattgataaggcaggcgcagttctcccaaacaggccttttctctttaagctgtagctgtggtttctgcagcaattttgtttttgccttgaaagaggtgctctggattatcacacctccatgtatgacaatttgtacctgcatggaattgaagactcggaggctggttcagcggattcctacacaagcaggccgtctgactccgatgtctctttggaagaggaccgggaagcaattcgacaggagagagaacagcaagcagctatccagcttgagagagcaaagtccaaacctgtagcatttgccgtgaagacaaatgtgagctactgcggcgccctggacgaggatgtgcctgttccaagcacagctatctcctttgatgctaaagactttctacatattaaagagaaatataacaatgattggtggataggaaggctggtgaaagagggctgtgaaattggcttcattccaagtccactcagattggagaacatacggatccagcaagaacaaaaaagaggacgttttcacggagggaaatcaagtggaaattcttcttcaagtcttggagaaatggtatctgggacattccgagcaactcccacatcaacagacggagcacattcctccttacgatgttgtaccgtcaatgcgtccggtggtgttagtggggccgtcactgaaaggttacgaggtaacagacatgatgcagaaagccctctttgatttcctgaagcacaggtttgatgggaggatttcaataacgagagtgacagctgacatttctcttgctaagaggtctgtcctaaataatcccagcaagagagcaataattgaacgttcgaacacccggtccagcttagcggaagtacaaagtgaaattgaaagaatctttgagttggcaagatctttgcaactggttgttcttgatgcagacaccatcaatcacccagcacaacttataaagacttccttagcaccaattattgttcatgtaaaagtctcatctccaaaggttttacagcggttgattaaatctagaggaaagtcacaaagtaaacacttgaatgttcaactggtggcagctgataaacttgcacaatgccccccagaaatgtttgatgttatattggatgaaaatcagcttgaggatgcatgtgaacatctaggggagtacctggaggcgtactggcgtgccacccacacaaccagtagcacacccatgaccccgctgctgggaaggaatttgggctccacggcactctcaccatatcccacagcaatttctgggttacagagtcagcgaatgaggcacagcaaccactccacagagaactctccaattgaaagacgaagtctaatgacctctgatgaaaattatcacaatgaaagggctcggaagagtaggaaccgcttgtcttccagttctcagcatagccgagatcattaccctcttgtggaagaagattaccctgactcataccaggacacttacaaaccccataggaaccgaggatcacctgggggatatagccatgactcccgacataggctttgagtctaatgaaacaaaaaatattcatctgttgacaatttgccatagcagtgctaggataaaccaatcatcttaacttggctaacatagcacagtatttactgtgctaatgggctgctgtcattttatgctaagtaaggggcaaaaaaaaaaattacattatgcccttgagtctagatggatattagatgcccgatcatatagatatttttaagtgcaacatttacatgataacagtacattttgttttcttcatagatttagacacatcaatttgtaatttagggtacttacaaggcacatataaaataatttcccatgctggaaattccaaatgaccagttccagttggaaccaatttataaaccaattcctgttggaatttgggtgaattgactagaaagtctacttgagcatgttgtaatcaactgaaaaatctggggggaaaaaaaaaaaactaataagaaaatcgaaataccaatagaagccaaatccagctttggtatttatttgctggaagctaaatttacacttaaagttggagtgtataaacattttaatatatgttaatgttgccagaatgacttttcagacttaccaaatgtattgatagtgccaaaaaaaaaatctcagaaatcttaatgcagaaattatatagtctcctcagattttaatatttttatttctttcctggcacagctgttgtattcaaagtgttttgctttttgtttggtcagtactgttagctcatttgaagttggcaaaaacaaatacaaacaagcaaaaaacctcaaatttttttcagcagtgagagagaatagtaaagagaggcccaagcatagctggttatgtgaaatataaaatggggtgttgttctccctttaatcaatctgagcacaactacatacatccaggaatctgaagtcagatagtaaggatgtggtaccaatcctcccgagtgcaatgctaaacacttccaggtgggaattcatctatttcacttaacacaaacgcagggtctgtatttcctgccaacaagattgagtatctttccattgcttctctcagtctctgtctttgaatatctgaatgttctggcccttcaacaaattctttaaatcatgctaaggaatttcgttttatgtggacacactcaactttgatattcaggagatgtttttacaaaatgactaattgaaaaaagttgaaacaaatgattttaaaagcttgcagtaaaaaataaactcatagattcagcaaatatttgttgactaaaattatagcatttttaatgcagaaaattataaagaatttggagattgagctgccttatttctaatgaacactcctcttcatcttattaagtcttcacagtttttccagtggctataattatggaattggtgacctatgttttatattatcaaggaagccttagattcactctgatctaagaaattattgaaattgaccctttttacacaaatgtctttaaaaaaaaaaacttatttctaaatgtccatagtgcatgcattttctaaaaccccaataagtccagccataaaagttcttttctgctagtacatgtcatgaagcctatttttgaaaataatgataattaattttatagtatcttcttttctccccaagcctttcagtattcaggcactcaaagcatgcaccagttcagtaatcttcttgaccatggaaataagttccacattactgatgagttatatatatatcttgaaccccattacaacctcaccacatccccctgcatttatgttcagtgtttgtaccccattatgaacctgtttagctgataatgaggata

SEQ ID NO: 2857 - DNA, 3520 bp, Homo sapiens
  source 1..3520: mol_type = unassigned DNA
tgggatgtgaatgaatagcatcttgcctggtaaatccacaggaattgataaggcaggcgcagttctcccaaacaggccttttctctttaagctgtagctgtggtttctgcagcaattttgtttttgccttgaaagaggtgctctggattatcacacctccatgtatgacaatttgtacctgcatggaattgaagactcggaggctcttacaaaacagttgggagttgggagaatctccaaaacagagattggattgctctctgacccaaatgggttcagcggattcctacacaagcaggccgtctgactccgatgtctctttggaagaggaccgggaagcaattcgacaggagagagaacagcaagcagctatccagcttgagagagcaaagtccaaacctgtagcatttgccgtgaagacaaatgtgagctactgcggcgccctggacgaggatgtgcctgttccaagcacagctatctcctttgatgctaaagactttctacatattaaagagaaatataacaatgattggtggataggaaggctggtgaaagagggctgtgaaattggcttcattccaagtccactcagattggagaacatacggatccagcaagaacaaaaaagaggacgttttcacggagggaaatcaagtggaaattcttcttcaagtcttggagaaatggtatctgggacattccgagcaactcccacatcaacagcaaaacagaagcaaaaagtgacggagcacattcctccttacgatgttgtaccgtcaatgcgtccggtggtgttagtggggccgtcactgaaaggttacgaggtaacagacatgatgcagaaagccctctttgatttcctgaagcacaggtttgatgggaggatttcaataacgagagtgacagctgacatttctcttgctaagaggtctgtcctaaataatcccagcaagagagcaataattgaacgttcgaacacccggtccagcttagcggaagtacaaagtgaaattgaaagaatctttgagttggcaagatctttgcaactggttgttcttgatgcagacaccatcaatcacccagcacaacttataaagacttccttagcaccaattattgttcatgtaaaagtctcatctccaaaggttttacagcggttgattaaatctagaggaaagtcacaaagtaaacacttgaatgttcaactggtggcagctgataaacttgcacaatgccccccagaaatgtttgatgttatattggatgaaaatcagcttgaggatgcatgtgaacatctaggggagtacctggaggcgtactggcgtgccacccacacaaccagtagcacacccatgaccccgctgctgggaaggaatttgggctccacggcactctcaccatatcccacagcaatttctgggttacagagtcagcgaatgaggcacagcaaccactccacagagaactctccaattgaaagacgaagtctaatgacctctgatgaaaattatcacaatgaaagggctcggaagagtaggaaccgcttgtcttccagttctcagcatagccgagatcattaccctcttgtggaagaagattaccctgactcataccaggacacttacaaaccccataggaaccgaggatcacctgggggatatagccatgactcccgacataggctttgagtctaatgaaacaaaaaatattcatctgttgacaatttgccatagcagtgctaggataaaccaatcatcttaacttggctaacatagcacagtatttactgtgctaatgggctgctgtcattttatgctaagtaaggggcaaaaaaaaaaattacattatgcccttgagtctagatggatattagatgcccgatcatatagatatttttaagtgcaacatttacatgataacagtacattttgttttcttcatagatttagacacatcaatttgtaatttagggtacttacaaggcacatataaaataatttcccatgctggaaattccaaatgaccagttccagttggaaccaatttataaaccaattcctgttggaatttgggtgaattgactagaaagtctacttgagcatgttgtaatcaactgaaaaatctggggggaaaaaaaaaaaactaataagaaaatcgaaataccaatagaagccaaatccagctttggtatttatttgctggaagctaaatttacacttaaagttggagtgtataaacattttaatatatgttaatgttgccagaatgacttttcagacttaccaaatgtattgatagtgccaaaaaaaaaatctcagaaatcttaatgcagaaattatatagtctcctcagattttaatatttttatttctttcctggcacagctgttgtattcaaagtgttttgctttttgtttggtcagtactgttagctcatttgaagttggcaaaaacaaatacaaacaagcaaaaaacctcaaatttttttcagcagtgagagagaatagtaaagagaggcccaagcatagctggttatgtgaaatataaaatggggtgttgttctccctttaatcaatctgagcacaactacatacatccaggaatctgaagtcagatagtaaggatgtggtaccaatcctcccgagtgcaatgctaaacacttccaggtgggaattcatctatttcacttaacacaaacgcagggtctgtatttcctgccaacaagattgagtatctttccattgcttctctcagtctctgtctttgaatatctgaatgttctggcccttcaacaaattctttaaatcatgctaaggaatttcgttttatgtggacacactcaactttgatattcaggagatgtttttacaaaatgactaattgaaaaaagttgaaacaaatgattttaaaagcttgcagtaaaaaataaactcatagattcagcaaatatttgttgactaaaattatagcatttttaatgcagaaaattataaagaatttggagattgagctgccttatttctaatgaacactcctcttcatcttattaagtcttcacagtttttccagtggctataattatggaattggtgacctatgttttatattatcaaggaagccttagattcactctgatctaagaaattattgaaattgaccctttttacacaaatgtctttaaaaaaaaaaacttatttctaaatgtccatagtgcatgcattttctaaaaccccaataagtccagccataaaagttcttttctgctagtacatgtcatgaagcctatttttgaaaataatgataattaattttatagtatcttcttttctccccaagcctttcagtattcaggcactcaaagcatgcaccagttcagtaatcttcttgaccatggaaataagttccacattactgatgagttatatatatatcttgaaccccattacaacctcaccacatccccctgcatttatgttcagtgtttgtaccccattatgaacctgtttagctgataatgagga

SEQ ID NO: 2858 - DNA, 3395 bp, Homo sapiens
  source 1..3395: mol_type = unassigned DNA
agtctgtggttgaggaagggttttgctttttgtgctctgtattgggaaggcagataaaatgccaggtctggactgcctctggggataacctcaccctgtgggatgtgaatgaatagcatcttgcctggtaaatccacaggaattgataaggcaggcgcagttctcccaaacaggccttttctctttaagctgtagctgtggtttctgcagcaattttgtttttgccttgaaagaggtgctctggattatcacacctccatgtatgacaatttgtacctgcatggaattgaagactcggaggctgtctttgactgagattccctaaggaagtggcaaagaagcagaatgtgctatgatctctgaatgttcctgggagactaaacatgatctttccttgcaagaaagtcacagttctctgtgtaataaacagagttggctgctccccagaattctccagtcaaggattactatctgcgagctgtttgaacttctgctccttgggaaattaagggttcagcggattcctacacaagcaggccgtctgactccgatgtctctttggaagaggaccgggaagcaattcgacaggagagagaacagcaagcagctatccagcttgagagagcaaagaaatataacaatgattggtggataggaaggctggtgaaagagggctgtgaaattggcttcattccaagtccactcagattggagaacatacggatccagcaagaacaaaaaagaggacgttttcacggagggaaatcaagtggaaattcttcttcaagtcttggagaaatggtatctgggacattccgagcaactcccacatcaacagcaaaacagaagcaaaaagtgacggagcacattcctccttacgatgttgtaccgtcaatgcgtccggtggtgttagtggggccgtcactgaaaggttacgagcggaagtacaaagtgaaattgaaagaatctttgagttggcaagatctttgcaactggttgttcttgatgcagacaccatcaatcacccagcacaacttataaagacttccttagcaccaattattgttcatgtaaaagtctcatctccaaaggttttacagcggttgattaaatctagaggaaagtcacaaagtaaacacttgaatgttcaactggtggcagctgataaacttgcacaatgccccccagaaatgtttgatgttatattggatgaaaatcagcttgaggatgcatgtgaacatctaggggagtacctggaggcgtactggcgtgccacccacacaaccagtagcacacccatgaccccgctgctgggaaggaatttgggctccacggcactctcaccatatcccacagcaatttctgggttacagagtcagcgaatgaggcacagcaaccactccacagagaactctccaattgaaagacgaagtctaatgacctctgatgaaaattatcacaatgaaagggctcggaagagtaggaaccgcttgtcttccagttctcagcatagccgagatcattaccctcttgtggaagaagattaccctgactcataccaggacacttacaaaccccataggaaccgaggatcacctgggggatatagccatgactcccgacataggctttgagtctaatgaaacaaaaaatattcatctgttgacaatttgccatagcagtgctaggataaaccaatcatcttaacttggctaacatagcacagtatttactgtgctaatgggctgctgtcattttatgctaagtaaggggcaaaaaaaaaaattacattatgcccttgagtctagatggatattagatgcccgatcatatagatatttttaagtgcaacatttacatgataacagtacattttgttttcttcatagatttagacacatcaatttgtaatttagggtacttacaaggcacatataaaataatttcccatgctggaaattccaaatgaccagttccagttggaaccaatttataaaccaattcctgttggaatttgggtgaattgactagaaagtctacttgagcatgttgtaatcaactgaaaaatctggggggaaaaaaaaaaaactaataagaaaatcgaaataccaatagaagccaaatccagctttggtatttatttgctggaagctaaatttacacttaaagttggagtgtataaacattttaatatatgttaatgttgccagaatgacttttcagacttaccaaatgtattgatagtgccaaaaaaaaaatctcagaaatcttaatgcagaaattatatagtctcctcagattttaatatttttatttctttcctggcacagctgttgtattcaaagtgttttgctttttgtttggtcagtactgttagctcatttgaagttggcaaaaacaaatacaaacaagcaaaaaacctcaaatttttttcagcagtgagagagaatagtaaagagaggcccaagcatagctggttatgtgaaatataaaatggggtgttgttctccctttaatcaatctgagcacaactacatacatccaggaatctgaagtcagatagtaaggatgtggtaccaatcctcccgagtgcaatgctaaacacttccaggtgggaattcatctatttcacttaacacaaacgcagggtctgtatttcctgccaacaagattgagtatctttccattgcttctctcagtctctgtctttgaatatctgaatgttctggcccttcaacaaattctttaaatcatgctaaggaatttcgttttatgtggacacactcaactttgatattcaggagatgtttttacaaaatgactaattgaaaaaagttgaaacaaatgattttaaaagcttgcagtaaaaaataaactcatagattcagcaaatatttgttgactaaaattatagcatttttaatgcagaaaattataaagaatttggagattgagctgccttatttctaatgaacactcctcttcatcttattaagtcttcacagtttttccagtggctataattatggaattggtgacctatgttttatattatcaaggaagccttagattcactctgatctaagaaattattgaaattgaccctttttacacaaatgtctttaaaaaaaaaaacttatttctaaatgtccatagtgcatgcattttctaaaaccccaataagtccagccataaaagttcttttctgctagtacatgtcatgaagcctatttttgaaaataatgataattaattttatagtatcttcttttctccccaagcctttcagtattcaggcactcaaagcatgcaccagttcagtaatcttcttgaccatggaaataagttccacattactgatgagttatatatatatcttgaaccccattacaacc

SEQ ID NO: 2859 - DNA, 3191 bp, Homo sapiens
  source 1..3191: mol_type = unassigned DNA
ggagcccgcagcctcccccagcggatgccggggactcggaccccgcaccctgagagtctttgttaatggatgtggtggcccgaggcaccacaacccggaggagcaggttgaaaagatccgatggcagcaccacttcgaccagcttcatcctcagacagggttcagcggattcctacacaagcaggccgtctgactccgatgtctctttggaagaggaccgggaagcaattcgacaggagagagaacagcaagcagctatccagcttgagagagcaaagtccaaacctgtagcatttgccgtgaagacaaatgtgagctactgcggcgccctggacgaggatgtgcctgttccaagcacagctatctcctttgatgctaaagactttctacatattaaagagaaatataacaatgattggtggataggaaggctggtgaaagagggctgtgaaattggcttcattccaagtccactcagattggagaacatacggatccagcaagaacaaaaaagaggacgttttcacggagggaaatcaagtggaaattcttcttcaagtcttggagaaatggtatctgggacattccgagcaactcccacatcaacagagtttacatattttgatatggctctcgttattgtcttttagcaaaacagaagcaaaaagtgacggagcacattcctccttacgatgttgtaccgtcaatgcgtccggtggtgttagtggggccgtcactgaaaggttacgaggtaacagacatgatgcagaaagccctctttgatttcctgaagcacaggtttgatgggaggatttcaataacgagagtgacagctgacatttctcttgctaagaggtctgtcctaaataatcccagcaagagagcaataattgaacgttcgaacacccggtccagcttagcggaagtacaaagtgaaattgaaagaatctttgagttggcaagatctttgcaactggttgttcttgatgcagacaccatcaatcacccagcacaacttataaagacttccttagcaccaattattgttcatgtaaaagtctcatctccaaaggttttacagcggttgattaaatctagaggaaagtcacaaagtaaacacttgaatgttcaactggtggcagctgataaacttgcacaatgccccccagaaatgtttgatgttatattggatgaaaatcagcttgaggatgcatgtgaacatctaggggagtacctggaggcgtactggcgtgccacccacacaaccagtagcacacccatgaccccgctgctgggaaggaatttgggctccacggcactctcaccatatcccacagcaatttctgggttacagagtcagcgaatgaggcacagcaaccactccacagagaactctccaattgaaagacgaagtctaatgacctctgatgaaaattatcacaatgaaagggctcggaagagtaggaaccgcttgtcttccagttctcagcatagccgagatcattaccctcttgtggaagaagattaccctgactcataccaggacacttacaaaccccataggaaccgaggatcacctgggggatatagccatgactcccgacataggctttgagtctaatgaaacaaaaaatattcatctgttgacaatttgccatagcagtgctaggataaaccaatcatcttaacttggctaacatagcacagtatttactgtgctaatgggctgctgtcattttatgctaagtaaggggcaaaaaaaaaaattacattatgcccttgagtctagatggatattagatgcccgatcatatagatatttttaagtgcaacatttacatgataacagtacattttgttttcttcatagatttagacacatcaatttgtaatttagggtacttacaaggcacatataaaataatttcccatgctggaaattccaaatgaccagttccagttggaaccaatttataaaccaattcctgttggaatttgggtgaattgactagaaagtctacttgagcatgttgtaatcaactgaaaaatctggggggaaaaaaaaaaaactaataagaaaatcgaaataccaatagaagccaaatccagctttggtatttatttgctggaagctaaatttacacttaaagttggagtgtataaacattttaatatatgttaatgttgccagaatgacttttcagacttaccaaatgtattgatagtgccaaaaaaaaaatctcagaaatcttaatgcagaaattatatagtctcctcagattttaatatttttatttctttcctggcacagctgttgtattcaaagtgttttgctttttgtttggtcagtactgttagctcatttgaagttggcaaaaacaaatacaaacaagcaaaaaacctcaaatttttttcagcagtgagagagaatagtaaagagaggcccaagcatagctggttatgtgaaatataaaatggggtgttgttctccctttaatcaatctgagcacaactacatacatccaggaatctgaagtcagatagtaaggatgtggtaccaatcctcccgagtgcaatgctaaacacttccaggtgggaattcatctatttcacttaacacaaacgcagggtctgtatttcctgccaacaagattgagtatctttccattgcttctctcagtctctgtctttgaatatctgaatgttctggcccttcaacaaattctttaaatcatgctaaggaatttcgttttatgtggacacactcaactttgatattcaggagatgtttttacaaaatgactaattgaaaaaagttgaaacaaatgattttaaaagcttgcagtaaaaaataaactcatagattcagcaaatatttgttgactaaaattatagcatttttaatgcagaaaattataaagaatttggagattgagctgccttatttctaatgaacactcctcttcatcttattaagtcttcacagtttttccagtggctataattatggaattggtgacctatgttttatattatcaaggaagccttagattcactctgatctaagaaattattgaaattgaccctttttacacaaatgtctttaaaaaaaaaaacttatttctaaatgtccatagtgcatgcattttctaaaaccccaataagtccagccataaaagttcttttctgct

SEQ ID NO: 2860 - DNA, 2369 bp, Homo sapiens
  source 1..2369: mol_type = unassigned DNA
gaggccgctttcctagctcagtcaccagtctgtggttgaggaagggttttgctttttgtgctctgtattgggaaggcagataaaatgccaggtctggactgcctctggggataacctcaccctgtgggatgtgaatgaatagcatcttgcctggtaaatccacaggaattgataaggcaggcgcagttctcccaaacaggccttttctctttaagctgtagctgtggtttctgcagcaattttgtttttgccttgaaagaggtgctctggattatcacacctccatgtatgacaatttgtacctgcatggaattgaagactcggaggctggttcagcggattcctacacaagcaggccgtctgactccgatgtctctttggaagaggaccgggaagcaattcgacaggagagagaacagcaagcagctatccagcttgagagagcaaagtccaaacctgtagcatttgccgtgaagacaaatgtgagctactgcggcgccctggacgaggatgtgcctgttccaagcacagctatctcctttgatgctaaagactttctacatattaaagagaaatataacaatgattggtggataggaaggctggtgaaagagggctgtgaaattggcttcattccaagtccactcagattggagaacatacggatccagcaagaacaaaaaagaggacgttttcacggagggaaatcaagtggaaattcttcttcaagtcttggagaaatggtatctgggacattccgagcaactcccacatcaacagcaaaacagaagcaaaaagtgacggagcacattcctccttacgatgttgtaccgtcaatgcgtccggtggtgttagtggggccgtcactgaaaggttacgaggtaacagacatgatgcagaaagccctctttgatttcctgaagcacaggtttgatgggaggatttcaataacgagagtgacagctgacatttctcttgctaagaggtctgtcctaaataatcccagcaagagagcaataattgaacgttcgaacacccggtccagcttagcggaagtacaaagtgaaattgaaagaatctttgagttggcaagatctttgcaactggttgttcttgatgcagacaccatcaatcacccagcacaacttataaagacttccttagcaccaattattgttcatgtaaaagtctcatctccaaaggttttacagcggttgattaaatctagaggaaagtcacaaagtaaacacttgaatgttcaactggtggcagctgataaacttgcacaatgccccccagaaatgtttgatgttatattggatgaaaatcagcttgaggatgcatgtgaacatctaggggagtacctggaggcgtactggcgtgccacccacacaaccagtagcacacccatgaccccgctgctgggaaggaatttgggctccacggcactctcaccatatcccacagcaatttctgggttacagagtcagcgaatgaggcacagcaaccactccacagagaactctccaattgaaagacgaagtctaatgacctctgatgaaaattatcacaatgaaagggctcggaagagtaggaaccgcttgtcttccagttctcagcatagccgagatcattaccctcttgtggaagaagattaccctgactcataccaggacacttacaaaccccataggaaccgaggatcacctgggggatatagccatgactcccgacataggctttgagtctaatgaaacaaaaaatattcatctgttgacaatttgccatagcagtgctaggataaaccaatcatcttaacttggctaacatagcacagtatttactgtgctaatgggctgctgtcattttatgctaagtaaggggcaaaaaaaaaaattacattatgcccttgagtctagatggatattagatgcccgatcatatagatatttttaagtgcaacatttacatgataacagtacattttgttttcttcatagatttagacacatcaatttgtaatttagggtacttacaaggcacatataaaataatttcccatgctggaaattccaaatgaccagttccagttggaaccaatttataaaccaattcctgttggaatttgggtgaattgactagaaagtctacttgagcatgttgtaatcaactgaaaaatctggggggaaaaaaaaaaaactaataagaaaatcgaaataccaatagaagccaaatccagctttggtatttatttgctggaagctaaatttacacttaaagttggagtgtataaacattttaatatatgttaatgttgccagaatgacttttcagacttaccaaatgtattgatagtgccaaaaaaaaaa

SEQ ID NO: 2861 - DNA, 2034 bp, Homo sapiens
  source 1..2034: mol_type = unassigned DNA
gctgcggtcctcaccggcttctctctggcccccgtgtgtcgagtccaggtggcccgaggcaccacaacccggaggagcaggttgaaaagatccgatggcagcaccacttcgaccagcttcatcctcagacagggttcagcggattcctacacaagcaggccgtctgactccgatgtctctttggaagaggaccgggaagcaattcgacaggagagagaacagcaagcagctatccagcttgagagagcaaagtccaaacctgtagcatttgccgtgaagacaaatgtgagctactgcggcgccctggacgaggatgtgcctgttccaagcacagctatctcctttgatgctaaagactttctacatattaaagagaaatataacaatgattggtggataggaaggctggtgaaagagggctgtgaaattggcttcattccaagtccactcagattggagaacatacggatccagcaagaacaaaaaagaggacgttttcacggagggaaatcaagtggaaattcttcttcaagtcttggagaaatggtatctgggacattccgagcaactcccacatcaacagcaaaacagaagcaaaaagtgacggagcacattcctccttacgatgttgtaccgtcaatgcgtccggtggtgttagtggggccgtcactgaaaggttacgaggtaacagacatgatgcagaaagccctctttgatttcctgaagcacaggtttgatgggaggatttcaataacgagagtgacagctgacatttctcttgctaagaggtctgtcctaaataatcccagcaagagagcaataattgaacgttcgaacacccggtccagcttagcggaagtacaaagtgaaattgaaagaatctttgagttggcaagatctttgcaactggttgttcttgatgcagacaccatcaatcacccagcacaacttataaagacttccttagcaccaattattgttcatgtaaaagtctcatctccaaaggttttacagcggttgattaaatctagaggaaagtcacaaagtaaacacttgaatgttcaactggtggcagctgataaacttgcacaatgccccccagaaatgtttgatgttatattggatgaaaatcagcttgaggatgcatgtgaacatctaggggagtacctggaggcgtactggcgtgccacccacacaaccagtagcacacccatgaccccgctgctgggaaggaatttgggctccacggcactctcaccatatcccacagcaatttctgggttacagagtcagcgaatgaggcacagcaaccactccacagagaactctccaattgaaagacgaagtctaatgacctctgatgaaaattatcacaatgaaagggctcggaagagtaggaaccgcttgtcttccagttctcagcatagccgagatcattaccctcttgtggaagaagattaccctgactcataccaggacacttacaaaccccataggaaccgaggatcacctgggggatatagccatgactcccgacataggctttgagtctaatgaaacaaaaaatattcatctgttgacaatttgccatagcagtgctaggataaaccaatcatcttaacttggctaacatagcacagtatttactgtgctaatgggctgctgtcattttatgctaagtaaggggcaaaaaaaaaaattacattatgcccttgagtctagatggatattagatgcccgatcatatagatatttttaagtgcaacatttacatgataacagtacattttgttttcttcatagatttagacacatcaatttgtaatttagggtacttacaaggcacatataaaataatttcccatgctggaaattccaaatgaccagttccagttggaaccaatttataaaccaattcctgttggaatttgggtgaattgactagaaagtctacttgagcatgttgtaatcaactgaaaaatctggggggaaaaaaaaaaaactaataagaaaatcgaaataccaatagaagcc

SEQ ID NO: 2862 - DNA, 2423 bp, Homo sapiens
  source 1..2423: mol_type = unassigned DNA
tgtattgggaaggcagataaaatgccaggtctggactgcctctggggataacctcaccctgtgggatgtgaatgaatagcatcttgcctggtaaatccacaggaattgataaggcaggcgcagttctcccaaacaggccttttctctttaagctgtagctgtggtttctgcagcaattttgtttttgccttgaaagaggtgctctggattatcacacctccatgtatgacaatttgtacctgcatggaattgaagactcggaggctgaagaataatgtgatgtgttacccaagatggtgtgaacagagcttcaagccaatggagaagactaggcctaaatagctgacctggtgaagtgacacataaagccacacctggagtgccacctcctcagcagtctttctcagtgccaatgcatttatggctgtttattacacaaaccgagggatgttcttatggggatccatggacgcagcagagaaagttaccaaaaacctaccacccagaaatagtcattgttaatatattgctacacaccctttcagatgatcaatccacatatatgtaaatagggttcagcggattcctacacaagcaggccgtctgactccgatgtctctttggaagaggaccgggaagcaattcgacaggagagagaacagcaagcagctatccagcttgagagagcaaagtccaaacctgtagcatttgccgtgaagacaaatgtgagctactgcggcgccctggacgaggatgtgcctgttccaagcacagctatctcctttgatgctaaagactttctacatattaaagagaaatataacaatgattggtggataggaaggctggtgaaagagggctgtgaaattggcttcattccaagtccactcagattggagaacatacggatccagcaagaacaaaaaagaggacgttttcacggagggaaatcaagtggaaattcttcttcaagtcttggagaaatggtatctgggacattccgagcaactcccacatcaacagcaaaacagaagcaaaaagtgacggagcacattcctccttacgatgttgtaccgtcaatgcgtccggtggtgttagtggggccgtcactgaaaggttacgaggtaacagacatgatgcagaaagccctctttgatttcctgaagcacaggtttgatgggaggatttcaataacgagagtgacagctgacatttctcttgctaagaggtctgtcctaaataatcccagcaagagagcaataattgaacgttcgaacacccggtccagcttagcggaagtacaaagtgaaattgaaagaatctttgagttggcaagatctttgcaactggttgttcttgatgcagacaccatcaatcacccagcacaacttataaagacttccttagcaccaattattgttcatgtaaaagtctcatctccaaaggttttacagcggttgattaaatctagaggaaagtcacaaagtaaacacttgaatgttcaactggtggcagctgataaacttgcacaatgccccccagaaatgtttgatgttatattggatgaaaatcagcttgaggatgcatgtgaacatctaggggagtacctggaggcgtactggcgtgccacccacacaaccagtagcacacccatgaccccgctgctgggaaggaatttgggctccacggcactctcaccatatcccacagcaatttctgggttacagagtcagcgaatgaggcacagcaaccactccacagagaactctccaattgaaagacgaagtctaatgacctctgatgaaaattatcacaatgaaagggctcggaagagtaggaaccgcttgtcttccagttctcagcatagccgagatcattaccctcttgtggaagaagattaccctgactcataccaggacacttacaaaccccataggaaccgaggatcacctgggggatatagccatgactcccgacataggctttgagtctaatgaaacaaaaaatattcatctgttgacaatttgccatagcagtgctaggataaaccaatcatcttaacttggctaacatagcacagtatttactgtgctaatgggctgctgtcattttatgctaagtaaggggcaaaaaaaaaaattacattatgcccttgagtctagatggatattagatgcccgatcatatagatatttttaagtgcaacatttacatgataacagtacattttgttttcttcatagatttagacacatcaatttgtaatttagggtacttacaaggcacatataaaataatttcccatgctggaaattccaaatgaccagttccagttggaaccaatttataaaccaattcctgttggaatttgggtgaattgactagaaagtctacttgagcatgttgtaatcaactgaaaaatc

SEQ ID NO: 2863 - DNA, 2159 bp, Homo sapiens
  source 1..2159: mol_type = unassigned DNA
cacaggacagctgagtttttctgtaagatgggaagtgaagagtgcagtgacttgactcggtggcagtagttgatggcgggtagtgctaggtactgcagtgctgtactcctggtgactcagtggtggccagcaggctgagatcctccgggctgtgcacatctgtggaggaagaataatgtgatgtgttacccaagatggtgtgaacagagcttcaagccaatggagaagactaggcctaaatagctgacctggtgaagtgacacataaagccacacctggagtgccacctcctcagcagtctttctcagtgccaatgcatttatggctggttcagcggattcctacacaagcaggccgtctgactccgatgtctctttggaagaggaccgggaagcaattcgacaggagagagaacagcaagcagctatccagcttgagagagcaaagtccaaacctgtagcatttgccgtgaagacaaatgtgagctactgcggcgccctggacgaggatgtgcctgttccaagcacagctatctcctttgatgctaaagactttctacatattaaagagaaatataacaatgattggtggataggaaggctggtgaaagagggctgtgaaattggcttcattccaagtccactcagattggagaacatacggatccagcaagaacaaaaaagaggacgttttcacggagggaaatcaagtggaaattcttcttcaagtcttggagaaatggtatctgggacattccgagcaactcccacatcaacagcaaaacagaagcaaaaagtgacggagcacattcctccttacgatgttgtaccgtcaatgcgtccggtggtgttagtggggccgtcactgaaaggttacgaggtaacagacatgatgcagaaagccctctttgatttcctgaagcacaggtttgatgggaggatttcaataacgagagtgacagctgacatttctcttgctaagaggtctgtcctaaataatcccagcaagagagcaataattgaacgttcgaacacccggtccagcttagcggaagtacaaagtgaaattgaaagaatctttgagttggcaagatctttgcaactggttgttcttgatgcagacaccatcaatcacccagcacaacttataaagacttccttagcaccaattattgttcatgtaaaagtctcatctccaaaggttttacagcggttgattaaatctagaggaaagtcacaaagtaaacacttgaatgttcaactggtggcagctgataaacttgcacaatgccccccagaaatgtttgatgttatattggatgaaaatcagcttgaggatgcatgtgaacatctaggggagtacctggaggcgtactggcgtgccacccacacaaccagtagcacacccatgaccccgctgctgggaaggaatttgggctccacggcactctcaccatatcccacagcaatttctgggttacagagtcagcgaatgaggcacagcaaccactccacagagaactctccaattgaaagacgaagtctaatgacctctgatgaaaattatcacaatgaaagggctcggaagagtaggaaccgcttgtcttccagttctcagcatagccgagatcattaccctcttgtggaagaagattaccctgactcataccaggacacttacaaaccccataggaaccgaggatcacctgggggatatagccatgactcccgacataggctttgagtctaatgaaacaaaaaatattcatctgttgacaatttgccatagcagtgctaggataaaccaatcatcttaacttggctaacatagcacagtatttactgtgctaatgggctgctgtcattttatgctaagtaaggggcaaaaaaaaaaattacattatgcccttgagtctagatggatattagatgcccgatcatatagatatttttaagtgcaacatttacatgataacagtacattttgttttcttcatagatttagacacatcaatttgtaatttagggtacttacaaggcacatataaaataatttcccatgctggaaattccaaatgaccagttccagttggaaccaatttataaaccaattcctgttggaatttgggtgaattgactagaaagtctacttgagcatgt

SEQ ID NO: 2864 - DNA, 3549 bp, Homo sapiens
  source 1..3549: mol_type = unassigned DNA
gtattgggaaggcagataaaatgccaggtctggactgcctctggggataacctcaccctgtgggatgtgaatgaatagcatcttgcctggtaaatccacaggaattgataaggcaggcgcagttctcccaaacaggccttttctctttaagctgtagctgtggtttctgcagcaattttgtttttgccttgaaagaggtgctctggattatcacacctccatgtatgacaatttgtacctgcatggaattgaagactcggaggctgaagaataatgtgatgtgttacccaagatggtgtgaacagagcttcaagccaatggagaagactaggcctaaatagctgacctggtgaagtgacacataaagccacacctggagtgccacctcctcagcagtctttctcagtgccaatgcatttatggctggttcagcggattcctacacaagcaggccgtctgactccgatgtctctttggaagaggaccgggaagcaattcgacaggagagagaacagcaagcagctatccagcttgagagagcaaagtccaaacctgtagcatttgccgtgaagacaaatgtgagctactgcggcgccctggacgaggatgtgcctgttccaagcacagctatctcctttgatgctaaagactttctacatattaaagagaaatataacaatgattggtggataggaaggctggtgaaagagggctgtgaaattggcttcattccaagtccactcagattggagaacatacggatccagcaagaacaaaaaagaggacgttttcacggagggaaatcaagtggaaattcttcttcaagtcttggagaaatggtatctgggacattccgagcaactcccacatcaacagcaaaacagaagcaaaaagtgacggagcacattcctccttacgatgttgtaccgtcaatgcgtccggtggtgttagtggggccgtcactgaaaggttacgaggtacaaatatcatctgttactcttcagttcttgatcgagcacccaggagacagtcatgttgacgcttgctcctcaagggtctgtttccacgtgggtcctgatggaagccagtgctcagcatgggaaggcagggggtaccgtgtggggctcatgaggccctctgccctttctttcctctcttgcacacttctcatcttttatgtattacattgtttagaaatacctccctcaaaatattcacaatgggaagatctggtcaaagatttgctgtacattaaatgcaaagaaaaggactttatctgtcttgaccattctcattattattagaagtaatagagaatgaacagcacaagaggacaaacaatcaatcttccagcaaacccaaacctttaaagcccaaacagagttcaccctgctgggtttttaagatgatggcatatgccaccaaatccttctctgcttatttattttaaagggcacatgttttaaaagaccactaaaaacattagtgaactttggagattaaacaaaaccatgtgacaaggaaaagagtagagacttcgtttcagatgtttgttttgactttgtgctagcttggattaaaaaataggtagaacgtgacattaaactctgaaggtgagcagcctccagggcaccattcccatcgagctaggacaatgtgtggcacatagtaggcactcagtacacatttgctgaatgaattaatgaatcgctttcaggcagatctaagaatcctggctctatccccctctctttctctcttgtctttctcagagttggaaatgtcagagggatgagcaggagagtggtctacaaaaatccagccatgggcatggagaatttccgccaacatacacaaactagcaggaaggctgagtccagtgctggcctcagttctctagctgctcctcactggaggcaggcacaactcaggcgtgccaaggatacccggcacctgtgtacaaagccagcctgttgtctcctggcagcagttctatcccctaacgagggaagagggaagagggaagagggtctggtgaacactgctggtttattcctcaacaccctggaggagaaccaaggggggtggaaattagcaattgcacatggttaagcatgaaaaacaccttccatggtaacctccccctaggagacgaatggctacaataaggtcttggctcatagtacccttccctccctcctctctcccttttgacttctctctctctctctgcatgtgtttgcctcattctttttttctcacctctgcaaaggtaacagacatgatgcagaaagccctctttgatttcctgaagcacaggtttgatgggaggatttcaataacgagagtgacagctgacatttctcttgctaagaggtctgtcctaaataatcccagcaagagagcaataattgaacgttcgaacacccggtccagcttagcggaagtacaaagtgaaattgaaagaatctttgagttggcaagatctttgcaactggttgttcttgatgcagacaccatcaatcacccagcacaacttataaagacttccttagcaccaattattgttcatgtaaaagtctcatctccaaaggttttacagcggttgattaaatctagaggaaagtcacaaagtaaacacttgaatgttcaactggtggcagctgataaacttgcacaatgccccccagaaatgtttgatgttatattggatgaaaatcagcttgaggatgcatgtgaacatctaggggagtacctggaggcgtactggcgtgccacccacacaaccagtagcacacccatgaccccgctgctgggaaggaatttgggctccacggcactctcaccatatcccacagcaatttctgggttacagagtcagcgaatgaggcacagcaaccactccacagagaactctccaattgaaagacgaagtctaatgacctctgatgaaaattatcacaatgaaagggctcggaagagtaggaaccgcttgtcttccagttctcagcatagccgagatcattaccctcttgtggaagaagattaccctgactcataccaggacacttacaaaccccataggaaccgaggatcacctgggggatatagccatgactcccgacataggctttgagtctaatgaaacaaaaaatattcatctgttgacaatttgccatagcagtgctaggataaaccaatcatcttaacttggctaacatagcacagtatttactgtgctaatgggctgctgtcattttatgctaagtaaggggcaaaaaaaaaaattacattatgcccttgagtctagatggatattagatgcccgatcatatagatatttttaagtgcaacatttacatgataacagtacattttgttttcttcatagatttagacacatcaatttgtaatttagggtacttacaaggcacatataaaataatttcccatgctggaaattccaaatgaccagttccagttggaaccaatttataaaccaattcctgttggaatttgggtgaattgactagaaagtctacttgagca

SEQ ID NO: 2865 - DNA, 2015 bp, Homo sapiens
  source 1..2015: mol_type = unassigned DNA
agtcaccagtctgtggttgaggaagggttttgctttttgtgctctgtattgggaaggcagataaaatgccaggtctggactgcctctggggataacctcaccctgtgggatgtgaatgaatagcatcttgcctggtaaatccacaggaattgataaggcaggcgcagttctcccaaacaggccttttctctttaagctgtagctgtggtttctgcagcaattttgtttttgccttgaaagaggtgctctggattatcacacctccatgtatgacaatttgtacctgcatggaattgaagactcggaggctggttcagcggattcctacacaagcaggccgtctgactccgatgtctctttggaagaggaccgggaagcaattcgacaggagagagaacagcaagcagctatccagcttgagagagcaaagaaatataacaatgattggtggataggaaggctggtgaaagagggctgtgaaattggcttcattccaagtccactcagattggagaacatacggatccagcaagaacaaaaaagaggacgttttcacggagggaaatcaagtggaaattcttcttcaagtcttggagaaatggtatctgggacattccgagcaactcccacatcaacagcaaaacagaagcaaaaagtgacggagcacattcctccttacgatgttgtaccgtcaatgcgtccggtggtgttagtggggccgtcactgaaaggttacgaggtaacagacatgatgcagaaagccctctttgatttcctgaagcacaggtttgatgggaggatttcaataacgagagtgacagctgacatttctcttgctaagaggtctgtcctaaataatcccagcaagagagcaataattgaacgttcgaacacccggtccagcttagcggaagtacaaagtgaaattgaaagaatctttgagttggcaagatctttgcaactggttgttcttgatgcagacaccatcaatcacccagcacaacttataaagacttccttagcaccaattattgttcatgtaaaagtctcatctccaaaggttttacagcggttgattaaatctagaggaaagtcacaaagtaaacacttgaatgttcaactggtggcagctgataaacttgcacaatgccccccagaaatgtttgatgttatattggatgaaaatcagcttgaggatgcatgtgaacatctaggggagtacctggaggcgtactggcgtgccacccacacaaccagtagcacacccatgaccccgctgctgggaaggaatttgggctccacggcactctcaccatatcccacagcaatttctgggttacagagtcagcgaatgaggcacagcaaccactccacagagaactctccaattgaaagacgaagtctaatgacctctgatgaaaattatcacaatgaaagggctcggaagagtaggaaccgcttgtcttccagttctcagcatagccgagatcattaccctcttgtggaagaagattaccctgactcataccaggacacttacaaaccccataggaaccgaggatcacctgggggatatagccatgactcccgacataggctttgagtctaatgaaacaaaaaatattcatctgttgacaatttgccatagcagtgctaggataaaccaatcatcttaacttggctaacatagcacagtatttactgtgctaatgggctgctgtcattttatgctaagtaaggggcaaaaaaaaaaattacattatgcccttgagtctagatggatattagatgcccgatcatatagatatttttaagtgcaacatttacatgataacagtacattttgttttcttcatagatttagacacatcaatttgtaatttagggtacttacaaggcacatataaaataatttcccatgctggaaattccaaatgaccagttccagttggaaccaatttataaaccaattcctgttggaatttgggtgaattgactagaaagtctacttgagc

SEQ ID NO: 2866 - DNA, 2112 bp, Homo sapiens
  source 1..2112: mol_type = unassigned DNA; mol_type = unassigned DNA
gtattgggaaggcagataaaatgccaggtctggactgcctctggggataacctcaccctgtgggatgtgaatgaatagcatcttgcctggtaaatccacaggaattgataaggcaggcgcagttctcccaaacaggccttttctctttaagctgtagctgtggtttctgcagcaattttgtttttgccttgaaagaggtgctctggattatcacacctccatgtatgacaatttgtacctgcatggaattgaagactcggaggctgaagaataatgtgatgtgttacccaagatggtgtgaacagagcttcaagccaatggagaagactaggcctaaatagctgacctggtgaagtgacacataaagccacacctggagtgccacctcctcagcagtctttctcagtgccaatgcatttatggctggttcagcggattcctacacaagcaggccgtctgactccgatgtctctttggaagaggaccgggaagcaattcgacaggagagagaacagcaagcagctatccagcttgagagagcaaagtccaaacctgtagcatttgccgtgaagacaaatgtgagctactgcggcgccctggacgaggatgtgcctgttccaagcacagctatctcctttgatgctaaagactttctacatattaaagagaaatataacaatgattggtggataggaaggctggtgaaagagggctgtgaaattggcttcattccaagtccactcagattggagaacatacggatccagcaagaacaaaaaagaggacgttttcacggagggaaatcaagtggaaattcttcttcaagtcttggagaaatggtatctgggacattccgagcaactcccacatcaacagcaaaacagaagcaaaaagtgacggagcacattcctccttacgatgttgtaccgtcaatgcgtccggtggtgttagtggggccgtcactgaaaggttacgaggtaacagacatgatgcagaaagccctctttgatttcctgaagcacaggtttgatgggaggatttcaataacgagagtgacagctgacatttctcttgctaagaggtctgtcctaaataatcccagcaagagagcaataattgaacgttcgaacacccggtccagcttagcggaagtacaaagtgaaattgaaagaatctttgagttggcaagatctttgcaactggttgttcttgatgcagacaccatcaatcacccagcacaacttataaagacttccttagcaccaattattgttcatgtaaaagtctcatctccaaaggaaatgtttgatgttatattggatgaaaatcagcttgaggatgcatgtgaacatctaggggagtacctggaggcgtactggcgtgccacccacacaaccagtagcacacccatgaccccgctgctgggaaggaatttgggctccacggcactctcaccatatcccacagcaatttctgggttacagagtcagcgaatgaggcacagcaaccactccacagagaactctccaattgaaagacgaagtctaatgacctctgatgaaaattatcacaatgaaagggctcggaagagtaggaaccgcttgtcttccagttctcagcatagccgagatcattaccctcttgtggaagaagattaccctgactcataccaggacacttacaaaccccataggaaccgaggatcacctgggggatatagccatgactcccgacataggctttgagtctaatgaaacaaaaaatattcatctgttgacaatttgccatagcagtgctaggataaaccaatcatcttaacttggctaacatagcacagtatttactgtgctaatgggctgctgtcattttatgctaagtaaggggcaaaaaaaaaaattacattatgcccttgagtctagatggatattagatgcccgatcatatagatatttttaagtgcaacatttacatgataacagtacattttgttttcttcatagatttagacacatcaatttgtaatttagggtacttacaaggcacatataaaataatttcccatgctggaaattccaaatgaccagttccagttggaaccaatttataaaccaa
